United States Patent Application Publication US 2010/0120627 A1 - sequence listing, part 4

SEQ ID NO: 5276 - protein, 104 aa, Homo sapiens
MGTDLSPKPKSFNYPLLSSPGDQFEIQLTQQLWSLIPNEDVRRFMSHVIWTLKMECSETHVQGTCAKLMSRTGLLMKLLSEQQEAKASKAEWSVDQWKTDETPS

SEQ ID NO: 5277 - DNA, 315 bp, Homo sapiens
atgggcactgacctgtcccccaagcccaaaagcttcaattacccattgctctcgtccccaggtgatcagtttgaaattcagctaacccagcagctatggtccctcatccccaatgaggatgtgagaaggttcatgtctcatgttatctggaccttgaaaatggaatgttcagaaacacatgtgcaagggacctgtgccaagctcatgtcacgaacaggcctcctgatgaagcttctccgcgagcagcaggaagcaaaggcatccaaggcagaatggtctgtagaccaatggaaaactgatgagactccatcttaa

SEQ ID NO: 5278 - protein, 104 aa, Homo sapiens
MGTDLSPKPKSFNYPLLSSPGDQFEIQLTQQLWSLIPNEDVRRFMSHVIWTLKMECSETHVQGTCAKLMSRTGLLMKLLREQQEAKASKAEWSVDQWKTDETPS

SEQ ID NO: 5279 - DNA, 709 bp, Homo sapiens
ccaccatgcccagcctcatcattcttattaactggtttaatcctttcaataatcctattaagtagaattattaggtaattagaattaggttaaaaagagctgaggtgtgggtgttcgtttctcaggtgaaacatggctaaaagcttacggagtaagtggaaaagaaagatgcgtgctgaaaagagaaaaaagaatgccccaaaggaggccagcaggcttaaaagtattctcaaactagacggtgatgttttaatgaaagatgttcaagagatagcaactgtggtggtacccaaacattgccaagagaaaatgcaatgtgaggtaaaagatgaaaaagatgacatgaaaagggagactgatactaagagaaacaaaaagactcttctagaccagcatggacagtacccaatatggatgaaccaaaggcaaagaaaaaggctgacggcaaagcgagagaaaagaaaggggaaaagcaaagcaaaagcagtgaaagtggcaaagggtttggcgtggtagactcttaaaaccttggaaaatgccacatgggatagatgatggattagaatgtatatacatgtatactttgatttcagctgccaccaaatgaaaaccatttgttttcctattttaacttggccttttttcttcaattcaaacccagcataactcctgaagtttgttttgggaacttgaataaaatattttcttt

SEQ ID NO: 5280 - protein, 127 aa, Homo sapiens
MAKSLRSKWKRKMRAEKRKKNAPKEASRLKSILKLDGDVLMKDVQEIATVVVPKHCQEKMQCEVKDEKDDMKRETDTKRNKKTLLDQHGQYPIWMNQRQRKRLTAKREKRKGKSKAKAVKVAKGLAW

SEQ ID NO: 5281 - DNA, 709 bp, Homo sapiens
ccaccatgcccagcctcatcattcttattaactggtttaatcctttcaataatcctattaagtagaattattaggtaattagaattaggttaaaaagagctgaggtgtgggtgttcgtttctcaggtaaaacatggctaaaagcttacggagtaagtggaaaagaaagatgcgtgctgaaaagagaaaaaagaatgccccaaaggaggccagcaggcttaaaagtattctcaaactagacggtgatgttttaatgaaagatgttcaagagatagcaactgtggtggtacccaaacattgccaagagaaaatgcaatgtgaggtaaaagatgaaaaagatgacatgaaaatggagactgatactaagagaaacaaaaagactcttctagaccagcatggacagtacccaatatggatgaaccaaaggcaaagaaaaaggctgacggcaaagcgagagaaaagaaaggggaaaagcaaagcaaaagcagtgaaagtggcaaagggtttggcgtggtagactcttaaaaccttggaaaatgccacatgggatagatgatggattagaatgtatatacatgtatactttgatttcagctgccaccaaatgaaaaccatttgttttcctattttaacttggccttttttcttcaattcaaacccagcataactcctgaagtttgttttgggaacttgaataaaatattttcttt

SEQ ID NO: 5282 - protein, 127 aa, Homo sapiens
MAKSLRSKWKRKMRAEKRKKNAPKEASRLKSILKLDGDVLMKDVQEIATVVVPKHCQEKMQCEVKDEKDDMKMETDTKRNKKTLLDQHGQYPIWMNQRQRKRLTAKREKRKGKSKAKAVKVAKGLAW

SEQ ID NO: 5283 - DNA, 699 bp, Homo sapiens
atgggagagaaccaagaacagttaagatgtaaaattgatgcagagacccaaacacctgagtgggagaaccaggataagaatggaagtgaggatgctgtggagacccagacatttgagaagaaggacaagaaagaggctggagaggaggatggggaagagatccaggctcaaggattggggaagcaaggccagactggagatgagaatggtgaggagacccagacaccacagtgggagaaacaagatcagatgaaaggtgatgcggatgtggaaattcagatggaagaggggagaaacaaggatcaggttggaggtcaggatgctgcacaaacccaatcatgtgggagggagaacgtgggagaagtaaaaaaagagaatagtgtagagacccaggccttggattggggaaaacaggaatgtgttggaaatgggaatgttacagagatccagacaccaaggtgggagaagcatgatcaaggtggaagtaagaaagctaagaagacccaagcatctgggggagagaaccagaaacaattaagtcatgaaattcaagtggggtggggaaataagggcctgagaagagatgaagatgctaaggaaacccagatagctaccaagaagaagctcagggagataagagaaggattgggtggtgatccaggcactatggtggggaaaccggagacaagtagcaagtga

SEQ ID NO: 5284 - protein, 232 aa, Homo sapiens [sequence omitted]

SEQ ID NO: 5285 - DNA, 390 bp, Homo sapiens
atgcacctgtgtttctgcctaagctctctaagcgtgacagcaggagcgcccgggtctccatcccggagagatgtgtccacactccgccgccactgctctcttcatcagcaacttgcttctgcagtcgctgcccaaagtttcgcggagcacccggcgacctggccgtcggtcaatcctgagaagcccagggattcggggcgcggagactgggggctgggccccgggaatcccaaagacgtccccgcggccaggaagggagtgacaggtgcgacgcgcggtcgcgggcggcgggagagcggaccacggaaaccgcgtgtgggcgcgcgagggaggcggcggccacgcgctctccttaggccgctccctgagacgcccccgcgacgtccctag

SEQ ID NO: 5286 - protein, 129 aa, Homo sapiens
MHLCFCLSSLSVTAGAPGSPSRRDVSTLRRHCSLHQQLASAVAAQSFAEHPATWPSVNPEKPRDSGRGDWGLGPGNPKDVPAARKGVTGATRGRGRRESGPRKPRVGARGRRRPRALLRPLPETPPRRP

SEQ ID NO: 5287 - DNA, 1571 bp, Homo sapiens
tgagtagctggaactacaggcaagtgccaccatggggatctggccatgttgcccaggtgggtcgtaaactcctggcctcaagcagccctcctgcttcagcctcctgagtagctgggactaccgctgcacaccagcaggccctgccaattgactgcttttacagtgagtgcacccagggcggccgcagatggcagtgtctctggggacagcagctgcgaatgagtccacgggccaatgctgagctgctcaggctgaggcggtgtgctcagcacagagcccccggaactggcatctgcagggcgtgagccaaggccgccgcgatgccgcacttcctggactggttcgtgccggtctacttggtcatctcggtcctcattctggtgggcttcggcgcctgcatctactacttcgagccgggcctgcaggaggcgcacaagtggcgcatgcagcgccccctggtggaccgcgacctccgcaagacgctaatggtgcgcgacaacctggccttcggcggcccggaggtctgagccgacttgcaaaggggataggcgggcggcaccgggcgccctcccccagcccgccccgcccgcccagcccggagacccccaaggcagagggaggccggcctgttggccctccacgctatccctctgcagcctgggccctcccgacagaggccccaggtgcgctggcagtggaggtggggcacttaggtgcctggctggcccagggcttgctctccgtgtcaagccgactcacccagagcccaccctcccaagctcaggggcatcctccgctgggccccagtgcctttgcgctgcgcagcactctgccctccactggactcaggcatgtctatggctgcctgtcctgaggctccggagccctcatttcttcgtgaagtccccagctcccctgcctccactcaatggcaccggccctgcaactttaggcaggtcgaagccaacccaaggaaagaacctaagaacctcgtttggagggatgtcagcttgggccagaccagccgcaccccgcggggctcaggcttggaactggtgagggtgtgtggtgggggtatgcagagggataagaccgtggtagaggagagggttggtgaggagagagagagagagagagagagagtctggggggagcgggcaagcatggggagatgagatgtgtatatgtgagagagagtgtgggggccccaggcagggcaggaggtggtggaaacggggtgaactccgtgggctgtgtgaggactgtccatagtgggtcccaaccccctccctctgctggagtttcctagcccttccccctccccaagactgtggcagcaggcaggagcccctgccctccctccctgtcctgtgccacacttctggggccaaacccagcccccttgagccaggccctgccagactccaagcccaccctagaaccctcctcctgtgtggagactctgttgccccactttggacacagattggcaacctgcctcaccccgccccccttcgctggggcttccatcttaatttattctcaataataaagacttcatgatgatctct

SEQ ID NO: 5288 - protein, 68 aa, Homo sapiens
MPHFLDWFVPVYLVISVLILVGFGACIYYFEPGLQEAHKWRMQRPLVDRDLRKTLMVRDNLAFGGPEV

SEQ ID NO: 5289 - DNA, 1494 bp, Homo sapiens
ggactgccccctcctggcccactcagagcccctgggtgtgagaagctcgtctcccgtgggttgcattggctctgccctatctctgcctccagcacccagggcggccgcagatggcagtgtctctggggacagcagctgcgaatgagtccacgggccaatgctgagctgctcaggctgaggcggtgtgctcagcacagagcccccggaactggcatctgcagggcgtgagccaaggccgccgcgatgccgcacttcctggactggttcgtgccggtctacttggtcatctcggtcctcattctggtgggcttcggcgcctgcatctactacttcgagccgggcctgcaggaggcgcacaagtggcgcatgcagcgccccctggtggaccgcgacctccgcaagacgctaatggtgcgcgacaacctggccttcggcggcccggaggtctgagccgacttgcaaaggggataggcgggcggcaccgggcgccctcccccagcccgccccgcccgcccagcccggagacccccaaggcagagggaggccggcctgttggccctccacgctatccctctgcagcctgggccctcccgacagaggccccaggtgcgctggcagtggaggtggggcacttaggtgcctggctggcccagggcttgctctccgtgtcaagccgactcacccagagcccaccctcccaagctcaggggcatcctccgctgggccccagtgcctttgcgctgcgcagcactctgccctccactggactcaggcatgtctatggctgcctgtcctgaggctccggagccctcatttcttcgtgaagtccccagctcccctgcctccactcaatggcaccggccctgcaactttaggcaggtcgaagccaacccaaggaaagaacctaagaacctcgtttggagggatgtcagcttgggccagaccagccgcaccccgcggggctcaggcttggaactggtgagggtgtgtggtgggggtatgcagagggataagaccgtggtagaggagagggttggtgaggagagagagagagagagagagagagtctggggggagcgggcaagcatggggagatgagatgtgtatatgtgagagagagtgtgggggccccaggcagggcaggaggtggtggaaacggggtgaactccgtgggctgtgtgaggactgtccatagtgggtcccaaccccctccctctgctggagtttcctagcccttccccctccccaagactgtggcagcaggcaggagcccctgccctccctccctgtcctgtgccacacttctggggccaaacccagcccccttgagccaggccctgccagactccaagcccaccctagaaccctcctcctgtgtggagactctgttgccccactttggacacagattggcaacctgcctcaccccgccccccttcgctggggcttccatcttaatttattctcaataataaagacttcatgatgatctct

SEQ ID NO: 5290 - protein, 68 aa, Homo sapiens; identical to SEQ ID NO: 5288

SEQ ID NO: 5291 - DNA, 974 bp, Homo sapiens
ggagacccccaaggcagagggaggccggcctgttggccctccacgctatccctctgcagcctgggccctcccgacagaggccccaggtgcgctggcagtggaggtggggcacttaggtgcctggctggcccagggcttgctctccgtgtcaagccgactcacccagagcccaccctcccaagctcaggggcatcctccgctgggccccagtgcctttgcgctgcgcagcactctgccctccactggactcaggcatgtctatggctgcctgtcctgaggctccggagccctcatttcttcgtgaagtccccagctcccctgcctccactcaatggcaccggccctgcaactttaggcaggtcgaagccaacccaaggaaagaacctaagaacctcgtttggagggatgtcagcttgggccagaccagccgcaccccgcggggctcaggcttggaactggtgagggtgtgtggtgggggtatgcagagggataagaccgtggtagaggagagggttggtgaggagagagagagagagagagagagagtctggggggagcgggcaagcatggggagatgagatgtgtatatgtgagagagagtgtgggggccccaggcagggcaggaggtggtggaaacggggtgaactccgtgggctgtgtgaggactgtccatagtgggtcccaaccccctccctctgctggagtttcctagcccttccccctccccaagactgtggcagcaggcaggagcccctgccctccctccctgtcctgtgccacacttctggggccaaacccagcccccttgagccaggccctgccagactccaagcccaccctagaaccctcctcctgtgtggagactctgttgccccactttggacacagattggcaacctgcctcaccccgccccccttcgctggggcttccatcttaatttattctcaataataaagacttcatgatgatctct

SEQ ID NO: 5292 - protein, 107 aa, Homo sapiens
MSMAACPEAPEPSFLREVPSSPASTQWHRPCNFRQVEANPRKEPKNLVWRDVSLGQTSRTPRGSGLELVRVCGGGMQRDKTVVEERVGEERERERERVWGERASMGR

SEQ ID NO: 5293 - DNA, 1344 bp, Homo sapiens
atggaccacaactttgctcctgctcctccagagatgcagtcgcatggagctccaggcccgggaacctccttctcccatagccatgtgctggggcgccctatccgcccctcgagactccctggaggagggtcccccctcacccccgtcctcaggaagaccatccatctggataccttcccccaaagccatatcccacagacctccagccggctgggccttggagccaggacccggagtgtgcccccacaggagacgggcatcgctctgggggcttccttgagccccctgcccaccagcagccttgtacccaggaagctcagctccatctccttgactctccatcagaacagccaggcacggtccctggatcgcccactttctcactgggaagagttgcctaccccaggaaagaaggctgctccccatgaaggagggagggtgtcctcgccaggctcgccacctgtgaccctagtgccagggggcagggtccactctgagggcccagggaacccaggtctgaccaaatccaacaggatgcttgccacggagaagcccctggtgagttcctacctagccttacctttccaatcccggttagcccagagtgcaccagtccttgcagagccaggctcgttgggccaggggcaccttgtctcagtgactgaccacatgcctaccagagcttctccaggaaaaggcaagccccgggccagggggatccccagaccccgggggcgtctccaaagggccaacacgactgtgaatttgactgctatggacacaaggacagacgcagccagacatttagccacaatggccaccaacagacctagcttggctatcaatttagccacaccaaacacatcccaactggacacaggcacagagttccctgccctggatatcaagctgggcacagccagagacttgtcttcggtagggacagtcaagtcaggcaaaaccgtgaacttggctacagcaggcacaatcaagccgggcacagccatgaatctgactacagttgggacaaccaagccagggatggtcatggatttgatagcctcagaaccagacaagctgggcaaagccatggctacaagaagcacagccaaaccagatatgaccacagagggtatagccatggattcagcaacatcagacccagtcaagccggacacaatcacagctacagtgggcaccaaatacctctccctttccattcttcccttccactcccatttgcctttccatctggccctcatctcctccaagaagtcttccaagccccctctccccaggacccagaaccttcgaggggagggatggttgtcctcacccctgtga

SEQ ID NO: 5294 - protein, 447 aa, Homo sapiens
MDHNFAPAPPEMQSHGAPGPGTSFSHSHVLGRPIRPSRLPGGGSPLTPVLRKTIHLDTFPQSHIPQTSSRLGLGARTRSVPPQETGIALGASLSPLPTSSLVPRKLSSISLTLHQNSQARSLDRPLSHWEELPTPGKKAAPHEGGRVSSPGSPPVTLVPGGRVHSEGPGNPGLTKSNRMLATEKPLVSSYLALPFQSRLAQSAPVLAEPGSLGQGHLVSVTDHMPTRASPGKGKPRARGIPRPRGRLQRANTTVNLTAMDTRTDAARHLATMATNRPSLAINLATPNTSQLDTGTEFPALDIKLGTARDLSSVGTVKSGKTVNLATAGTIKPGTAMNLTTVGTTKPGMVMDLIASEPDKLGKAMATRSTAKPDMTTEGIAMDSATSDPVKPDTITATVGTKYLSLSILPFHSHLPFHLALISSKKSSKPPLPRTQNLRGEGWLSSPL

SEQ ID NO: 5295 - DNA, 636 bp, Homo sapiens
atgtggcgctctaggtgggatgccagcgtcctgaaggcggaggccctggccctcctcccctgcggcctgggcatggcattctcccagtcccacgtgatggccgctcggcggcaccagcacagccggctcatcatcgaggtggacgagtacagctccaaccccacccaggccttcaccttctacaacatcaaccagggccgcttccagccaccgcatgtgcagatggtggacccggtgcctcacgatgcccccaaacctccaggctacacccgcttcgtctgcgtctctgatacccactcgaggacggaccccatccagatgccgtacggcgacgtgctgatccacgctggggacttcactgagctggggctcccgagcgaggtgaagaagttcaacgagtggctgggcagcctgccctacgagtacaagatcgtgatcgcaggcaaccacgagctgacctttgaccaggagttcatggccgacctcatcaagcaggacttttactacttcccatctgtgtcgaagctgaagccggagaactatgagaatgtgcagtcgctgctgaccaactgcatctaccttcaggactcggaggtcaccgtgcggggcttccggatctatggctccccatggtga

SEQ ID NO: 5296 - protein, 211 aa, Homo sapiens
MWRSRWDASVLKAEALALLPCGLGMAFSQSHVMAARRHQHSRLIIEVDEYSSNPTQAFTFYNINQGRFQPPHVQMVDPVPHDAPKPPGYTRFVCVSDTHSRTDPIQMPYGDVLIHAGDFTELGLPSEVKKFNEWLGSLPYEYKIVIAGNHELTFDQEFMADLIKQDFYYFPSVSKLKPENYENVQSLLTNCIYLQDSEVTVRGFRIYGSPW

SEQ ID NO: 5297 - DNA, 1004 bp, Homo sapiens
atgtggatgctgggagaagtatgtgagatggaaaagttgtttcatggcatccaagaagtgaatgatcctcaaggtgtagcagaggaatctgtaggagagagggatgattgacgtcttcgtatagccctccatccatcccagttagcatggagggattttagggctaccattggctgggtagtggagtgttgaccaatcacagctcaggggcgtgattgtctcgtcctgggatcgcgagaggtgtatatacagggaggccaggcagcctggagttagtcgaccgttgcgagacgttgagctgcggaagatgagtccaaagccgagagcctcgggacctccggccaaggccacggaggcaggaaagaggaagtcctcctctcagccgagccccagtgacccgaagaagaagactaccaaggtggccaagaagggaaaagcagttcgtagagggagacgcgggaagaaaggggctgcgacaaagatggcggccgtgacggcacctgaggcggagagcgggccagcggcacccggccccagcgaccagcccagccaggagctccctcagcacgagctgccgccggaggagccagtgagcgaggggacccagcacgaccccctgagtcaggagagcgagctggaggaaccactgagtcaggagagcgaggtggaagaaccactgagtcaggagagccaggtggaggaaccactgagtcaggagagcgaggtggaagaaccactgagtcaggagagccaggtggaggaaccactgagtcaggagagcgaggtggaggaaccactgagtcaggagagccaggtggaggaaccactgagtcaggagagcgagatggaagaactaccgagtgtgtagacggccagctactcccctatctccgagagcagcgactaagttcaggcccagccgccagacctcagagatctcaccagcggggtgcttgccattctgaagataataaaatgaatgtgttgcaaattgaaaaaaaaaa

SEQ ID NO: 5298 - protein, 186 aa, Homo sapiens
MSPKPRASGPPAKATEAGKRKSSSQPSPSDPKKKTTKVAKKGKAVRRGRRGKKGAATKMAAVTAPEAESGPAAPGPSDQPSQELPQHELPPEEPVSEGTQHDPLSQESELEEPLSQESEVEEPLSQESQVEEPLSQESEVEEPLSQESQVEEPLSQESEVEEPLSQESQVEEPLSQESEMEELPSV

SEQ ID NO: 5299 - DNA, 339 bp, Homo sapiens
atgcagccagattgctcctttaagtgggtccctgatctcattcctcctgaactgggaccagtcattccagatagtggttattcatcatcccacgcagaggccacctatgaagaaggcttggaagtatttgacccctattatttcatcaaacatgtcccaccactgacagaagaacaactaaataggaaatctgttcttccgttgaaaacaagaagcacaccgaaattctccctagatttacacttggatgaaacagtagtgcactgtagtctaaatgaggtagaagaggcagcacttacttttccagtccttttccaagatgtcatttatcaggtttag

SEQ ID NO: 5300 - protein, 112 aa, Homo sapiens
MQPDCSFKWVPDLIPPELGPVIPDSGYSSSHAEATYEEGLEVFDPYYFIKHVPPLTEEQLNRKSVLPLKTRSTPKFSLDLHLDETVVHCSLNEVEEAALTFPVLFQDVIYQV

SEQ ID NO: 5301 - DNA, 763 bp, Homo sapiens
gagcgcgtgcaccctagtctcttcctcttacttttattttattatttttttgagatagtgtctcattctgtcgcccaggctggagtgccgtggtgtgatcacagctcactgcagtctcaaccttcctggctcaagcgatcctcccacctcagcctcccgagtagctgagactacaggcacttgccaccacacccggctaattaaattttttgttttgttttcttttagggctggggtgtcactatgttgcccaggctgctctagaactcctgggctcaagtgatcctcctgcctctgccttccaaagtgttgggattacaggcatgaaccaccatggctagtttaaatggtttttcagggtcacatatctcggaagatatgtgggatgtaaacccagcagcctggccccagagcccatggtcttcatggcagcagcatgtgtgccgcctctcatgtgtacaagtgaatgaagaatgaaagagagttgcactctcaccaatgaccagctgccttctgggtgaagtgaaacaataccgagaaacaaggaggcctggtcctaccaggccacaaagctgcttgactgtctgcctaggggaaaaggaattcggccacatggagaagaggacaaagatactcagagagaaaaagtaaaagaccgaagaaggaggctggagagaccaggatccttccagctgaacaaagtcagccacaaagcagactagccagccggctacaattggagtcagagtcccaaagacatggg

SEQ ID NO: 5302 - protein, 50 aa, Homo sapiens
MTSCLLGEVKQYRETRRPGPTRPQSCLTVCLGEKEFGHMEKRTKILREKK

SEQ ID NO: 5303 - DNA, 763 bp, Homo sapiens; identical to SEQ ID NO: 5301

SEQ ID NO: 5304 - protein, 50 aa, Homo sapiens; identical to SEQ ID NO: 5302

SEQ ID NO: 5305 - DNA, 585 bp, Homo sapiens
atggacccatcacagaagtttaatccaacctacatcccagagtctccacaaatgctcaccgaagaaaattcccgggacgattcaggggcctctcaaatctgctccgagacgttgataaagaaccttagtaacttgactatcaacactagtagcgaatctgtttcccctctatcggaagctttactccgtcgagagtctgtaggagcagaagtcctcagggaaatcgaagatgagtggctttacagcaggagaggaccattggggcctaaggacaacctaacagtaggttggaagtggggctcggtgttgtctgctctaatccttggccacgtcgtggagtacgagtgctcatggactctggatcccctgaagcccactcacaaggagcagatgatttttctctcctaccaccactgtaccacagatcctaaaagttgtctcagatgtcatgctcagtctttacaaccactcgtctacatataccctccactatcctgcccctctcgcactttgtgttgcttggcaaaagcacgacccctggctaaatccagctacatccccatgagcctgcacccatacagctaa

SEQ ID NO: 5306 - protein, 194 aa, Homo sapiens
MDPSQKFNPTYIPESPQMLTEENSRDDSGASQICSETLIKNLSNLTINTSSESVSPLSEALLRRESVGAEVLREIEDEWLYSRRGPLGPKDNLTVGWKWGSVLSALILGHVVEYECSWTLDPLKPTHKEQMIFLSYHHCTTDPKSCLRCHAQSLQPLVYIYPPLSCPSRTLCCLAKARPLAKSSYIPMSLHPYS

SEQ ID NO: 5307 - DNA, 2843 bp, Homo sapiens
atgctagacaagcccccacagattcaggttctagtttccatcccagggccaggccagccccagcaaccctgggctgtagaccacatctgggctggccccagtggtcccaggcctcaggctggtcccagcaacagaacagcccccacagcccttgtcatcaggctagcacctatggacccagcctccaggtcagcctctgtggatataggctccaggccaacccagctccaacccagccccctgcaacccaaggcaccaggcctgccccagggttcagaacagctgagagccaggtcaactcacacagccctaggctccaggcccatctcagcaccaggtgagtactattggcctcagcctcaggtaccatactggtcccaagggaccctggatccaggactgtcctcacagcccaaagcttcgggccagcctctgtgtcaccagtcaccagaccatcactcttgctaccaggctccagaccagtccccacaaacccaggcttcacacttgccacaggaccaggctggccctgggccccagagggtccagagtcacagcctgatccagcagacccagggcccaggcctatcccagtttacccaggctccagaccagacactatggactcaggctttaggccagccaccaaggttacaggctccaagtctgcccatgaggactcaagctcaagcccacctctacaagccaaataaacaggtccattcccatggattcaggctcctggtccaaaccagtggaatcagacagcaggcccacctacttactaatgcaggatttgacatggaagtgaaaggttggggtggagaagatgttcatctttatcgaaaatacttacgtggtgacctcattgttattcggaatccagttcctggtcttttccacctctggcatgaaaagcactgtgctgatgagctgacccccgagcagtaccgcatgtgcatccagtctaaagccatggatgaggcttctcgctcccacctgggaatgctggtcttcagggaggaaatagagacgcatcttcataaacaggcatacaggacaaacagcgaagctgttggttgaaatcataatgccttactgtgtgaaccacaaaccaacactatttatttagccttgcttctactttcagatgcagtgcctcttttggagaagacatgtttatttttcatgttctttctgacattactttagcaattcaacttgatgtgagaagaaaaaacaaatgtttcaacacgaaatctctgttttgtgagaatactgcactatggaataattgacaaattgaaatctcgtatttgtcccaaaagttgttttgagttagttctacctagtgcccatgttctgattgtgtgtgggattgcatggtgtcctgattgcatctaggtggagtggatggaatgtgctgggccactgttgggtggagagcagcacattcttacagaggagatggagtgctatgagcatagtgtgtggacaggtatcttcacctgcccacccctgagttagcctgcttaatttgatagcttgaagaatccttttccactgaagtagaggataattaattgacacatctgaaatccccaatcaatcaatcaagagaaaggtagaaataaaaactccttaacttactgttgcttacacccctgaaagtctgtttttaagcaagtgggtaatagtagaaaataggttagaatctatggcttgattaaaaagataatgttattacattatcatgttcaggattaggattagtagtcagagttgctgtaaactattttgaacaaacagaaaagaacacggaaacatttttaacagagcacttaattatgttggactacaggatcctagctgtgtctgggaacattggtttatgtgagccagctacatcagggtcttcccatggtgattcagaatagatgagcatagcatggtttcgtttgtttttgctttcaattttctcatttggcatggatccatatgtatttactatcctttcttctaatatattaatatatgctacatttgtatttgcattactataatactttgaatggagaaagtttcattgtggagagaaaaagcaaatggtataccacaagatcaccctgatttgagaaaagggaggaggggaagacagtctgaatggaaatctgaaatacggaatgttttagagaaatatatcacttgcatatagaatgttttaattgagatataaattaatgagacaaagtgaagaagaaattatattcagataggactgcactacattatttctcacacatgtatctgttaccatcaggtcaattcctagtatgcataaattttttaaccattggcttttaaaagagacctatgttgaaaacccctgaaaattcaccgaagaaaaatcattactctttttctcagtaaatcatatcatctgaaatattacaaatttcaaatttctaggtgctatattaattcaacattacaataattcttacctgattattcttacaagttttaagttgtggtagtttagtgattttttttaaagatgtgtgaaatgttctctgcaaaataattcaggccactgtctctttgtatatattattataattatttattatgaagaccagcgaattatgatatttaaagtgagagaacttaattatttgcaaaggtaagttacagcttgtttttttgagagaatcaaatgagtttacttttgttcctgttgtttgtaaactagtttgtagtttaaagatggaagctaagcaatggaaatgttatatgtttttgacatttattaaatggtaccaataaagtattttattaccaaa

SEQ ID NO: 5308 - protein, 360 aa, Homo sapiens
MLDKPPQIQVLVSIPGPGQPQQPWAVDHIWAGPSGPRPQAGPSNRTAPTALVIRLAPMDPASRSASVDIGSRPTQLQPSPLQPKAPGLPQGSEQLRARSTHTALGSRPISAPGEYYWPQPQVPYWSQGTLDPGLSSQPKASGQPLCHQSPDHHSCYQAPDQSPQTQASHLPQDQAGPGPQRVQSHSLIQQTQGPGLSQFTQAPDQTLWTQALGQPPRLQAPSLPMRTQAQAHLYKPNKQVHSHGFRLLVQTSGIRQQAHLLTNAGFDMEVKGWGGEDVHLYRKYLRGDLIVIRNPVPGLFHLWHEKHCADELTPEQYRMCIQSKAMDEASRSHLGMLVFREEIETHLHKQAYRTNSEAVG

SEQ ID NO: 5309 - DNA, 2843 bp, Homo sapiens; identical to SEQ ID NO: 5307

SEQ ID NO: 5310 - protein, 360 aa, Homo sapiens; identical to SEQ ID NO: 5308

SEQ ID NO: 5311 - DNA, 795 bp, Homo sapiens
atgtctgccacaggggatcaagacctgatccaagaggaccaggaggctccagtgaaccaggagggagcgcaggccgaggccgtaggtgaccgggagggcggtgactctggccccgacagtggcaacactgtggccggagtcgcagggcccatgagaggcctcggggaggaggagggtgagcaggcggcaggcttggccgcagcccccgggggtgggaacgccgaggaagactcagagatcaggatagtagtggagatgtttctggacatggtccactcccttctcctccgcatctatcacaacgaccacatcctgatcaggatgcgtggcggccgcctgatgcggaggcgccgcactgcggcgcccagtggctcagaagagccccggctgttgctggtgcatgagaggctgggcgtgggggccgcgggtcctgagggcgagggcctgggcctgctccaggaggccgcgttggtcccagagcctgaggtgccagcagacctggccgagatggccagggagcctgcagaagagcccgcagaggaggcctcagagaagcccacagaggaggccgcagaagagcccggtggagtactgggtgccgctgctggttataaattgggctatattttctgtgaatgtctggtcccaacatctgtattattcttcgctaaagaagtcactaaatatcagcatgaaaagtgggatgaagaggcccaagatgctgcaggcaaggaagagaaagaagagaaagagaaggatgctgaaaacaaggtgaagaactccaaagggacctag

SEQ ID NO: 5312 - protein, 264 aa, Homo sapiens
MSATGDQDLIQEDQEAPVNQEGAQAEAVGDREGGDSGPDSGNTVAGVAGPMRGLGEEEGEQAAGLAAAPGGGNAEEDSEIRIVVEMFLDMVHSLLLRIYHNDHILIRMRGGRLMRRRRTAAPSGSEEPRLLLVHERLGVGAAGPEGEGLGLLQEAALVPEPEVPADLAEMAREPAEEPAEEASEKPTEEAAEEPGGVLGAAAGYKLGYIFCECLVPTSVLFFAKEVTKYQHEKWDEEAQDAAGKEEKEEKEKDAENKVKNSKGT

SEQ ID NO: 5313 - DNA, 2104 bp, Homo sapiens
atggaagaacacagtagtgaaagtattatgccctcctttacaaaagggcaaagctttttagaacagagattcaactacggccccgccccgaacactgtggcacaagctcaggccgcagacggtgccggccccgaggacgacactgaggcctcccgtgccgccgccccagccgaaggccctcctggcggcatccagccggaagccgcagaaccaaaacccacggccgaagccccgaaggccccccgagtggaggagatccctcagcgcatgaccaggaaccgggcgcagatgctcgcgaaccagagcaagcagggcccgcccccctccgagaaggagtgcgcccccacccctgccccggtcaccagggccaaggcccgcggctccgaggacgacgacgcccaggcccagcatccgcgcaaacgccgctttcagcgctccacccagcagctgcagcagcagctgaacacgtccacgcagcagacgagggaggtgatccagcagacgctggccgccatcgtggacgccatcaagctggatgccatcgagccctaccacagcgacagggccaacccctacttcgaatacctgcagatcaggaagaagatcgaggagaagcgcaagatcctgtgctgtatcacgccgcaggcgccccagtggtacgcccagtacgtcacctacacgggctcctacctcctggacggcaagccgctcagcaagctccacatccccgtgatcgcaccccctccctccctggcggagcccctgaaggagctgttcaggcagcaggaggccgtccggggaaagctgcgtctacagcacagcatcgagagggagaagctgatcgtatcctgtgagcaggagattctgcgggttcactgccgggcggccaggaccatcgccaaccaggcagtgccattcagcacctgcacgatgctgctggactccgaggtctacaacatgcccctggagagccagggtgacgagaacaagtcagtgcgcgaccgtttcaacgcccgccagttcatctcctggctccaggacgtggatgacaagtatgaccgcatgaagacttgcctcctcatgcggcagcagcacgaggccgcggccctgaacgccgtgcagaggatggagtggcagctgaaggtgcaggaactggaccccgccgggcacaagtccctgtgcgtgaacgaggtgccctccttctacgtgcccatggtcgacgtcaacgacgactttgtattgttgccggcatgacaccgcgggacggccgcaggacgcaggcgagggccgcacggctgcccaggactgctgctgagccccaggggcggaggagggagcgccctgtccacccgggcggggagagaccccgagagagactgcacttggccacagcgcctccatcccttccagactggtccagacgtcggggaggtgaaacacgtctcttctctaccagctgccgcggcgggggcaaagcccccagagcctcactggccccggcgggatgaggagaccatgccgggcgcgcacacacggcagcttctgtttgaaaacggcgaccttcgggcccttttctccagcaactgcagaggcatttcaggagttggagaacggagtacatttttaaaattttttgttccattctgatcaactaaagaaaattaaggtgtccacctctcacaaacagtgacctgcaggtcggaggggcaggagccccatcccagccgtggttctgttgccgccgagctgcgacggcctcagactgggcttcagacctggtgcggagcgaggcggagggacacagagccaggactcccagccgtattgaaatggagtcaaatccgcgtggtttgtatcttctttcctttaatcttgggcattttgtttctctttctgagaacgtaacttgaaacactacagagccaataatcatataaaaagtgtatccgtaaacgctgtacagttttatataccttcacaatgtacttttgctgccttctagataatttattttgcaacacattactgcacagttgtaaataacttatgtactgtaacatcactttcatttatgtgtaaagaaataaataaattaattaaaaaa

SEQ ID NO: 5314 - protein, 417 aa, Homo sapiens
MEEHSSESIMPSFTKGQSFLEQRFNYGPAPNTVAQAQAADGAGPEDDTEASRAAAPAEGPPGGIQPEAAEPKPTAEAPKAPRVEEIPQRMTRNRAQMLANQSKQGPPPSEKECAPTPAPVTRAKARGSEDDDAQAQHPRKRRFQRSTQQLQQQLNTSTQQTREVIQQTLAAIVDAIKLDAIEPYHSDRANPYFEYLQIRKKIEEKRKILCCITPQAPQWYAQYVTYTGSYLLDGKPLSKLHIPVIAPPPSLAEPLKELFRQQEAVRGKLRLQHSIEREKLIVSCEQEILRVHCRAARTIANQAVPFSTCTMLLDSEVYNMPLESQGDENKSVRDRFNARQFISWLQDVDDKYDRMKTCLLMRQQHEAAALNAVQRMEWQLKVQELDPAGHKSLCVNEVPSFYVPMVDVNDDFVLLPA

SEQ ID NO: 5315 - DNA, 2104 bp, Homo sapiens
atggaagaacacagtagtgaaagtattatgccctcctttacaaaagggcaaagctttttagaacagagattcaactacggccccgccccgaacactgtggcacaagctcaggccgcagacggtgccggccccgaggacgacactgaggcctcccgtgccgccgccccagccgaaggccctcctggcggcatccagccggaagccgcagaaccaaaacccacggccgaagccccgaaggccccccgagtggaggagatccctcagcgcatgaccaggaaccgggcgcagatgctcgcgaaccagagcaagcagggcccgcccccctccgagaaggagtgcgcccccacccctgccccggtcaccagggccaaggcccgcggctccgaggacgacgacgcccaggcccagcatccgcgcaaacgccgctttcagcgctccacccagcagctgcagcagcagctgaacacgtccacgcagcagacgagggaggtgatccagcagacgctggccgccatcgtggacgccatcaagctggatgccatcgagccctaccacagcgacagggccaacccctacttcgaatacctgcagatcaggaagaagatcgaggagaagcgcaagatcctgtgctgtatcacgccgcaggcgccccagtggtacgcccagtacgtcacctacacgggctcctacctcctggacggcaagccgctcagcaagctccacatccccgtgatcgcaccccctccctccctggcggagcccctgaaggagctgttcaggcagcaggaggccgtccggggaaagctgcgtctacagcacagcatcgagagggagaagctgatcgtatcctgtgagcaggagattctgcgggttcactgccgggcggccaggaccatcgccaaccaggcagtgccattcagcacctgcacgatgctgctggactccgaggtctacaacatgcccctggagagccagggtgacgagaacaagtcagtgcgcgaccgtttcaacgcccgccagttcatctcctggctccaggacgtggatgacaagtatgaccgcatgaagacttgcctcctcatgcggcagcagcacgaggccgcggccctgaacgccgtgcagaggatggagtggcagctgaaggtgcaggaactggaccccgccgggcacaagtccctgtgcgtgaacgaggtgccctccttctacgtgcccatggtcgacgtcaacgacgactttgtattgttgccggcatgacaccgcgggacggccgcaggacgcaggcgagggccgcacggctgcccaggactgctgctgagccccaggggcggaggagggagcgccctgtccacccgggcggggagagaccccgagagagactgcacttggccacagcgcctccatcccttccagactggtccagacgtcggggaggtgaaacacgtctcttctctaccagctgccgcggcgggggcaaagcccccagagcctcactggccccggcgggatgaggagaccatgccgggcgcgcacacacggcagcttctgtttgaaaacggcgaccttcgggcccttttctccagcaactgcagaggcatttcaggagttggagaacggagtacatttttaaaattttttgttccattctgatcaactaaagaaaattaaggtgtccacctctcacaaacagtgacctgcaggtcggaggggcaggagccccatcccagccgtggttctgttgccgccgagctgcgacggcctcagactgggcttcagacctggtgcggagccaggcggagggacacagagccaggactcccagccgtattgaaatggagtcaaatccgcgtggtttgtatcttctttcctttaatcttgggcattttgtttctctttctgagaacgtaacttgaaacactacagagccaataatcatataaaaagtgtatccgtaaacgctgtacagttttatataccttcacaatgtacttttgctgccttctagataatttattttgcaacacattactgcacagttgtaaataacttatgtactgtaacatcactttcatttatgtgtaaagaaataaataaattaattaaaaaa

SEQ ID NO: 5316 - protein, 417 aa, Homo sapiens; identical to SEQ ID NO: 5314

SEQ ID NO: 5317 - DNA, 829 bp, Homo sapiens
aaagggctggacgctcacccaagaaggggaccccggcctgacctctctcggaattcaaaaaaatctaaggctcagagagggaatgggagctggctcttccctctgtgtttagcatccacgttttttggcggtctggctgaaaccagcccaccctagttcgggcgccagagcaacgcagttccgagggcagatctccaaggggcggaggcagagccgcgggtggatctttaactcaagactagcatgaagagttgccttctggcctgccctgagtctcctcaaataacaacaggcccttccaccgcagccatccgcacgggaggcctcgcgattgctcggaaccatcccgcaggagttcagctgatattttctagtgtggggcgagagattttgtggagcgcatttaaggggtttttgttgtgactgctgccttgtatacatttattttctttcttggaactgggcctcgccctcctcccactgacatgatggcccagtccaaggccaatggctcgcactatgcgctgaccgccatcggcctggggatgctggtccttggggtgatcatggccatgtggaacctggtacccggcttcagcgcggccgagaagccaacagctcagggcagcaacaagaccgaggtgggtggcggcatcctcaagagcaagaccttctctgtggcctacgtgctggtcggggccggggtgatgctgctgctgctttctatctgcctgagtatcagggataagaggaagcagcggcagggcgaggacctggcccatgtccagcacccgacaggcgctgggcctcacgcccaggaggaagacag

SEQ ID NO: 5318 - protein, 59 aa, Homo sapiens
MKSCLLACPESPQITTGPSTAAIRTGGLAIARNHPAGVQLIFSSVGREILWSAFKGFLL

SEQ ID NO: 5319 - DNA, 1979 bp, Homo sapiens
gctggacgctcacccaagaaggggaccccggcctgacctctctcggaattcaaaaaaatctaaggctcagagagggaatgggagctggctcttccctctgtgtttagcatccacgttttttggcggtctggctgaaaccagcccaccctagttcgggcgccagagcaacgcagttccgagggcagatctccaaggggcggaggcagagccgcgggtggatctttaactcaagactagcatgaagagttgccttctggcctgccctgagtctcctcaaataacaacaggcccttccaccgcagccatccgcacgggaggcctcgcgattgctcggaaccatcccgcaggagttcagctgatattttctagtgtggggcgagagattttgtggagcgcatttaaggggtttttgttgtgactgctgccttgtatacatttattttctttcttggaactgggcctcgccctcctcccactgacatgatggcccagtccaaggccaatggctcgcactatgcgctgaccgccatcggcctggggatgctggtccttggggtgatcatggccatgtggaacctggtacccggcttcagcgcggccgagaagccaacagctcagggcagcaacaagaccgaggtgggtggcggcatcctcaagagcaagaccttctctgtggcctacgtgctggtcggggccggggtgatgctgctgctgctttctatctgcctgagtatcagggataagaggaagcagcggcagggcgaggacctggcccatgtccagcacccgacaggcgctgggcctcacgcccaggaggaagacagccaggaggaagaagaggaggatgaggaggctgcctcaaggtactatgttcccagctacgaggaagtgatgaacacaaactactcagaagcaaggggagaggagcagaacccgaggttgagcatctctctcccgtcctatgagtcactgacggggctcgacgagaccacccccacatccaccagggctgacgtggaggccagccctgggaacccccctgacaggcagaactctaagttggccaaacgactgaaaccgctgaaagttcgaaggattaaatctgaaaagcttcacctcaaagactttaggatcaacctcccagacaaaaacgtccctcctccctcgatagagcctttgactcctccaccgcagtatgatgaagtccaggagaaggcccccgacacccggccgcccgactgaatggccccacttgagccacgctccctcctgtctctcacacctttcacccccaagactctaacaaagccacatgagccacagttgagaagcggaggggccagctgtgcatggagccatttggatggcggcgggcggggggggattctctgtatcaggagtgactttgttgccccacacagcctcctgctgcaggtgctttggaaagagatgctgccttggagctggtgaatctgtggaccacattcaagggtgtggcacaggcatcttcccatccttttcactccgaatcgctggcgacacattctcctttccagctaggaaagggttcctcgcggctggtttagattgtggttgtttgttttgcttctactaagactgttttgtttcaaaaaggaaacaagttttgtgtttgctgtctacgctggagtcctgaactgtgggtagaaaacacgacctggctttgtagaaaggacacagggctgttttatgaactaagcggtgaggctcaggtggcggctctcgcagagcccctgatgctgttgttctttgagggcttaaggcctgatgaacgtaggcacgtgatgcataatagtcttcaatggtacacttaactagtctcttctgtgtaacagcaaaaaaaaaaaaaaaaagaagaagaaagaaaactgtaggaaatgttctttttgaaatgccatgcaatggagctttttgtaataaaatattttatatgtagtaca

SEQ ID NO: 5320 - protein, 253 aa, Homo sapiens; identical to SEQ ID NO: 2

SEQ ID NO: 5321 - DNA, 2081 bp, Homo sapiens
gacttcgggtttgcactccccggagccagaactccgtggcggctccgggcctccgtggatccgagcagagactggctgcccgcctgccactcgcaggctgggaaaacgccagccggtgcctcgccgggaaagttctcggcaaagctggggatgagccctcagcagggcaggctcccggtgcagcgcgcccccatccattgcccgcgcgcaagaacccggaatgggccccacctgggccgggactcgggcgtgcgatcccgagggcgccctggggaccacgcatcgggtggggaccctggccgagggcgtgagctgactcagtttttaaaaactcgcttcctccttccctacttgtgccggtcactcacctcgctgggaaccagcccagggcagaagggggagagggaggcggtggcctccccaggaaggaggagaggtggatctttaactcaagactagcatgaagagttgccttctggcctgccctgagtctcctcaaataacaacaggcccttccaccgcagccatccgcacgggaggcctcgcgattgctcggaaccatcccgcaggagttcagctgatattttctagtgtggggcgagagattttgtggagcgcatttaaggggtttttgttgtgactgctgccttgtatacatttattttctttcttggaactgggcctcgccctcctcccactgacatgatggcccagtccaaggccaatggctcgcactatgcgctgaccgccatcggcctggggatgctggtccttggggtgatcatggccatgtggaacctggtacccggcttcagcgcggccgagaagccaacagctcagggcagcaacaagaccgaggtgggtggcggcatcctcaagagcaagaccttctctgtggcctacgtgctggtcggggccggggtgatgctgctgctgctttctatctgcctgagtatcagggataagaggaagcagcggcagggcgaggacctggcccatgtccagcacccgacaggcgctgggcctcacgcccaggaggaagacagccaggaggaagaagaggaggatgaggaggctgcctcaaggtactatgttcccagctacgaggaagtgatgaacacaaactactcagaagcaaggggagaggagcagaactctaagttggccaaacgactgaaaccgctgaaagttcgaaggattaaatctgaaaagcttcacctcaaagactttaggatcaacctcccagacaaaaacgtccctcctccctcgatagagcctttgactcctccaccgcagtatgatgaagtccaggagaaggcccccgacacccggccgcccgactgaatggccccacttgagccacgctccctcctgtctctcacacctttcacccccaagactctaacaaagccacatgagccacagttgagaagcggaggggccagctgtgcatggagccatttggatggcggcgggcggggggggattctctgtatcaggagtgactttgttgccccacacagcctcctgctgcaggtgctttggaaagagatgctgccttggagctggtgaatctgtggaccacattcaagggtgtggcacaggcatcttcccatccttttcactccgaatcgctggcgacacattctcctttccagctaggaaagggttcctcgcggctggtttagattgtggttgtttgttttgcttctactaagactgttttgtttcaaaaaggaaacaagttttgtgtttgctgtctacgctggagtcctgaactgtgggtagaaaacacgacctggctttgtagaaaggacacagggctgttttatgaactaagcggtgaggctcaggtggcggctctcgcagagcccctgatgctgttgttctttgagggcttaaggcctgatgaacgtaggcacgtgatgcataatagtcttcaatggtacacttaactagtctcttctgtgtaacagcaaaaaaaaaaaaaaaaagaagaagaaagaaaactgtaggaaatgttctttttgaaatgccatgcaatggagctttttgtaataaaatattttatatgtagtaca

SEQ ID NO: 5322 - protein, 213 aa, Homo sapiens
MMAQSKANGSHYALTAIGLGMLVLGVIMAMWNLVPGFSAAEKPTAQGSNKTEVGGGILKSKTFSVAYVLVGAGVMLLLLSICLSIRDKRKQRQGEDLAHVQHPTGAGPHAQEEDSQEEEEEDEEAASRYYVPSYEEVMNTNYSEARGEEQNSKLAKRLKPLKVRRIKSEKLHLKDFRINLPDKNVPPPSIEPLTPPPQYDEVQEKAPDTRPPD

SEQ ID NO: 5323 - DNA, 1810 bp, Homo sapiens
acgccggcgctcccaggccgcgcttcctgcgtccccaacccggtccctgagagggcagtgcgccctctccaccactgcgttccctcggctaagaatcccccgaaccccagccccgcgatcgcggcgcccaccgaggaggccgcccgggtggggcgcgggggtcgcgaagcccgcagtcccggaccgcccagccgagacggagccggacccgccgcctcccgggcccttccaccgcagccatccgcacgggaggcctcgcgattgctcggaaccatcccgcaggagttcagctgatattttctagtgtggggcgagagattttgtggagcgcatttaaggggtttttgttgtgactgctgccttgtatacatttattttctttcttggaactgggcctcgccctcctcccactgacatgatggcccagtccaaggccaatggctcgcactatgcgctgaccgccatcggcctggggatgctggtccttggggtgatcatggccatgtggaacctggtacccggcttcagcgcggccgagaagccaacagctcagggcagcaacaagaccgaggtgggtggcggcatcctcaagagcaagaccttctctgtggcctacgtgctggtcggggccggggtgatgctgctgctgctttctatctgcctgagtatcagggataagaggaagcagcggcagggcgaggacctggcccatgtccagcacccgacaggcgctgggcctcacgcccaggaggaagacagccaggaggaagaagaggaggatgaggaggctgcctcaaggtactatgttcccagctacgaggaagtgatgaacacaaactactcagaagcaaggggagaggagcagaacccgaggttgagcatctctctcccgtcctatgagtcactgacggggctcgacgagaccacccccacatccaccagggctgacgtggaggccagccctgggaacccccctgacaggcagaactctaagttggccaaacgactgaaaccgctgaaagttcgaaggattaaatctgaaaagcttcacctcaaagactttaggatcaacctcccagacaaaaacgtccctcctccctcgatagagcctttgactcctccaccgcagtatgatgaagtccaggagaaggcccccgacacccggccgcccgactgaatggccccacttgagccacgctccctcctgtctctcacacctttcacccccaagactctaacaaagccacatgagccacagttgagaagcggaggggccagctgtgcatggagccatttggatggcggcgggcggggggggattctctgtatcaggagtgactttgttgccccacacagcctcctgctgcaggtgctttggaaagagatgctgccttggagctggtgaatctgtggaccacattcaagggtgtggcacaggcatcttcccatccttttcactccgaatcgctggcgacacattctcctttccagctaggaaagggttcctcgcggctggtttagattgtggttgtttgttttgcttctactaagactgttttgtttcaaaaaggaaacaagttttgtgtttgctgtctacgctggagtcctgaactgtgggtagaaaacacgacctggctttgtagaaaggacacagggctgttttatgaactaagcggtgaggctcaggtggcggctctcgcagagcccctgatgctgttgttctttgagggcttaaggcctgatgaacgtaggcacgtgatgcataatagtcttcaatggtacacttaactagtctcttctgtgtaacagc

SEQ ID NO: 5324 - protein, 253 aa, Homo sapiens; identical to SEQ ID NO: 2

SEQ ID NO: 5325 - DNA, 1914 bp, Homo sapiens
acgccggcgctcccaggccgcgcttcctgcgtccccaacccggtccctgagagggcagtgcgccctctccaccactgcgttccctcggctaagaatcccccgaaccccagccccgcgatcgcggcgcccaccgaggaggccgcccgggtggggcgcgggggtcgcgaagcccgcagtcccggaccgcccagccgagacggagccggacccgccgcctcccgggcccttccaccgcagccatccgcacgggaggcctcgcgattgctcggaaccatcccgcaggagttcagctgatattttctagtgtggggcgagagattttgtggagcgcatttaaggggtttttgttgtgactgctgccttgtatacatttattttctttcttggaactgggcctcgccctcctcccactgacatgatggcccagtccaaggccaatggctcgcactatgcgctgaccgccatcggcctggggatgctggtccttggggtgatcatggccatgtggaacctggtacccggcttcagcgcggccgagaagccaacagctcagggcagcaacaagaccgaggtgggtggcggcatcctcaagagcaagaccttctctgtggcctacgtgctggtcggggccggggtgatgctgctgctgctttctatctgcctgagtatcagggataagaggaagcagcggcagggcgaggacctggcccatgtccagcacccgacaggcgctgggcctcacgcccaggaggaagacagccaggaggaagaagaggaggatgaggaggctgcctcaaggtactatgttcccagctacgaggaagtgatgaacacaaactactcagaagcaaggggagaggagcagaacccgaggttgagcatctctctcccgtcctatgagtcactgacggggctcgacgagaccacccccacatccaccagggctgacgtggaggccagccctgggaacccccctgacaggcagaactctaagttggccaaacgactgaaaccgctgaaagttcgaaggattaaatctgaaaagcttcacctcaaagactttaggatcaacctcccagacaaaaacgtccctcctccctcgatagagcctttgactcctccaccgcagtatgatgaagtccaggagaaggcccccgacacccggccgcccgactgaatggccccacttgagccacgctccctcctgtctctcacacctttcacccccaagactctaacaaagccacatgagccacagttgagaagcggaggggccagctgtgcatggagccatttggatggcggcgggcggggggggattctctgtatcaggagtgactttgttgccccacacagcctcctgctgcaggtgctttggaaagagatgctgccttggagctggtgaatctgtggaccacattcaagggtgtggcacaggcatcttcccatccttttcactccgaatcgctggcgacacattctcctttccagctaggaaagggttcctcgcggctggtttagattgtggttgtttgttttgcttctactaagactgttttgtttcaaaaaggaaacaagttttgtgtttgctgtctacgctggagtcctgaactgtgggtagaaaacacgacctggctttgtagaaaggacacagggctgttttatgaactaagcggtgaggctcaggtggcggctctcgcagagcccctgatgctgttgttctttgagggcttaaggcctgatgaacgtaggcacgtgatgcataatagtcttcaatggtacacttaactagtctcttctgtgtaacagcaaaaaaaaaaaaaaaaagaagaagaaagaaaactgtaggaaatgttctttttgaaatgccatgcaatggagctttttgtaataaaatattttatatgtagtaca

SEQ ID NO: 5326 - protein, 253 aa, Homo sapiens; identical to SEQ ID NO: 2

SEQ ID NO: 5327 - DNA, 818 bp, Homo sapiens
aggccgcgcttcctgcgtccccaacccggtccctgagagggcagtgcgccctctccaccactgcgttccctcggctaagaatcccccgaaccccagccccgcgatcgcggcgcccaccgaggaggccgcccgggtggggcgcgggggtcgcgaagcccgcagtcccggaccgcccagccgagacggagccggacccgccgcctcccgggtggatctttaactcaagactagcatgaagagttgccttctggcctgccctgagtctcctcaaataacaacaggcccttccaccgcagccatccgcacgggaggcctcgcgattgctcggaaccatcccgcaggagttcagctgatattttctagtgtggggcgagagattttgtggagcgcatttaaggggtttttgttgtgactgctgccttgtatacatttattttctttcttggaactgggcctcgccctcctcccactgacatgatggcccagtccaaggccaatggctcgcactatgcgctgaccgccatcggcctggggatgctggtccttggggtgatcatggccatgtggaacctggtacccggcttcagcgcggccgagaagccaacagctcagggcagcaacaagaccgaggtgggtggcggcatcctcaagagcaagaccttctctgtggcctacgtgctggtcggggccggggtgatgctgctgctgctttctatctgcctgagtatcagggataagaggaagcagcggcagggcgaggacctggcccatgtccagcacccgacaggcgctgggcctcacgcccaggaggaagacag

SEQ ID NO: 5328 - protein, 59 aa, Homo sapiens; identical to SEQ ID NO: 5318

SEQ ID NO: 5329 - DNA, 1952 bp, Homo sapiens
caacccggtccctgagagggcagtgcgccctctccaccactgcgttccctcggctaagaatcccccgaaccccagccccgcgatcgcggcgcccaccgaggaggccgcccgggtggggcgcgggggtcgcgaagcccgcagtcccggaccgcccagccgagacggagccggacccgccgcctcccgggtggatctttaactcaagactagcatgaagagttgccttctggcctgccctgagtctcctcaaataacaacaggcccttccaccgcagccatccgcacgggaggcctcgcgattgctcggaaccatcccgcaggagttcagctgatattttctagtgtggggcgagagattttgtggagcgcatttaaggggtttttgttgtgactgctgccttgtatacatttattttctttcttggaactgggcctcgccctcctcccactgacatgatggcccagtccaaggccaatggctcgcactatgcgctgaccgccatcggcctggggatgctggtccttggggtgatcatggccatgtggaacctggtacccggcttcagcgcggccgagaagccaacagctcagggcagcaacaagaccgaggtgggtggcggcatcctcaagagcaagaccttctctgtggcctacgtgctggtcggggccggggtgatgctgctgctgctttctatctgcctgagtatcagggataagaggaagcagcggcagggcgaggacctggcccatgtccagcacccgacaggcgctgggcctcacgcccaggaggaagacagccaggaggaagaagaggaggatgaggaggctgcctcaaggtactatgttcccagctacgaggaagtgatgaacacaaactactcagaagcaaggggagaggagcagaacccgaggttgagcatctctctcccgtcctatgagtcactgacggggctcgacgagaccacccccacatccaccagggctgacgtggaggccagccctgggaacccccctgacaggcagaactctaagttggccaaacgactgaaaccgctgaaagttcgaaggattaaatctgaaaagcttcacctcaaagactttaggatcaacctcccagacaaaaacgtccctcctccctcgatagagcctttgactcctccaccgcagtatgatgaagtccaggagaaggcccccgacacccggccgcccgactgaatggccccacttgagccacgctccctcctgtctctcacacctttcacccccaagactctaacaaagccacatgagccacagttgagaagcggaggggccagctgtgcatggagccatttggatggcggcgggcggggggggattctctgtatcaggagtgactttgttgccccacacagcctcctgctgcaggtgctttggaaagagatgctgccttggagctggtgaatctgtggaccacattcaagggtgtggcacaggcatcttcccatccttttcactccgaatcgctggcgacacattctcctttccagctaggaaagggttcctcgcggctggtttagattgtggttgtttgttttgcttctactaagactgttttgtttcaaaaaggaaacaagttttgtgtttgctgtctacgctggagtcctgaactgtgggtagaaaacacgacctggctttgtagaaaggacacagggctgttttatgaactaagcggtgaggctcaggtggcggctctcgcagagcccctgatgctgttgttctttgagggcttaaggcctgatgaacgtaggcacgtgatgcataatagtcttcaatggtacacttaactagtctcttctgtgtaacagcaaaaaaaaaaaaaaaaagaagaagaaagaaaactgtaggaaatgttctttttgaaatgccatgcaatggagctttttgtaataaaatattttatatgtagtaca

SEQ ID NO: 5330 - protein, 253 aa, Homo sapiens; identical to SEQ ID NO: 2

SEQ ID NO: 5331 - DNA, 1686 bp, Homo sapiens
cggtccctgagagggcagtgcgccctctccaccactgcgttccctcggctaagaatcccccgaaccccagccccgcgatcgcggcgcccaccgaggaggccgcccgggtggggcgcgggggtcgcgaagcccgcagtcccggaccgcccagccgagacggagccggacccgccgcctcccgggcccttccaccgcagccatccgcacgggaggcctcgcgattgctcggaaccatcccgcaggagttcagctgatattttctagtgtggggcgagagattttgtggagcgcatttaaggggtttttgttgtgactgctgccttgtatacatttattttctttcttggaactgggcctcgccctcctcccactgacatgatggcccagtccaaggccaatggctcgcactatgcgctgaccgccatcggcctggggatgctggtccttggggtgatcatggccatgtggaacctggtacccggcttcagcgcggccgagaagccaacagctcagggcagcaacaagaccgagccaggaggaagaagaggaggatgaggaggctgcctcaaggtactatgttcccagctacgaggaagtgatgaacacaaactactcagaagcaaggggagaggagcagaacccgaggttgagcatctctctcccgtcctatgagtcactgacggggctcgacgagaccacccccacatccaccagggctgacgtggaggccagccctgggaacccccctgacaggcagaactctaagttggccaaacgactgaaaccgctgaaagttcgaaggattaaatctgaaaagcttcacctcaaagactttaggatcaacctcccagacaaaaacgtccctcctccctcgatagagcctttgactcctccaccgcagtatgatgaagtccaggagaaggcccccgacacccggccgcccgactgaatggccccacttgagccacgctccctcctgtctctcacacctttcacccccaagactctaacaaagccacatgagccacagttgagaagcggaggggccagctgtgcatggagccatttggatggcggcgggcggggggggattctctgtatcaggagtgactttgttgccccacacagcctcctgctgcaggtgctttggaaagagatgctgccttggagctggtgaatctgtggaccacattcaagggtgtggcacaggcatcttcccatccttttcactccgaatcgctggcgacacattctcctttccagctaggaaagggttcctcgcggctggtttagattgtggttgtttgttttgcttctactaagactgttttgtttcaaaaaggaaacaagttttgtgtttgctgtctacgctggagtcctgaactgtgggtagaaaacacgacctggctttgtagaaaggacacagggctgttttatgaactaagcggtgaggctcaggtggcggctctcgcagagcccctgatgctgttgttctttgagggcttaaggcctgatgaacgtaggcacgtgatgcataatagtcttcaatggtacacttaactagtctcttctgtgtaacagcaaaaaaaaaaaaaaaaagaagaagaaagaaaactgtaggaaatgttctttttgaaatgccatgcaatggagctttttgtaataaaatattttatatgtagtaca

SEQ ID NO: 5332 - protein, 59 aa, Homo sapiens
MMAQSKANGSHYALTAIGLGMLVLGVIMAMWNLVPGFSAAEKPTAQGSNKTEPGGRRGG

SEQ ID NO: 5333 - DNA, 5783 bp, Homo sapiens
aaaattctctctcatccccttgggattcaaagctgagaagatgtaaggactggagctgcagcagtctttctgggaccattatacagagattctgtctgaggttggatccacgtggtcaaaagtattgctgaggagccagagagagactgaggtctgatgacatcacttgagccctgcagacttttcatttacgggaaaacagagaggatgaaggcctatctaaagagcgcagaaggcttttttgtcctaaataaaagtaccacaattggaaggcatgaaaattcagaccttgttttacagtctcctgacatcgacaaccaccatgcactcattgaatataacgaggcggagtgcagctttgttctccaggacttcaattcccgcaacggcacgtttgtcaacgagtgccacattcaaaacgtggctgtgaagctcatccctggagacatcctgagatttgggtctgcagggctgacctatgaactggtcattgaaaatccacctccggtgagtccgggccactgggggatagaggggccatgtcgccttcgtgcagcccggcgctcggatgcagctgcagggtggcgcttatccacattggtctctttcccatggatgaggggcccagcaccatggccagggccacagccacctcgtgccacacagcagccaaaccaggcccccccaccatcacatatccccttccaccaaggtgtccagccagcaccgatgcaaaggagctggtcccaggcctttcccagacccaccgtggtcctgccggcctcccacaggcggcctgtgagcgccaacaaggagatgttctcgttcgtggtggacgacgcccgcaagccacccgtcatcaagcaagtgtggaccaatgccatgaaactgtcagaaaaatcagtggccgaggggattcctggggcagttccccctgcggagatttatgtggaggaggacttggcccagcaggacaaggatgaaataattctgctgctgggaaaagaggtcagccgtctctcagattatgaaattgaatccaaatacaaagacgtcataatagcaaacctgcagaatgaagtggctgagctgagtcagaaggtgtcagagaccaccacctccaggcagaatgagaaggagatctcgcagaagtgtcaggttctggatgaagacatcgatgccaaacagaaagagatccagagcttgaaaagccagatcagtgccctacagaaaggctacagcaaggtgctgtgccagaccctgtcagagcggaactcagaaatcacatccctgaagaatgagggcgagaacttaaagagagacaacgctatcacatcagggatggtgtcatctttgcaaaaagacatattagcaaaggatgagcaagttcaacaactaaaggaagaggtcagtcacctaaaaagtcagaacaaggacaaggaccaccagctggaagcccttggctctagatgctcggtgctaaaggaagagttaaaacaggaagatgctcacagggagctcagggaagcccaggagaaagagttaaaactctgcaaaacccaaatccaagacatggagaaagaaatgaagaagcttagggcagagctgaggaagagttgtactgaacaaagcgtgatctctaggactctgagagaaaaaagcaaggttgaagagaagcttcaggaggattccagaaggaaattgcttcagctgcaagaaatggggaacagagagagcgtcattaaaatcaatttggagagggcagtaggtcagctggagcacttcagaagtcaagtcatcaaggccacctatggacgggcgaagccgttccgggacaagcccgtcaccgaccaacagttaatagagaaaattacccaggtcactgaggacaacatcaattttcagcagaaaaagtggaccctccagaaagagacccagctgagcaactccaagcaggaggagaccaccgagaacatcgagaagctgaggacgtcgctggacagctgccaggcttgcatgaaaatatcctgttgcagccatgacctgaagaaggaggtcgaccttcttcagcacctccaggtgagcccacctgtctcggggctccagaaggtggtgctggacgtcctgaggcacgcgctgtcctggctggaggaggtggagcagctcctccgggacctcgggatcctgccctccagccccaacaaagggttctctttgtatctgatatatcttctggaacattataaaaaacttatgagccaggcccaggaacttcagatcaagttcaacagttctcaggaaactcagcagtctttactgcaggaaaagctgcgggagcatctggcagagaaggagaagctgaacgaggagaggctagagcaagaggagaagctcaaagccaaaatcaggcaactgacggaagagaaggcggctttggaggagtacattactcaagagagaaacagagcgaaagagactttagaggaagaacggaagagaatgcaagaactggagagcctcctggcccagcagaagaaggctttggcgaaaagcattacccaggagaagaacagagtgaaggaagcattagaggaagagcagacaagagtccaagagctggaggaacgcttggcccgccagaaggagatctcagagagcaacattgcgtacgagaaacgcaaagcaaaggaggccatggagaaggaaaagaaaaaggtgcaagacctggagaatcgcttaaccaagcagaaagaggaattagaattaaaagagcaaaaagaggacgttttaaataataaattaagtgacgcactggccatggttgaagagactcagaaaacaaaggcaactgaaagtctaaaagcagagagcctcgccttgaaattaaatgaaacattagccgaactggaaactaccaagacaaaaatgatcatggtggaagagcggctaatcctgcagcagaagatggtaaaggccctccaggatgagcaggaatcacagagacacgggtttgaagaagagatcatggaatataaggagcaaatcaaacagcacgcccagacaattgtgagcctcgaagagaaactccagaaagtcactcagcaccataaaaaaatagaaggcgagattgcaacattgaaggacaatgacccagccccaaaggaggaaaggccgcaagaccctctggtggctcccatgacagagagcagtgccaaagacatggcgtacgaacatctgatagatgacttattggctgctcagaaggaaattctgtctcagcaggaagtcatcatgaagttaaggaaagaccttaccgaagcccacagcagaatgtcggatttgagaggggagctaaacgagaagcagaagatggaactggagcagaacgtggtgctggtccagcagcagagcaaggagctgagtgtgctcaaggagaagatggcccagatgagcagcctggtagaaaagaaagatcgggagctgaaggcccttgaggaggcactcagggcttcccaagagaaacacagactccagctgaacacagagaaggaacagaagccccggaagaagacccagacgtgtgacacctctgtgcagatagaacccgtccacactgaggccttctccagcagccaagagcagcaatccttcagcgatctaggggtcaggtgcaaagggtcccggcacgaggaggtcattcagcgtcagaaaaaggccttatctgaacttcgagcgcgaattaaagaactcgagaaggcgcgctcaccagatcataaagaccaccagaatgaatcatttctagatttaaagaacctcagaatggaaaacaatgtccagaaaatactactggatgcaaaaccggatttgccaactctctcaagaatagagatcctagcgcctcagaatggcctttgcaacgcaaggttcggctcagccatggagaagtcagggaagatggatgtggctgaggctttagagctcagtgaaaagctgtacctggatatgagcaaaaccctcggaagtctcatgaacatcaagaatatgtcaggccacgtgtccatgaaatacctctcccgccaggagagggagaaggtcaaccagcttcgacaaagggacctcgacctggtgtttgataagatcacccaactcaagaaccagctggggaggaaagaggagctgttgagaggatatgaaaaggacgttgaacagctcaggcggagcaaagtgtccattgagatgtaccagtcgcaggtggcaaagctggaggatgatatctacaaagaggccgaagagaaggccctgctgaaggaggccctggagcgcatggagcaccagctgtgccaggagaagaggatcaacagggccatccggcagcagaagtagatgggagcttccagcccctgcctcgcagacagatggtgaggatgaaagaatgcaggcatccctcgctatctgctgtccactctcgctgtcgtcatacctcaggagccaagtgcttttggatggtgagggtgcttgtcccgtctctgaagcacctgcccagggcctggcaccagccggcggacactgccttccccatgctgcccatgacccatgctgcccgtgacccatgcaggtggtctcctgggtgagtcctgcctcagacccggtagggtctacacactggaaagtttccccaaagcaagtcacacatgagcagcacccgggcggcttccaaagctccctgaaagctggcagaggggctttcctgtctgctttgcagttgacatattcatcatccactcctgcagtccacaaggcactggaacagtgacctctaaatagagccagactctccctttccttcactcttgcctaaggtggagcagatcccaaggctggggttaggcaagtcagggaaagaaccacagtcactgtttcttcatgaccgtctccaggccagggactgggctcacctgagctttgcagccgtgatagggcttattaatgcctctaatagccctgcctggtacgatgatccctattttacagatgaggaaactgcgcctcagagagttaagaggcgcccaagtgcacacagcggctggtaaggacagctgggacctgaccccagatccctctgaccctggttctcctgctgtctgcagggttggccgtgagtcccctccttgtaactgtcagcttttatgtgtgtgtgcattctcgtgtgtgtgtacattctcatgtgtgtgtgtgtgtgcacatgtgtaccatgtgcatgagggtttggctgtgtgtgacactatgtgtgtgtgtttgtgtgtgttgcctgcctgagctcagagagagccaaacccccagagaagggtgccccctccaccaaccaggtgagctccttgcagaggcctggccttcatcccacaaaccttgcagaccacaggctccctggcttgcagcccccaaaaatgaaggcagcgctctgctctggacgtggcctttccagcactcaccactctgaattaaacatcacaggcccccatctgcacatgtcgtggggctgcctcgggcagaggaccgtttccttttacgctgtgccatgccagggagatctgggcagcagcagagtcctgagatgtcctttgatgtacccacaggagagttcgctccttcccgaggcagtgtcccccagggcttggcaggccaggcccacagcagagacaccaaaccacagaatgggacggcagagggccctaaaaagcccattgtcatgcactggctgaaaatgaaagaaaacctgcagattt

SEQ ID NO: 5334 - protein, 1408 aa, Homo sapiens
MTSLEPCRLFIYGKTERMKAYLKSAEGFFVLNKSTTIGRHENSDLVLQSPDIDNHHALIEYNEAECSFVLQDFNSRNGTFVNECHIQNVAVKLIPGDILRFGSAGLTYELVIENPPPVSPGHWGIEGPCRLRAARRSDAAAGWRLSTLVSFPWMRGPAPWPGPQPPRATQQPNQAPPPSHIPFHQGVQPAPMQRSWSQAFPRPTVVLPASHRRPVSANKEMFSFVVDDARKPPVIKQVWTNAMKLSEKSVAEGIPGAVPPAEIYVEEDLAQQDKDEIILLLGKEVSRLSDYEIESKYKDVIIANLQNEVAELSQKVSETTTSRQNEKEISQKCQVLDEDIDAKQKEIQSLKSQISALQKGYSKVLCQTLSERNSEITSLKNEGENLKRDNAITSGMVSSLQKDILAKDEQVQQLKEEVSHLKSQNKDKDHQLEALGSRCSVLKEELKQEDAHRELREAQEKELKLCKTQIQDMEKEMKKLRAELRKSCTEQSVISRTLREKSKVEEKLQEDSRRKLLQLQEMGNRESVIKINLERAVGQLEHFRSQVIKATYGRAKPFRDKPVTDQQLIEKITQVTEDNINFQQKKWTLQKETQLSNSKQEETTENIEKLRTSLDSCQACMKISCCSHDLKKEVDLLQHLQVSPPVSGLQKVVLDVLRHALSWLEEVEQLLRDLGILPSSPNKGFSLYLIYLLEHYKKLMSQAQELQIKFNSSQETQQSLLQEKLREHLAEKEKLNEERLEQEEKLKAKIRQLTEEKAALEEYITQERNRAKETLEEERKRMQELESLLAQQKKALAKSITQEKNRVKEALEEEQTRVQELEERLARQKEISESNIAYEKRKAKEAMEKEKKKVQDLENRLTKQKEELELKEQKEDVLNNKLSDALAMVEETQKTKATESLKAESLALKLNETLAELETTKTKMIMVEERLILQQKMVKALQDEQESQRHGFEEEIMEYKEQIKQHAQTIVSLEEKLQKVTQHHKKIEGEIATLKDNDPAPKEERPQDPLVAPMTESSAKDMAYEHLIDDLLAAQKEILSQQEVIMKLRKDLTEAHSRMSDLRGELNEKQKMELEQNVVLVQQQSKELSVLKEKMAQMSSLVEKKDRELKALEEALRASQEKHRLQLNTEKEQKPRKKTQTCDTSVQIEPVHTEAFSSSQEQQSFSDLGVRCKGSRHEEVIQRQKKALSELRARIKELEKARSPDHKDHQNESFLDLKNLRMENNVQKILLDAKPDLPTLSRIEILAPQNGLCNARFGSAMEKSGKMDVAEALELSEKLYLDMSKTLGSLMNIKNMSGHVSMKYLSRQEREKVNQLRQRDLDLVFDKITQLKNQLGRKEELLRGYEKDVEQLRRSKVSIEMYQSQVAKLEDDIYKEAEEKALLKEALERMEHQLCQEKRINRAIRQQK

SEQ ID NO: 5335 - DNA, 2424 bp, Homo sapiens
gggtgcgagctggagactccgcgggagcgcggccgggaggcttcgccccggagctggcccgacgcctcccgagctggcagggctctcggcggaggtcggagcgtgggcttcctcctcccgccagggaaaacagagaggatgaaggcctatctaaagagcgcagaaggcttttttgtcctaaataaaagtaccacaattggaaggcatgaaaattcagaccttgttttacagtctcctgacatcgacaaccaccatgcactcattgaatataacgaggcggagtgcagctttgttctccaggacttcaattcccgcaacggcacgtttgtcaacgagtgccacattcaaaacgtggctgtgaagctcatccctggagacatcctgagatttgggtctgcagggctgacctatgaactggtcattgaaaatccacctccggtctctttcccatggatgaggggcccagcaccatggccagggccacagccacctcgtgccacacagcagccaaaccaggcccccccaccatcacatatccccttccaccaaggtgtccagccagcaccgatgcaaaggagctggtcccaggcctttcccagacccaccgtggtcctgccggcctcccacaggcggcctgtgagcgccaacaaggagatgttctcgttcgtggtggacgacgcccgcaagccacccgtcatcaagcaaggcctcagggaaactcatgatgtcttttgtgctctctgctgatctcacgccttagtgtggaccaatgccatgaaactgtcagaaaaatcagtggccgaggggattcctggggcagttccccctgcggagatttatgtggaggaggacttggcccagcaggacaagatcagtgccctacagaaaggctacagcaaggtgctgtgccagaccctgtcagagcggaactcagaaatcacatccctgaagaatgagggcgagaacttaaagagagacaacgctatcacatcagggatggtgtcatctttgcaaaaagacatattagcaaaggatgagcaagttcaacaactaaaggaagaggtcagtcacctaaaaagtcagaacaaggacaaggaccaccagctggaagcccttggctctagatgctcggtgctaaaggaagagttaaaacaggaagatgctcacagggagctcagggaagcccaggagaaagagttaaaactctgcaaaacccaaatccaagacatggagaaagaaatgaagaagcttagggcagagctgaggaagagttgtactgaacaaagcgtgatctctaggactctgagagaaaaaagcaagctggagcacttcagaagtcaagtcatcaaggccacctatggacgggcgaagccgttccgggacaagcccgtcaccgaccaacagttaatagagaaaattacccaggtcactgaggacaacatcaattttcagcagaaaaagtggaccctccagaaagagacccagctgagcaactccaagcaggaggagaccaccgagaacatcgagaagctgaggacgtcgctggacagctgccaggcttgcatgaaaatatcctgttgcagccatgacctgaagaaggaggtcgaccttcttcagcacctccaggtgagcccacctgtctcggggctccagaaggtggtgctggacgtcctgaggcacgcgctgtcctggctggaggaggtggagcagctcctccgggacctcgggatcctgccctccagccccaacaaagggttctctttgtatctgatatatcttctggaacattataaaaaacttatgagccaggcccaggaacttcagatcaagttcaacagttctcaggaaactcagcagtctttactgcaggaaaagctgcgggagcatctggcagagaaggagaagctgaacgaggagaggctagagcaagaggagaagctcaaagccaaaatcaggcaactgacggaagagaaggcggctttggaggagtacattactcaagagagaaacagagcgaaagagactttagaggaagaacggaagagaatgcaagaactggagagcctcctggcccagcagaagaaggctttggcgaaaagcattacccagtggaaagtactagagaaacctcgtcccaccaggcctcatgtgatcctctaccagaagctggagcagccaccttggggatcagcagacaccagcagcaggccaaaggatagtggagtggagggacaagaaggcctgggtgagccttctctgagaatcactgagctctgaaccatgaatgaactgcctacctctgtacttcctgttgtataggacaaagaaatccctatctatttaaaccactgtagtcaggtctatgtatttgtgctgtggaacaaaccacccaaactgagtgacttaaaatgacaaatatttatt

SEQ ID NO: 5336 - protein, 500 aa, Homo sapiens; identical to SEQ ID NO: 8

SEQ ID NO: 5337 - DNA, 530 bp, Homo sapiens
aatgagtgaggcaagacagccctgaggatggggaaggacatgatggacggagaagtcagcccagggcaggggcacagtggctcagcttctgaaaccaaagaatggaaaagagggtctctttcccatggatgaggggcccagcaccatggccagggccacagccacctcgtgccacacagcagccaaaccaggcccccccaccatcacatatccccttccaccaaggtgtccagccagcaccgatgcaaaggagctggtcccaggcctttcccagacccaccgtggtcctgccggcctcccacaggcggcctgtgagcgccaacaaggagatgttctcgttcgtggtggacgacgcccgcaagccacccgtcatcaagcaaggtatgcgtcagggctgccattggtggcttgggggtggttcacggccatgtggatgggtcttggttttggtttactttctgattctaaaagtagaacatattcaattgtaaaaaatgaaaataaattcaggataagcagaaagtaagaaa

SEQ ID NO: 5338 - protein, 129 aa, Homo sapiens
MEKRVSFPWMRGPAPWPGPQPPRATQQPNQAPPPSHIPFHQGVQPAPMQRSWSQAFPRPTVVLPASHRRPVSANKEMFSFVVDDARKPPVIKQGMRQGCHWWLGGGSRPCGWVLVLVYFLILKVEHIQL

SEQ ID NO: 5339 - DNA, 1889 bp, Homo sapiens
taagaagtgcttttcgcctcccaccatgattctgaggcctccccggccatgtggaactatcagtgccctacagaaaggctacagcaaggtgctgtgccagaccctgtcagagcggaactcagaaatcacatccctgaagaatgagggcgagaacttaaagagagacaacgctatcacatcagggatggtgtcatctttgcaaaaagacatattagcaaaggatgagcaagttcaacaactaaaggaagaggtcagtcacctaaaaagtcagaacaaggacaaggaccaccagctggaagcccttggctctagatgctcggtgctaaaggaagagttaaaacaggaagatgctcacagggagctcagggaagcccaggagaaagagttaaaactctgcaaaacccaaatccaagacatggagaaagaaatgaagaagcttagggcagagctgaggaagagttgtactgaacaaagcgtgatctctaggactctgagagaaaaaagcaagctggagcacttcagaagtcaagtcatcaaggccacctatggacgggcgaagccgttccgggacaagcccgtcaccgaccaacagttaatagagaaaattacccaggtcactgaggacaacatcaattttcagcagaaaaagtggaccctccagaaagagacccagctgagcaactccaagcaggaggagaccaccgagaacatcgagaagctgaggacgtcgctggacagctgccaggcttgcatgaaaatatcctgttgcagccatgacctgaagaaggaggtcgaccttcttcagcacctccaggtgagcccacctgtctcggggctccagaaggtggtgctggacgtcctgaggcacgcgctgtcctggctggaggaggtggagcagctcctccgggacctcgggatcctgccctccagccccaacaaaggttactgggactttttttctcacatggttgcatgactctaaaatgtcgcgttgaatctcagcatgatgggacatctgttgaggaagtcttcctgggtatctggccaagtctattcccttctccagaaccccctgcttctctgcttgaggcgtaattttccattaaaaaaaaaaacacacacatacaagtgagacacgataactgaagaaaaatgaaacaaaacagaggcaaaaggaaaattaaatcgaaattatgcaaagtctaattacgctgtttaacctccaaggcattttcccatggaaataaccgcgtgattccaggcaagtgacttaccctgtctatgcctcagtttccctatctgtaaaatgaggctaatagggagtacccaccctttagggctgttgtgatcattaaaatgcatgaatatatggaaagtacttggaatagtacctggcacacaataggcattactgaatgtttattgacttttaatttgacaaaaaaatagtgtcacgttaccctcgattttctttggtttattcctaatggtacgtcatccatgtcagtagacacagacctacatcatcgctgttaccgacggcagttactgattccattgtgtaggatgtgccattgttttagacaatcccctatcatgggcacttaggtgatttccagtttttcacactcataaatcatgctgggatgaacattgttgcacacatacctgctcatattatctttattctcctagaggtggagaggtatgaatcactttctttcaacaaatagtgattgcatgcatgcttaccagaggccacatgttgtgcagggcagagacgtaacggggtcaggaacaggtagaatcaggtcatgggtatatggttcactgtaaaattcttccaatatgtccatacatttgaaattttttataataaaatactgggg

SEQ ID NO: 5340 - protein, 316 aa, Homo sapiens
MILRPPRPCGTISALQKGYSKVLCQTLSERNSEITSLKNEGENLKRDNAITSGMVSSLQKDILAKDEQVQQLKEEVSHLKSQNKDKDHQLEALGSRCSVLKEELKQEDAHRELREAQEKELKLCKTQIQDMEKEMKKLRAELRKSCTEQSVISRTLREKSKLEHFRSQVIKATYGRAKPFRDKPVTDQQLIEKITQVTEDNINFQQKKWTLQKETQLSNSKQEETTENIEKLRTSLDSCQACMKISCCSHDLKKEVDLLQHLQVSPPVSGLQKVVLDVLRHALSWLEEVEQLLRDLGILPSSPNKGYWDFFSHMVA

SEQ ID NO: 5341 - DNA, 1676 bp, Homo sapiens
tcccaccatgattctgaggcctccccggccatgtggaactatcagtgccctacagaaaggctacagcaaggtgctgtgccagaccctgtcagagcggaactcagaaatcacatccctgaagaatgagggcgagaacttaaagagagacaacgctatcacatcagggatggtgtcatctttgcaaaaagacatattagcaaaggatgagcaagttcaacaactaaaggaagaggtcagtcacctaaaaagtcagaacaaggacaaggaccaccagctggaagcccttggctctagactggagcacttcagaagtcaagtcatcaaggccacctatggacgggcgaagccgttccgggacaagcccgtcaccgaccaacagttaatagagaaaattacccaggtcactgaggacaacatcaattttcagcagaaaaagtggaccctccagaaagagacccagctgagcaactccaagcaggaggagaccaccgagaacatcgagaagctgaggacgtcgctggacagctgccaggcttgcatgaaaatatcctgttgcagccatgacctgaagaaggaggtcgaccttcttcagcacctccaggtgagcccacctgtctcggggctccagaaggtggtgctggacgtcctgaggcacgcgctgtcctggctggaggaggtggagcagctcctccgggacctcgggatcctgccctccagccccaacaaaggttactgggactttttttctcacatggttgcatgactctaaaatgtcgcgttgaatctcagcatgatgggacatctgttgaggaagtcttcctgggtatctggccaagtctattcccttctccagaaccccctgcttctctgcttgaggcgtaattttccattaaaaaaaaaaacacacacatacaagtgagacacgataactgaagaaaaatgaaacaaaacagaggcaaaaggaaaattaaatcgaaattatgcaaagtctaattacgctgtttaacctccaaggcattttcccatggaaataaccgcgtgattccaggcaagtgacttaccctgtctatgcctcagtttccctatctgtaaaatgaggctaatagggagtacccaccctttagggctgttgtgatcattaaaatgcatgaatatatggaaagtacttggaatagtacctggcacacaataggcattactgaatgtttattgacttttaatttgacaaaaaaatagtgtcacgttaccctcgattttctttggtttattcctaatggtacgtcatccatgtcagtagacacagacctacatcatcgctgttaccgacggcagttactgattccattgtgtaggatgtgccattgttttagacaatcccctatcatgggcacttaggtgatttccagtttttcacactcataaatcatgctgggatgaacattgttgcacacatacctgctcatattatctttattctcctagaggtggagaggtatgaatcactttctttcaacaaatagtgattgcatgcatgcttaccagaggccacatgttgtgcagggcagagacgtaacggggtcaggaacaggtagaatcaggtcatgggtatatggttcactgtaaaattcttccaatatgtccatacatttgaaattttttataataaaatactgggg

SEQ ID NO: 5342 - protein, 251 aa, Homo sapiens; identical to SEQ ID NO: 16

SEQ ID NO: 5343 - DNA, 556 bp, Homo sapiens
aacatctttgatgattcaccctgggaagtcacattcaccacttccacagtgccatatgagttacacacgtcagccctattcagggatggtgtcatctttgcaaaaagacatattagcaaaggatgagcaagttcaacaactaaaggaagaggtcagtcacctaaaaagtcagaacaaggacaaggaccaccagctggaagcccttggctctagacgaaatgggaacaacaaaatcagttttgagaagtgagaggccggtttgcattgtgcgcttccgcctctgcggctggttagcccgcctcgcccagccctctgcatccgtcccccgagcagggtcaccgcctggattacatgtgttgtcgccctttcaggtctgccttcttctccaggccgcacctggcgttcatcagcacgtgggctcctcgtgaccaagggtattgctcatgtgaacatccgaatgactgtctttatttttcaaattacatgtgctgtgttaattttagaataaaaagtagataaaactggagagcaaaattaaagagagaagagaaatgcc

SEQ ID NO: 5344 - protein, 79 aa, Homo sapiens
MIHPGKSHSPLPQCHMSYTRQPYSGMVSSLQKDILAKDEQVQQLKEEVSHLKSQNKDKDHQLEALGSRRNGNNKISFEK

SEQ ID NO: 5345 - DNA, 4405 bp, Homo sapiens
ggaggattccagaaggaaattgcttcagctgcaagaaatggggaacagagagagcgtcattaaaatcaatttggagagggcagtaggtcaggtaggcatgttccagagcccccctcattggcccacgctctccaatgattgcacccaagcagccagtgggggtgagagaggaggacgcccaaggtagaaagacagacgtgcgttaattctcccatttatctcatgagcagaggctgtctgcagctccccacccccatggacatcgcttaacaggtttctgctgctgggaggcctcccactcgaatagtttacgatgacccgagacccggaccaggcagccaatcccggctcgatgcctgcccccagttaaccgagctccttgcccccagtggtgtttctagcattttctccttaatgtttttagtcctgacatttaccacaatctttcttccccttgggccccagcagacattacagacagtgtctataaggaaatgccacttttcttaataaggtaaaaccctggagtgtccaaagtgcgtgctggatggagaagctcccggctgtgggtgagccactccgacctggtctggaggtgctgtttctttgatgctgtggcctgaaatcgccggtggcccttcctggcaaatgtgacacagtcatgggggccggaatgtgcagacgaaagtttaccaaaagctaagggaaagcaaacaggaaaccaagatgggagggcatatgaccctgaggaatgtggtcccccaggggcagcccaccctagattcctccacaggggtccctctcctggaaaccatgactccaggggatccacagaatggtttgcacacacacgtgtgtgtgcgtgtgtgtgtgtgtattactgggaaggagggccccccatgtctcccactgggttctcaggagggtctgtgaactaccaagaaaggttaaaagccaggatctctcaaaccacccagctcagctcccaaagcccttccattttctaccatccaagccttaccaggcagtgtgaccaggcctttgtccctgtaccctaaaattcaaatattcaccactgtaaccgccagcaccatttctcctgtgggggcgccagccccttatcaagggcagagaacctgcctgtctgggcctcttcctgtgcacattggctacccccaatcttccccctaacacatacctgatttgagggtctgacccgtgctccttgcccaagggccaaggttcttgttatagctctgggcagaggtcatccaggaggagccctggaggtcctgagactgctccaggtctagacttgagagaaaggacaagccctctctctgcctcccagtgccttccctctcctgtatctccaaggccctgctccctgtccaatagtctgcccttccccagccaagtgaccccaggcccgaggccatgtctaagatgacctctccctcccaatggccctgggcagccattcctgtggggagcccctgatggcaatgggggaccatcattcatagggcttcctctacacagtcaattctttgggtgagctgggaccctccacttggccatgaaaccagaggatggctttgagaacctcatgtcacctggtcttctcctggcagggtcactgcagagatgtccgtaagacgtttcccattagaactcccctgtgcagtaaatacctgtgtcttgggccccaggttgaggcagtagcccttttggtcccttcaaggctctgctttggagtatttaataaccacgttttgccagtgaactggagactcacgccaggggctgccatgttggtaaattctcagagaaagtcgggctcctttttacctctaactactaatggaatcaggacaccttggacttgtcattctgtaagtccggacttaatgtaactgctatttcatcagccttaacctgaaaacactagcacccaggaggggctcagtgaaagccactagaagtagaggcccttggcttaaggtgatgtttctgtgtacaggcatccagcaaaggttagttgggtgtctgagtgtctcctctacaccaggcaccgtagtaggctccagggataccgagatgaacagagtggacatagtcttcaggactcttatgggctcaggcatgaaatggagaaagggagaacactctcctctccccgggcttccttgctgactacacaatttacttggactgacagcctcaatatttatttcacagtctggtgccaacttagcaattacggaagagcgctcccggccccagacttcccattggataattggcagcaagaggctcttctgagggtttgagacatgtgtgtgcactgaccacaggcatcgttcgggttaggcaggcgtgcctaaaaagtaattaaagcctgctgttctcttttcttctgtgggtcccgccactccccgtgagcggtgaagattctgataacgcggaatggtcattcaggcgtgcaaaccctgctaagtggtgtttcccgcaccctgccatggaaacgctgcccccacttgccggcccctgctgaccccctgacactgttgccccctctctgctgcagctggagcacttcagaagtcaagtcatcaaggccacctatggacgggcgaagccgttccgggacaagcccgtcaccgaccaacagttaatagagaaaattacccaggtcactgaggacaacatcaattttcagcagaaaaagtggaccctccagaaagagacccagctgagcaactccaagcaggaggagaccaccgagaacatcgagaagctgaggacgtcgctggacagctgccaggtggcccctccttacgctttccacaaatggtctctttgtctaatttttgtgcggcttatttgggaaattgcccagcttttttggagcaagttgggcagaaatgcttggcttttctatccactttttcctcttgttggagaaacttgttggagaagaaaaaacaaagggcctaaaaaaatgcctcccgggagaacttggcgtgtccaaaaaagatgcctgagcatcttcaattactgactttgagcggcccgcatccccagccaaaaagaaattgttttcatagcccctatgttatttccagagaaaccaaagaaacattcctgctttttatttgcattttcttgttttggcccagccacaaaaggcggtttccacaccgttgcttttgactctggaggagcagggacgggaggacttggccacagccctgcggcccccaccctgggacatggcttatcagagcaggcggtggcttctgctttctctggaaatcagcagctcctgtttggggagtttgtgcaaatgctggcttgtcagcactctttcaaatcaggaaaccacgctttccgaccagcttgtgtgttgatcttggcaggaattctgacgaatggaaaaaagaagtagccacatttgcttctcattgcagccaaactgttgatggtactttggctctggggtttcatagacctaaaagggggttcgctttgaccatcaaaagtccaaattagagtattaaaaaaaaacctgtcaaaacataaaaattttaaaaaagaaaaaaactgagtcctcccaaggcggccaatacgtggcgctgcctgcttcgtggcagagtcaagaacgctgttcctcgaaggtcacgtcaggggctatttctggccacagggcctgggctcctcatgatctcacctctttgcaggcttgcatgaaaatatcctgttgcagccatgacctgaagaaggaggtcgaccttcttcagcacctccaggtgagcccacctgtctcggggctccagaaggtggtgctggacgtcctgaggcacgcgctgtcctggctggaggaggtggagcagctcctccgggacctcgggatcctgccctccagccccaacaaaggttactgggactttttttctcacatggttgcatgactctaaaatgtcgcgttgaatctcagcatgatgggacatctgttgaggaagtcttcctgggtatctggccaagtctattcccttctccagaaccccctgcttctctgcttgaggcgtaattttccattaaaaaaaaaaacacacacatacaagtgagacacgataactgaagaaaaatgaaacaaaacagaggcaaaaggaaaattaaatcgaaattatgcaaagtctaattacgctgtttaacctccaaggcattttcccatggaaataaccgcgtgattccaggcaagtgacttaccctgtctatgcctcagtttccctatctgtaaaatgaggctaatagggagtacccaccctttagggctgttgtgatcattaaaatgcatgaatatatggaaagtacttggaatagtacctggcacacaataggc

SEQ ID NO: 5346 - protein, 111 aa, Homo sapiens [sequence omitted]

SEQ ID NO: 5347 - DNA, 3105 bp, Homo sapiens
aaaataaggcatttgggatgccgatgttaaaaggagaaggtaatcagagaagaaaaaaggaagtcggtggagagttctgcgaagattttgaagatttctagcagagaagcagggggttctggagaagggaatagacttggccagatacccaggaagacttcctcaacagatgtcccatcatgctgagattcaacgcgacattttagagtcatgcaaccatgtgagaaaaaaagtcccagtaacctttgttggggctggagggcaggatcccgaggtcccggaggagctgctccacctcctccagccaggacagcgcgtgcctcaggacgtccagcaccaccttctggagccccgagacaggtgggctcacctggaggtgctgaagaaggtcgacctccttcttcaggtcatggctgcaacaggatattttcatgcaagcctgcaaagaggtgagatcatgaggagcccaggccctgtggccagaaatagcccctgacgtgaccttcgaggaacagcgttcttgactctgccacgaagcaggcagcgccacgtattggccgccttgggaggactcagtttttttcttttttaaaatttttatgttttgacaggtttttttttaatactctaatttggacttttgatggtcaaagcgaacccccttttaggtctatgaaaccccagagccaaagtaccatcaacagtttggctgcaatgagaagcaaatgtggctacttcttttttccattcgtcagaattcctgccaagatcaacacacaagctggtcggaaagcgtggtttcctgatttgaaagagtgctgacaagccagcatttgcacaaactccccaaacaggagctgctgatttccagagaaagcagaagccaccgcctgctctgataagccatgtcccagggtgggggccgcagggctgtggccaagtcctcccgtccctgctcctccagagtcaaaagcaacggtgtggaaaccgccttttgtggctgggccaaaacaagaaaatgcaaataaaaagcaggaatgtttctttggtttctctggaaataacataggggctatgaaaacaatttctttttggctggggatgcgggccgctcaaagtcagtaattgaagatgctcaggcatcttttttggacacgccaagttctcccgggaggcatttttttaggccctttgttttttcttctccaacaagtttctccaacaagaggaaaaagtggatagaaaagccaagcatttctgcccaacttgctccaaaaaagctgggcaatttcccaaataagccgcacaaaaattagacaaagagaccatttgtggaaagcgtaaggaggggccacctggcagctgtccagcgacgtcctcagcttctcgatgttctcggtggtctcctcctgcttggagttgctcagctgggtctctttctggagggtccactttttctgctgaaaattgatgttgtcctcagtgacctgggtaattttctctattaactggtgagaaaaagaaaaaggaaaaaaaaaaaaaagatgtaacatacaggggtggggggccctgagggaaggggaatgggagaggggagagatgcaacttaagtccctgtctaagcacgggaggacagaggtcctgatatgtcttggtgatggctgtcaagggggacgttggtcctgtcaccagggaatgagtcccagaatcagagattctcttttcttttttcttttcttttttttttttttgcgacggagtttcactcttgttgcccaggctggagtgcaatggtttgatctcggctcaccgcaacctccgcctcctgggttcaagcgattctcctgcctcagcctctgaagtagctgagattacaggcacgcgccaccatgcccggctaattttgtatttttaatagagatggggttttaccatgttggtcaggctggtttcgaactcccgacctgaggtgatccacccgcctcggcctctcaaagtgctggcattacaggcatgagccaccactccttgccgatcagagattatttttatgatccaaaggcctgtcttgtggccctgagtttgttccagattcttctgtgttgtatagggattcagaacactgagcctgatattatgggctcataagcagcaggtcaggttctcccacacccactgagagcagcccacggcacattttcccatctgtgctttgacacagggggctagaaagtgtagtggaagaacagcaaggcaatcattacagccagacatccaccctcactgccactgtcaacttttctcctctgaaggaacgcgccagaacgcactggctgtggggaggcggctccctttctcccagtgctaatggaggcgaaacatgcatgtctggagaccagaagtaagcccgaatggtttaatttgattttcacagacacatttcaagggagttttaactggcttttactttaaaagccaggaaatcccataaaatcaaaacaaatctttatggtgtagcaacagtgtgaaaaatatgccaccaacaaaaacagaaacatatgctcccagggtctggaatccagatccacgaagaagaagaagaggaaagtgaaggagccacgtggcagggacggcagactaacctgttggtcggtgacgggcttgtcccggaacggcttcgcccgtccataggtggccttgatgacttgacttctgaagtgctccagctgcagcagagagggggcaacagtgtcagggggtcagcaggggccggcaagtgggggcagcgtttccatggcagggtgcgggaaacaccacttagcagggtttgcacgcctgaatgaccattccgcgttatcagaatcttcaccgctcacggggagtggcgggacccacagaagaaaagagaacagcaggctttaattactttttaggcacgcctgcctaacccgaacgatgcctgtggtcagtgcacacacatgtctcaaaccctcagaagagcctcttgctgccaattatccaatgggaagtctggggccgggagcgctcttccgtaattgctaagttggcaccagactgtgaaataaatattgaggctgtcagtcc

SEQ ID NO: 5348 - protein, 108 aa, Homo sapiens
MSHHAEIQRDILESCNHVRKKVPVTFVGAGGQDPEVPEELLHLLQPGQRVPQDVQHHLLEPRDRWAHLEVLKKVDLLLQVMAATGYFHASLQRGEIMRSPGPVARNSP

SEQ ID NO: 5349 - DNA, 1623 bp, Homo sapiens
tgaccacaggcatcgttcgggttaggcaggcgtgcctaaaaagtaattaaagcctgctgttctcttttcttctgtgggtcccgccactccccgtgagcggtgaagattctgataacgcggaatggtcattcaggcgtgcaaaccctgctaagtggtgtttcccgcaccctgccatggaaacgctgcccccacttgccggcccctgctgaccccctgacactgttgccccctctctgctgcagctggagcacttcagaagtcaagtcatcaaggccacctatggacgggcgaagccgttccgggacaagcccgtcaccgaccaacagttaatagagaaaattacccaggtcactgaggacaacatcaattttcagcagaaaaagtggaccctccagaaagagacccagctgagcaactccaagcaggaggagaccaccgagaacatcgagaagctgaggacgtcgctggacagctgccaggcttgcatgaaaatatcctgttgcagccatgacctgaagaaggaggtcgaccttcttcagcacctccaggtgagcccacctgtctcggggctccagaaggtggtgctggacgtcctgaggcacgcgctgtcctggctggaggaggtggagcagctcctccgggacctcgggatcctgccctccagccccaacaaaggttactgggactttttttctcacatggttgcatgactctaaaatgtcgcgttgaatctcagcatgatgggacatctgttgaggaagtcttcctgggtatctggccaagtctattcccttctccagaaccccctgcttctctgcttgaggcgtaattttccattaaaaaaaaaaacacacacatacaagtgagacacgataactgaagaaaaatgaaacaaaacagaggcaaaaggaaaattaaatcgaaattatgcaaagtctaattacgctgtttaacctccaaggcattttcccatggaaataaccgcgtgattccaggcaagtgacttaccctgtctatgcctcagtttccctatctgtaaaatgaggctaatagggagtacccaccctttagggctgttgtgatcattaaaatgcatgaatatatggaaagtacttggaatagtacctggcacacaataggcattactgaatgtttattgacttttaatttgacaaaaaaatagtgtcacgttaccctcgattttctttggtttattcctaatggtacgtcatccatgtcagtagacacagacctacatcatcgctgttaccgacggcagttactgattccattgtgtaggatgtgccattgttttagacaatcccctatcatgggcacttaggtgatttccagtttttcacactcataaatcatgctgggatgaacattgttgcacacatacctgctcatattatctttattctcctagaggtggagaggtatgaatcactttctttcaacaaatagtgattgcatgcatgcttaccagaggccacatgttgtgcagggcagagacgtaacggggtcaggaacaggtagaatcaggtcatgggtatatggttcactgtaaaattcttccaatatgtccatacatttgaaattttttataataaaatactgggg

SEQ ID NO: 5350 - protein, 74 aa, Homo sapiens [sequence omitted]

SEQ ID NO: 5351 - DNA, 486 bp, Homo sapiens
ttctggagccccgagacaggtgggctcacctggaggtgctgaagaaggtcgacctccttcttcaggtcatggctgcaacaggatattttcatgcaagcctgcaaagaggtgagatcatgaggagcccaggccctgtggccagaaatagcccctgacgtgaccttcgaggaacagcgttttcttttttccattcgtcagaattcctgccaagatcaacacacaagctggtcggaaagcgtggtttcctgatttgaaagagtgctgacaagccagcatttgcacaaactccccaaacaggagctgctgatttccagagaaagcagaagccaccgcctgctctgataagccatgtcccagggtgggggccgcagggctgtggccaagtcctcccgtccctgctcctccagagtcaaaagcaacggtgtggaaaccgccttttgtggctgggccaaaacaagaaaatgcaaataaaaagcaggaatgttt

SEQ ID NO: 5352 - protein, 40 aa, Homo sapiens
MSQGGGRRAVAKSSRPCSSRVKSNGVETAFCGWAKTRKCK

SEQ ID NO: 5353 - DNA, 725 bp, Homo sapiens
aaaagttgcccagagtcacacagctggtacattagggttaagactcaaactgaggtctttgtgaccctaacacctgtgtcttccctatgaccccctgccccttcacccccaccccctgcacacatacacacttcctctgacaatgcagcaatgtaccaggcacatgcccagtccctagagaatgggtgctgtcatcggctcaggcagtgacagagctaagagttgtctttccctaagctaaaccgcatctgattcctaccctgagccataaccacagaaagccccatttgtatcacagtgatgttccaagctgggactctgggtaccactgccaaggcttgaatttcagctgtgcacctactagctgtgtgggcagttacgtgacgtggctgcgcctccatttacttgctcgtgaaatggccatccagtctcctagcggcatatgaggactgagtgatgggatacatgcatggcagtgctggtcacagttagctcgtaatcggtgggggctgctgtcatcgtcagcctcaaatactggtttctcagggttcctctgataagggaaggaaaggattttttacatttttctctgcaagctccgtcgtttgtgtctatttctgcaagactttgttacaaataaaagactcttcttgcatgcatggcaaatcactcaactatccaagatacactgtgtctttaactgaaaagaaagcaagttgcaatac

SEQ ID NO: 5354 - protein, 46 aa, Homo sapiens
SVGAAVIVSLKYWFLRVPLIREGKDFLHFSLQAPSFVSISARLCYK

SEQ ID NO: 5355 - DNA, 1378 bp, Homo sapiens
gagacagacatgacagccctcctcaaatatttaaagggctgtctcataaaagagaaataaaacatactcaatgagctccaggtgacagaactgagctcagagaccagaaatcacaaggagacagatctccgctgaatataaagacgagttctataataattggaaccttccagagaaggcatggactttgtgctttaaaagaatcgacagaataattagagaatagactttaccctgtccttgaaggtgggggataagggggctgggtaaatatgtattcctgaatgtctgttattttgctacttgtttttttgtctaggaattagaattaaaagagcaaaaagaggacgttttaaataataaattaagtgacgcactggccatggttgaagagactcagaaaacaaaggcaactgaaagtctaaaagcagagagcctcgccttgaaattaaatgaaacattagccgaactggaaactaccaagacaaaaatgatcatggtggaagagcggctaatcctgcagcagaagatggtaaaggccctccaggatgagcaggaatcacagagacacgggtttgaagaagagatcatggaatataaggagcaaatcaaacagcacgcccagacaattgtgagcctcgaagagaaactccagaaagtcactcagcaccataaaaaaatagaaggcgagattgcaacattgaaggacaatgacccagccccaaaggaggaaaggccgcaagaccctctggtggctcccatgacagagagcagtgccaaagacatggcgtacgaacatctgattgagtctacaaagaagtctatcctcaaagaactgacagttttcagagaaacaaacgtatgaatgggaaagatccagaaagcagcacgtaaagaaggaggcgccgatgggatgcagtggagggattcagaagctcccccaagaggagaaccacctgcctgacccttgcaccaaatcctagtgaccgaagtctaatgtcacagggtttttaccccaaaaagacaaggatactcagcctccgcattgtgaaaagttcctgactcctcctcctgtttaaaatctagaaacggtggtgcccatgacttggagaagactcagcaccacccagctctgctctggtccacttccttggcgtgtgaacatgcttgaattctaaggttttatcctcaagttggaagatttgtggttgcagccaagaacacactcacgtggacacacacgcatgcatgcacacacagaatatactatatctatgtagttattttcattctgatgatcaccagtctttttgtttgtttgtttgacatgcaacctgccagtgttttactttaattcataataaacacagtaccttct

SEQ ID NO: 5356 - protein, 160 aa, Homo sapiens; identical to SEQ ID NO: 6

SEQ ID NO: 5357 - DNA, 2308 bp, Homo sapiens
agatgacttattggctgctcagaaggaaattctgtctcagcaggaagtcatcatgaagttaaggaaagaccttaccgaagcccacagcagaatgtcggatttgagaggggagctaaacgagaagcagaagatggaactggagcagaacgtggtgctggtccagcagcagagcaaggagctgagtgtgctcaaggagaagatggcccagatgagcagcctggtagaaaagaaagatcgggagctgaaggcccttgaggaggcactcagggcttcccaagagaaacacagactccagctgaacacagagaaggaacagaagccccggaagaagacccagacgtgtgacacctctgtgcagatagaacccgtccacactgaggccttctccagcagccaagagcagcaatccttcagcgatctaggggtcaggtgcaaagggtcccggcacgaggaggtcattcagcgtcagaaaaaggccttatctgaacttcgagcgcgaattaaagaactcgagaaggcgcgctcaccagatcataaagaccaccagaatgaatcatttctagatttaaagaacctcagaatggaaaacaatgtccagaaaatactactggatgcaaaaccggatttgccaactctctcaagaatagagatcctagcgcctcagaatggcctttgcaacgcaaggttcggctcagccatggagaagtcagggaagatggatgtggctgaggctttagagctcagtgaaaagctgtacctggatatgagcaaaaccctcggaagtctcatgaacatcaagaatatgtcaggccacgtgtccatgaaatacctctcccgccaggagagggagaaggtcaaccagcttcgacaaagggacctcgacctggtgtttgataagatcacccaactcaagaaccagctggggaggaaagaggagctgttgagaggatatgaaaaggacgttgaacagctcaggcggagcaaagtgtccattgagatgtaccagtcgcaggtggcaaagctggaggatgatatctacaaagaggccgaagagaaggccctgctgaaggaggccctggagcgcatggagcaccagctgtgccaggagaagaggatcaacagggccatccggcagcagaagatgaggaaactgcgcctcagagagttaagaggcgcccaagtgcacacagcggctggtaaggacagctgggacctgaccccagatccctctgaccctggttctcctgctgtctgcagggttggccgaaagtgtagaggagcacgaactgagaaacgcaaaagaatcgacaccttgcaactgtgccttcaaagagaaagacaggcaggccctgccccacctgcctgcagtttgaacggatgacctaagagacaagcacgcgtccagccccgtctgtccattaagagacgagtatttgtagagatggtgaagaacaggatgcagaactcaaattcccaggttggaaccagaaaagcctccctaaagatggaccaagaaagagagatgctgaggaaagagacctccagcaagtccagccagagccttttgcattctaagcccagtggaaagtactagagaaacctcgtcccaccaggcctcatgtgatcctctgtgagttcatgtgactcttctgtgtcatctgtgtcaaaatactgagttgcttttgtaagtctttaaagattgttaccctagtgtttcatttcctagaccagtattttgaacaatattatattttggagactgtggggagaagggttcttctttaaaaatacctatgaatgtacacgaactcaggtatatgaagaatagaagtgtgtaacccagatgtccaggcctggtagatataattatgtggtccacgttgggtcatgatgttcccaaatatcaaacctcctaagacttccaacagactcacacttgagaaaacctaagacttgtactggagcctcagggcagaattgtaaccttggagctctcagggccttgggatagtgaattcaagtctccgttatggcctggcaggatggctcatgcctgtaatctcagcactttgggaggccgaggcaggcggattataagatcaggagtttgagaccagcctggcaaacatagtgaatacctgtctctactaaaaatacaaaaattagccaggtgtggtggcacatgcctgtagtcccagctacacaggaggctgaggtgggagaatcacttgaacctaggaggcagaggttgcagtgagccaagaccacgccattgcacgccagcctaacagagtgagactctgtcttt

SEQ ID NO: 5358 - protein, 442 aa, Homo sapiens
MKLRKDLTEAHSRMSDLRGELNEKQKMELEQNVVLVQQQSKELSVLKEKMAQMSSLVEKKDRELKALEEALRASQEKHRLQLNTEKEQKPRKKTQTCDTSVQIEPVHTEAFSSSQEQQSFSDLGVRCKGSRHEEVIQRQKKALSELRARIKELEKARSPDHKDHQNESFLDLKNLRMENNVQKILLDAKPDLPTLSRIEILAPQNGLCNARFGSAMEKSGKMDVAEALELSEKLYLDMSKTLGSLMNIKNMSGHVSMKYLSRQEREKVNQLRQRDLDLVFDKITQLKNQLGRKEELLRGYEKDVEQLRRSKVSIEMYQSQVAKLEDDIYKEAEEKALLKEALERMEHQLCQEKRINRAIRQQKMRKLRLRELRGAQVHTAAGKDSWDLTPDPSDPGSPAVCRVGRKCRGARTEKRKRIDTLQLCLQRERQAGPAPPACSLNG

SEQ ID NO: 5359 - DNA, 1240 bp, Homo sapiens
gcctcagaatggcctttgcaacgcaaggttcggctcagccatggagaagtcagggaagatggatgtggctgaggctttagagctcagtgaaaagctgtacctggatatgagcaaaaccctcggaagtctcatgaacatcaagaatatgtcaggccacgtgtccatgaaatacctctcccgccaggagagggagaaggtcaaccagcttcgacaaagggacctcgacctggtgtttgataagatcacccaactcaagaaccagctggggaggaaagaggagctgttgagaggatatgaaaaggacgttgaacagctcaggcggagcaaagtgtccattgagatgtaccagtcgcaggtggcaaagctggaggatgatatctacaaagaggccgaagagaaggccctgctgaaggaggccctggagcgcatggagcaccagctgtgccaggagaagaggatcaacagggccatccggcagcagaaggaaagtgtagaggagcacgaactgagaaacgcaaaagaatcgacaccttgcaactgtgccttcaaagagaaagacaggcaggccctgccccacctgcctgcagtttgaacggatgacctaagagacaagcacgcgtccagccccgtctgtccattaagagtcttgctctattgcccaggctagagtgcagtggtgcaatttcggctcactgcaacctccacctcccaggttcaagcgattctcctgcctcagcctcccgagtagctgggactacaggttggaaccagaaaagcctccctaaagatggaccaagaaagagagatgctgaggaaagagacctccagcaagtccagccagagccttttgcattctaagcccagtggaaagtactagagaaacctcgtcccaccaggcctcatgtgatcctctctaggacgggccatgttggaccaatctggctaatgacatataaggaaaagctcctgtggagggcttcccttccagcttctctaggtgaaagcattcacccttggtacctttgtcttgtctcctttctcactcctggagctcagaccagaagctggagcagccaccttggggatcagcagacaccagcagcaggccaaaggatagtggagtggagggacaagaaggcctgggtgagccttctctgagaatcactgagctctgaaccatgaatgaactgcctacctctgtacttcctgttgtataggacaaagaaatccctatctattt

SEQ ID NO: 5360 - protein, 183 aa, Homo sapiens
MEKSGKMDVAEALELSEKLYLDMSKTLGSLMNIKNMSGHVSMKYLSRQEREKVNQLRQRDLDLVFDKITQLKNQLGRKEELLRGYEKDVEQLRRSKVSIEMYQSQVAKLEDDIYKEAEEKALLKEALERMEHQLCQEKRINRAIRQQKESVEEHELRNAKESTPCNCAFKEKDRQALPHLPAV

SEQ ID NO: 5361 - DNA, 695 bp, Homo sapiens
tgtcaggccacgtgtccatgaaatacctctcccgccaggagagggagaaggtcaaccagcttcgacaaagggacctcgacctggtgtttgataagatcacccaactcaagaaccagctggggaggaaagaggagctgttgagaggatatgaaaaggacgttgaacagctcaggcggagcaaagtgtccattgagatgtaccagtcgcaggtggcaaagctggaggatgatatctacaaagaggccgaagagaaggccctgctgaaggaggccctggagcgcatggagcaccagctgtgccaggagaagaggatcaacagggccatccggcagcagaagtagatgggagcttccagcccctgcctcgcagacagatggtgaggatgaaagaatgcaggcatccctcgctatctgctgtccactctcgctgtcgtcatacctcaggagccaagtgcttttggatggttggaaccagaaaagcctccctaaagatggaccaagaaagagagatgctgaggaaagagacctccagcaagtccagccagagccttttgcattctaagcccagtggaaagtactagagaaacctcgtcccaccaggcctcatgtgatcctctgtgagttcatgtgactcttctgtgtcatctgtgtcaaaatactgagttgcttttgtaagtctttaaagattgttaccct

SEQ ID NO: 5362 - protein, 107 aa, Homo sapiens
MKYLSRQEREKVNQLRQRDLDLVFDKITQLKNQLGRKEELLRGYEKDVEQLRRSKVSIEMYQSQVAKLEDDIYKEAEEKALLKEALERMEHQLCQEKRINRAIRQQK

SEQ ID NO: 5363 - DNA, 367 bp, Homo sapiens
cgtgacccatgcaggtggtctcctggatgaggaaactgcgcctcagagagttaagaggcgcccaagtgcacacagcggctgagacgagtatttgtagagatggtgaagaacaggatgcagaactcaaattcccaggttggaaccagaaaagcctccctaaagatggaccaagaaagagagatgctgaggaaagagacctccagcaagtccagccagagccttttgcattctaagcccagtggaaagtactagagaaacctcgtcccaccaggcctcatgtgatcctctgtgagttcatgtgactcttctgtgtcatctgtgtcaaaatactgagttgcttttgtaagtctttaaagattgttaccct

SEQ ID NO: 5364 - protein, 74 aa, Homo sapiens; identical to SEQ ID NO: 20

SEQ ID NO: 5365 - DNA, 919 bp, Homo sapiens
ccccagggtcagcaactgtaaaccaaaccccagggaaatagcaagcttcagattctgggtgacgatgacattcaaacaggcccctaaagggagttcaaccatcatgggccccaccatccctgagccattgggataccgaggtgtgaaccaccgggcatctgcagccccttccacttgctctgggaggcgctgcctcgagctaaaacagacgtgtcctccgagaagagcattgttcctcacaggccctgggttgagcagcctccacctctgctggaatctagaacagagacccccaagagactcagcaagatggggcactgtggctcccaaaagctgtgcccccttctcgttgagaaaatggatttttctcaattttcagatgctacctgtttggaatgctgtccctgggaaggcccagcgttccaaatggttagcatctaaaagtggagaaaaatccatttttctttgatgcaaaaggcaaagaggaatctaagctagattttgttcttattctttctgtattgaagagacgagtatttgtagagatggtgaagaacaggatgcagaactcaaattcccaggttggaaccagaaaagcctccctaaagatggaccaagaaagagagatgctgaggaaagagacctccagcaagtccagccagagccttttgcattctaagcccagtggaaagtactagagaaacctcgtcccaccaggcctcatgtgatcctctaccagaagctggagcagccaccttggggatcagcagacaccagcagcaggccaaaggatagtggagtggagggacaagaaggcctgggtgagccttctctgagaatcactgagctctgaaccatgaatgaactgcctacctctgtacttcctgttgtataggacaaagaaatccctatctattta

SEQ ID NO: 5366 - protein, 50 aa, Homo sapiens
MVKNRMQNSNSQVGTRKASLKMDQEREMLRKETSSKSSQSLLHSKPSGKY

SEQ ID NO: 5367 - DNA, 4500 bp, Homo sapiens
gcaggggttccgaggcggacctggggagcagaaacccctgtttagggtgaaccgtggcgggcgccgatggcctcttggaagaggacagactagcagctgcgagggagatgggactgggtttcacccctgaaagggcccctggagacagcggggaaactgacagggagatcatgatgtcgccattttgatggggtccccagaggagagatgtcctccccaacggctcctggacaggactggggaaagagttcagataaggctgctgaacgccggagccttacaactgttaaactcaggcagagctcgggaaatgctgcccggatgggtgagtccttttaacacctcttgggttgatttttctcacaggttttcggggtttgcagagctctgagactgtgaccacagggtgagacctcaagctgcccagtactgtggccccatttcagaggccttgggcctgggccagagatggacgctggggctgccttttactccaagtttttttcttcattggtcattggtcattgggctccaagaaaagcactttttcaggaatcaaagaagcagtgatggaacgaaaagcagagaaagctgatgagccctgaatggaggtgaaacttccaggaaatatcacttgcctcttgattaggggaaatcacttttgaatgaccccgagttttgtgccccaagcatagattctggcagaaagaaacagtctggactgatgacacactacaacatttggtcatgtggaaagaatgatcttcaggaaaaatcacacccttggcaaaggctttttacagaggcaagggcgagccggccaattctgacaatattccagtggcaagggagccaggctgactcagtcatcattacttgtgtttcgtctcttcctcccacatctccttgtataactgtcttttggggaggggtgaagtgatagtaagaaaaacaacagcactttgaaaaagggacagggggagaaacaagaaggggagaaagagttggggagagctcttgggtgatggggagatagcactggggatgttctggagcctgacagaactgtgtggtccctccagctggagatgctgggaaaacaggaagggattcgggagacggcagggatgaagttggctcatgaaatgcagggctcccttagcactttacaaataccagcttacaaacactccacagtcatcaggaaacccttgatggatgctgcacagagatcgaagttcaggagcagcaccaatattcatccggggcaattggagtgagagcagcacaggatcacagcctgatttggcctcagaggctttcttatctcttgcaagatctggaagccatgcaaaaggtgtcatggggagaggcgctgatgtcaggcatttatgggaccactgagtgggggcaaagaggcaggagaaaaagccagtgatgatgggtcgacacctgcaggtagacccatttgcaggttattagaaactagcttatttatccagcttttttttttttttttttctgggcactgggcactggaattctcctggttgtaggcaagctgggggacagggaggtgagagctggaatagtcattctgaagtgtgatatttattggaccccatactaggtgactgatggagaggggctaccactcttccagctaaactccgctctggttgggacccagcaattattttccatagcgaagtgttaataaaatatctgttactcccaacacaacctcctgggggaagggacctgtctgtctgcttcaactttggatcctcagtgcccacatcaggatacctggcctgaggtgagtgctgtagaaatagctgttgaatgaatgcatgagggcctgctctgcctgagggctggggacagattgggtgttttctgtgtcccctccagagcatccggtgacccagttttaggtctcaaggtcactgccaagaaagagaagctgctaaagtgacacctctgtgcacccacatgacttaacacaaaagttaacaggagctcttcaaaaacaagcctctcgagtgtctgtctcctgttttccctgaggacagcatcagtggcatcagataggggttggggctgggtgacctgctggtcctcagccatcactgtggcccagaggtcatttaagcagctctctgcttagcagacaggcagagggaatagatggaaggtacaggtaaacactgcatgtggccaccgcgaggataccccggagcctgggaaacagacagggacgtcgtaaaaccaacacataatggaccagtgcagagacaggcaaaaccagtcagaagaaataggatggtgcctagcccagggacacctgacttaaggtatttttgtttgtttgttttgttttttgagacaggggtctctctctgtcacccaggctggagtgcagtggcatactcactgctcactgcagtctcaacctcccaggcttaagcgatcctcccacctcagcctccttagtagtagctgggactacaggtgtgcaccaacacatccagttcatttttgtatttttttgtagaggtggagtttcgccatgttgctcaggctggtctcgaactgggctcaagcgatctgcccgcctcggcctcccaaagtgtggggattacaggcgtgagccaccacacctcgttgacctaaggtattaactaaagaaagcaggtgattctcaggggggctatgaaagcagcatgcctaagggacaggaacgtaccatgaaggtgttgtcttttgaggctcagtccaggagaagcaggtcttttagacccaatgacaacgctccctagtgtgcaggtgcgtctctctgatgacaaaaggcagtgtgattgtgatattttatatatatatagtttttgttattgttgttttggggacaggtctcactctgtcacccagactggagtgcagtggtaagaatacggctcactgcagcctcaaaatcccagtttcaagcgatcctcccacctcagcttcctgagtagctgtaactacaggcatgcaccacctggctaatttttcaaatttttttatggagactgggtctcattatgttgcccaggctggtctcaaattcctgggtttaggcaatcctcctgcctcggcctccctcaatactgaggttacaggcgtgagccactgcaccaagcctatattttgttttttgttcacggttcctggcttataactcccatggcccttgttacagtaaacacgatctccctccctgacattcttctaccctcctttcacctgcccacagcaggactttaatctgattctgcgtgtaatctcattgcagagagggtcctgccggtattaccctggaggaaggaatgctgcacagaggccgagaggaatttgaacagactggccttgctgggtttttatctctttttgtccaatcccattttgacacagttgtccatgctccaatcatgcttatccaatgaagtttccataacaggcctgagaggacagggttcaggagcttccggacagctgagcaggtggaggttcctggagggtggtgtgccagggagggtgtggaagctctgccccttcccccataccttgtcctatgcattcctttatctgcatccttcattttattttatttttttttgagacggagtcttgctcttgtcgtccaggctggaatgcagtggtgcgcgatcttggcgcactgcaacctccgcctcccgagttcaagagattctcttgcctgagcctcccgagtagctgggattacaggcacccgccaccatccctggctaatttttgtatttttagtagagatggggtttcaccatgttggccaggttagtcttgaactcctgacctcaggtgatccacccacctcagcctcccaaagtgctgagattacaggcgtgagccacagtgcccggcctgtatcctttataatatcttttataaacaaccaatcagtaaatgtgttactctgacttctgtgagctgctctagcaaattaatcaaatccacagaagggtcatgggaaccccaacttgaagcctgtccgtcagaagttccagagtcctggacttgtgactggtgtctgaagtgggcaagtcttggggactgagcccctagcctgtgggatctgatgctatctccacatagatagcaatggaattgaattggcgggcacctggctggtgtctgctgcagagctcattgtttgcttagtggtggagagaagtctccctccacatgtggtcacagcatcttctgtctgtgttgattgcttttgatgttgatcgagagaacaggaaaaagcacattgaatgtctcaatgatgaagatgacaataatctggcttctaggttgttatgcggcaggcaacagctgtgcagatcctaataatctactctgggtgacagtttaacacaggggttggcaaatgtggcccacttcctatttttataaataaagttttattgaaacatg

SEQ ID NO: 5368 - protein, 67 aa, Homo sapiens [sequence omitted]

SEQ ID NO: 5369 - DNA, 922 bp, Homo sapiens
aggaagaggaagagcgcggccggcggcgctgcgctgagagcaggggcccggccaaggcgagtgccgcgcgggccaccatggccacggacgagctggccaccaagctgagccggcggctgcagatggagggcgagggcggcggcgagaccccggagcagcccgggctgaacggggcagcggcggcggcggcgggggcacccgacgaggcggccgaggcgctgggcagcgcggactgcgagctgagcgccaagctgctgcggcgcgcagacctcaaccagggcatcggcgagccccagtcgcccagccgccgcgtcttcaacccctacaccgagttcaaggagttctccaggaagcagatcaaggacatggagaagatgttcaagcagtatgatgccgggcgggacggcttcatcgacctgatggagctaaaactcatgatggagaaacttggggcccctcagacccacctgggcctgaaaaacatgatcaaggaggtggatgaggactttgacagcaagctgagcttccgggagttcctcctgatcttccgcaaggcggcggccggggagcttcaggaggacagcgggctgtgcgtgctggcccgcctctctgagatcgacgtctccagtgagggtgtcaagggggccaagagcttctttgaggccaaggtccaggccatcaacgtgtccagccgcttcgaggaggagatcaaggcagagcaggaggaaaggaagaagcaggcggaggagatgaagcagcggaaagcggccttcaaggagctgcagtccacctttaagtagcgggggctgcagccgaccgccctgctccggccccagtgtggtgggcgagggtggcgcatgggaggccgagcctgaatccttgcctgtgtctgacgggaccactactaaaaacctaaaaatat

SEQ ID NO: 5370 - protein, 240 aa, Homo sapiens; identical to SEQ ID NO: 24

SEQ ID NO: 5371 - DNA, 2281 bp, Homo sapiens
aagaggaagagcgcggccggcggcgctgcgctgagagcaggggcccggccaaggcgagtgccgcgcgggccaccatggccacggacgagctggccaccaagctgagccggcggctgcagatggagggcgagggcggcggcgagaccccggagcagcccgggctgaacggggcagcggcggcggcggcgggggcacccgacgaggcggccgaggcgctgggcagcgcggactgcgagctgagcgccaagctgctgcggcgcgcagacctcaaccagggcatcggcgagccccagtcgcccagccgccgcgtcttcaacccctacaccgagttcaaggagttctccaggaagcagatcaaggacatggagaagatgttcaagcagtatgatgccgggcgggacggcttcatcgacctgatggagctaaaactcatgatggagaaacttggggcccctcagacccacctgggcctgaaaaacatgatcaaggaggtggatgaggactttgacagcaagctgagcttccgggagttcctcctgatcttccgcaaggcggcggccggggagcttcaggaggacagcgggctgtgcgtgctggcccgcctctctgagatcgacgtctccagtgagggtgtcaagggggccaagagcttctttgaggccaaggtccaggccatcaacgtgtccagccgcttcgaggaggagatcaaggcagagcaggaggaaaggaagaagcaggcggaggagatgaagcagcggaaagcggccttcaaggagctgcagtccacctttaagtagcgggggctgcagccgaccgccctgctccggccccagtgtggtgggcgagggtggcgcatgggaggccgagcctgaatccttgcctgtgtctgacgggaccactactaaaaacctaaaaatatctgtgaatggagcaagttcaggggtcttatggaggtggcccggcccctccccgctcccttccactctgcacgaggccgccacaccggcgctggctccctgcccggcccggccctccctggcaatccctgggctctcttgcacccctaactgccccctgcctgctccggcactgccccaggcccagctcctggccctaggtccctcccagccccatgtgcctgccgcctgccctccacacatccctgtccccccaacccgggaacccctgccctcctccagcaggccgcaccgcccctggggccccctgccagccccttcccaggctgggagacggcagaagagatagaatcagggctgcccccacagagtgggacccaaggggctaattggaggcacgaggggacccctccccagggccttttcctcctctgcgtcttccatctactgaaatgggagagggggtggggagcttctgttctggtgaagggacccgggcaggcccccagcaccccatgctgacttggagaaccccagatctctggggcccagccaggcagggtgtgggggcagctgtgccaatctacctcacaggcccaccccctgccgggcatgccgtgggatcatgggcagggaaggctctgggggtcggagacaccgctgcttagcacccccagccagaacaccctgagggtctcggggctctggagagagtggggcgggaggaagaattggcaccttcctagggaaggagacgagcgcttcgccttgattctccgagaagcctccgagaagtgctttaagtgtgtttgcatgcgccaggcggtgggcagcgggggcctgtccagccctctcccgccatccttccccaagtgacgtccactgccttgtcaccagcgacctgcctgtcatgcccaccccctgaggaagcatggggaccctaacaccctggtgccctgcaccagacaggccgtggtcaggcccaggccaccggccgggttctgccacagcttcccacgtgcttgctgacatgcgtgtgcctgtgtgtggtgtctgttgctgtgtcgtgaaactgtgaccatcactcagtccaaacaagtgagtggccctcgaggccacagttatgcaactttcagtgtgtgtcataacgacgtcactgctttttaaactcgataactctttattttagtaaaatgcccaggagtcctggaagctacgcggacttgcagaggttttattttttggccttagaatctgcagaaattaggaggcaccgagcccagcgcagcagcctcggacccggattgcgtttgccttagcggatatgtttatacagatgaatataaaatgtttttttctttggg

SEQ ID NO: 5372 - protein, 240 aa, Homo sapiens; identical to SEQ ID NO: 24

SEQ ID NO: 5373 - DNA, 2427 bp, Homo sapiens
aagaggaagagcgcggccggcggcgctgcgctgagagcaggggcccggccaaggcgagtgccgcgcgggccaccatggccacggacgagctggccaccaagctgagccggcggctgcagatggagggcgagggcggcggcgagaccccggagcagcccgggctgaacggggcagcggcggcggcggcgggggcacccgacgaggcggccgaggcgctgggcagcgcggactgcgagctgagcgccaagctgctgcggcgcgcagacctcaaccagggcatcggcgagccccagtcgcccagccgccgcgtcttcaacccctacaccgagttcaaggagttctccaggaagcagatcaaggacatggagaagatgttcaagcagtatgatgccgggcgggacggcttcatcgacctgatggagctaaaactcatgatggagaaacttggggcccctcagacccacctgggcctgaaaaacatgatcaaggaggtggatgaggactttgacagcaagctgagcttccgggagttcctcctgatcttccgcaaggcggcggccggggagcttcaggaggacagcgggctgtgcgtgctggcccgcctctctgagatcgacgtctccagtgagggtgtcaagggggccaagagcttctttgaggccaaggtccaggccatcaacgtgtccagccgcttcgaggaggagatcaaggcagagcaggaggaaaggaagaagcaggcggaggagatgaagcagcggaaagcggccttcaaggagctgcagtccacctttaagtagcgggggctgcagccgaccgccctgctccggccccagtgtggtgggcgagggtggcgcatgggaggccgagcctgaatccttgcctgtgtctgacgggaccactactaaaaacctaaaaatatctgtgaatggagcaagttcaggggtcttatggaggtggcccggcccctccccgctcccttccactctgcacgaggccgccacaccggcgctggctccctgcccggcccggccctccctggcaatccctgggctctcttgcacccctaactgccccctgcctgctccggcactgccccaggcccagctcctggccctaggtccctcccagccccatgtgcctgccgcctgccctccacacatccctgtccccccaacccgggaacccctgccctcctccagcaggccgcaccgcccctggggccccctgccagccccttcccaggctgggagacggcagaagagatagaatcagggctgcccccacagagtgggacccaaggggctaattggaggcacgaggggacccctccccagggccttttcctcctctgcgtcttccatctactgaaatgggagagggggtggggagcttctgttctggtgaagggacccgggcaggcccccagcaccccatgctgacttggagaaccccagatctctggggcccagccaggcagggtgtgggggcagctgtgccaatctacctcacaggcccaccccctgccgggcatgccgtgggatcatgggcagggaaggctctgggggtcggagacaccgctgcttagcacccccagccagaacaccctgagggtctcggggctctggagagagtggggcgggaggaagaattggcaccttcctagggaaggagacgagcgcttcgccttgattctccgagaagcctccgagaagtgctttaagtgtgtttgcatgcgccaggcggtgggcagcgggggcctgtccagccctctcccgccatccttccccaagtgacgtccactgccttgtcaccagcgacctgcctgtcatgcccaccccctgaggaagcatggggaccctaacaccctggtgccctgcaccagacaggccgtggtcaggcccaggccaccggccgggttctgccacagcttcccacgtgcttgctgacatgcgtgtgcctgtgtgtggtgtctgttgctgtgtcgtgaaactgtgaccatcactcagtccaaacaagtgagtggccctcgaggccacagttatgcaactttcagtgtgtgtcataacgacgtcactgctttttaaactcgataactctttattttagtaaaatgcccaggagtcctggaagctacgcggacttgcagaggttttattttttggccttagaatctgcagaaattaggaggcaccgagcccagcgcagcagcctcggacccggattgcgtttgccttagcggatatgtttatacagatgaatataaaatgtttttttctttgggctttttgcttcttttttcccccccttctcaccttcccttctccccgaccccaccccccaaaaaagctacttcttcattccgtggtacgattattttttttaactaaaggaagataaaattctatattcttatgtgtgtatggttct

SEQ ID NO: 5374 - protein, 240 aa, Homo sapiens; identical to SEQ ID NO: 24

SEQ ID NO: 5375 - DNA, 1109 bp, Homo sapiens
aggtccaggccatcaacgtgtccagccgcttcgaggaggagatcaaggcagagcaggaggaaaggaagaagcaggcggaggagatgaagcagcggaaagcggccttcaaggagctgcagtccacctttaagtagcgggggctgcagccgaccgccctgctccggccccagtgtggtgggcgagggtggcgcatgggaggccgagcctgaatccttgcctgtgtctgacgggaccactactaaaaacctaaaaatatctgtgaatggagcaagttcaggggtcttatggaggtggcccggcccctccccgctcccttccactctgcacgaggccgccacaccggcgctggctccctgcccggcccggccctccctggcaatccctgggctctcttgcacccctaactgccccctgcctgctccggcactgccccaggcccagctcctggccctaggtccctcccagccccatgtgcctgccgcctgccctccacacatccctgtccccccaacccgggaacccctgccctcctccagcaggccgcaccgcccctggggccccctgccagccccttcccaggctgggagacggcagaagagatagaatcagggctgcccccacagagtgggacccaaggggctaattggaggcacgaggggacccctccccagggccttttcctcctctgcgtcttccatctactgaaatgggagagggggtggggagcttctgttctggtgaagggacccgggcaggcccccagcaccccatgctgacttggagaaccccagatctctggggcccagccaggcagggtgtgggggcagctgtgccaatctacctcacaggcccaccccctgccgggcatgccgtgggatcatgggcagggaaggctctgggggtcggagacaccgctgcttagcacccccagccagaacaccctgagggtctcggggctctggagagagtggggcgggaggaagaattggcaccttcctagggaaggagacgagcgcttcgccttgattcttctccccgaccccaccccccaaaaaagctacttcttcattccgtggtacgattattttttttaactaaaggaagataaa

SEQ ID NO: 5376 - protein, 75 aa, Homo sapiens
MPWDHGQGRLWGSETPLLSTPSQNTLRVSGLWREWGGRKNWHLPREGDERFALILLPDPTPQKSYFFIPWYDYFF

SEQ ID NO: 5377 - DNA, 997 bp, Homo sapiens
cctccccgctcccttccactctgcacgaggccgccacaccggcgctggctccctgcccggcccggccctccctggcaatccctgggctctcttgcacccctaactgccccctgcctgctccggcactgccccaggcccccagcaccccatgctgacttggagaaccccagatctctggggcccagccaggcagggtgtgggggcagctgtgccaatctacctcacaggcccaccccctgccgggcatgccgtgggatcatgggcagggaaggctctgggggtcggagacaccgctgcttagcacccccagccagaacaccctgagggtctcggggctctggagagagtggggcgggaggaagaattggcaccttcctagggaaggagacgagcgcttcgccttgattctccgagaagcctccgagaagtgctttaagtgtgtttgcatgcgccaggcggtgggcagcgggggcctgtccagccctctcccgccatccttccccaagtgacgtccactgccttgtcaccagcgacctgcctgtcatgcccaccccctgaggaagcatggggaccctaacaccctggtgccctgcaccagacaggccgtggtcaggcccaggccaccggccgggttctgccacagcttcccacgtgcttgctgacatgcgtgtgcctgtgtgtggtgtctgttgctgtgtcgtgaaactgtgaccatcactcagtccaaacaagtgagtggccctcgaggccacagttatgcaactttcagtgtgtgtcataacgacgtcactgctttttaaactcgataactctttattttagtaaaatgcccaggagtcctggaagctacgcggacttgcagaggttttattttttggccttagaatctgcagaaattaggaggcaccgagcccagcgcagcagcctcggacccggattgcgtttgccttagcggatatgtttatacagatgaatataaaatgtttttttctttggg

SEQ ID NO: 5378 - protein, 87 aa, Homo sapiens
MPWDHGQGRLWGSETPLLSTPSQNTLRVSGLWREWGGRKNWHLPREGDERFALILREASEKCFKCVCMRQAVGSGGLSSPLPPSFPK

SEQ ID NO: 5379 - DNA, 1143 bp, Homo sapiens
cctccccgctcccttccactctgcacgaggccgccacaccggcgctggctccctgcccggcccggccctccctggcaatccctgggctctcttgcacccctaactgccccctgcctgctccggcactgccccaggcccccagcaccccatgctgacttggagaaccccagatctctggggcccagccaggcagggtgtgggggcagctgtgccaatctacctcacaggcccaccccctgccgggcatgccgtgggatcatgggcagggaaggctctgggggtcggagacaccgctgcttagcacccccagccagaacaccctgagggtctcggggctctggagagagtggggcgggaggaagaattggcaccttcctagggaaggagacgagcgcttcgccttgattctccgagaagcctccgagaagtgctttaagtgtgtttgcatgcgccaggcggtgggcagcgggggcctgtccagccctctcccgccatccttccccaagtgacgtccactgccttgtcaccagcgacctgcctgtcatgcccaccccctgaggaagcatggggaccctaacaccctggtgccctgcaccagacaggccgtggtcaggcccaggccaccggccgggttctgccacagcttcccacgtgcttgctgacatgcgtgtgcctgtgtgtggtgtctgttgctgtgtcgtgaaactgtgaccatcactcagtccaaacaagtgagtggccctcgaggccacagttatgcaactttcagtgtgtgtcataacgacgtcactgctttttaaactcgataactctttattttagtaaaatgcccaggagtcctggaagctacgcggacttgcagaggttttattttttggccttagaatctgcagaaattaggaggcaccgagcccagcgcagcagcctcggacccggattgcgtttgccttagcggatatgtttatacagatgaatataaaatgtttttttctttgggctttttgcttcttttttcccccccttctcaccttcccttctccccgaccccaccccccaaaaaagctacttcttcattccgtggtacgattattttttttaactaaaggaagataaaattctatattcttatgtgtgtatggttct

SEQ ID NO: 5380 - protein, 87 aa, Homo sapiens; identical to SEQ ID NO: 5378

SEQ ID NO: 5381 - DNA, 902 bp, Homo sapiens
ggtcagccagtcctgagcacctaaccatgttgggcatcactgtcctcgctgcgctcttggcctgtgcctccagctgtggggtgcccagcttcccgcccaacctatccgcccgagtggtgggaggagaggatgcccggccccacagctggccctggcagatctccctccagtacctcaagaacgacacgtggaggcatacgtgtggcgggactttgattgctagcaacttcgtcctcactgccgcccactgcatcagcaacacccggacctaccgtgtggccgtgggaaagaacaacctggaggtggaagacgaagaaggatccctgtttgtgggtgtggacaccatccacgtccacaagagatggaatgccctcctgttgcgcaatgatattgccctcatcaagcttgcagagcatgtggagctgagtgacaccatccaggtggcctgcctgccagagaaggactccctgctccccaaggactacccctgctatgtcaccggctggggccgcctctggaccaacggccccattgctgataagctgcagcagggcctgcagcccgtggtggatcacgccacgtgctccaggattgactggtggggcttcagggtgaagaaaaccatggtgtgcgctgggggcgatggcgtcatctcagcctgcaatggggactccggtggcccactgaactgccagttggagaacggttcctgggaggtgtttggcatcgtcagctttggctcccggcggggctgcaacacccgcaagaagccggtagtctacacccgggtgtccgcctacatcgactggatcaacgagaaaatgcagctgtgatttgttgctgggagcggcggcagcgagtccctgcaacagcaataaacttccttctcctcgggccacctg

SEQ ID NO: 5382 - protein, 268 aa, Homo sapiens [sequence omitted]

SEQ ID NO: 5383 - DNA, 747 bp, Homo sapiens
cagccagtcctgagcacctaaccatgttgggcatcactgtcctcgctgcgctcttggcctgtgcctccagctgtggggtgcccagcttcccgcccaacctatccgcccgagtggtgggaggagaggatgcccggccccacagctggccctggcagatctccctccagtacctcaagaacgacacgtggaggcatacgtgtggcgggactttgattgctagcaacttcgtcctcactgccgcccactgcatcagcaacacccggacctaccgtgtggccgtgggaaagaacaacctggaggtggaagacgaagaaggatccctgtttgtgggtgtggacaccatccacgtccacaagagatggaatgccctcctgttgcgcaatgatattgccctcatcaagcttgcagagcatgtggagctgagtgacaccatccaggtggcctgcctgccagagaaggactccctgctccccaaggactacccctgctatgtcaccggctggggccgcctctggaggggactccggtggcccactgaactgccagttggagaacggttcctgggaggtgtttggcatcgtcagctttggctcccggcggggctgcaacacccgcaagaagccggtagtctacacccgggtgtccgcctacatcgactggatcaacgagaaaatgcagctgtgatttgttgctgggagcggcggcagcgagtccctgcaacagcaataaacttccttctcctcgggc

SEQ ID NO: 5384 - protein, 240 aa, Homo sapiens
MLGITVLAALLACASSCGVPSFPPNLSARVVGGEDARPHSWPWQISLQYLKNDTWRHTCGGTLIASNFVLTAAHCISNTRTYRVAVGKNNLEVEDEEGSLFVGVDTIHVHKRWNALLLRNDIALIKLAEHVELSDTIQVACLPEKDSLLPKDYPCYVTGWGRLWRGLRWPTELPVGERFLGGVWHRQLWLPAGLQHPQEAGSLHPGVRLHRLDQRENAAVICCWERRQRVPATAINFLLL

SEQ ID NO: 5385 - DNA, 1262 bp, Homo sapiens
cagccagtcctgagcacctaaccatgttgggcatcactgtcctcgctgcgctcttggcctgtgcctccagctgtggggtgcccagcttcccgcccaacctatccgcccgagtggtgggaggagaggatgcccggccccacagctggccctggcagatctccctccagtacctcaagaacgacacgtggaggcatacgtgtggcgggactttgattgctagcaacttcgtcctcactgccgcccactgcatcagcaacacccggacctaccgtgtggccgtgggaaagaacaacctggaggtggaagacgaagaaggatccctgtttgtgggtgtggacaccatccacgtccacaagagatggaatgccctcctgttgcgcaatgatattgccctcatcaagcttgcagagcatgtggagctgagtgacaccatccaggtggcctgcctgccagagaaggactccctgctccccaaggactacccctgctatgtcaccggctggggccgcctctggaccaacggccccattgctgataagctgcagcagggcctgcagcccgtggtggatcacgccacgtgctccaggattgactggtggggcttcagggtgaagaaaaccatggtgtgcgctgggggcgatggcgtcatctcagcctgcaatggggactccggtggcccactgaactgccagttggagaacggttcctgggaggtgtttggcatcgtcagctttggctcccggcggggctgcaacacccgcaagaagccggtagtctacacccgggtgtccgcctacatcgactggatcaacgagaaaatgcagctgtgatttgttgctgggagcggcggcagcgagtccctgcaacagcaataaacttccttctcctcgggccacctggatccttgatttgtgcagcttctgttgcttccctcctctctggtgctgcccctttccacactatggagccaaagagagaccccactcagccagtttcccccaccctgcattagacaggtggggaaacagaggccgggagagagggccaaggaaggagcctcctggggcattaatgggaggcagggggctggggtggagagcccagggagtcctgcgtgaagccggaggggatgggagtgaaggacgcatcagacaccttccccgctccatctcacaagctgcgaacaggtgagaccctgatgaaatcactcgcttctccgatcctacctccaccgaggggcctggcaggtcctcacagccccc

SEQ ID NO: 5386 - protein, 268 aa, Homo sapiens [sequence omitted]

SEQ ID NO: 5387 - DNA, 315 bp, Homo sapiens
ctccaccttctgcctgggggctgggaggcctggaaggggctgctgagagccccaccagccactgatccactagtgtgccattggatgcctaatagccgttgcgtggctagcatatattgagcacttgctaatttgtgttaggctccgcccaaggcttcatatatatgacctcatttcatcctcatggcaaccctgtttattatccctcagttttccccatctgtgaaatggacacctgccctgtctccttactggggagccaatgaaatgacagaggctagtgaatggggcagagagggccattactactactga

SEQ ID NO: 5388 - protein, 43 aa, Homo sapiens [sequence omitted]

SEQ ID NO: 5389 - DNA, 532 bp, Homo sapiens
gcttacagaactcccacggacacaccatgataaggacgctgctgctgtccactttggtggctggagccctcagttgtggggaccccacttacccaccttatgtgactagggtggttggcggtgaagaagcgaggcccaacagctggccctggcaggtctccctgcagtacagctccaatggcaagtggtaccacacctgcggagggtccctgatagccaacagctgggtcctgacggctgcccactgcatcagctcctccaggacctaccgcgtggggctgggccggcacaacctctacgttgcggagtccggctcgctggcagtcagtgtctctaagattgtggtgcacaaggactggaactccaaccaaatctccaaagggttcgtttctgtctgggtgcacttgggggtgaggttgtcagggaacagatgggggtctcacagaggcaagggtctcaaccacaccacaccccctctgcttcttctacagggagggggaaggagctctggcctcttagatgtggaaccagc

SEQ ID NO: 5390 - protein, 167 aa, Homo sapiens
MIRTLLLSTLVAGALSCGDPTYPPYVTRVVGGEEARPNSWPWQVSLQYSSNGKWYHTCGGSLIANSWVLTAAHCISSSRTYRVGLGRHNLYVAESGSLAVSVSKIVVHKDWNSNQISKGFVSVWVHLGVRLSGNRWGSHRGKGLNHTTPPLLLLQGGGRSSGLLDVE

SEQ ID NO: 5391 - DNA, 921 bp, Homo sapiens
cttacagaactcccacggacacaccatgataaggacgctgctgctgtccactttggtggctggagccctcagttgtggggaccccacttacccaccttatgtgactagggtggttggcggtgaagaagcgaggcccaacagctggccctggcaggtctccctgcagtacagctccaatggcaagtggtaccacacctgcggagggtccctgatagccaacagctgggtcctgacggctgcccactgcatcagctcctccaggacctaccgcgtggggctgggccggcacaacctctacgttgcggagtccggctcgctggcagtcagtgtctctaagattgtggtgcacaaggactggaactccaaccaaatctccaaagggaacgacattgccctgctcaaactggctaaccccgtctccctcaccgacaagatccagctggcctgcctccctcctgccggcaccattctacccaacaactacccctgctacgtcacgggctggggaaggctgcagaccaacggggctgttcctgatgtcctgcagcagggccggttgctggttgtggactatgccacctgctccagctctgcctggtggggcagcagcgtgaaaaccagtatgatctgtgctgggggtgatggcgtgatctccagctgcaacggagactctggcgggccactgaactgtcaggcgtctgacggccggtggcaggtgcacggcatcgtcagcttcgggtctcgcctcggctgcaactactaccacaagccctccgtcttcacgcgggtctccaattacatcgactggatcaattcggtgattgcaaataactaaccaaaagaagtccctgggactgtttcagacttggaaaggtcacagaaggaaaataatataataaagtgacaactatgcaaatcaca

SEQ ID NO: 5392 - protein, 269 aa, Homo sapiens; identical to SEQ ID NO: 28

SEQ ID NO: 5393 - DNA, 582 bp, Homo sapiens
acacaccatgataaggacgctgctgctgtccactttggtggctggagccctcagttgtggggaccccacttacccaccttatgtgactagggtggttggcggtgaagaagcgaggcccaacagctggccctggcaggtgagttgaccacactgtacttctccccgtccctgccccactccctttacatctcccctttgcccttccaccatggcgtctattgtgctggcaaagtgagtattgatgggactcagagagcagcacaggcaactttagcaataagatatatttccggctgggcgcagtggctcatgcctgttatcccagcactgtgggaggctgtggtgggcagatcacctgaagtcaggagtttgagaccagcctggccaacatggtgaaacctgcctctactaataatacacaagtagccaggtgtggtggcacacgcctgtaatcccagcaactggggaggcttaggcaggaggatcgcttgaacccaggaggcagaggttgcagtgagctgaaattgcaccactgtactccagcctgggcaacaaagcaagactctgtctcaaaaaaaaaaa

SEQ ID NO: 5394 - protein, 45 aa, Homo sapiens
MIRTLLLSTLVAGALSCGDPTYPPYVTRVVGGEEARPNSWPWQVS

SEQ ID NO: 5395 - DNA, 923 bp, Homo sapiens
cttacagaactcccacggacacaccatgattaggaccctgctgctgtccactttggtggctggagccctcagttgtggggtctccacttacgcgcctgatatgtctaggatgcttggaggtgaagaagcgaggcccaacagctggccctggcaggtctccctgcagtacagctccaatggccagtggtaccacacctgcggagggtccctgatagccaacagctgggtcctgacggctgcccactgcatcagctcctccgggatctaccgcgtgatgctgggccagcataacctctacgttgcagagtccggctcgctggccgtcagtgtctctaagattgtggtgcacaaggactggaactccgaccaggtctccaaagggaacgacattgccctgctcaaactggctaaccccgtctccctcaccgacaagatccagctggcctgcctccctcctgccggcaccattctacccaacaactacccctgctacgtcacgggctggggaaggctgcagaccaacggggctctccctgatgacctgaagcagggccagttgctggttgtggactatgccacctgctccagctctggctggtggggcagcaccgtgaagacgaatatgatctgtgctgggggtgatggcgtgatatgcacctgcaacggagactccggtgggccgctgaactgtcaggcatctgacggccggtgggaggtgcatggcatcggcagcctcacgtcggtccttggttgcaactactactacaagccctccatcttcacgcgggtctccaactacaacgactggatcaattcggtgattgcaaataactaaccaaaagaagtccctgggactgtttcagacttggaaaggtcacagaaggaaaataatattatataaagtgacaactatgcaaatcaca

SEQ ID NO: 5396 - protein, 269 aa, Homo sapiens
MIRTLLLSTLVAGALSCGVSTYAPDMSRMLGGEEARPNSWPWQVSLQYSSNGQWYHTCGGSLIANSWVLTAAHCISSSGIYRVMLGQHNLYVAESGSLAVSVSKIVVHKDWNSDQVSKGNDIALLKLANPVSLTDKIQLACLPPAGTILPNNYPCYVTGWGRLQTNGALPDDLKQGQLLVVDYATCSSSGWWGSTVKTNMICAGGDGVICTCNGDSGGPLNCQASDGRWEVHGIGSLTSVLGCNYYYKPSIFTRVSNYNDWINSVIANN

SEQ ID NO: 5397 - DNA, 756 bp, Homo sapiens
gtagctcttactacaggcgtgcaccattgcacccagccccatttattcatgtcttatttcacttgatccttatcccatcccaggaaggcaacaagggtgagaaccctgtgctcagggaggttaggtctcttgtccaagggaaaacgattatccagagaagagacctggccagaacctgggtcccctgagtcctagccatgcttcccatgtgccttacttgctgaagcacccccggactgcagtgtgaacgtgctgtgcaatagtgacacgctgggcttccccacaaggctccaccctgaggtcttttaagctgtccttatgccagcctatttcttgttttttgggcctttttttttggagatagggtctcactctgtcgcccaggctggagtgcaatgacgcaatcttggcttattgcagtctcgacctcctgggctcaagagatccttccacctcagccacctgtaatcccagctagttaggaggctgaggcaggagaattgcttgaacccgggaggcgcaggttgcagtgagctgagatcaagccactgtactccagcctgtgcaacagagcgagactccatttgaaaaaaaacaaaacaaaaacaatgattacctctggagagtggaattggagatgtaaaatgaggggggacttctacttttttacttgatactctcctgtattcttttaatatttttacaaagagtatgtattaccttctggaaaaagaataaaaactaaggattgctgga

SEQ ID NO: 5398 - protein, 37 aa, Homo sapiens
GLTLSPRLECNDAILAYCSLDLLGSRDPSTSATCNPS

SEQ ID NO: 5399 - DNA, 721 bp, Homo sapiens
agggacttcttttggttagttatttgcaatcacctgcaggacacacacacaagaaaattgtcaggttcacgtaaccacagagctgtgcgtggcagtttcctgtctctgtcctcctgggctaagctactcaagtgagtcacaggcagcccacactacagtagctcctgcctgaggagttcagatgatgtttcggagaaaaagatgcaatcacagcttttcattgacctgttagggtcttcctgtaaagggggtcttagccaggagtcctgtgtgggcttcaggtcagggggccttcgaaccccctaaaaattatatgccaaatgtgcggatggcatatttttagatttcatttgtttctcatcaaaactgctgtttgcaaggcagttatgcactgtggttggggctataactgtttccagaggctgttgatcagtatctgttaaactttttttttttttttttgagacagtcttgctctgttgcccagacgagtacatgagctgagatcaagccactgtactccagcctgtgcaacagagcgagactccatttgaaaaaaaacaaaacaaaaacaatgattacctctggagagtggaattggagatgtaaaatgaggggggacttctacttttttacttgatactctcctgtattcttttaatatttttacaaagagtatgtattaccttctggaaaaagaataaaaactaaggattgctgg

SEQ ID NO: 5400 - protein, 40 aa, Homo sapiens
MCGWHIFRFHLFLIKTAVCKAVMHCGWGYNCFQRLLISIC

SEQ ID NO: 5401 - DNA, 1820 bp, Homo sapiens
gacgcagtggtggattctggagcggggcggtgacgtggggcgggttctggggcggggcggtgacgcggagcgtgttctggggcggcgcggtgatgggaggcttggccctgggggcggggcgaggcgcagaggtgcgtcctgagggcggggcggtgacgcaagagcgactcctgggggcggggcgaggccttggagatgcgtccggaggcggtggggagcgaagactgacccggggccgtgacgcgggggcaggccctggggcgggggcgggtcctggggactggggcgggcggccgaggcccggaagcggactgaggcggcctggagtcttagttggctactcgccatggacgaagcggatcggcggctcctgcggcggtgccggctgcggctggtggaagagctgcaggtggaccagctctgggacgccctgctgagccgcgagctgttcaggccccatatgatcgaggacatccagcgggcaggctctggatctcggcgggatcaggccaggcagctgatcatagatctggagactcgagggagtcaggctcttcctttgttcatctcctgcttagaggacacaggccaggacatgctggcttcgtttctgcgaactaacaggcaagcagcaaagttgtcgaagccaaccctagaaaaccttaccccagtggtgctcagaccagagattcgcaaaccagaggttctcagaccggaaacacccagaccagtggacattggttctggaggatttggtgatgtcgagcagaaagaccatgggtttgaggtggcctccacttcccctgaagacgagtcccctggcagtaaccccgagccagatgccaccccgttccaggaaggtttgaggaccttcgaccagctggacgccatatctagtttgcccacacccagtgacatctttgtgtcctactctactttcccaggttttgtttcctggagggaccccaagagtggctcctggtacgttgagaccctggacgacatctttgagcagtgggctcactctgaagacctgcagtccctcctgcttagggtcgctaatgctgtttcggtgaaagggatttataaacagatgcctggttgctttaatttcctccggaaaaaacttttctttaaaacatcataaggccagggcccctcaccctgccttatcttgcaccccaaagctttcctgccccaggcctgaaagaggctgaggcctggactttcctgcaactcaaggactttgcagccggcacagggtctgctctttctctgccagtgacagacaggctcttagcagcttccagattgacgacaagtgctgaacagtggaggaagagggacagatgaatgccgtggattgcacgtggcctcttgagcagtggctggtccagggctagtgacttgtgtcccatgatccctgtgttgtctctagagcagggattaacctctgcactactgacatgtggggccaggtcaccctttgctgtgaggctgtcctgtacattgtgggatgttcagcactgtcccttgcctcaatgccagtaacgcgtcttcctgagtggtgccaaacaaaaaggttctcaggtgttgccaaatatgtcctggggtataaaactttcctcgcctgacaaccactggtctgtagggatttttggctacacacaaaccagtatcgctcatagatcagcaaaccggggcctactagagtctgaacagctgtaatctatgaattctaagtgaaattttaaaaattgttaatttttcctatattgcattaattttaaaaaataaatctgaggcaaatatggactctc

SEQ ID NO: 5402 - protein, 266 aa, Homo sapiens; identical to SEQ ID NO: 34

SEQ ID NO: 5403 - DNA, 2270 bp, Homo sapiens
gacgcagtggtggattctggagcggggcggtgacgtggggcgggttctggggcggggcggtgacgcggagcgtgttctggggcggcgcggtgatgggaggcttggccctgggggcggggcgaggcgcagaggtgcgtcctgagggcggggcggtgacgcaagagcgactcctgggggcggggcgaggccttggagatgcgtccggaggcggtggggagcgaagactgacccggggccgtgacgcgggggcaggccctggggcgggggcgggtcctggggactggggcgggcggccgaggcccggaagcggactgaggcggcctggagtcttagttggctactcgccatggacgaagcggatcggcggctcctgcggcggtgccggctgcggctggtggaagagctgcaggtggaccagctctgggacgccctgctgagccgcgagctgttcaggccccatatgatcgaggacatccagcgggcaggctctggatctcggcgggatcaggccaggcagctgatcatagatctggagactcgagggagtcaggctcttcctttgttcatctcctgcttagaggacacaggccaggacatgctggcttcgtttctgcgaactaacaggcaagcagcaaagttgtcgaagccaaccctagaaaaccttaccccagtggtgctcagaccagagattcgcaaaccagaggttctcagaccggaaacacccagaccagtggacattggttctggaggatttggtgatgtcggtgctcttgagagtttgaggggaaatgcagatttggcttacatcctgagcatggagccctgtggccactgcctcattatcaacaatgtgaacttctgccgtgagtccgggctccgcacccgcactggctccaacatcgactgtgagaagttgcggcgtcgcttctcctcgctgcatttcatggtggaggtgaagggcgacctgactgccaagaaaatggtgctggctttgctggagctggcgcagcaggaccacggtgctctggactgctgcgtggtggtcattctctctcacggctgtcaggccagccacctgcagttcccaggggctgtctacggcacagatggatgccctgtgtcggtcgagaagattgtgaacatcttcaatgggaccagctgccccagcctgggagggaagcccaagctctttttcatccaggcctgtggtggggagcagaaagaccatgggtttgaggtggcctccacttcccctgaagacgagtcccctggcagtaaccccgagccagatgccaccccgttccaggaaggtttgaggaccttcgaccagctggacgccatatctagtttgcccacacccagtgacatctttgtgtcctactctactttcccaggttttgtttcctggagggaccccaagagtggctcctggtacgttgagaccctggacgacatctttgagcagtgggctcactctgaagacctgcagtccctcctgcttagggtcgctaatgctgtttcggtgaaagggatttataaacagatgcctggttgctttaatttcctccggaaaaaacttttctttaaaacatcataaggccagggcccctcaccctgccttatcttgcaccccaaagctttcctgccccaggcctgaaagaggctgaggcctggactttcctgcaactcaaggactttgcagccggcacagggtctgctctttctctgccagtgacagacaggctcttagcagcttccagattgacgacaagtgctgaacagtggaggaagagggacagatgaatgccgtggattgcacgtggcctcttgagcagtggctggtccagggctagtgacttgtgtcccatgatccctgtgttgtctctagagcagggattaacctctgcactactgacatgtggggccaggtcaccctttgctgtgaggctgtcctgtacattgtgggatgttcagcactgtcccttgcctcaatgccagtaacgcgtcttcctgagtggtgccaaacaaaaaggttctcaggtgttgccaaatatgtcctggggtataaaactttcctcgcctgacaaccactggtctgtagggatttttggctacacacaaaccagtatcgctcatagatcagcaaaccggggcctactagagtctgaacagctgtaatctatgaattctaagtgaaattttaaaaattgttaatttttcctatattgcattaattttaaaaaataaatctgaggcaaatatggactctc

SEQ ID NO: 5404 - protein, 416 aa, Homo sapiens; identical to SEQ ID NO: 32

SEQ ID NO: 5405 - DNA, 425 bp, Homo sapiens
ccacacatggtccctttttggcagcacctctgtctggctggagcaggccctgctctgtctgctttgtagaggtcagagtcttctgtttcatggcacagtggcatcatgggctcaagtaactttggcagcttcaattccaaagacttggcaaaaagaaagcagaagagagaggagaaacctctttttatttttcttgtcaccattctcctgacctccatcaactagaccccgtttccactatcccagagaaagggtggccacagctaaactgcatggagaaaccaaagaatttaaatattggaattttcaaaagtgtagttgtgggggttcgaggaacatttaaagattattggattctttgtagttttgctgtatgctctaattttaaacttaactcctattacagtgttatctgattttcttat

SEQ ID NO: 5406 - protein, 47 aa, Homo sapiens
MEKPKNLNIGIFKSVVVGVRGTFKDYWILCSFAVCSNFKLNSYYSVI

SEQ ID NO: 5407 - DNA, 2713 bp, Homo sapiens
acctttaagcgtcacgtgactcccctcgggcttgtcccctcctctttcccctccccaggcccaggcgagcgctggtgtggacgggaagctcccggcccggcgaactaactggagcacggagctgcagccggttgggccggtgtactttcccgctctggaaaggaagagaaatggaagtgagaaagttgagcatttcctggcagttcttgatagttctggttctgatcctgcaaattctgtctgcgttggattttgacccatacagagtcctaggggtcagccgaacagccagtcaggctgatattaaaaaggcttataagaagctcgcccgggaatggcatcctgacaaaaacaaagatcctggagcagaagacaagttcattcaaatcagtaaggcttacgagattctttcaaatgaagaaaagagatcaaattatgatcaatatggagacgctggagagaaccagggctaccagaagcagcaacagcagcgagagtatcgcttccgccatttccatgaaaatttttattttgatgaatccttttttcacttcccttttaattctgaacggcgggactcaattgacgaaaagtatttattgcacttttcacattatgtgaatgaagtggttccagatagcttcaagaaaccctacctcatcaagatcacctccgattggtgctttagctgcattcatatcgagcctgtgtggaaagaagtcattcaagaactggaagaattgggtgtaggaattggcgtggtccatgctgggtatgagagacgcctggcccatcacctaggggcacacagcacgccctctatcctaggaatcattaacgggaaaatctccttcttccacaatgcagttgtccgtgaaaatctgcgacaatttgtagaaagtcttcttccagggaacttggtggagaaagttacaaataaaaattacgtcagattcctctctggctggcagcaagagaataagcctcatgtccttctgtttgaccaaacgcccattgtgccactgttatacaagttgactgcctttgcatacaaagattatttatcatttggatatgtatatgtgggtttgagagggacggaagagatgacaaggcggtacaacatcaatatctacgcccctaccctcttggtctttaaagaacatataaacaggcctgccgatgttatccaggcccgaggtatgaagaagcaaatcattgacgacttcatcacccgaaacaaatatctattggcagccaggctcaccagccagaagttgttccatgaactctgccctgtgaaacggtcgcatcgacagaggaagtactgtgtggttttattgactgctgagactaccaagttgagcaaaccctttgaggctttcctgtcctttgccctggcaaacactcaagacacagtgagatttgtgcatgtctacagcaatcggcagcaggagtttgccgacaccttactaccagacagtgaggcgtttcaagggaaatcagcggtgtctattttagaaaggcgcaacacagcaggaagggtggtgtataaaaccctggaagacccttggattgggagtgagagtgacaaatttatcctcttgggctatctcgaccagctgcgtaaagatccagctcttctgtcctctgaagcagtgcttcctgacctgaccgatgaacttgcccctgtttttctccttcgatggttctactctgcttctgactacatctcagactgctgggatagcatttttcacaacaactggagggaaatgatgcccctgctgtccctgatcttctctgccctcttcatcctcttcggcactgtcatcgttcaggctttcagcgactctaatgatgagcgagagtcaagccctccagaaaaagaggaagcccaagagaagactgggaaaactgagccaagcttcaccaaagaaaacagcagcaagattcctaaaaaaggctttgtggaggtaactgaactcacagatgtaacatacaccagtaacttggtacgtctgaggccaggccacatgaatgtggtcctcatcctgtcgaattctaccaagaccagcctactacagaaatttgctttggaggtctacacatttactgggagcagctgcctacacttctccttcctgagtctagataaacacagagaatggctagaatacttactagaatttgctcaagatgcagctccaatcccaaaccaatatgataagcatttcatggagcgtgactacactggttatgtactggctctgaatggccacaagaaatacttctgcctcttcaagccccaaaagacagtcgaagaggaggaagccatagggtcgtgcagtgatgttgactcttccctctacctgggtgaatctcgagggaaaccttcctgtggccttggatccaggcccatcaaaggaaagttgagcaagctctctttatggatggaacgcctgctggagggctccttacagaggttttatatcccatcatggcctgaactagactgagaggattttccaaagagatttgaactcttcagactttttaacatgcccctgtgaacaggtattttcaggactcaaactaccacaatgaacagagtatagattttagattgctcttctagaaccatggctagaagaatctttcctttgtcctgttctaacctaggaatgaaaaacaccaccagtttgaatcgcct

SEQ ID NO: 5408 - protein, 782 aa, Homo sapiens; identical to SEQ ID NO: 36

SEQ ID NO: 5409 - DNA, 6305 bp, Homo sapiens
acctttaagcgtcacgtgactcccctcgggcttgtcccctcctctttcccctccccaggcccaggcgagcgctggtgtggacgggaagctcccggcccggcgaactaactggagcacggagctgcagccggttgggccggtgtactttcccgctctggaaaggaagagaaatggaagtgagaaagttgagcatttcctggcagttcttgatagttctggttctgatcctgcaaattctgtctgcgttggattttgacccatacagagtcctaggggtcagccgaacagccagtcaggctgatattaaaaaggcttataagaagctcgcccgggaatggcatcctgacaaaaacaaagatcctggagcagaagacaagttcattcaaatcagtaaggcttacgagattctttcaaatgaagaaaagagatcaaattatgatcaatatggagacgctggagagaaccagggctaccagaagcagcaacagcagcgagagtatcgcttccgccatttccatgaaaatttttattttgatgaatccttttttcacttcccttttaattctgaacggcgggactcaattgacgaaaagtatttattgcacttttcacattatgtgaatgaagtggttccagatagcttcaagaaaccctacctcatcaagatcacctccgattggtgctttagctgcattcatatcgagcctgtgtggaaagaagtcattcaagaactggaagaattgggtgtaggaattggcgtggtccatgctgggtatgagagacgcctggcccatcacctaggggcacacagcacgccctctatcctaggaatcattaacgggaaaatctccttcttccacaatgcagttgtccgtgaaaatctgcgacaatttgtagaaagtcttcttccagggaacttggtggagaaagttacaaataaaaattacgtcagattcctctctggctggcagcaagagaataagcctcatgtccttctgtttgaccaaacgcccattgtgccactgttatacaagttgactgcctttgcatacaaagattatttatcatttggatatgtatatgtgggtttgagagggacggaagagatgacaaggcggtacaacatcaatatctacgcccctaccctcttggtctttaaagaacatataaacaggcctgccgatgttatccaggcccgaggtatgaagaagcaaatcattgacgacttcatcacccgaaacaaatatctattggcagccaggctcaccagccagaagttgttccatgaactctgccctgtgaaacggtcgcatcgacagaggaagtactgtgtggttttattgactgctgagactaccaagttgagcaaaccctttgaggctttcctgtcctttgccctggcaaacactcaagacacagtgagatttgtgcatgtctacagcaatcggcagcaggagtttgccgacaccttactaccagacagtgaggcgtttcaagggaaatcagcggtgtctattttagaaaggcgcaacacagcaggaagggtggtgtataaaaccctggaagacccttggattgggagtgagagtgacaaatttatcctcttgggctatctcgaccagctgcgtaaagatccagctcttctgtcctctgaagcagtgcttcctgacctgaccgatgaacttgcccctgtttttctccttcgatggttctactctgcttctgactacatctcagactgctgggatagcatttttcacaacaactggagggaaatgatgcccctgctgtccctgatcttctctgccctcttcatcctcttcggcactgtcatcgttcaggctttcagcgactctaatgatgagcgagagtcaagccctccagaaaaagaggaagcccaagagaagactgggaaaactgagccaagcttcaccaaagaaaacagcaggtttctctaacaaaacaccagactcacctccccggcacctgccccccagatcctgtcatctgataacgcagcattggaacatagagtgtagagaagaactctcatgcacctcctcccatgtaaactgtggctacagggaaaagtcactgtgatttgtgtttactaagaccctgtaggtgtttagatgccttagatttcataatgaaggcagaaggaaagaagcctatcaggcaagtattcctaaaaaaggctttgtggaggtaactgaactcacagatgtaacatacaccagtaacttggtacgtctgaggccaggccacatgaatgtggtcctcatcctgtcgaattctaccaagaccagcctactacagaaatttgctttggaggtctacacatttactgggagcagctgcctacacttctccttcctgagtctagataaacacagagaatggctagaatacttactagaatttgctcaagatgcagctccaatcccaaaccaatatgataagcatttcatggagcgtgactacactggttatgtactggctctgaatggccacaagaaatacttctgcctcttcaagccccaaaagacagtcgaagaggaggaagccatagggtcgtgcagtgatgttgactcttccctctacctgggtgaatctcgagggaaaccttcctgtggccttggatccaggcccatcaaaggaaagttgagcaagctctctttatggatggaacgcctgctggagggctccttacagaggttttatatcccatcatggcctgaactagactgagaggattttccaaagagatttgaactcttcagactttttaacatgcccctgtgaacaggtattttcaggactcaaactaccacaatgaacagagtatagattttagattgctcttctagaaccatggctagaagaatctttcctttgtcctgttctaacctaggaatgaaaaacaccaccagtttgaatcgcctagatgaaaatcttttcctctgggtgttatttttccccactgaatgccacaccattgaaaatagactgctcatcccctcttcctttcttgtccttgtcccatgctcaccccaccctcctgtcctgtgtcttggagaagcacagggctccaccctgcaagcggcatctggcggaccctcatgagcctgtcgtgcaggccaggtcattggccccttccccaatcccggccctgctgtgctgctgccatggcgcatgctcctaactctgaacaacccacggcagcttctagccccgcatctggaaaaaggcccctttccaagcaatctcacgtttactggttgttctgggagtaagtggctaaatgtatattttgggggtatcccccaacaacagtttgttggccacaggttgaaaaggaaaggaataaacgggagttctgcatgtgagttctcaagaaaaggaaagggaggctgagcagtggctgaagcgatgcagccttgagacacgctgtgagcatcccatccgccgccccagcgctgctggtagccaggggaggggtctgcacagcgagaagtactgtgatgactttgagccgttgacatgtatgtcttcagatgcctttctgcctctgtcgattttagggtatggatattaggagccataacttgtaatcttgttctctgaacgtagagataagctgctataaagccagtagatgttaaactgaagagaaattattcccacctgctatgagtcaggcttaaggaatctcttcaatagtgtctctttagtaaaataccaaacatgtctttgtatcaaggaacttaaaatttctcaacaattgtattttgaacactgttaccctaaaagtgctgtctcttcaagtcatcttttgcaggaagtgagccaagatttgttctagactcccattttgcaaaaggcttactttccacttctgggctgtattttgatgtctcatcttcattgttttcactcttaacttagagctgcttcaccagtattggggtcagactggccatcagcacctgagcgtgctgagctccaggtatagtggaccccagggtgcctcataccagccagttagagagcataccttttatttttcagggcagaatgaccagtggttctgagtttgagtttggacagcttcaaagagtggtccgttcaaatgtcaaagcaaggtgcctttggtggctttgtgaagggtgaaaatcagtgatgggacatttactaagtatttctttttttttttttttttttagttgttgagacagagtttcactcttgttgcccaggctggagtgaaatggtgcgatctcggttcaccgcaacctccacatcccaggttcaagtgattctcctgcctcagcctcctgagtagctaggattacaggcatgtgccaccatgtaattagcccggctaattttgtatttttagtagagacgggatttctccatgttgatcaggctggtcatgaactcctgacctcaggtgatctgcctgcctcagcctcccaaagtgctgctgggattacaggcgtgagccaccactcccggctaagttagtatttctttaatcttaatgctttaaactaagccacttggatcctgaataatttaaatcttgagctacattggtaagtaataaattatttaaggccaggaattcctgtagttttcatggagtctgtagctttattaaaaaataaatcactgccaggcttcattcttccatatgatcctctaaaaatggacacttcctctgaatgctgtatctcatggcacctggtccaactagaaatggtcaaggaattcatttggctccttgatacatcagtcctcaatattactttctaggtattttatggccagattgcttatatgagtggtcttttggtttggtagtaggtttttatttttaatttctgtactaatgaaattcctgactttaatttctgaaaaccaaaaactctccaagtgtatttatttatattttttttaatagagacgaggtcttgctatgttgcccaggctggtcccaaactcctggcctcaagcagtccttccaccttggcctcccaaagtgctgggattatcaatatgagccaccatgccagatttgttcatttttaaacatttttatctcttcaagtcatcttttgatcttttaaaaagcaccttcaaacagctgcaccttccatttgcactaggaaatgaaggtagtgatgggattggcaatgttcctggcagatgtttcagcccaaaagctcttctacagaccggtttagagctggtgccctatgagaatattagggagcttttattttaaattgaactttacccttgtccatgcaaggcattcctcctgaatgcatccatgaatttgtttacttttgcgtcaaacatatgagccattgtcatgctcagcctgtgccaccattgctctgtctgatgtatgtaatcatacaagacctgattttggttctaacacagtggtctttgactatcaacattgatgtttttagagatgggttcttctggttgatacagactatgcattgcgtttagcagatggggtaaaactggcctaaaacaagtctttgcagaatacatgccaatttccaaaaaaaaaaaaaaatttgttgctcaggtgttgcacaatttttatctaacactgaggctatcagctccaactaaacaacatttcagtgggtgaggctgccctaacttccattaggggccatggtctcactgccatcacttattagccatgagaatttggttgtagttttcaggtaggttggtttcttcctcatttgcagcttgttgatacttgttcctttttatttattaacatcccaatcaatttgcagctgccatcattacataaatatttttctgttataaaaagaagtgtgatctgtttttttagtgatttcctttgtttgggaatagagattggaagcacatactcagacctgttttgttaactagaattctttaaaagctgatgccaaacatctttacagaggaactgtagttcacatccacctgtctgacattgtcccctaaaaacaagtgcagtgtggcagctgctgaatctgtctgttcagtttgtcaaggaggataattatgcttgggagagatctgaaaagaaggtgaatattttgcacttttgatactcttaggaacaaataacttatttggcaaattgtttcttttttatgttttgggtgttgtttttgttttttgactttttttgtattgtgaacaggcactgaagctgatgttattttaagattacagaatggaaaaagaaataaactattttaatgtctgat

SEQ ID NO: 5410 - protein, 595 aa, Homo sapiens
MEVRKLSISWQFLIVLVLILQILSALDFDPYRVLGVSRTASQADIKKAYKKLAREWHPDKNKDPGAEDKFIQISKAYEILSNEEKRSNYDQYGDAGENQGYQKQQQQREYRFRHFHENFYFDESFFHFPFNSERRDSIDEKYLLHFSHYVNEVVPDSFKKPYLIKITSDWCFSCIHIEPVWKEVIQELEELGVGIGVVHAGYERRLAHHLGAHSTPSILGIINGKISFFHNAVVRENLRQFVESLLPGNLVEKVTNKNYVRFLSGWQQENKPHVLLFDQTPIVPLLYKLTAFAYKDYLSFGYVYVGLRGTEEMTRRYNINIYAPTLLVFKEHINRPADVIQARGMKKQIIDDFITRNKYLLAARLTSQKLFHELCPVKRSHRQRKYCVVLLTAETTKLSKPFEAFLSFALANTQDTVRFVHVYSNRQQEFADTLLPDSEAFQGKSAVSILERRNTAGRVVYKTLEDPWIGSESDKFILLGYLDQLRKDPALLSSEAVLPDLTDELAPVFLLRWFYSASDYISDCWDSIFHNNWREMMPLLSLIFSALFILFGTVIVQAFSDSNDERESSPPEKEEAQEKTGKTEPSFTKENSRFL

SEQ ID NO: 5411 - DNA, 3598 bp, Homo sapiens
acctttaagcgtcacgtgactcccctcgggcttgtcccctcctctttcccctccccaggcccaggcgagcgctggtgtggacgggaagctcccggcccggcgaactaactggagcacggagctgcagccggttgggccggtgtactttcccgctctggaaaggaagagaaatggaagtgagaaagttgagcatttcctggcagttcttgatagttctggttctgatcctgcaaattctgtctgcgttggattttgacccatacagagtcctaggggtcagccgaacagccagtcaggctgatattaaaaaggcttataagaagctcgcccgggaatggcatcctgacaaaaacaaagatcctggagcagaagacaagttcattcaaatcagtaaggcttacgagattctttcaaatgaagaaaagagatcaaattatgatcaatatggagacgctggagagaaccagggctaccagaagcagcaacagcagcgagagtatcgcttccgccatttccatgaaaatttttattttgatgaatccttttttcacttcccttttaattctgaacggcgggactcaattgacgaaaagtatttattgcacttttcacattatgtgaatgaagtggttccagatagcttcaagaaaccctacctcatcaagatcacctccgattggtgctttagctgcattcatatcgagcctgtgtggaaagaagtcattcaagaactggaagaattgggtgtaggaattggcgtggtccatgctgggtatgagagacgcctggcccatcacctaggggcacacagcacgccctctatcctaggaatcattaacgggaaaatctccttcttccacaatgcagttgtccgtgaaaatctgcgacaatttgtagaaagtcttcttccagggaacttggtggagaaagttacaaataaaaattacgtcagattcctctctggctggcagcaagagaataagcctcatgtccttctgtttgaccaaacgcccattgtgccactgttatacaagttgactgcctttgcatacaaagattatttatcatttggatatgtatatgtgggtttgagagggacggaagagatgacaaggcggtacaacatcaatatctacgcccctaccctcttggtctttaaagaacatataaacaggcctgccgatgttatccaggcccgaggtatgaagaagcaaatcattgacgacttcatcacccgaaacaaatatctattggcagccaggctcaccagccagaagttgttccatgaactctgccctgtgaaacggtcgcatcgacagaggaagtactgtgtggttttattgactgctgagactaccaagttgagcaaaccctttgaggctttcctgtcctttgccctggcaaacactcaagacacagtgagatttgtgcatgtctacagcaatcggcagcaggagtttgccgacaccttactaccagacagtgaggcgtttcaagggaaatcagcggtgtctattttagaaaggcgcaacacagcaggaagggtggtgtataaaaccctggaagacccttggattgggagtgagagtgacaaatttatcctcttgggctatctcgaccagctgcgtaaagatccagctcttctgtcctctgaagcagtgcttcctgacctgaccgatgaacttgcccctgtttttctccttcgatggttctactctgcttctgactacatctcagactgctgggatagcatttttcacaacaactggagggaaatgatgcccctgctgtccctgatcttctctgccctcttcatcctcttcggcactgtcatcgttcaggctttcagcgactctaatgatgagcgagagtcaagccctccagaaaaagaggaagcccaagagaagactgggaaaactgagccaagcttcaccaaagaaaacagcaggtttctctaacaaaacaccagactcacctccccggcacctgccccccagatcctgtcatctgataacgcagcattggaacatagagtgtagagaagaactctcatgcacctcctcccatgtaaactgtggctacagggaaaagtcactgtgatttgtgtttactaagaccctgtaggtgtttagatgccttagatttcataatgaaggcagaaggaaagaagcctatcaggcaagtgttaggtgagccagaagcaggacgtggtttatccctgtaaatgtcaatgaacgtaaccagtcttgtgcgcacacacacccagcagcaagaggccagggtctccgagacaaagaacatagactgaatgatagttgtcttcttcattctgtcctagagcaacttctgcacctgaaaagcaccaccatgccagatttgttcatttttaaacatttttatctcttcaagtcatcttttgatcttttaaaaagcaccttcaaacagctgcaccttccatttgcactaggaaatgaaggtagtgatgggattggcaatgttcctggcagatgtttcagcccaaaagctcttctacagaccggtttagagctggtgccctatgagaatattagggagcttttattttaaattgaactttacccttgtccatgcaaggcattcctcctgaatgcatccatgaatttgtttacttttgcgtcaaacatatgagccattgtcatgctcagcctgtgccaccattgctctgtctgatgtatgtaatcatacaagacctgattttggttctaacacagtggtctttgactatcaacattgatgtttttagagatgggttcttctggttgatacagactatgcattgcgtttagcagatggggtaaaactggcctaaaacaagtctttgcagaatacatgccaatttccaaaaaaaaaaaaaaatttgttgctcaggtgttgcacaatttttatctaacactgaggctatcagctccaactaaacaacatttcagtgggtgaggctgccctaacttccattaggggccatggtctcactgccatcacttattagccatgagaatttggttgtagttttcaggtaggttggtttcttcctcatttgcagcttgttgatacttgttcctttttatttattaacatcccaatcaatttgcagctgccatcattacataaatatttttctgttataaaaagaagtgtgatctgtttttttagtgatttcctttgtttgggaatagagattggaagcacatactcagacctgttttgttaactagaattctttaaaagctgatgccaaacatctttacagaggaactgtagttcacatccacctgtctgacattgtcccctaaaaacaagtgcagtgtggcagctgctgaatctgtctgttcagtttgtcaaggaggataattatgcttgggagagatctgaaaagaaggtgaatattttgcacttttgatactcttaggaacaaataacttatttggcaaattgtttcttttttatgttttgggtgttgtttttgttttttgactttttttgtattgtgaacaggcactgaagctgatgttattttaagattacagaatggaaaaagaaataaactattttaatgtctgat

SEQ ID NO: 5412 - protein, 595 aa, Homo sapiens; identical to SEQ ID NO: 5410

SEQ ID NO: 5413 - DNA, 6073 bp, Homo sapiens
acctttaagcgtcacgtgactcccctcgggcttgtcccctcctctttcccctccccaggcccaggcgagcgctggtgtggacgggaagctcccggcccggcgaactaactggagcacggagctgcagccggttgggccggtgtactttcccgctctggaaaggaagagaaatggaagtgagaaagttgagcatttcctggcagttcttgatagttctggttctgatcctgcaaattctgtctgcgttggattttgacccatacagagtcctaggggtcagccgaacagccagtcaggctgatattaaaaaggcttataagaagctcgcccgggaatggcatcctgacaaaaacaaagatcctggagcagaagacaagttcattcaaatcagtaaggcttacgagattctttcaaatgaagaaaagagatcaaattatgatcaatatggagacgctggagagaaccagggctaccagaagcagcaacagcagcgagagtatcgcttccgccatttccatgaaaatttttattttgatgaatccttttttcacttcccttttaattctgaacggcgggactcaattgacgaaaagtatttattgcacttttcacattatgtgaatgaagtggttccagatagcttcaagaaaccctacctcatcaagatcacctccgattggtgctttagctgcattcatatcgagcctgtgtggaaagaagtcattcaagaactggaagaattgggtgtaggaattggcgtggtccatgctgggtatgagagacgcctggcccatcacctaggggcacacagcacgccctctatcctaggaatcattaacgggaaaatctccttcttccacaatgcagttgtccgtgaaaatctgcgacaatttgtagaaagtcttcttccagggaacttggtggagaaagttacaaataaaaattacgtcagattcctctctggctggcagcaagagaataagcctcatgtccttctgtttgaccaaacgcccattgtgccactgttatacaagttgactgcctttgcatacaaagattatttatcatttggatatgtatatgtgggtttgagagggacggaagagatgacaaggcggtacaacatcaatatctacgcccctaccctcttggtctttaaagaacatataaacaggcctgccgatgttatccaggcccgaggtatgaagaagcaaatcattgacgacttcatcacccgaaacaaatatctattggcagccaggctcaccagccagaagttgttccatgaactctgccctgtgaaacggtcgcatcgacagaggaagtactgtgtggttttattgactgctgagactaccaagttgagcaaaccctttgaggctttcctgtcctttgccctggcaaacactcaagacacagtgagatttgtgcatgtctacagcaatcggcagcaggagtttgccgacaccttactaccagacagtgaggcgtttcaagggaaatcagcggtgtctattttagaaaggcgcaacacagcaggaagggtggtgtataaaaccctggaagacccttggattgggagtgagagtgacaaatttatcctcttgggctatctcgaccagctgcgtaaagatccagctcttctgtcctctgaagcagtgcttcctgacctgaccgatgaacttgcccctgtttttctccttcgatggttctactctgcttctgactacatctcagactgctgggatagcatttttcacaacaactggagggaaatgatgcccctgctgtccctgatcttctctgccctcttcatcctcttcggcactgtcatcgttcaggctttcagcgactctaatgatgagcgagagtcaagccctccagaaaaagaggaagcccaagagaagactgggaaaactgagccaagcttcaccaaagaaaacagcagcaagattcctaaaaaaggctttgtggaggtaactgaactcacagatgtaacatacaccagtaacttggtacgtctgaggccaggccacatgaatgtggtcctcatcctgtcgaattctaccaagaccagcctactacagaaatttgctttggaggtctacacatttactgggagcagctgcctacacttctccttcctgagtctagataaacacagagaatggctagaatacttactagaatttgctcaagatgcagctccaatcccaaaccaatatgataagcatttcatggagcgtgactacactggttatgtactggctctgaatggccacaagaaatacttctgcctcttcaagccccaaaagacagtcgaagaggaggaagccatagggtcgtgcagtgatgttgactcttccctctacctgggtgaatctcgagggaaaccttcctgtggccttggatccaggcccatcaaaggaaagttgagcaagctctctttatggatggaacgcctgctggagggctccttacagaggttttatatcccatcatggcctgaactagactgagaggattttccaaagagatttgaactcttcagactttttaacatgcccctgtgaacaggtattttcaggactcaaactaccacaatgaacagagtatagattttagattgctcttctagaaccatggctagaagaatctttcctttgtcctgttctaacctaggaatgaaaaacaccaccagtttgaatcgcctagatgaaaatcttttcctctgggtgttatttttccccactgaatgccacaccattgaaaatagactgctcatcccctcttcctttcttgtccttgtcccatgctcaccccaccctcctgtcctgtgtcttggagaagcacagggctccaccctgcaagcggcatctggcggaccctcatgagcctgtcgtgcaggccaggtcattggccccttccccaatcccggccctgctgtgctgctgccatggcgcatgctcctaactctgaacaacccacggcagcttctagccccgcatctggaaaaaggcccctttccaagcaatctcacgtttactggttgttctgggagtaagtggctaaatgtatattttgggggtatcccccaacaacagtttgttggccacaggttgaaaaggaaaggaataaacgggagttctgcatgtgagttctcaagaaaaggaaagggaggctgagcagtggctgaagcgatgcagccttgagacacgctgtgagcatcccatccgccgccccagcgctgctggtagccaggggaggggtctgcacagcgagaagtactgtgatgactttgagccgttgacatgtatgtcttcagatgcctttctgcctctgtcgattttagggtatggatattaggagccataacttgtaatcttgttctctgaacgtagagataagctgctataaagccagtagatgttaaactgaagagaaattattcccacctgctatgagtcaggcttaaggaatctcttcaatagtgtctctttagtaaaataccaaacatgtctttgtatcaaggaacttaaaatttctcaacaattgtattttgaacactgttaccctaaaagtgctgtctcttcaagtcatcttttgcaggaagtgagccaagatttgttctagactcccattttgcaaaaggcttactttccacttctgggctgtattttgatgtctcatcttcattgttttcactcttaacttagagctgcttcaccagtattggggtcagactggccatcagcacctgagcgtgctgagctccaggtatagtggaccccagggtgcctcataccagccagttagagagcataccttttatttttcagggcagaatgaccagtggttctgagtttgagtttggacagcttcaaagagtggtccgttcaaatgtcaaagcaaggtgcctttggtggctttgtgaagggtgaaaatcagtgatgggacatttactaagtatttctttttttttttttttttttagttgttgagacagagtttcactcttgttgcccaggctggagtgaaatggtgcgatctcggttcaccgcaacctccacatcccaggttcaagtgattctcctgcctcagcctcctgagtagctaggattacaggcatgtgccaccatgtaattagcccggctaattttgtatttttagtagagacgggatttctccatgttgatcaggctggtcatgaactcctgacctcaggtgatctgcctgcctcagcctcccaaagtgctgctgggattacaggcgtgagccaccactcccggctaagttagtatttctttaatcttaatgctttaaactaagccacttggatcctgaataatttaaatcttgagctacattggtaagtaataaattatttaaggccaggaattcctgtagttttcatggagtctgtagctttattaaaaaataaatcactgccaggcttcattcttccatatgatcctctaaaaatggacacttcctctgaatgctgtatctcatggcacctggtccaactagaaatggtcaaggaattcatttggctccttgatacatcagtcctcaatattactttctaggtattttatggccagattgcttatatgagtggtcttttggtttggtagtaggtttttatttttaatttctgtactaatgaaattcctgactttaatttctgaaaaccaaaaactctccaagtgtatttatttatattttttttaatagagacgaggtcttgctatgttgcccaggctggtcccaaactcctggcctcaagcagtccttccaccttggcctcccaaagtgctgggattatcaatatgagccaccatgccagatttgttcatttttaaacatttttatctcttcaagtcatcttttgatcttttaaaaagcaccttcaaacagctgcaccttccatttgcactaggaaatgaaggtagtgatgggattggcaatgttcctggcagatgtttcagcccaaaagctcttctacagaccggtttagagctggtgccctatgagaatattagggagcttttattttaaattgaactttacccttgtccatgcaaggcattcctcctgaatgcatccatgaatttgtttacttttgcgtcaaacatatgagccattgtcatgctcagcctgtgccaccattgctctgtctgatgtatgtaatcatacaagacctgattttggttctaacacagtggtctttgactatcaacattgatgtttttagagatgggttcttctggttgatacagactatgcattgcgtttagcagatggggtaaaactggcctaaaacaagtctttgcagaatacatgccaatttccaaaaaaaaaaaaaaatttgttgctcaggtgttgcacaatttttatctaacactgaggctatcagctccaactaaacaacatttcagtgggtgaggctgccctaacttccattaggggccatggtctcactgccatcacttattagccatgagaatttggttgtagttttcaggtaggttggtttcttcctcatttgcagcttgttgatacttgttcctttttatttattaacatcccaatcaatttgcagctgccatcattacataaatatttttctgttataaaaagaagtgtgatctgtttttttagtgatttcctttgtttgggaatagagattggaagcacatactcagacctgttttgttaactagaattctttaaaagctgatgccaaacatctttacagaggaactgtagttcacatccacctgtctgacattgtcccctaaaaacaagtgcagtgtggcagctgctgaatctgtctgttcagtttgtcaaggaggataattatgcttgggagagatctgaaaagaaggtgaatattttgcacttttgatactcttaggaacaaataacttatttggcaaattgtttcttttttatgttttgggtgttgtttttgttttttgactttttttgtattgtgaacaggcactgaagctgatgttattttaagattacagaatggaaaaagaaataaactattttaatgtctgat

SEQ ID NO: 5414 - protein, 782 aa, Homo sapiens; identical to SEQ ID NO: 36

SEQ ID NO: 5415 - DNA, 3990 bp, Homo sapiens
acctttaagcgtcacgtgactcccctcgggcttgtcccctcctctttcccctccccaggcccaggcgagcgctggtgtggacgggaagctcccggcccggcgaactaactggagcacggagctgcagccggttgggccggtgtactttcccgctctggaaaggaagagaaatggaagtgagaaagttgagcatttcctggcagttcttgatagttctggttctgatcctgcaaattctgtctgcgttggattttgacccatacagagtcctaggggtcagccgaacagccagtcaggctgatattaaaaaggcttataagaagctcgcccgggaatggcatcctgacaaaaacaaagatcctggagcagaagacaagttcattcaaatcagtaaggcttacgagattctttcaaatgaagaaaagagatcaaattatgatcaatatggagacgctggagagaaccagggctaccagaagcagcaacagcagcgagagtatcgcttccgccatttccatgaaaatttttattttgatgaatccttttttcacttcccttttaattctgaacggcgggactcaattgacgaaaagtatttattgcacttttcacattatgtgaatgaagtggttccagatagcttcaagaaaccctacctcatcaagatcacctccgattggtgctttagctgcattcatatcgagcctgtgtggaaagaagtcattcaagaactggaagaattgggtgtaggaattggcgtggtccatgctgggtatgagagacgcctggcccatcacctaggggcacacagcacgccctctatcctaggaatcattaacgggaaaatctccttcttccacaatgcagttgtccgtgaaaatctgcgacaatttgtagaaagtcttcttccagggaacttggtggagaaagttacaaataaaaattacgtcagattcctctctggctggcagcaagagaataagcctcatgtccttctgtttgaccaaacgcccattgtgccactgttatacaagttgactgcctttgcatacaaagattatttatcatttggatatgtatatgtgggtttgagagggacggaagagatgacaaggcggtacaacatcaatatctacgcccctaccctcttggtctttaaagaacatataaacaggcctgccgatgttatccaggcccgaggtatgaagaagcaaatcattgacgacttcatcacccgaaacaaatatctattggcagccaggctcaccagccagaagttgttccatgaactctgccctgtgaaacggtcgcatcgacagaggaagtactgtgtggttttattgactgctgagactaccaagttgagcaaaccctttgaggctttcctgtcctttgccctggcaaacactcaagacacagtgagatttgtgcatgtctacagcaatcggcagcaggagtttgccgacaccttactaccagacagtgaggcgtttcaagggaaatcagcggtgtctattttagaaaggcgcaacacagcaggaagggtggtgtataaaaccctggaagacccttggattgggagtgagagtgacaaatttatcctcttgggctatctcgaccagctgcgtaaagatccagctcttctgtcctctgaagcagtgcttcctgacctgaccgatgaacttgcccctgtttttctccttcgatggttctactctgcttctgactacatctcagactgctgggatagcatttttcacaacaactggagggaaatgatgcccctgctgtccctgatcttctctgccctcttcatcctcttcggcactgtcatcgttcaggctttcagcgactctaatgatgagcgagagtcaagccctccagaaaaagaggaagcccaagagaagactgggaaaactgagccaagcttcaccaaagaaaacagcaggtttctctaacaaaacaccagactcacctccccggcacctgccccccagatcctgtcatctgataacgcagcattggaacatagagtgtagagaagaactctcatgcacctcctcccatgtaaactgtggctacagggaaaagtcactgtgatttgtgtttactaagaccctgtaggtgtttagatgccttagatttcataatgaaggcagaaggaaagaagcctatcaggcaagtgttaggtgagccagaagcaggacgtggtttatccctgtaaatgtcaatgaacgtaaccagtcttgtgcgcacacacacccagcagcaagaggccagggtctccgagacaaagaacatagactgaatgatagttgtcttcttcattctgtcctagagcaacttctgcacctgaaaagcaccaccatgccagatttgttcatttttaaacatttttatctcttcaagtcatcttttgatcttttaaaaagcaccttcaaacagctgcaccttccatttgcactaggaaatgaaggtagtgatgggattggcaatgttcctggcagatgtttcagcccaaaagctcttctacagaccggtttagagctggtgccctatgagaatattagggagcttttattttaaattgaactttacccttgtccatgcaaggcattcctcctgaatgcatccatgaatttgtttacttttgcgtcaaacatatgagccattgtcatgctcagcctgtgccaccattgctctgtctgatgtatgtaatcatacaagacctgattttggttctaacacagtggtctttgactatcaacattgatgtttttagagatgggttcttctggttgatacagactatgcattgcgtttagcagatggggtaaaactggcctaaaacaagtctttgcagaatacatgccaatttccaaaaaaaaaaaaaaatttgttgctcaggtgttgcacaatttttatctaacactgaggctatcagctccaactaaacaacatttcagtgggtgaggctgccctaacttccattaggggccatggtctcactgccatcacttattagccatgagaatttggttgtagttttcaggtaggttggtttcttcctcatttgcagcttgttgatacttgttcctttttatttattaacatcccaatcaatttgcagctgccatcattacataaatatttttctgttataaaaagaagtgtgatctgtttttttagtgatttcctttgtttgggaatagagattggaagcacatactcagacctgttttgttaactagaattctttaaaagctgatgccaaacatctttacagaggaactgtagttcacatccacctgtctgacattgtcccctaaaaacaagtgcagtgtggcagctgctgaatctgtctgttcagtttgtcaaggaggataattatgcttgggagagatctgaaaagaaggtgaatattttgcacttttgatactcttaggaacaaataacttatttggcaaattgtttcttttttatgttttgggtgttgtttttgttttttgactttttttgtattgtgaacaggcactgaagctgatgttattttaagattacagaatggaaaaagaaataaactattttaatgtctgataattatggggtagcccttgcattgcaagatgatgatttgattatggacacattatcaacagaattgaatttgcatggaactcaagacacgcttaagatcaccacagcataactgcagatttcaggaattacagtcatagagggtacatcaacttgaagagtagattgagtcttacaggaagtgagttacaataagtaacattaagagcccagctgccagcctggccaacatggtgaaaccccgtctctactaaaaatacaaaaattagccgggcgtggtgacgcatgactgtaattctagctactcaggaggctgaggcagcagaattgcttgaacccaggaggcggagattgcagtgagctaagatcgggccactgcactccagcctgggg

SEQ ID NO: 5416 - protein, 595 aa, Homo sapiens; identical to SEQ ID NO: 5410

SEQ ID NO: 5417 - DNA, 3447 bp, Homo sapiens
acctttaagcgtcacgtgactcccctcgggcttgtcccctcctctttcccctccccaggcccaggcgagcgctggtgtggacgggaagctcccggcccggcgaactaactggagcacggagctgcagccggttgggccggtgtactttcccgctctggaaaggaagagaaatggaagtgagaaagttgagcatttcctggcagttcttgatagttctggttctgatcctgcaaattctgtctgcgttggattttgacccatacagagtcctaggggtcagccgaacagccagtcaggctgatattaaaaaggcttataagaagctcgcccgggaatggcatcctgacaaaaacaaagatcctggagcagaagacaagttcattcaaatcagtaaggcttacgagattctttcaaatgaagaaaagagatcaaattatgatcaatatggagacgctggagagaaccagggctaccagaagcagcaacagcagcgagagtatcgcttccgccatttccatgaaaatttttattttgatgaatccttttttcacttcccttttaattctgaacggcgggactcaattgacgaaaagtatttattgcacttttcacattatgtgaatgaagtggttccagatagcttcaagaaaccctacctcatcaagatcacctccgattggtgctttagctgcattcatatcgagcctgtgtggaaagaagtcattcaagaactggaagaattgggtgtaggaattggcgtggtccatgctgggtatgagagacgcctggcccatcacctaggggcacacagcacgccctctatcctaggaatcattaacgggaaaatctccttcttccacaatgcagttgtccgtgaaaatctgcgacaatttgtagaaagtcttcttccagggaacttggtggagaaagttacaaataaaaattacgtcagattcctctctggctggcagcaagagaataagcctcatgtccttctgtttgaccaaacgcccattgtgccactgttatacaagttgactgcctttgcatacaaagattatttatcatttggatatgtatatgtgggtttgagagggacggaagagatgacaaggcggtacaacatcaatatctacgcccctaccctcttggtctttaaagaacatataaacaggcctgccgatgttatccaggcccgaggtatgaagaagcaaatcattgacgacttcatcacccgaaacaaatatctattggcagccaggctcaccagccagaagttgttccatgaactctgccctgtgaaacggtcgcatcgacagaggaagtactgtgtggttttattgactgctgagactaccaagttgagcaaaccctttgaggctttcctgtcctttgccctggcaaacactcaagacacagtgagatttgtgcatgtctacagcaatcggcagcaggagtttgccgacaccttactaccagacagtgaggcgtttcaagggaaatcagcggtgtctattttagaaaggcgcaacacagcaggaagggtggtgtataaaaccctggaagacccttggattgggagtgagagtgacaaatttatcctcttgggctatctcgaccagctgcgtaaagatccagctcttctgtcctctgaagcagtgcttcctgacctgaccgatgaacttgcccctgtttttctccttcgatggttctactctgcttctgactacatctcagactgctgggatagcatttttcacaacaactggagggaaatgatgcccctgctgtccctgatcttctctgccctcttcatcctcttcggcactgtcatcgttcaggctttcagcgactctaatgatgagcgagagtcaagccctccagaaaaagaggaagcccaagagaagactgggaaaactgagccaagcttcaccaaagaaaacagcagcaagattcctaaaaaaggctttgtggaggtaactgaactcacagatgtaacatacaccagtaacttggtacgtctgaggccaggccacatgaatgtggtcctcatcctgtcgaattctaccaagaccagcctactacagaaatttgctttggaggtctacacatttactggaaagatcatacggtggtgaaacttcgacaagatcacagcccatcacgttcaggccttgacaacccctgatgatctccagagcctattcaagatcaagactgagttgtccacagtggtaatcatttacagtgaaaagcacccagtagagcttttcccagcccacgccaccctttgacttggaattggctttccctccataaacatttgttgactgccaggcacactggcaggcctcccagagaaacagataatgcgtacacagtccctgctcctcagggctgcatggtgtggtgatggagacaaggaaaccaatcgtttcaatgtcatgcaccaagggcttcaaggaaagcaagcccagaatggtatcagcataggtaatagcctggagaggtgggtaaggcttccccaaggtggaaatacccagttcaagggataggccaggcagagggaaaaacacaggcaaaggcaccaagatgggaaaagttcaggtagtaagatgtggccagaagacagagtaagtgagggagactgatgggaagagagtgaccttgtctgaaagggttcccatcctgcaggtgaaaagcccagaaggttgctaagcagagggatgaggaatgtgtttcagaaatccctcatgagaagagaggatggttacagccatttcaagagagagagttatggccaccctcctttaagatcttagaggatgtaaggtacttgattaggtttaagcagtcttcattcatttactctcaaatgtctttgagtgcctactatttgtattaggcactgtcctaggctccaaggacaaggtagggaacaatacataggtcctgcccttggggagattctagtcataaccattctgcccccgtgcatttactcccagcacacattattggagctttatttgggtgtttctaaaactcttgagcttaccttggcaggtaattgtgccatcacatgcacttttatttatttatttatttatttatttatttatttatttatttttgagacagggtctctgtcacccgggctatagtgcagtggtatgatcacggctcactgaaggcttgacctgccaggctcagttgatcctcctgccccagcctccctagtagctgggactacaggtgcacactagcacaccagactaatttttatttttatttttagtaaagatgggatctcactatgttgcccaggctgggctgaaactcctgggctcaaacgatccatccaccctggcctcccaaagtgctgaggatagtgcctgagccaccgcgcctggcccgttgtatgcacttttatttaaatttaaccct

SEQ ID NO: 5418 - protein, 655 aa, Homo sapiens
MEVRKLSISWQFLIVLVLILQILSALDFDPYRVLGVSRTASQADIKKAYKKLAREWHPDKNKDPGAEDKFIQISKAYEILSNEEKRSNYDQYGDAGENQGYQKQQQQREYRFRHFHENFYFDESFFHFPFNSERRDSIDEKYLLHFSHYVNEVVPDSFKKPYLIKITSDWCFSCIHIEPVWKEVIQELEELGVGIGVVHAGYERRLAHHLGAHSTPSILGIINGKISFFHNAVVRENLRQFVESLLPGNLVEKVTNKNYVRFLSGWQQENKPHVLLFDQTPIVPLLYKLTAFAYKDYLSFGYVYVGLRGTEEMTRRYNINIYAPTLLVFKEHINRPADVIQARGMKKQIIDDFITRNKYLLAARLTSQKLFHELCPVKRSHRQRKYCVVLLTAETTKLSKPFEAFLSFALANTQDTVRFVHVYSNRQQEFADTLLPDSEAFQGKSAVSILERRNTAGRVVYKTLEDPWIGSESDKFILLGYLDQLRKDPALLSSEAVLPDLTDELAPVFLLRWFYSASDYISDCWDSIFHNNWREMMPLLSLIFSALFILFGTVIVQAFSDSNDERESSPPEKEEAQEKTGKTEPSFTKENSSKIPKKGFVEVTELTDVTYTSNLVRLRPGHMNVVLILSNSTKTSLLQKFALEVYTFTGKIIRW

SEQ ID NO: 5419 - DNA, 2847 bp, Homo sapiens
agttgttccatgaactctgccctgtgaaacggtcgcatcgacagaggaatccagggcactttagcaccaaattgtcagatgtgccagcctgtcctagtggtcagagaagatttccctaagatgtaacatttcagctgagacctgaaggatgagcacagtttagccaggcgtctgggatagactgggtcactttacagaagcacagaatatggaagagtgactgtccctactaaagcattccacacagggtactgtgtggttttattgactgctgagactaccaagttgagcaaaccctttgaggctttcctgtcctttgccctggcaaacactcaagacacagtgagatttgtgcatgtctacagcaatcggcagcaggagtttgccgacaccttactaccagacagtgaggcgtttcaagggaaatcagcggtgtctattttagaaaggcgcaacacagcaggaagggtggtgtataaaaccctggaagacccttggattgggagtgagagtgacaaatttatcctcttgggctatctcgaccagctgcgtaaagatccagctcttctgtcctctgaagcagtgcttcctgacctgaccgatgaacttgcccctgtttttctccttcgatggttctactctgcttctgactacatctcagactgctgggatagcatttttcacaacaactggaaaggatcacccatggctgccattctgggcagcagagcctgggactgtctcttcatcagggaacctctggtgcccagcacagggcctgacacacgtggagtccagtgtatagatgtaaaaggaatgagtgaattaacctcaagagggatacccactcccacctactgatgagaccatgagcccctgaaggacagaaccacatctcattcgtgtttgtgattcctggcacccaacacagcacctgacaaatgacagcctttgatgggtgttggagggaaatgatgcccctgctgtccctgatcttctctgccctcttcatcctcttcggcactgtcatcgttcaggctttcagcgactctaatgatgagcgagagtcaagccctccagaaaaagaggaagcccaagagaagactgggaaaactgagccaagcttcaccaaagaaaacagcaggtttctctaacaaaacaccagactcacctccccggcacctgccccccagatcctgtcatctgataacgcagcattggaacatagagtgtagagaagaactctcatgcacctcctcccatgtaaactgtggctacagggaaaagtcactgtgatttgtgtttactaagaccctgtaggtgtttagatgccttagatttcataatgaaggcagaaggaaagaagcctatcaggcaagtattcctaaaaaaggctttgtggaggtaactgaactcacagatgtaacatacaccagtaacttggtacgtctgaggccaggccacatgaatgtggtcctcatcctgtcgaattctaccaagaccagcctactacagaaatttgctttggaggtctacacatttactgggagcagctgcctacacttctccttcctgagtctagataaacacagagaatggctagaatacttactagaatttgctcaagatgcagctccaatcccaaaccaatatgataagcatttcatggagcgtgactacactggttatgtactggctctgaatggccacaagaaatacttctgcctcttcaagccccaaaagacagtcgaagaggaggaagccatagggtcgtgcagtgatgttgactcttccctctacctgggtgaatctcgagggaaaccttcctgtggccttggatccaggcccatcaaaggaaagttgagcaagctctctttatggatggaacgcctgctggagggctccttacagaggttttatatcccatcatggcctgaactagactgagaggattttccaaagagatttgaactcttcagactttttaacatgcccctgtgaacaggttgaaaaggaaaggaataaacgggagttctgcatgtgagttctcaagaaaaggaaagggaggctgagcagtggctgaagcgatgcagccttgagacacgctgtgagcatcccatccgccgccccagcgctgctggtagccaggggaggggtctgcacagcgagaagtactgtgatgactttgagccgttgacataaagatcatacggtggtgaaacttcgacaagatcacagcccatcacgttcaggccttgacaacccctgatgatctccagagcctattcaagatcaagactgagttgtccacagtggtaatcatttacagtgaaaagcacccagtagagcttttcccagcccacgccaccctttgacttggaattggctttccctccataaacatttgttgactgccaggcacactggcaggcctcccagagaaacagataatgcgtacacagtccctgctcctcagggctgcatggtgtggtgatggagacaaggaaaccaatcgtttcaatgtcatgcaccaagggcttcaaggaaagcaagcccagaatggtatcagcataggtaatagcctggagaggtgaaaagcccagaaggttgctaagcagagggatgaggaatgtgtttcagaaatccctcatgagaagagaggatggttacagccatttcaagagagagagttatggccaccctcctttaagatcttagaggatgtaaggaagaaggttgagaagtacccatctagtaaactataatttccaatatctacttcaaccttttgggtgtcctccaagggcagtaccttgtaaaacacaaggaataaatgttttgtgagtg

SEQ ID NO: 5420 - protein, 160 aa, Homo sapiens [sequence omitted]

SEQ ID NO: 5421 - DNA, 451 bp, Homo sapiens
gtttcaccatgttggtaaggctggtctcgaactcctgacctcaggtgatccacccacctcagcctcccaaagtgctgggattacaggcgtgtgccaccatgcccggccacttccctttttttatattggctgactgaccctttcccactggctaggaaaggatcacccatggctgccattctgggcagcagagcctgggactgtctcttcatcagggaacctctggtgcccagcacagggcctgacacacgtggagtccagtgtatagatgtaaaaggaatgagtgaattaacctcaagagggatacccactcccacctactgatgagaccatgagcccctgaaggacagaaccacatctcattcgtgtttgtgattcctggcacccaacacagcacctgacaaatgacagcctttgatgggtgttggagggaaatgatgcccctgctgtc

SEQ ID NO: 5422 - protein, 51 aa, Homo sapiens
MAAILGSRAWDCLFIREPLVPSTGPDTRGVQCIDVKGMSELTSRGIPTPTY

SEQ ID NO: 5423 - DNA, 513 bp, Homo sapiens
ttattggtgtgaagagtttttggtttgggatttttattttatctttttttagctggagagaagaaattttaacttgagctaatagtttgttaatttggttttaggagggaaatgatgcccctgctgtccctgatcttctctgccctcttcatcctcttcggcactgtcatcgttcaggctttcagcgactctaatgatgagcgagagtcaagccctccagaaaaagaggaagcccaagagaagactgggaaaactgagccaagcttcaccaaagaaaacagcaggtttctctaacaaaacaccagactcacctccccggcacctgccccccagatcctgtcatctgataacgcagcattggaacatagagtgtagagaagaactctcatgcacctcctcccatgtaaactgtggctacagggaaaagtcactgtgatttgtgtttactaagaccctgtaggtgtttagatgccttagatttcataatgaaggcagaaggaaagaagcctatca

SEQ ID NO: 5424 - protein, 60 aa, Homo sapiens
MMPLLSLIFSALFILFGTVIVQAFSDSNDERESSPPEKEEAQEKTGKTEPSFTKENSRFL

SEQ ID NO: 5425 - DNA, 818 bp, Homo sapiens
acggctttccccctatcctgacagcatcttaactcctcaatatttctccacagcaagattcctaaaaaaggctttgtggaggtaactgaactcacagatgtaacatacaccagtaacttggtacgtctgaggccaggccacatgaatgtggtcctcatcctgtcgaattctaccaagaccagcctactacagaaatttgctttggaggtctacacatttactgggagcagctgcctacacttctccttcctgagtctagataaacacagagaatggctagaatacttactagaatttgctcaagatgcagctccaatcccaaaccaatatgataagcatttcatggagcgtgactacactggttatgtactggctctgaatggccacaagaaatacttctgcctcttcaagccccaaaagacagtcgaagaggaggaagccatagggtcgtgcagtgatgttgactcttccctctacctgggtgaatctcgagggaaaccttcctgtggccttggatccaggcccatcaaaggaaagttgagcaagctctctttatggatggaacgcctgctggagggctccttacagaggttttatatcccatcatggcctgaactagactgagaggattttccaaagagatttgaactcttcagactttttaacatgcccctgtgaacaggtattttcaggactcaaactaccacaatgaacagagtatagattttagattgctcttctagaaccatggctagaagaatctttcctttgtcctgttctaacctaggaatgaaaaacaccaccagtttgaatcgcct

SEQ ID NO: 5426 - protein, 160 aa, Homo sapiens [sequence omitted]

SEQ ID NO: 5427 - DNA, 1683 bp, Homo sapiens
acggctttccccctatcctgacagcatcttaactcctcaatatttctccacagcaagattcctaaaaaaggctttgtggaggtaactgaactcacagatgtaacatacaccagtaacttggtacgtctgaggccaggccacatgaatgtggtcctcatcctgtcgaattctaccaagaccagcctactacagaaatttgctttggaggtctacacatttactgggagcagctgcctacacttctccttcctgagtctagataaacacagagaatggctagaatacttactagaatttgctcaagatgcagctccaatcccaaaccaatatgataagcatttcatggagcgtgactacactggttatgtactggctctgaatggccacaagaaatacttctgcctcttcaagccccaaaagacagtcgaagaggaggaagccatagggtcgtgcagtgatgttgactcttccctctacctgggtgaatctcgagggaaaccttcctgtggccttggatccaggcccatcaaaggaaagttgagcaagctctctttatggatggaacgcctgctggagggctccttacagaggttttatatcccatcatggcctgaactagactgagaggattttccaaagagatttgaactcttcagactttttaacatgcccctgtgaacaggtattttcaggactcaaactaccacaatgaacagagtatagattttagattgctcttctagaaccatggctagaagaatctttcctttgtcctgttctaacctaggaatgaaaaacaccaccagtttgaatcgcctagatgaaaatcttttcctctgggtgttatttttccccactgaatgccacaccattgaaaatagactgctcatcccctcttcctttcttgtccttgtcccatgctcaccccaccctcctgtcctgtgtcttggagaagcacagggctccaccctgcaagcggcatctggcggaccctcatgagcctgtcgtgcaggccaggtcattggccccttccccaatcccggccctgctgtgctgctgccatggcgcatgctcctaactctgaacaacccacggcagcttctagccccgcatctggaaaaaggcccctttccaagcaatctcacgtttactggttgttctgggagtaagtggctaaatgtatattttgggggtatcccccaacaacagtttgttggccacaggttgaaaaggaaaggaataaacgggagttctgcatgtgagttctcaagaaaaggaaagggaggctgagcagtggctgaagcgatgcagccttgagacacgctgtgagcatcccatccgccgccccagcgctgctggtagccaggggaggggtctgcacagcgagaagtactgtgatgactttgagccgttgacatgtatgtcttcagatgcctttctgcctctgtcgattttagggtatggatattaggagccataacttgtaatcttgttctctgaacgtagagataagctgctataaagccagtagatgttaaactgaagagaaattattcccacctgctatgagtcaggcttaaggaatctcttcaatagtgtctctttagtaaaataccaaacatgtctttgtatcaaggaacttaaaatttctcaacaattgtattttgaacactgttaccctaa

SEQ ID NO: 5428 - protein, 160 aa, Homo sapiens [sequence omitted]

SEQ ID NO: 5429 - DNA, 2538 bp, Homo sapiens
ggagcagctgcctacacttctccttcctgagtctagataaacacagagaatggctagaatacttactagaatttgctcaagatgcagctccaatcccaaaccaatatgataagcatttcatggagcgtgactacactggttatgtactggctctgaatggccacaagaaatacttctgcctcttcaagccccaaaagacagtcgaagaggaggaagccatagggtcgtgcagtgatgttgactcttccctctacctgggtgaatctcgagggaaaccttcctgtggccttggatccaggcccatcaaaggaaagttgagcaagctctctttatggatggaacgcctgctggagggctccttacagaggttttatatcccatcatggcctgaactagactgagaggattttccaaagagatttgaactcttcagactttttaacatgcccctgtgaacagttgttgagacagagtttcactcttgttgcccaggctggagtgaaatggtgcgatctcggttcaccgcaacctccacatcccaggttcaagtgattctcctgcctcagcctcctgagtagctaggattacaggcatgtgccaccatgtaattagcccggctaattttgtatttttagtagagacgggatttctccatgttgatcaggctggtcatgaactcctgacctcaggtgatctgcctgcctcagcctcccaaagtgctgctgggattacaggcgtgagccaccactcccggctaagttagtatttctttaatcttaatgctttaaactaagccacttggatcctgaataatttaaatcttgagctacattggtaagtaataaattatttaaggccaggaattcctgtagttttcatggagtctgtagctttattaaaaaataaatcactgccaggcttcattcttccatatgatcctctaaaaatggacacttcctctgaatgctgtatctcatggcacctggtccaactagaaatggtcaaggaattcatttggctccttgatacatcagtcctcaatattactttctaggtattttatggccagattgcttatatgagtggtcttttggtttggtagtaggtttttatttttaatttctgtactaatgaaattcctgactttaatttctgaaaaccaaaaactctccaagtgtatttatttatattttttttaatagagacgaggtcttgctatgttgcccaggctggtcccaaactcctggcctcaagcagtccttccaccttggcctcccaaagtgctgggattatcaatatgagccaccatgccagatttgttcatttttaaacatttttatctcttcaagtcatcttttgatcttttaaaaagcaccttcaaacagctgcaccttccatttgcactaggaaatgaaggtagtgatgggattggcaatgttcctggcagatgtttcagcccaaaagctcttctacagaccggtttagagctggtgccctatgagaatattagggagcttttattttaaattgaactttacccttgtccatgcaaggcattcctcctgaatgcatccatgaatttgtttacttttgcgtcaaacatatgagccattgtcatgctcagcctgtgccaccattgctctgtctgatgtatgtaatcatacaagacctgattttggttctaacacagtggtctttgactatcaacattgatgtttttagagatgggttcttctggttgatacagactatgcattgcgtttagcagatggggtaaaactggcctaaaacaagtctttgcagaatacatgccaatttccaaaaaaaaaaaaaaatttgttgctcaggtgttgcacaatttttatctaacactgaggctatcagctccaactaaacaacatttcagtgggtgaggctgccctaacttccattaggggccatggtctcactgccatcacttattagccatgagaatttggttgtagttttcaggtaggttggtttcttcctcatttgcagcttgttgatacttgttcctttttatttattaacatcccaatcaatttgcagctgccatcattacataaatatttttctgttataaaaagaagtgtgatctgtttttttagtgatttcctttgtttgggaatagagattggaagcacatactcagacctgttttgttaactagaattctttaaaagctgatgccaaacatctttacagaggaactgtagttcacatccacctgtctgacattgtcccctaaaaacaagtgcagtgtggcagctgctgaatctgtctgttcagtttgtcaaggaggataattatgcttgggagagatctgaaaagaaggtgaatattttgcacttttgatactcttaggaacaaataacttatttggcaaattgtttcttttttatgttttgggtgttgtttttgttttttgactttttttgtattgtgaacaggcactgaagctgatgttattttaagattacagaatggaaaaagaaataaactattttaatgtctgat

SEQ ID NO: 5430 - protein, 93 aa, Homo sapiens [sequence omitted]

SEQ ID NO: 5431 - DNA, 2930 bp, Homo sapiens
ggagcagctgcctacacttctccttcctgagtctagataaacacagagaatggctagaatacttactagaatttgctcaagatgcagctccaatcccaaaccaatatgataagcatttcatggagcgtgactacactggttatgtactggctctgaatggccacaagaaatacttctgcctcttcaagccccaaaagacagtcgaagaggaggaagccatagggtcgtgcagtgatgttgactcttccctctacctgggtgaatctcgagggaaaccttcctgtggccttggatccaggcccatcaaaggaaagttgagcaagctctctttatggatggaacgcctgctggagggctccttacagaggttttatatcccatcatggcctgaactagactgagaggattttccaaagagatttgaactcttcagactttttaacatgcccctgtgaacagttgttgagacagagtttcactcttgttgcccaggctggagtgaaatggtgcgatctcggttcaccgcaacctccacatcccaggttcaagtgattctcctgcctcagcctcctgagtagctaggattacaggcatgtgccaccatgtaattagcccggctaattttgtatttttagtagagacgggatttctccatgttgatcaggctggtcatgaactcctgacctcaggtgatctgcctgcctcagcctcccaaagtgctgctgggattacaggcgtgagccaccactcccggctaagttagtatttctttaatcttaatgctttaaactaagccacttggatcctgaataatttaaatcttgagctacattggtaagtaataaattatttaaggccaggaattcctgtagttttcatggagtctgtagctttattaaaaaataaatcactgccaggcttcattcttccatatgatcctctaaaaatggacacttcctctgaatgctgtatctcatggcacctggtccaactagaaatggtcaaggaattcatttggctccttgatacatcagtcctcaatattactttctaggtattttatggccagattgcttatatgagtggtcttttggtttggtagtaggtttttatttttaatttctgtactaatgaaattcctgactttaatttctgaaaaccaaaaactctccaagtgtatttatttatattttttttaatagagacgaggtcttgctatgttgcccaggctggtcccaaactcctggcctcaagcagtccttccaccttggcctcccaaagtgctgggattatcaatatgagccaccatgccagatttgttcatttttaaacatttttatctcttcaagtcatcttttgatcttttaaaaagcaccttcaaacagctgcaccttccatttgcactaggaaatgaaggtagtgatgggattggcaatgttcctggcagatgtttcagcccaaaagctcttctacagaccggtttagagctggtgccctatgagaatattagggagcttttattttaaattgaactttacccttgtccatgcaaggcattcctcctgaatgcatccatgaatttgtttacttttgcgtcaaacatatgagccattgtcatgctcagcctgtgccaccattgctctgtctgatgtatgtaatcatacaagacctgattttggttctaacacagtggtctttgactatcaacattgatgtttttagagatgggttcttctggttgatacagactatgcattgcgtttagcagatggggtaaaactggcctaaaacaagtctttgcagaatacatgccaatttccaaaaaaaaaaaaaaatttgttgctcaggtgttgcacaatttttatctaacactgaggctatcagctccaactaaacaacatttcagtgggtgaggctgccctaacttccattaggggccatggtctcactgccatcacttattagccatgagaatttggttgtagttttcaggtaggttggtttcttcctcatttgcagcttgttgatacttgttcctttttatttattaacatcccaatcaatttgcagctgccatcattacataaatatttttctgttataaaaagaagtgtgatctgtttttttagtgatttcctttgtttgggaatagagattggaagcacatactcagacctgttttgttaactagaattctttaaaagctgatgccaaacatctttacagaggaactgtagttcacatccacctgtctgacattgtcccctaaaaacaagtgcagtgtggcagctgctgaatctgtctgttcagtttgtcaaggaggataattatgcttgggagagatctgaaaagaaggtgaatattttgcacttttgatactcttaggaacaaataacttatttggcaaattgtttcttttttatgttttgggtgttgtttttgttttttgactttttttgtattgtgaacaggcactgaagctgatgttattttaagattacagaatggaaaaagaaataaactattttaatgtctgataattatggggtagcccttgcattgcaagatgatgatttgattatggacacattatcaacagaattgaatttgcatggaactcaagacacgcttaagatcaccacagcataactgcagatttcaggaattacagtcatagagggtacatcaacttgaagagtagattgagtcttacaggaagtgagttacaataagtaacattaagagcccagctgccagcctggccaacatggtgaaaccccgtctctactaaaaatacaaaaattagccgggcgtggtgacgcatgactgtaattctagctactcaggaggctgaggcagcagaattgcttgaacccaggaggcggagattgcagtgagctaagatcgggccactgcactccagcctgggg

SEQ ID NO: 5432 - protein, 93 aa, Homo sapiens [sequence omitted]

SEQ ID NO: 5433 - DNA, 2545 bp, Homo sapiens
agttagctgggcgtggtggcgcgtgcctatagtcccagctactcaggaagctgaggcaggggcattgcttgaacccgggaggtggaggttgcagtgagctgaggtcatgccactacactccagcctgggtgacagagtgagactccgtctccaaaaaaaaaaaaaaaaaaaaaaaagcaggccggacccagtggctcacgcctgtaatcccaggcctaggcgggaggatcaccatgttggccaggctggcagctgggctcttaatgttacttattgtaactcacttcctgtaagactcaatctactcttcaagttgatgtaccctctatgactgtaattcctgaaatctgcagttatgctgtggtgatcttaagcgtgtcttgagttccatgcaaattcaattctgttgataatgtgtccataatcaaatcatcatcttgcaatgcaagggctaccccataattatcagacattaaaatagtttatttctttttccattctgtaatcttaaaataacatcagcttcagtgcctgttcacaatacaaaaaaagtcaaaaaacaaaaacaacacccaaaacataaaaaagaaacaatttgccaaataagttatttgttcctaagagtatcaaaagtgcaaaatattcaccttcttttcagatctctcccaagcataattatcctccttgacaaactgaacagacagattcagcagctgccacactgcacttgtttttaggggacaatgtcagacaggtggatgtgaactacagttcctctgtaaagatgtttggcatcagcttttaaagaattctagttaacaaaacaggtctgagtatgtgcttccaatctctattcccaaacaaaggaaatcactaaaaaaacagatcacacttctttttataacagaaaaatatttatgtaatgatggcagctgcaaattgattgggatgttaataaataaaaaggaacaagtatcaacaagctgcaaatgaggaagaaaccaacctacctgaaaactacaaccaaattctcatggctaataagtgatggcagtgagaccatggcccctaatggaagttagggcagcctcacccactgaaatgttgtttagttggagctgatagcctcagtgttagataaaaattgtgcaacacctgagcaacaaatttttttttttttttggaaattggcatgtattctgcaaagacttgttttaggccagttttaccccatctgctaaacgcaatgcatagtctgtatcaaccagaagaacccatctctaaaaacatcaatgttgatagtcaaagaccactgtgttagaaccaaaatcaggtcttgtatgattacatacatcagacagagcaatggtggcacaggctgagcatgacaatggctcatatgtttgacgcaaaagtaaacaaattcatggatgcattcaggaggaatgccttgcatggacaagggtaaagttcaatttaaaataaaagctccctaatattctcatagggcaccagctctaaaccggtctgtagaagagcttttgggctgaaacatctgccaggaacattgccaatcccatcactaccttcatttcctagtgcaaatggaaggtgcagctgtttgaaggtgctttttaaaagatcaaaagatgacttgaagagataaaaatgtttaaaaatgaacaaatctggcatggtggctcatattgataatcccagcactttgggaggccaaggtggaaggactgcttgaggccaggagtttgggaccagcctgggcaacatagcaagacctcgtctctattaaaaaaaatataaataaatacacttggagagtttttggttttcagaaattaaagtcaggaatttcattagtacagaaattaaaaataaaaacctactaccaaaccaaaagaccactcatataagcaatctggccataaaatacctagaaagtaatattgaggactgatgtatcaaggagccaaatgaattccttgaccatttctagttggaccaggtgccatgagatacagcattcagaggaagtgtccatttttagaggatcatatggaagaatgaagcctggcagtgatttattttttaataaagctacagactccatgaaaactacaggaattcctggccttaaataatttattacttaccaatgtagctcaagatttaaattattcaggatccaagtggcttagtttaaagcattaagattaaagaaatactaacttagccgggagtggtggctcacgcctgtaatcccagcagcactttgggaggctgaggcaggcagatcacctgaggtcaggagttcatgaccagcctgatcaacatggagaaatcccgtctctactaaaaatacaaaattagccgggctaattacatggtggcacatgcctgtaatcctagctactcaggaggctgaggcaggagaatcacttgaacctgggatgtggaggttgcggtgaaccgagatcgcaccatttcactccagcctgggcaacaagagtgaaactctgtctcaacaact

SEQ ID NO: 5434 - protein, 74 aa, Homo sapiens
MPLHSSLGDRVRLRLQKKKKKKKSRPDPVAHACNPRPRREDHHVGQAGSWALNVTYCNSLPVRLNLLFKLMYPL

SEQ ID NO: 5435 - DNA, 2437 bp, Homo sapiens
cactccagcctgggtgccagagcaagactccatctcaaaaaaaaaaaaaaaaaatacagaaaaaaaaagcaggccggacccagtggctcacgcctgtaatcccaggcctaggcgggaggatcaccatgttggccaggctggcagctgggctcttaatgttacttattgtaactcacttcctgtaagactcaatctactcttcaagttgatgtaccctctatgactgtaattcctgaaatctgcagttatgctgtggtgatcttaagcgtgtcttgagttccatgcaaattcaattctgttgataatgtgtccataatcaaatcatcatcttgcaatgcaagggctaccccataattatcagacattaaaatagtttatttctttttccattctgtaatcttaaaataacatcagcttcagtgcctgttcacaatacaaaaaaagtcaaaaaacaaaaacaacacccaaaacataaaaaagaaacaatttgccaaataagttatttgttcctaagagtatcaaaagtgcaaaatattcaccttcttttcagatctctcccaagcataattatcctccttgacaaactgaacagacagattcagcagctgccacactgcacttgtttttaggggacaatgtcagacaggtggatgtgaactacagttcctctgtaaagatgtttggcatcagcttttaaagaattctagttaacaaaacaggtctgagtatgtgcttccaatctctattcccaaacaaaggaaatcactaaaaaaacagatcacacttctttttataacagaaaaatatttatgtaatgatggcagctgcaaattgattgggatgttaataaataaaaaggaacaagtatcaacaagctgcaaatgaggaagaaaccaacctacctgaaaactacaaccaaattctcatggctaataagtgatggcagtgagaccatggcccctaatggaagttagggcagcctcacccactgaaatgttgtttagttggagctgatagcctcagtgttagataaaaattgtgcaacacctgagcaacaaatttttttttttttttggaaattggcatgtattctgcaaagacttgttttaggccagttttaccccatctgctaaacgcaatgcatagtctgtatcaaccagaagaacccatctctaaaaacatcaatgttgatagtcaaagaccactgtgttagaaccaaaatcaggtcttgtatgattacatacatcagacagagcaatggtggcacaggctgagcatgacaatggctcatatgtttgacgcaaaagtaaacaaattcatggatgcattcaggaggaatgccttgcatggacaagggtaaagttcaatttaaaataaaagctccctaatattctcatagggcaccagctctaaaccggtctgtagaagagcttttgggctgaaacatctgccaggaacattgccaatcccatcactaccttcatttcctagtgcaaatggaaggtgcagctgtttgaaggtgctttttaaaagatcaaaagatgacttgaagagataaaaatgtttaaaaatgaacaaatctggcatggtggctcatattgataatcccagcactttgggaggccaaggtggaaggactgcttgaggccaggagtttgggaccagcctgggcaacatagcaagacctcgtctctattaaaaaaaatataaataaatacacttggagagtttttggttttcagaaattaaagtcaggaatttcattagtacagaaattaaaaataaaaacctactaccaaaccaaaagaccactcatataagcaatctggccataaaatacctagaaagtaatattgaggactgatgtatcaaggagccaaatgaattccttgaccatttctagttggaccaggtgccatgagatacagcattcagaggaagtgtccatttttagaggatcatatggaagaatgaagcctggcagtgatttattttttaataaagctacagactccatgaaaactacaggaattcctggccttaaataatttattacttaccaatgtagctcaagatttaaattattcaggatccaagtggcttagtttaaagcattaagattaaagaaatactaacttagccgggagtggtggctcacgcctgtaatcccagcagcactttgggaggctgaggcaggcagatcacctgaggtcaggagttcatgaccagcctgatcaacatggagaaatcccgtctctactaaaaatacaaaattagccgggctaattacatggtggcacatgcctgtaatcctagctactcaggaggctgaggcaggagaatcacttgaacctgggatgtggaggttgcggtgaaccgagatcgcaccatttcactccagcctgggcaacaagagtgaaactctgtctcaacaact

SEQ ID NO: 5436 - protein, 55 aa, Homo sapiens [sequence omitted]

SEQ ID NO: 5437 - DNA, 2659 bp, Homo sapiens
agtattgagtatcttcctttaaactacagctcctcctcggacgctgcagtgagctgagatcgcaccactgcactccagcctgggtgccagagcaagactccatctcaaaaaaaaaaaaaaaaaatacagcttctcctatgaggtgcttagggctgcatcttggttttaggaccactgtgaacgtaagtaaaaagtataaagtaacacggagagcctaatgaagaaacttcttgctcagaggcctagaagggtacacaaaatgtcttctaaactagaaaacctaaggctggacacggtggctcatgcctgtaatcccagcactttggggggcggaggtgggcagatcacttgaggtcaggctggcagctgggctcttaatgttacttattgtaactcacttcctgtaagactcaatctactcttcaagttgatgtaccctctatgactgtaattcctgaaatctgcagttatgctgtggtgatcttaagcgtgtcttgagttccatgcaaattcaattctgttgataatgtgtccataatcaaatcatcatcttgcaatgcaagggctaccccataattatcagacattaaaatagtttatttctttttccattctgtaatcttaaaataacatcagcttcagtgcctgttcacaatacaaaaaaagtcaaaaaacaaaaacaacacccaaaacataaaaaagaaacaatttgccaaataagttatttgttcctaagagtatcaaaagtgcaaaatattcaccttcttttcagatctctcccaagcataattatcctccttgacaaactgaacagacagattcagcagctgccacactgcacttgtttttaggggacaatgtcagacaggtggatgtgaactacagttcctctgtaaagatgtttggcatcagcttttaaagaattctagttaacaaaacaggtctgagtatgtgcttccaatctctattcccaaacaaaggaaatcactaaaaaaacagatcacacttctttttataacagaaaaatatttatgtaatgatggcagctgcaaattgattgggatgttaataaataaaaaggaacaagtatcaacaagctgcaaatgaggaagaaaccaacctacctgaaaactacaaccaaattctcatggctaataagtgatggcagtgagaccatggcccctaatggaagttagggcagcctcacccactgaaatgttgtttagttggagctgatagcctcagtgttagataaaaattgtgcaacacctgagcaacaaatttttttttttttttggaaattggcatgtattctgcaaagacttgttttaggccagttttaccccatctgctaaacgcaatgcatagtctgtatcaaccagaagaacccatctctaaaaacatcaatgttgatagtcaaagaccactgtgttagaaccaaaatcaggtcttgtatgattacatacatcagacagagcaatggtggcacaggctgagcatgacaatggctcatatgtttgacgcaaaagtaaacaaattcatggatgcattcaggaggaatgccttgcatggacaagggtaaagttcaatttaaaataaaagctccctaatattctcatagggcaccagctctaaaccggtctgtagaagagcttttgggctgaaacatctgccaggaacattgccaatcccatcactaccttcatttcctagtgcaaatggaaggtgcagctgtttgaaggtgctttttaaaagatcaaaagatgacttgaagagataaaaatgtttaaaaatgaacaaatctggcatggtggctcatattgataatcccagcactttgggaggccaaggtggaaggactgcttgaggccaggagtttgggaccagcctgggcaacatagcaagacctcgtctctattaaaaaaaatataaataaatacacttggagagtttttggttttcagaaattaaagtcaggaatttcattagtacagaaattaaaaataaaaacctactaccaaaccaaaagaccactcatataagcaatctggccataaaatacctagaaagtaatattgaggactgatgtatcaaggagccaaatgaattccttgaccatttctagttggaccaggtgccatgagatacagcattcagaggaagtgtccatttttagaggatcatatggaagaatgaagcctggcagtgatttattttttaataaagctacagactccatgaaaactacaggaattcctggccttaaataatttattacttaccaatgtagctcaagatttaaattattcaggatccaagtggcttagtttaaagcattaagattaaagaaatactaacttagccgggagtggtggctcacgcctgtaatcccagcagcactttgggaggctgaggcaggcagatcacctgaggtcaggagttcatgaccagcctgatcaacatggagaaatcccgtctctactaaaaatacaaaattagccgggctaattacatggtggcacatgcctgtaatcctagctactcaggaggctgaggcaggagaatcacttgaacctgggatgtggaggttgcggtgaaccgagatcgcaccatttcactccagcctgggcaacaagagtgaaactctgtctcaacaact

SEQ ID NO: 5438 - protein, 34 aa, Homo sapiens
MPVIPALWGAEVGRSLEVRLAAGLLMLLIVTHFL

SEQ ID NO: 5439 - DNA, 2465 bp, Homo sapiens
agtattgagtatcttcctttaaactacagctcctcctcggacgctgcagtgagctgagatcgcaccactgcactccagcctgggtgccagagcaagactccatctcaaaaaaaaaaaaaaaaaatacagcttctcctatgaggtgcttagggctgcatcttggttttaggaccactgtgaacgtaagtaaaaagtataaagtaacacggagagcctaatgaagaaacttcttgctcagaggccctctatgactgtaattcctgaaatctgcagttatgctgtggtgatcttaagcgtgtcttgagttccatgcaaattcaattctgttgataatgtgtccataatcaaatcatcatcttgcaatgcaagggctaccccataattatcagacattaaaatagtttatttctttttccattctgtaatcttaaaataacatcagcttcagtgcctgttcacaatacaaaaaaagtcaaaaaacaaaaacaacacccaaaacataaaaaagaaacaatttgccaaataagttatttgttcctaagagtatcaaaagtgcaaaatattcaccttcttttcagatctctcccaagcataattatcctccttgacaaactgaacagacagattcagcagctgccacactgcacttgtttttaggggacaatgtcagacaggtggatgtgaactacagttcctctgtaaagatgtttggcatcagcttttaaagaattctagttaacaaaacaggtctgagtatgtgcttccaatctctattcccaaacaaaggaaatcactaaaaaaacagatcacacttctttttataacagaaaaatatttatgtaatgatggcagctgcaaattgattgggatgttaataaataaaaaggaacaagtatcaacaagctgcaaatgaggaagaaaccaacctacctgaaaactacaaccaaattctcatggctaataagtgatggcagtgagaccatggcccctaatggaagttagggcagcctcacccactgaaatgttgtttagttggagctgatagcctcagtgttagataaaaattgtgcaacacctgagcaacaaatttttttttttttttggaaattggcatgtattctgcaaagacttgttttaggccagttttaccccatctgctaaacgcaatgcatagtctgtatcaaccagaagaacccatctctaaaaacatcaatgttgatagtcaaagaccactgtgttagaaccaaaatcaggtcttgtatgattacatacatcagacagagcaatggtggcacaggctgagcatgacaatggctcatatgtttgacgcaaaagtaaacaaattcatggatgcattcaggaggaatgccttgcatggacaagggtaaagttcaatttaaaataaaagctccctaatattctcatagggcaccagctctaaaccggtctgtagaagagcttttgggctgaaacatctgccaggaacattgccaatcccatcactaccttcatttcctagtgcaaatggaaggtgcagctgtttgaaggtgctttttaaaagatcaaaagatgacttgaagagataaaaatgtttaaaaatgaacaaatctggcatggtggctcatattgataatcccagcactttgggaggccaaggtggaaggactgcttgaggccaggagtttgggaccagcctgggcaacatagcaagacctcgtctctattaaaaaaaatataaataaatacacttggagagtttttggttttcagaaattaaagtcaggaatttcattagtacagaaattaaaaataaaaacctactaccaaaccaaaagaccactcatataagcaatctggccataaaatacctagaaagtaatattgaggactgatgtatcaaggagccaaatgaattccttgaccatttctagttggaccaggtgccatgagatacagcattcagaggaagtgtccatttttagaggatcatatggaagaatgaagcctggcagtgatttattttttaataaagctacagactccatgaaaactacaggaattcctggccttaaataatttattacttaccaatgtagctcaagatttaaattattcaggatccaagtggcttagtttaaagcattaagattaaagaaatactaacttagccgggagtggtggctcacgcctgtaatcccagcagcactttgggaggctgaggcaggcagatcacctgaggtcaggagttcatgaccagcctgatcaacatggagaaatcccgtctctactaaaaatacaaaattagccgggctaattacatggtggcacatgcctgtaatcctagctactcaggaggctgaggcaggagaatcacttgaacctgggatgtggaggttgcggtgaaccgagatcgcaccatttcactccagcctgggcaacaagagtgaaactctgtctcaacaact

SEQ ID NO: 5440 - protein, 55 aa, Homo sapiens [sequence omitted]

SEQ ID NO: 5441 - DNA, 2448 bp, Homo sapiens
agcctcctgagtacctgggattacaggtgcctgccaccacgcctggctaatttttgtatttttagtagagacagggtttcaccacattggccaggctggtcttgaactcctgacctaaggtgatccgcccgcctcagcctccttaaagtgctgggattacaggcatgagccaccgcacccagccgctttttaaaattttgatgatctgtcttcaagttgatgtaccctctatgactgtaattcctgaaatctgcagttatgctgtggtgatcttaagcgtgtcttgagttccatgcaaattcaattctgttgataatgtgtccataatcaaatcatcatcttgcaatgcaagggctaccccataattatcagacattaaaatagtttatttctttttccattctgtaatcttaaaataacatcagcttcagtgcctgttcacaatacaaaaaaagtcaaaaaacaaaaacaacacccaaaacataaaaaagaaacaatttgccaaataagttatttgttcctaagagtatcaaaagtgcaaaatattcaccttcttttcagatctctcccaagcataattatcctccttgacaaactgaacagacagattcagcagctgccacactgcacttgtttttaggggacaatgtcagacaggtggatgtgaactacagttcctctgtaaagatgtttggcatcagcttttaaagaattctagttaacaaaacaggtctgagtatgtgcttccaatctctattcccaaacaaaggaaatcactaaaaaaacagatcacacttctttttataacagaaaaatatttatgtaatgatggcagctgcaaattgattgggatgttaataaataaaaaggaacaagtatcaacaagctgcaaatgaggaagaaaccaacctacctgaaaactacaaccaaattctcatggctaataagtgatggcagtgagaccatggcccctaatggaagttagggcagcctcacccactgaaatgttgtttagttggagctgatagcctcagtgttagataaaaattgtgcaacacctgagcaacaaatttttttttttttttggaaattggcatgtattctgcaaagacttgttttaggccagttttaccccatctgctaaacgcaatgcatagtctgtatcaaccagaagaacccatctctaaaaacatcaatgttgatagtcaaagaccactgtgttagaaccaaaatcaggtcttgtatgattacatacatcagacagagcaatggtggcacaggctgagcatgacaatggctcatatgtttgacgcaaaagtaaacaaattcatggatgcattcaggaggaatgccttgcatggacaagggtaaagttcaatttaaaataaaagctccctaatattctcatagggcaccagctctaaaccggtctgtagaagagcttttgggctgaaacatctgccaggaacattgccaatcccatcactaccttcatttcctagtgcaaatggaaggtgcagctgtttgaaggtgctttttaaaagatcaaaagatgacttgaagagataaaaatgtttaaaaatgaacaaatctggcatggtggctcatattgataatcccagcactttgggaggccaaggtggaaggactgcttgaggccaggagtttgggaccagcctgggcaacatagcaagacctcgtctctattaaaaaaaatataaataaatacacttggagagtttttggttttcagaaattaaagtcaggaatttcattagtacagaaattaaaaataaaaacctactaccaaaccaaaagaccactcatataagcaatctggccataaaatacctagaaagtaatattgaggactgatgtatcaaggagccaaatgaattccttgaccatttctagttggaccaggtgccatgagatacagcattcagaggaagtgtccatttttagaggatcatatggaagaatgaagcctggcagtgatttattttttaataaagctacagactccatgaaaactacaggaattcctggccttaaataatttattacttaccaatgtagctcaagatttaaattattcaggatccaagtggcttagtttaaagcattaagattaaagaaatactaacttagccgggagtggtggctcacgcctgtaatcccagcagcactttgggaggctgaggcaggcagatcacctgaggtcaggagttcatgaccagcctgatcaacatggagaaatcccgtctctactaaaaatacaaaattagccgggctaattacatggtggcacatgcctgtaatcctagctactcaggaggctgaggcaggagaatcacttgaacctgggatgtggaggttgcggtgaaccgagatcgcaccatttcactccagcctgggcaacaagagtgaaactctgtctcaacaact

SEQ ID NO: 5442 - protein, 40 aa, Homo sapiens
MSHRTQPLFKILMICLQVDVPSMTVIPEICSYAVVILSVS

SEQ ID NO: 5443 - DNA, 329 bp, Homo sapiens
aaaaaaaaagcaggccggacccagtggctcacgcctgtaatcccaggcctaggcgggaggatcaccatgttggccaggctggcagctgggctcttaatgttacttattgtaactcacttcctgtaagactcaatctactcttcaagttgatgtaccctctatgactgtaattcctgaaatctgcagttatgctgtggtgatcttaagcgtgtcttgagttccatgcaaattcaattctgttgataatgtgtccataatcaaatcatcatcttgcaatgcaagggctaccccataattatcagacattaaaatagtttatttctttttcc

SEQ ID NO: 5444 - DNA, 496 bp, Homo sapiens
agttagctgggcgtggtggcgcgtgcctatagtcccagctactcaggaagctgaggcaggggcattgcttgaacccgggaggtggaggttgcagtgagctgaggtcatgccactacactccagcctgggtgacagagtgagactccgtctccaaaaaaaaaaaaaaaaaaaaaaaagcaggccggacccagtggctcacgcctgtaatcccaggcctaggcgggaggatcaccatgttggccaggctggcagctgggctcttaatgttacttattgtaactcacttcctgtaagactcaatctactcttcaagttgatgtaccctctatgactgtaattcctgaaatctgcagttatgctgtggtgatcttaagcgtgtcttgagttccatgcaaattcaattctgttgataatgtgtccataatcaaatcatcatcttgcaatgcaagggctaccccataattatcagacattaaaatagtttatttctttttcc

SEQ ID NO: 5445 - protein, 74 aa, Homo sapiens; identical to SEQ ID NO: 5434

SEQ ID NO: 5446 - DNA, 610 bp, Homo sapiens
agtattgagtatcttcctttaaactacagctcctcctcggacgctgcagtgagctgagatcgcaccactgcactccagcctgggtgccagagcaagactccatctcaaaaaaaaaaaaaaaaaatacagcttctcctatgaggtgcttagggctgcatcttggttttaggaccactgtgaacgtaagtaaaaagtataaagtaacacggagagcctaatgaagaaacttcttgctcagaggcctagaagggtacacaaaatgtcttctaaactagaaaacctaaggctggacacggtggctcatgcctgtaatcccagcactttggggggcggaggtgggcagatcacttgaggtcaggctggcagctgggctcttaatgttacttattgtaactcacttcctgtaagactcaatctactcttcaagttgatgtaccctctatgactgtaattcctgaaatctgcagttatgctgtggtgatcttaagcgtgtcttgagttccatgcaaattcaattctgttgataatgtgtccataatcaaatcatcatcttgcaatgcaagggctaccccataattatcagacattaaaatagtttatttctttttcc

SEQ ID NO: 5447 - protein, 34 aa, Homo sapiens; identical to SEQ ID NO: 5438

SEQ ID NO: 5448 - DNA, 1944 bp, Homo sapiens
tgacctttgagccggctcgggttccggctctggcgcgtgcacactcgcctcgccgttcgggaccagccagatcgcggcggcctcgcgggcggtttggtcggtgaggtcttggccgcgcgcggcaatgctgaggctgctggcgtccgggtgcgcccggggcccggggcccggcgtgggcgcgcgtcctgccgcagggctctttcatccggggcgccgccagagccgccaggcttccgacgcgccccggaaccagccccccagccccgagttcgtggcccggccggtgggcgtctgctccatgatgcgcctgccggtgcagacctcccccgaggggctggacgctgccttcatcggggtgcccctggatactgggacctccaaccggcctggggcgagattcggacctcgccgcatccgggaagaatcagtgatgcttgggacagtcaatcctagcacgggggccctccccttccagtccctcatggttgcagacctaggcgatgtgaatgtcaatctttacaaccttcaggacagctgccggcgaattcaagaggcctatgagaaaattgtagcagctggctgtattcctctgaccttgggtggagatcacacaatcacatatcccatattgcaagcgatggcaaaaaagcatggcccagtggggctgctgcacgtggatgcgcacacggacacgaccgacaaggccctaggagagaagctctaccacggggcgcccttccgccggtgtgtggatgagggtctcctggactgtaagcgtgtggtgcagattggcatccggggctcttccacgaccttggatccctacagatacaaccggagccagggcttccgggtagtcctggctgaagactgctggatgaagtcgctggttcctctgatgggggaagtcaggcagcagatgggaggcaaacccatttatatcagctttgatattgacgctctggatcctgcctatgcgccagggacagggacacctgaaattgctggtctcactcctagtcaggctctggagatcatcaggggttgtcaaggcctgaacgtgatgggctgtgatcttgtcgaagtttcaccaccgtatgatctttctgggaacacagccctgctggcggctaacctgctgtttgagatgctatgtgctctccccaaagtgacaaccgtctgagtcttgtgctcttcaagacaaaacagattgcgtcgctgacaagttctcaagaagaacttatgagtaagcagtctgagaactaaagagtttatgccaagaaaactttctgctgaaagtgtcattgctggctgtgaagtcgggataatcagtagaattctcacccaaacagcaacatttctaaggaacttggattaattgggggaaaaaaaaaggagtacttgtactgctttgattttttttcctttgatgaaagatggaggataaaggggaagtgaggagaatttctttcaagattatctaaacattagaaacatgacatttaaaaaaactatgaaataatactgtataagcattccatatttctatatcttccttttaaacatttttttttttgagatagagttttgcttgtcacccaggctggagtgcaatggcatgatctcggttcattgcaacctccgcctcccgagttcaatcgattctcctgcctcagcctgtaatcccagcactttggggggcggaggtgggcagatcacttgaggtcaggagttcgagaccagcctggccaacatggtgaaaacccatctctactgaaaatacagaagttagctgggcgtggtggcgcgtgcctatagtcccagctactcaggaagctgaggcaggggcattgcttgaacccgggaggtggaggttgcagtgagctgaggtcatgccactacactccagcctgggtgacagagtgagactccgtctccaaaaaa

SEQ ID NO: 5449 - protein, 352 aa, Homo sapiens; identical to SEQ ID NO: 38

SEQ ID NO: 5450 - DNA, 2272 bp, Homo sapiens
agatcgcggcggcctcgcgggcggtttggtcggtgaggtcttggccgcgcgcggcaatgctgaggctgctggcgtccgggtgcgcccggggcccggggcccggcgtgggcgcgcgtcctgccgcagggctctttcatccggggcgccgccagagccgccaggcttccgacgcgccccggaaccagccccccagccccgagttcgtggcccggccggtgggcgtctgctccatgatgcgcctgccggtgcagacctcccccgaggggctggacgctgccctccccttccagtccctcatggttgcagacctaggcgatgtgaatgtcaatctttacaaccttcaggacagctgccggcgaattcaagaggcctatgagaaaattgtagcagctggctgtattcctctgaccttgggtggagatcacacaatcacatatcccatattgcaagcgatggcaaaaaagcatggcccagtggggctgctgcacgtggatgcgcacacggacacgaccgacaaggccctaggagagaagctctaccacggggcgcccttccgccggtgtgtggatgagggtctcctggactgtaagcgtgtggtgcagattggcatccggggctcttccacgaccttggatccctacagatacaaccggagccagggcttccgggtagtcctggctgaagactgctggatgaagtcgctggttcctctgatgggggaagtcaggcagcagatgggaggcaaacccatttatatcagctttgatattgacgctctggatcctgcctatgcgccagggacagggacacctgaaattgctggtctcactcctagtcaggctctggagatcatcaggggttgtcaaggcctgaacgtgatgggctgtgatcttgtcgaagtttcaccaccgtatgatctttctgggaacacagccctgctggcggctaacctgctgtttgagatgctatgtgctctccccaaagtgacaaccgtctgagtcttgtgctcttcaagacaaaacagattgcgtcgctgacaagttctcaagaagaacttatgagtaagcagtctgagaactaaagagtttatgccaagaaaactttctgctgaaagtgtcattgctggctgtgaagtcgggataatcagtagaattctcacccaaacagcaacatttctaaggaacttggattaattgggggaaaaaaaaaggagtacttgtactgctttgattttttttcctttgatgaaagatggaggataaaggggaagtgaggagaatttctttcaagattatctaaacattagaaacatgacatttaaaaaaactatgaaataatactgtataagcattccatatttctatatcttccttttaaacatttttttttttgagatagagttttgcttgtcacccaggctggagtgcaatggcatgatctcggttcattgcaacctccgcctcccgagttcaatcgattctcctgcctcagcctcctgagtacctgggattacaggtgcctgccaccacgcctggctaatttttgtatttttagtagagacagggtttcaccacattggccaggctggtcttgaactcctgacctaaggtgatccgcccgcctcagcctccttaaagtgctgggattacaggcatgagccaccgcacccagccgctttttaaaattttgatgatctgcttcctagagtattgagtatcttcctttaaactacagctcctcctcggacgctgcagtgagctgagatcgcaccactgcactccagcctgggtgccagagcaagactccatctcaaaaaaaaaaaaaaaaaatacagcttctcctatgaggtgcttagggctgcatcttggttttaggaccactgtgaacgtaagtaaaaagtataaagtaacacggagagcctaatgaagaaacttcttgctcagaggcctagaagggtacacaaaatgtcttctaaactagaaaacctaaggctggacacggtggctcatgcctgtaatcccagcactttggggggcggaggtgggcagatcacttgaggtcaggagttcgagaccagcctggccaacatggtgaaaacccatctctactgaaaatacagaagttagctgggcgtggtggcgcgtgcctatagtcccagctactcaggaagctgaggcaggggcattgcttgaacccgggaggtggaggttgcagtgagctgaggtcatgccactacactccagcctgggtgacagagtgagactccgtctcc

SEQ ID NO: 5451 - protein, 313 aa, Homo sapiens
MLRLLASGCARGPGPGVGARPAAGLFHPGRRQSRQASDAPRNQPPSPEFVARPVGVCSMMRLPVQTSPEGLDAALPFQSLMVADLGDVNVNLYNLQDSCRRIQEAYEKIVAAGCIPLTLGGDHTITYPILQAMAKKHGPVGLLHVDAHTDTTDKALGEKLYHGAPFRRCVDEGLLDCKRVVQIGIRGSSTTLDPYRYNRSQGFRVVLAEDCWMKSLVPLMGEVRQQMGGKPIYISFDIDALDPAYAPGTGTPEIAGLTPSQALEIIRGCQGLNVMGCDLVEVSPPYDLSGNTALLAANLLFEMLCALPKVTTV

SEQ ID NO: 5452 - DNA, 2196 bp, Homo sapiens
cttgatcctagggcgcccctgacctttgagccggctcgggttccggctctggcgcgtgcacactcgcctcgccgttcgggaccagccagatcgcggcggcctcgcgggcggtttggtcggtgaggtcttggccgcgcgcggcaatgctgaggctgctggcgtccgggtgcgcccggggcccggggcccggcgtgggcgcgcgtcctgccgcagggctctttcatccggggcgccgccagagccgccaggcttccgacgcgccccggaaccagccccccagccccgagttcgtggcccggccggtgggcgtctgctccatgatgcgcctgccggtgcagacctcccccgaggggctggacgctgccttcatcggggtgcccctggatactgggacctccaaccggcctggggcgagattcggacctcgccgcatccgggaagaatcagtgatgcttgggacagtcaatcctagcacgggggccctccccttccagtccctcatggttgcagacctaggcgatgtgaatgtcaatctttacaaccttcaggacagctgccggcgaattcaagaggcctatgagaaaattgtagcagctggctgtattcctctgaccttgggtggagatcacacaatcacatatcccatattgcaagcgatggcaaaaaagcatggcccagtggggctgctgcacgtggatgcgcacacggacacgaccgacaaggccctaggagagaagctctaccacggggcgcccttccgccggtgtgtggatgagggtctcctggactgtaagcgtgtggtgcagattggcatccggggctcttccacgaccttggatccctacagatacaaccggagccagggcttccgggtagtcctggctgaagactgctggatgaagtcgctggttcctctgatgggggaagtcaggcagcagatgggaggcaaacccatttatatcagctttgatattgacgctctggatcctgcctatgcgccagggacagggacacctgaaattgctggtctcactcctagtcaggctctggagatcatcaggggttgtcaaggcctgaacgtgatgggctgtgatcttgtcgaagtttcaccaccgtatgatctttctgggaacacagccctgctggcggctaacctgctgtttgagatgctatgtgctctccccaaagtgacaaccgtctgagtcttgtgctcttcaagacaaaacagattgcgtcgctgacaagttctcaagaagaacttatgagtaagcagtctgagaactaaagagtttatgccaagaaaactttctgctgaaagtgtcattgctggctgtgaagtcgggataatcagtagaattctcacccaaacagcaacatttctaaggaacttggattaattgggggaaaaaaaaaggagtacttgtactgctttgattttttttcctttgatgaaagatggaggataaaggggaagtgaggagaatttctttcaagattatctaaacattagaaacatgacatttaaaaaaactatgaaataatactgtataagcattccatatttctatatcttccttttaaacatttttttttttgagatagagttttgcttgtcacccaggctggagtgcaatggcatgatctcggttcattgcaacctccgcctcccgagttcaatcgattctcctgcctcagcctcctgagtacctgggattacaggtgcctgccaccacgcctggctaatttttgtatttttagtagagacagggtttcaccacattggccaggctggtcttgaactcctgacctaaggtgatccgcccgcctcagcctccttaaagtgctgggattacaggcatgagccaccgcacccagccgctttttaaaattttgatgatctgcttcctagagtattgagtatcttcctttaaactacagctcctcctcggacgctgcagtgagctgagatcgcaccactgcactccagcctgggtgccagagcaagactccatctcaaaaaaaaaaaaaaaaaatacagcttctcctatgaggtgcttagggctgcatcttggttttaggaccactgtgaacgtaagtaaaaagtataaagtaacacggagagcctaatgaagaaacttcttgctcagaggcctagaagggtacacaaaatgtcttctaaactagaaaacctaaggc

SEQ ID NO: 5453 - protein, 352 aa, Homo sapiens; identical to SEQ ID NO: 38

SEQ ID NO: 5454 - DNA, 1053 bp, Homo sapiens
ccttccagtccctcatggttgcagacctaggcgatgtgaatgtcaatctttacaaccttcaggacagctgccggcgaattcaagaggcctatgagaaaattgtagcagctggctgtattcctctgaccttgggtggagatcacacaatcacatatcccatattgcaagcgatggcaaaaaagcatggcccagtggggctgctgcacgtggatgcgcacacggacacgaccgacaaggccctaggagagaagctctaccacggggcgcccttccgccggtgtgtggatgagggtctcctggactgtaagcgtgtggtgcagattggcatccggggctcttccacgaccttggatccctacagatacaaccggagccagggcttccgggtagtcctggctgaagactgctggatgaagtcgctggttcctctgatgggggaagtcaggcagcagatgggaggcaaacccatttatatcagctttgatattgacgctctggatcctgcctatgcgccagggacagggacacctgaaattgctggtctcactcctagtcaggctctggagatcatcaggggttgtcaaggcctgaacgtgatgggctgtgatcttgtcgaagtttcaccaccgtatgatctttctgggaacacagccctgctggcggctaacctgctgtttgagatgctatgtgctctccccaaagtgacaaccgtctgagtcttgtgctcttcaagacaaaacagattgcgtcgctgacaagttctcaagaagaacttatgagtaagcagtctgagaactaaagagtttatgccaagaaaactttctgctgaaagtgtcattgctggctgtgaagtcgggataatcagtagaattctcacccaaacagcaacatttctaaggaacttggattaattgggggaaaaaaaaaggagtacttgtactgctttgattttttttcctttgatgaaagatggaggataaaggggaagtgaggagaatttctttcaagattatctaaacattagaaacatgacatttaaaaaaactatgaaat

SEQ ID NO: 5455 - protein, 233 aa, Homo sapiens
MVADLGDVNVNLYNLQDSCRRIQEAYEKIVAAGCIPLTLGGDHTITYPILQAMAKKHGPVGLLHVDAHTDTTDKALGEKLYHGAPFRRCVDEGLLDCKRVVQIGIRGSSTTLDPYRYNRSQGFRVVLAEDCWMKSLVPLMGEVRQQMGGKPIYISFDIDALDPAYAPGTGTPEIAGLTPSQALEIIRGCQGLNVMGCDLVEVSPPYDLSGNTALLAANLLFEMLCALPKVTTV

SEQ ID NO: 5456 - DNA, 1300 bp, Homo sapiens
cttgatcctagggcgcccctgacctttgagccggctcgggttccggctctggcgcgtgcacactcgcctcgccgttcgggaccagccagatcgcggcggcctcgcgggcggtttggtcggtgaggtcttggccgcgcgcggcaatgctgaggctgctggcgtccgggtgcgcccggggcccggggcccggcgtgggcgcgcgtcctgccgcagggctctttcatccggggcgccgccagagccgccaggcttccgacgcgccccggaaccagccccccagccccgagttcgtggcccggccggtgggcgtctgctccatgatgcgcctgccggtgcagacctcccccgaggggctggacgctgccttcatcggggtgcccctggatactgggacctccaaccggcctggggcgagattcggacctcgccgcatccgggaagaatcagtgatgcttgggacagtcaatcctagcacgggggccctccccttccagtccctcatggttgcagacctaggcgatgtgaatgtcaatctttacaaccttcaggacagctgccggcgaattcaagaggcctatgagaaaattgtagcagctggctgtattcctctgaccttgggtggagatcacacaatcacatatcccatattgcaagcgatggcaaaaaagcatggcccagtggggctgctgcacgtggatgcgcacacggacacgaccgacaaggccctaggagagaagctctaccacggggcgcccttccgccggtgtgtggatgagggtctcctggactgtaagcgtgtggtgcagattggcatccggggctcttccacgaccttggatccctacagatacaaccggagccagggcttccgggtagtcctggctgaagactgctggatgaagtcgctggttcctctgatgggggaagtcaggcagcagatgggaggcaaacccatttatatcagctttgatattgacgctctggatcctgcctatgcgccagggacagggacacctgaaattgctggtctcactcctagtcaggctctggagatcatcaggggttgtcaaggcctgaacgtgatgggctgtgatcttgtcgaagtttcaccaccgtatgatctttctgggaacacagccctgctggcggctaacctgctgtttgagatgctatgtgctctccccaaagtgacaaccgtctgagtcttgtgctcttcaagacaaaacagattgcgtcgctgacaagttctcaagaagaacttatgagtaagcagtctgagaactaaagagtttatgccaag

SEQ ID NO: 5457 - protein, 352 aa, Homo sapiens; identical to SEQ ID NO: 38

SEQ ID NO: 5458 - DNA, 2860 bp, Homo sapiens
atgcctggcgtccgcgcatttggctcctggttgctaggcgacgccaacccgattctggttgctggagtttatcctcccgaggttgctgtgcgagtttcggactcagctcaagcgcttggatccctacagcacctgcgagggcttctcctggctgccgctttcgttctggcgaatgttcggggtggcagccccccttcgaggcttgcacgagggcgtcccggcatccgcgatcaagcgggccctgctgcttttggggctgaccctgcggctggggtgctgcggcgtcgctctggctatgcccggtccactcacggactccctgctttggcctgctcagctcaggagaaccgggcccgactccatttcgggcagtggtggacagggaaactagtgcctgcctgtagtggtcccaggcatagagcttcctgcagctaccctgtggcttagttcacgttttgttgctttgaccaccgatgagaaatgtgcagtagggaccctgtaggagtctgcttacccgaaatggtttctgtcttgaatagttgttgagtgaaagctcttgctgctgctcactctttgggtctgtgccgccttcatgagctgtgacactcaccgtgaagttttgcagcttcgctcctaaagccagcgagaccacgaacccactgggagggacagcaactctggacgcgccacttttacgaactgtagcactcaccgcaaaggtctgcagcttcactcctgaggccagcgagaccacgaacccaccgtgaaggaacgaacaactccagacgcgccgcctttaagagctgtaacactgcaaaggtctgcagcttcactcctgaagtcagcgtagaccacgaacctagcagaaggaagaaacttcggacacatctgaacatctgaaggaacaaactccggacacactatctttaagaactgtaacaccgcgagggtctgtggcttcattcttgaagtcagcgagacaaagaacccaccaattcgatacactgggaccacaggtgtgcaccaccagtcttggctaacttttgtattctttgtagagacaggatttccccatgttggccaggctggtctcaagctcctggactcaagccatgtgcctgccttggtctcacaaagtgctaggattacgggcatgaggcaccgcacccagtgagaccctatttctacaaaaaatacaaaaattagctgggcatagttgtgtgcacctgtagtcctagctacttgggaggctgaggcagaaggattgctcaagcccagggggtggaggctgcagtgagctatgactgtaccacagcaccacagccttcatgacagagcgagacttctatctcccttaaaaaaaaaaaaagttcagggtcttttgagggtgggcttctactgaacattggacatgtggagctgagggctggggtggagcactgcaggcagacagaaaagcatgaacaaaggaaaggaggcaagaaagtgggggctgaggcagctgaccatgggctggaggaacaagcccgtggagctgcagaaggggaaacacaggaagaattggctccaggaagcattaccgggcaggcatatgtatggtgatactagtgagagtgagatcagctggaaagctggggtgggaaggcctggaccagagtaacagcagaggaaatgagcagaaggcttgggggcaggaaaccatcaggacttcttaaatttgggggcgtagagcaggatcagagacagggaggtggaaagtcgctggctgaacttgcagcccaccccaggtgctgtcaagcatccaggtcagggttagaaattggtcgcctggagctcagggctgggatttgggcttgtggttgacctgcctatgggtgaaagtcatcacctccgtattaaaagggattgccagccgagaaggagccacgaaggtggaaggagaccaggggagtcccagtcaagaggccgcctgaggaacgtttcaaggagagagggtgctcagcagtagtggatgttggggacacctcattggaacgcctggcacatagcggacactcaatatttgtgagctgaatgaaagaaaaacccggagtaagaacatgatacattcaggacaagcaacatgaaagaaatagcagttgaatttgggagtcaagagaataactgagaccctttaagtggcataagggagaaaaaaaggaaaaaataactgagagattgttgcatttgttccagaaaatggctgggacctgccccaaggccaacactaagcactgataattgaccattaggaaactctgtcccgacctgcagagtggaggctccactccagagtggaggctggagtggtgtggggtttaatgtgcaacctttttttttttttttgacagagtcttgctgtgttgcccaggctggagtgcagtggcgcgatcttggctcactgcaaactccaccctcccgggttcacgtcattctcccgcctcaggctcccgagtagctggtactacaggtgcccaccaccacgcctggctaattttttgtatttttagtagagatggggtttcaccatgttagccaagatggtctcatctcctgacctcatgatccgcccacctcggcctcccaaagtgctgggattacaggtgtgagccaccgcgcctggcctaatgtgcaacctttgtgtagaggttgcaacgtaaatgcaaatgtgagccttttccattcaatctcaacatttagagatcagaaaaaataatatatataatactgctaaatggctcacataattccattacaaatcacttctttctttccacgtgtgtttttctttccccttagaaataaagaggatgtaacaggt

SEQ ID NO: 5459 - protein, 148 aa, Homo sapiens [sequence omitted]

SEQ ID NO: 5460 - DNA, 797 bp, Homo sapiens
atgaggctagttcagttgtgcaagagcatttcctcaaagccgagccgtcgcgtacctaggatacctggaagccgaagccacacctcccgcatggcccctccggccagccgggcccctcagatgagagctgcacccaggccagcaccagtcgctcagccaccagcagcggcaccgccatctacagttggctcttctgctgctgcgccccggcagccaggtctgatggcccagatggcaaccactgcagctggcgtggctgtgggctctgctgtggggcacatactgggtcatgccattactgggggcttcagtggaggaagtaatgctgagcctgcgaggcctgacatcacttaccaggagcctcagggaacccagccggcacagcagcagcagccttgcttctgtgagatcaaacagtttctggagtgtgccgagaaccagggtgacatcaagctctgtgagggtttcaatgaggtgctgaaacagtgccgacttgcaaacggattggcctaatcaagaagttcaacctggagagatggaaaatcagctctcatactaattaatttagtataaaaatagaattggtagtgagggtataaagtgtaagcatcagttaaacttctcctgtcattcctagcttccttgcttcagaattgaaatggaagggagggtgttcctactctgtagaatctgggactgggcaaatgtttgtgtggcctccttaaactagctgttatgattttattctttgtgagttaattagaataaagtcattttcttccaaaaaagaaaaaaaa

SEQ ID NO: 5461 - protein, 170 aa, Homo sapiens
MRLVQLCKSISSKPSRRVPRIPGSRSHTSRMAPPASRAPQMRAAPRPAPVAQPPAAAPPSTVGSSAAAPRQPGLMAQMATTAAGVAVGSAVGHILGHAITGGFSGGSNAEPARPDITYQEPQGTQPAQQQQPCFCEIKQFLECAENQGDIKLCEGFNEVLKQCRLANGLA

SEQ ID NO: 5462 - DNA, 1500 bp, Homo sapiens
ggagggagcgagcgagcgaacgagcagccggcgccgtcctcccgcagcaccagccaggccacgccgccgcctcttcccctgcgccccgcgcccaggccgggccgagccgagccgagccgggtcgggcccgggccatgctgctcaccgtgtactgtgtgcggagggacctctccgaggtgaccttttccctccaggtcgacgccgacttcgagctgcacaacttccgcgcgctgtgcgagctcgagtctggcatccccgcagccgagagccagatcgtctatgcggaaagacctctcacagacaaccacagatcattggcttcttatggcttgaaagatggggacgttgtgattttacgacagaaggagaatgcagaccctcgacctccagtgcagttcccaaacttaccccgaatagatttcagtagtatagctgtgcctggcacatcaagtccccggcagcgccagccaccaggaacacagcagtcccactcatctcctggagaaataacttcatctcctcagggcttggacaatccagccttgctccgagatatgttgctggccaacccgcatgagctgtccttgctgaaggaacgcaatccacccctggcagaagctctgctcagtggagaccttgagaaattttctagagtcctggtggagcagcagcaggaccgagcccggagagagcaagaaaggattcgtctgttttctgctgatccctttgaccttgaagctcaggcaaagatagaagaagatataaggtaaagacctgttcatctaaagaacaaaacttagagactccagatttcccagactgcaggttatctgacattggttgggcatctgcttggaggtagcttctctgttttgcagttgagatagtaacctcagtcttttaggttagtctctcctctttcattttctatgcatttcgatttgacatgacaaagatataggtgcttagtttaatgactttctttctaaaattttaaggaggactccctgactagcagacagagcatcataacacagctttagataaatgacccccggactgagcagaagccaccatctggtgagaccacaaggctggttgcatattacatgggctgatttgactctctttctttagacatattgtataagtcctgattaaatccagggcttaaacatgattggattagagagggctctgcgccgatggaacgttggtagtcctaagtctgttttcctgctgcatttcttgtactggcctcagtggataaactgaatgctggacatgtttccagctctcagtttctgtaatgcggtggttctcacctggggctatagtaaaatcacatgagaaacttttaaaaatgcagatgcttggactcttctcccaaatctgatgaatcagaattgtcgggcatggagctcaagcaaggacagtgacgctgttccggcctcagtcacactgatagtcacaagcaagattctgttcagtcattctctg

SEQ ID NO: 5463 - protein, 211 aa, Homo sapiens
MLLTVYCVRRDLSEVTFSLQVDADFELHNFRALCELESGIPAAESQIVYAERPLTDNHRSLASYGLKDGDVVILRQKENADPRPPVQFPNLPRIDFSSIAVPGTSSPRQRQPPGTQQSHSSPGEITSSPQGLDNPALLRDMLLANPHELSLLKERNPPLAEALLSGDLEKFSRVLVEQQQDRARREQERIRLFSADPFDLEAQAKIEEDIR

SEQ ID NO: 5464 - DNA, 303 bp, Homo sapiens
gggtgggatctgaagctgtggtgatggtggtttgaaactaatctcataaggagtggaaaccattgaggacttttaagcagatgaagaagtaagtgatttgaaaatggtgctattggcccagtgcagtggctcaaacctgtaatcccagcacgttgggaggctgaggcgggtggatcacctgaggtcaggagttcaagaccagcctggccaacatgctgaagccccatctctactaaaaatacaaaaaatagccgggcatggtggcacttgcatgtaatcccagctactcgggaggctgaggca

SEQ ID NO: 5465 - protein, 40 aa, Homo sapiens
FENGAIGPVQWLKPVIPARWEAEAGGSPEVRSSRPAWPTC

SEQ ID NO: 5466 - DNA, 757 bp, Homo sapiens
agtgttccatcgacctgaagaaaaatgtactcgtgatcggcaccacaggctcccagaccacctttcttcctgagggagagctaccagagtgtgcccggttggcatatggggctggaagagaggatgtacggccagaggagattgcagaccaagaattagcagaagcccttcaaaaatcagcagaggatgcagattgctgtgtgtattgtgagagaatggaagcaaccaacaaatattttggatgtccaaactacagaaacatccctcaacttggaatctaccagttcctgattttaaagatggcaaaagaacggaaactataaccctgcatgctgtgtggtttgcattgttaacccaagtttgcttgtctgtttcctaattcacacagagcgtcagaagccatgatgcatgtagtgtgtgtgtactgcagctggagtgggccccagaccaggtatttatagacaccatgttaagccttccatccagttgtcatctgtgatctgacagtctgtatccgcagcagtttgggaagttagcatttgtcattcaccatttcaccttgttcaatctggttacaactagcctatatgcatttgtattttggcatgcatacatggatatgtaacataaactcctgtttaaaaatggattcgttattagaaccatccaacagggagaaaatcccagttaaaacagtgtctattatatctaccccatcttggctactataaatatcacatcaagaatattggcctca

SEQ ID NO: 5467 - protein, 34 aa, Homo sapiens
MQIAVCIVREWKQPTNILDVQTTETSLNLESTSS

SEQ ID NO: 5468 - DNA, 2722 bp, Homo sapiens
aatctgttgaaattaacagattgctgtgtgtattgtgagagaatggaagcaaccaacaaatattttggatgtccaaactacagaaacatccctcaacttggaatctaccagttcctgattttaaagatggcaaaagaacggaaactataaccctgcatgctgtgtggtttgcattgttaacccaagtttgcttgtctgtttcctaattcacacagagcgtcagaagccatgatgcatgtagtgtgtgtgtactgcagctggagtgggccccagaccagagaaaagtggtaaagaatctacctcactgggaatgtcatcattaccaacttcagatgggtttaaccatcccgcccgttcttcaggacagagtcctgatgttggtaatcctatgagtcttgctcgctctgtctctgcttcagtctgccctatcaagcccagtgactcagatcgcattgaacctaaagctgtgaaggctttgaaggcttcagctgaattccagctaaactctgaaaagaaagaacatctttctttacaagatctttctgatcatgcttcctcagcagaccatgctccaacagaccagagtccagctatgcctatgcagaattcatccgaagaaataactgttgcaggtaatctggagaaatctgctgaaagaagcacccagggcctcaaatttcatctccatacaagacaggaagctagtttatctgtcacatctactaggatgcatgaaccacagatgtttctaggtgaaaaggattggcatccagaaaatcagaacctgagtcaagtgagtgaccctcagcagcacgaagaaccagggaatgaacagtatgaggttgcacaacaaaaagcttcacatgaccaagaatatctttgtaacataggggaccttgagcttcctgaagaaaggcaacagaatcaacacaaaattgttgatttggaagctacgatgaaaggaaatgggctcccacagaatgtggatcctccaagtgcgaagaaaagtattccatcttcagaatgcagtggctgctcaaattcagaaacatttatggaaatcgatacagctcaacagtccctagttactttgcttaattcaacaggcaggcagaatgccaatgtcaagaacattggtgcattggatctcactttagataatcccttgatggaagtagaaacatcaaaatgtaacccttcatctgaaattttgaatgattccatttccactcaggatttacagcccccagaaactaatgttgaaatacctggaacaaataaagaatatggccattactcctctccaagtctctgtggcagttgtcagccttctgtggagtcagcagaagaatcttgcccgtctataacggcagccttgaaagaacttcatgaacttttggttgttagcagtaaaccagcttcagaaaatacatctgaagaagtaatctgtcaatcagaaaccatagctgagggccaaaccagtattaaagacctttctgaaagatggacccaaaatgagcatcttacccagaatgaacagtgtccacaagtctcctttcatcaggccatatctgtatcagtggagacagaaaaattaacaggtacttcatctgacactggaagagaagctgtagaaaatgtaaacttcaggagtctaggtgatggcctgtcaaccgataaggaaggtgtccccaaatctagggaatccataaataagaaccgttctgtcactgtaacctcagctaaaacatccaatcagttacactgcaccttaggtgtagaaatttcacccaaacttttagcaggtgaggaggatgcactcaatcagacttctgagcaaactaagtctttgtcatccaatttcatattggttaaagacttaggtcagggcatacagaattcagtaacagacaggcctgaaaccagagaaaatgtctgtcctgatgcttcgaggccattacttgaatatgaaccacctaccagccatccatcatcaagtcctgccattcttccaccattgatttttcctgccacagatattgaccgcattctccgtgctggctttactttgcaggaagctcttggagctttgcatcgagttggtgggaatgcagaccttgcacttcttgttttgctcgcaaaaaacatcgtagttcctacatgactgtgggaaagtgggctagaccgttctccattccctttaaacaaaagaaagctctctctatatacacgcacacatacacactcaccacatatacagtatatatagaaacctgcaagcagaatgttgagccagattttttttaaagatttttttcggccaaagtaatttatgatcttttgtctgatgaatttgtctatcctacttgttaaaatttaggcctttttaaatgtattggcagtatgtgcatacagaagctttttattctcattaagatgtatcctggaataaaatggatggttttgtgtgtagcatactgttttagaatgagagtaaatgctttgaaaagcagaagccatgagaaatcccactacccatccagctaaaaacagatgaactctccacactgtgactgtgtgtctgtgctgatggcaaggtatggtttgctggctcagttgtcaatttagaaacttttgaccacataatttggtgtttggaattctacccagtgctctgtgtatcatgattcattaattataacaggaaattggagaataattg

SEQ ID NO: 5469 - protein, 617 aa, Homo sapiens; identical to SEQ ID NO: 42

SEQ ID NO: 5470 - DNA, 508 bp, Homo sapiens
ttccagagtcagccttagttttaaataaaactaataactgttagacatctggtggtatgaaaataaaaaaactaataactgtgtttctagactctaatgggtatagcctaaactgagataagtgcagttttcctttttactcctaaagtgtaagtaaggtaagattgtttcatgggaagtcaatagcttcctgaaacaatgctttgtcttctcatgctgttaaccagtagtttattagaatgatttaaagccttttgaatataactgctttgctgctttttaagatcaagccctcttgttggatgttaacatttagtactgagcatttgagttgcatctgtcctaataatagattgtattttgaagtcatttttgttactgaccttttgatttttattttttattattattattttttattttgactgagtttcactctgtcacccaggctggactcagatggcgccattgtactcctgtctgggcaacaagagcaaaacacagtctt

SEQ ID NO: 5471 - protein, 40 aa, Homo sapiens
MLTFSTEHLSCICPNNRLYFEVIFVTDLLIFIFYYYYFLF

SEQ ID NO: 5472 - DNA, 2906 bp, Homo sapiens
caaaagaagagctggaaatgatgtttaatgatactatgatgcttacactgagccgtcttgtttgggtggtctaaggtagcagtgaatctaaatagtcattgccagttgaaaaactattaatgaaccatctccctccacattcccctttctttaaaacatttaaatattcttaacttagttgcacactattgatgtgataaaaacttataagccttttaagtttagagttgtattatttggtaggatgatgattgtgatttaatctgctgatcattagtttacttttgttttctgagtcagatgctcacccagttttaccatgatttttggaaagcttggctagaaataaaatagaacatttgcttctctgtccccaagcattatgttatttcttatttctctttataattccctctctgtccaggtatacctggtttaagacttctcatttgtaacctcagtgttcacatttgaaacaagaaaagtgcattaacatgagaatcattctggtgcaaagattctcaggatttgtaatatccttaagaatcacccaaggagcttattgaaaatgcacattcctggatttactctcaagtatggtaccccagggtctgcatacttcacaagcgtccctggtggttttagggcaagtggtgaaaaaagtacacttggagaaactattctagagttgtagactagactagggaataaagaaacataaatgtccttcattcctgagcactaaccccgccattatgtgaatgcatattaatggatacttaatcacattgaattacagtatgcagattttattaagaacatgtctacctcttattctgatgctgtgaatgtctaccacaatgagaaagtaattttaaaatcatttctatttgtgtaagagaaacccgagtttgaggaccttattttattctacgctgtttagatttgtatcctctggtaatttagtggcattagtcacctgctaattaatctttttcctttcccctgtgttccatatagagaaaagtggtaaagaatctacctcactgggaatgtcatcattaccaacttcagatgggtttaaccatcccgcccgttcttcaggacagagtcctgatgttggtaatcctatgagtcttgctcgctctgtctctgcttcagtctgccctatcaagcccagtgactcagatcgcattgaacctaaagctgtgaaggctttgaaggcttcagctgaattccagctaaactctgaaaagaaagaacatctttctttacaagatctttctgatcatgcttcctcagcagaccatgctccaacagaccagagtccagctatgcctatgcagaattcatccgaagaaataactgttgcaggtaatctggagaaatctgctgaaagaagcacccagggcctcaaatttcatctccatacaagacaggaagctagtttatctgtcacatctactaggatgcatgaaccacagatgtttctaggtgaaaaggattggcatccagaaaatcagaacctgagtcaagtgagtgaccctcagcagcacgaagaaccagggaatgaacagtatgaggttgcacaacaaaaagcttcacatgaccaagaatatctttgtaacataggggaccttgagcttcctgaagaaaggcaacagaatcaacacaaaattgttgatttggaagctacgatgaaaggaaatgggctcccacagaatgtggatcctccaagtgcgaagaaaagtattccatcttcagaatgcagtggctgctcaaattcagaaacatttatggaaatcgatacagctcaacagtccctagttactttgcttaattcaacaggcaggcagaatgccaatgtcaagaacattggtgcattggatctcactttagataatcccttgatggaagtagaaacatcaaaatgtaacccttcatctgaaattttgaatgattccatttccactcaggatttacagcccccagaaactaatgttgaaatacctggaacaaataaagaatatggccattactcctctccaagtctctgtggcagttgtcagccttctgtggagtcagcagaagaatcttgcccgtctataacggcagccttgaaagaacttcatgaacttttggttgttagcagtaaaccagcttcagaaaatacatctgaagaagtaatctgtcaatcagaaaccatagctgagggccaaaccagtattaaagacctttctgaaagatggacccaaaatgagcatcttacccagaatgaacagtgtccacaagtctcctttcatcaggccatatctgtatcagtggagacagaaaaattaacaggtacttcatctgacactggaagagaagctgtagaaaatgtaaacttcaggagtctaggtgatggcctgtcaaccgataaggaaggtgtccccaaatctagggaatccataaataagaaccgttctgtcactgtaacctcagctaaaacatccaatcagttacactgcaccttaggtgtagaaatttcacccaaacttttagcaggtgaggaggatgcactcaatcagacttctgagcaaactaagtctttgtcatccaatttcatattggttaaagacttaggtcagggcatacagaattcagtaacagacaggcctgaaaccagagaaaatgtctgtcctgatgcttcgaggccattacttgaatatgaaccacctaccagccatccatcatcaagtcctgccattcttccaccattgatttttcctgccacagatattgaccgcattctccgtgctggctttactttgcaggaagctcttggagctttgcatcgagttggtgggaatgcagaccttgcacttcttgttttgctcgcaaaaaacatcgtagttcctacatga

SEQ ID NO: 5473 - protein, 617 aa, Homo sapiens; identical to SEQ ID NO: 42

SEQ ID NO: 5474 - DNA, 4033 bp, Homo sapiens
atggcctgctattcaacagcagagaagaatcccaaagcttgttggcggttggcggcggcccccggcccccggcgcgggaagcggcggcggggcggcggcggcggtggcggtggcggtggcggcgacggtggcagcgccatggagccgggggaggtgaaggaccggatcctggagaacatctcgctgtcggtgaagaagttgcagagctattttgctgcatgtgaggatgagatccctgccatccggaaccatgacaaggtcctacagcgtctgtgtgagcacctggaccacgccctgctgtacggactgcaagacctctcctctggctactgggtgctcgtggtgcattttactcggagagaggccatcaagcagatcgaggtgctgcagcacgtggccaccaacctggggcgcagccgtgcctggctgtacctggccctcaacgagaactccttggagagctacctgcggttgttccaggagaacctgggcctgctgcataagtactacgtcaagaatgccctggtctgcagccacgatcacctgacgctcttcctgaccttggtgtccgggctagagttcattcgtttcgagctggatctggatgccccttacctagacctggccccctacatgcccgactactacaaacctcagtacctgctggactttgaagaccgccttcccagctcggtccacggctcagacagtctgtccctcaactctttcaactccgtcacctccaccaacctggagtgggatgacagtgcgattgccccatctagtgaggattatgattttggagatgtgtttccagcagtgccgtctgtacccagcacagactgggaagatggagacctcacagacacggtcagtggtccccgctccacagcctccgacctgaccagcagcaaggcctccaccaggagccccacccagcgccagaaccccttcaacgaggagccggcagagactgtgtcctcctctgacaccacccccgtgcacaccacctctcaggagaaggaggaggcccaggccctggacccgccggatgcctgcacggagctcgaggtcatcagggtcaccaagaagaagaaaattggcaagaagaaaaagagcagatcagatgaggaggcaagtccactccaccccgcctgcagccagaagaaatgtgccaagcagggggacggtgacagccgcaacggcagcccaagccttgggcgggactcgccagacactatgcttgcctccccccaggaggagggagaggggccgagcagcaccacggagagcagcgagcgctccgagccgggcctgctgatccctgagatgaaggacacctccatggagcgcttggggcagcccctgagcaaggttatcgaccagctcaacgggcagctggaccccagcacctggtgctcccgtgctgagcccccagaccagtcctttcggaccggctctcccggggatgccccggagaggccgccgctttgcgactttagtgaggggctttcagccccaatggacttctaccgctttaccgtcgagagtccaagcactgttacatcaggtggcggccaccatgaccctgcagggcttggccaaccgctgcatgttcctagtagccctgaggctgctggccaagaagaagagggaggaggaggagagggacagacgcctcggcccctagaggataccacgagggaggctcaggagctggaggcccagctgtccctggtcagggaggggcctgtgtctgagccagagcctgggacccaggaggttctctgccagctcaagcgagaccagcccagcccgtgtctgagtagcgctgaggattctggggtggatgagggacaggggagcccttcggagatggtccattcctcggagttcagagtagacaacaatcacctgctcctgctcatgatccacgtgttccgagaaaacgaagagcagctgttcaaaatgatccggatgagcaccgggcacatggagggcaacctgcagctgctgtacgtgctgctcacagactgctatgtctacctgctccggaaaggggccacagagaagccatacctggtggaagaggccgtttcttacaatgaacttgactatgtgtcggttggccttgaccagcagacggtgaagctggtgtgcaccaaccgcaggaagcagtttctgctggacacggctgatgtggcgctggctgagttctttttggcttctttgaagtcagccatgatcaaaggctgtcgagaacctccctaccccagcatcctgacggatgccaccatggagaagctggcactggccaaatttgtggcccaagaatcgaagtgtgaggcatctgctgtcaccgtgcgcttctacggccttgtgcactgggaggaccccacagacgagtccctgggccccacgccctgccactgctcaccccccgagggcaccatcaccaaagaaggcatgctgcactacaaggcgggcacctcctacctgggcaaggaacactggaagacgtgcttcgtggtgctcagcaacgggatcctctaccagtacccggaccgcaccgacgtcatccctctgctctcggtgaacatggggggggagcagtgcggtggctgccggagagccaacaccacggatcggccccacgccttccaggtcattctctccgaccggccctgcctggagctaagtgccgagagcgaggccgagatggccgagtggatgcagcatctctgccaggctgtgtccaaaggggtcatcccccagggcgtagctcccagcccctgcataccctgctgcctggtcctcacggatgaccgcctctttacgtgccatgaggattgccagaccagcttcttccgctctttgggcacagccaagctgggcgacatcagcgccgtctccaccgagccgggcaaggagtactgcgtcttggagttctcccaggacagccagcagctcctcccgccctgggtcatctacctgagctgcacttctgaactggaccgattgctgtctgcactgaactctgggtggaaaaccatctatcaggtggacctcccccacacggcgatccaggaagcctccaacaagaagaaattcgaggatgccttgagcctcatccacagcgcctggcagcggagcgacagtctctgccgcggccgagcctcccgagacccctggtgctgaggcagagctggttggcgtccctggtgggcaggaaaggaaggcacgccagccggcaggcacactgtcacggctgttgtcatgctgtcgggagcctacagtccacccctgccctgggcggcagaaccaccgagtgtggcttaagacagggtccctccactccagggatccagatcaggtgcccggcacccctgggcatcctgcccgacaggtagcgaatggaggtcgctgggggcagagggtccgagccctgtgggctctgcggatgcacgccctcctcccgggcctccgcctcagtctgcagaatttctgccgagtggcaccgagaacaccatccatctaaggacgaacaaaagaaccaggagggcgggacccccctcttcctctcctgggttgggggctggggccctgagtgcccagccatccttgttcgtgtttgaacactctcctggccacgtggggaagcgggaacacggggtgtctgcgcatgtttcctcctcctagctccatcactgcgcacacagctgcctgcctcgccagatgcaggggggcgggcagccctccctggctgccaggaggctctgcatgcccacagtcctgccctgcctgtcccctcaacccggcagtgcctgtagcaccgaggagcaaagggggtggatggggggcttggagaagggcggagcccaccagcctggcatccatgttgacatcttctgactgtcccctgcttggctggagccaggcccttccctagagtttcgtcaagagcctcctggggaaggggtcaggtggtttgggttttgttttttaaaataaaatagacatgttatattgccaa

SEQ ID NO: 5475 - protein, 1065 aa, Homo sapiens
MACYSTAEKNPKACWRLAAAPGPRRGKRRRGGGGGGGGGGGDGGSAMEPGEVKDRILENISLSVKKLQSYFAACEDEIPAIRNHDKVLQRLCEHLDHALLYGLQDLSSGYWVLVVHFTRREAIKQIEVLQHVATNLGRSRAWLYLALNENSLESYLRLFQENLGLLHKYYVKNALVCSHDHLTLFLTLVSGLEFIRFELDLDAPYLDLAPYMPDYYKPQYLLDFEDRLPSSVHGSDSLSLNSFNSVTSTNLEWDDSAIAPSSEDYDFGDVFPAVPSVPSTDWEDGDLTDTVSGPRSTASDLTSSKASTRSPTQRQNPFNEEPAETVSSSDTTPVHTTSQEKEEAQALDPPDACTELEVIRVTKKKKIGKKKKSRSDEEASPLHPACSQKKCAKQGDGDSRNGSPSLGRDSPDTMLASPQEEGEGPSSTTESSERSEPGLLIPEMKDTSMERLGQPLSKVIDQLNGQLDPSTWCSRAEPPDQSFRTGSPGDAPERPPLCDFSEGLSAPMDFYRFTVESPSTVTSGGGHHDPAGLGQPLHVPSSPEAAGQEEEGGGGEGQTPRPLEDTTREAQELEAQLSLVREGPVSEPEPGTQEVLCQLKRDQPSPCLSSAEDSGVDEGQGSPSEMVHSSEFRVDNNHLLLLMIHVFRENEEQLFKMIRMSTGHMEGNLQLLYVLLTDCYVYLLRKGATEKPYLVEEAVSYNELDYVSVGLDQQTVKLVCTNRRKQFLLDTADVALAEFFLASLKSAMIKGCREPPYPSILTDATMEKLALAKFVAQESKCEASAVTVRFYGLVHWEDPTDESLGPTPCHCSPPEGTITKEGMLHYKAGTSYLGKEHWKTCFVVLSNGILYQYPDRTDVIPLLSVNMGGEQCGGCRRANTTDRPHAFQVILSDRPCLELSAESEAEMAEWMQHLCQAVSKGVIPQGVAPSPCIPCCLVLTDDRLFTCHEDCQTSFFRSLGTAKLGDISAVSTEPGKEYCVLEFSQDSQQLLPPWVIYLSCTSELDRLLSALNSGWKTIYQVDLPHTAIQEASNKKKFEDALSLIHSAWQRSDSLCRGRASRDPWC

SEQ ID NO: 5476 - DNA, 4122 bp, Homo sapiens
gcctccttccccgccggccgcgctccggagcctccgggccgcggtggagcgagggcccaggcgaggcgagggccgggcggcgggcgccgggccccgcggccggcacgacggagcccccgtacggccggcggcagcggttggcggcggcccccggcccccggcgcgggaagcggcggcggggcggcggcggcggtggcggtggcggtggcggcgacggtggcagcgccatggagccgggggaggtgaaggaccggatcctggagaacatctcgctgtcggtgaagaagttgcagagctattttgctgcatgtgaggatgagatccctgccatccggaaccatgacaaggtcctacagcgtctgtgtgagcacctggaccacgccctgctgtacggactgcaagacctctcctctggctactgggtgctcgtggtgcattttactcggagagaggccatcaagcagatcgaggtgctgcagcacgtggccaccaacctggggcgcagccgtgcctggctgtacctggccctcaacgagaactccttggagagctacctgcggttgttccaggagaacctgggcctgctgcataagtactacgtcaagaatgccctggtctgcagccacgatcacctgacgctcttcctgaccttggtgtccgggctagagttcattcgtttcgagctggatctggatgccccttacctagacctggccccctacatgcccgactactacaaacctcagtacctgctggactttgaagaccgccttcccagctcggtccacggctcagacagtctgtccctcaactctttcaactccgtcacctccaccaacctggagtgggatgacagtgcgattgccccatctagtgaggattatgattttggagatgtgtttccagcagtgccgtctgtacccagcacagactgggaagatggagacctcacagacacggtcagtggtccccgctccacagcctccgacctgaccagcagcaaggcctccaccaggagccccacccagcgccagaaccccttcaacgaggagccggcagagactgtgtcctcctctgacaccacccccgtgcacaccacctctcaggagaaggaggaggcccaggccctggacccgccggatgcctgcacggagctcgaggtcatcagggtcaccaagaagaagaaaattggcaagaagaaaaagagcagatcagatgaggaggcaagtccactccaccccgcctgcagccagaagaaatgtgccaagcagggggacggtgacagccgcaacggcagcccaagccttgggcgggactcgccagacactatgcttgcctccccccaggaggagggagaggggccgagcagcaccacggagagcagcgagcgctccgagccgggcctgctgatccctgagatgaaggacacctccatggagcgcttggggcagcccctgagcaaggttatcgaccagctcaacgggcagctggaccccagcacctggtgctcccgtgctgagcccccagaccagtcctttcggaccggctctcccggggatgccccggagaggccgccgctttgcgactttagtgaggggctttcagccccaatggacttctaccgctttaccgtcgagagtccaagcactgttacatcaggtggcggccaccatgaccctgcagggcttggccaaccgctgcatgttcctagtagccctgaggctgctggccaagaagaagagggaggaggaggagagggacagacgcctcggcccctagaggataccacgagggaggctcaggagctggaggcccagctgtccctggtcagggaggggcctgtgtctgagccagagcctgggacccaggaggttctctgccagctcaagcgagaccagcccagcccgtgtctgagtagcgctgaggattctggggtggatgagggacaggggagcccttcggagatggtccattcctcggagttcagagtagacaacaatcacctgctcctgctcatgatccacgtgttccgagaaaacgaagagcagctgttcaaaatgatccggatgagcaccgggcacatggagggcaacctgcagctgctgtacgtgctgctcacagactgctatgtctacctgctccggaaaggggccacagagaagccatacctggtggaagaggccgtttcttacaatgaacttgactatgtgtcggttggccttgaccagcagacggtgaagctggtgtgcaccaaccgcaggaagcagtttctgctggacacggctgatgtggcgctggctgagttctttttggcttctttgaagtcagccatgatcaaaggctgtcgagaacctccctaccccagcatcctgacggatgccaccatggagaagctggcactggccaaatttgtggcccaagaatcgaagtgtgaggcatctgctgtcaccgtgcgcttctacggccttgtgcactgggaggaccccacagacgagtccctgggccccacgccctgccactgctcaccccccgagggcaccatcaccaaagaaggcatgctgcactacaaggcgggcacctcctacctgggcaaggaacactggaagacgtgcttcgtggtgctcagcaacgggatcctctaccagtacccggaccgcaccgacgtcatccctctgctctcggtgaacatggggggggagcagtgcggtggctgccggagagccaacaccacggatcggccccacgccttccaggtcattctctccgaccggccctgcctggagctaagtgccgagagcgaggccgagatggccgagtggatgcagcatctctgccaggctgtgtccaaaggggtcatcccccagggcgtagctcccagcccctgcataccctgctgcctggtcctcacggatgaccgcctctttacgtgccatgaggattgccagaccagcttcttccgctctttgggcacagccaagctgggcgacatcagcgccgtctccaccgagccgggcaaggagtactgcgtcttggagttctcccaggacagccagcagctcctcccgccctgggtcatctacctgagctgcacttctgaactggaccgattgctgtctgcactgaactctgggtggaaaaccatctatcaggtggacctcccccacacggcgatccaggaagcctccaacaagaagaaattcgaggatgccttgagcctcatccacagcgcctggcagcggagcgacagtctctgccgcggccgagcctcccgagacccctggtgctgaggcagagctggttggcgtccctggtgggcaggaaaggaaggcacgccagccggcaggcacactgtcacggctgttgtcatgctgtcgggagcctacagtccacccctgccctgggcggcagaaccaccgagtgtggcttaagacagggtccctccactccagggatccagatcaggtgcccggcacccctgggcatcctgcccgacaggtagcgaatggaggtcgctgggggcagagggtccgagccctgtgggctctgcggatgcacgccctcctcccgggcctccgcctcagtctgcagaatttctgccgagtggcaccgagaacaccatccatctaaggacgaacaaaagaaccaggagggcgggacccccctcttcctctcctgggttgggggctggggccctgagtgcccagccatccttgttcgtgtttgaacactctcctggccacgtggggaagcgggaacacggggtgtctgcgcatgtttcctcctcctagctccatcactgcgcacacagctgcctgcctcgccagatgcaggggggcgggcagccctccctggctgccaggaggctctgcatgcccacagtcctgccctgcctgtcccctcaacccggcagtgcctgtagcaccgaggagcaaagggggtggatggggggcttggagaagggcggagcccaccagcctggcatccatgttgacatcttctgactgtcccctgcttggctggagccaggcccttccctagagtttcgtcaagagcctcctggggaaggggtcaggtggtttgggttttgttttttaaaataaaatagacatgttatattgccaa

SEQ ID NO: 5477 - protein, 1019 aa, Homo sapiens
MEPGEVKDRILENISLSVKKLQSYFAACEDEIPAIRNHDKVLQRLCEHLDHALLYGLQDLSSGYWVLVVHFTRREAIKQIEVLQHVATNLGRSRAWLYLALNENSLESYLRLFQENLGLLHKYYVKNALVCSHDHLTLFLTLVSGLEFIRFELDLDAPYLDLAPYMPDYYKPQYLLDFEDRLPSSVHGSDSLSLNSFNSVTSTNLEWDDSAIAPSSEDYDFGDVFPAVPSVPSTDWEDGDLTDTVSGPRSTASDLTSSKASTRSPTQRQNPFNEEPAETVSSSDTTPVHTTSQEKEEAQALDPPDACTELEVIRVTKKKKIGKKKKSRSDEEASPLHPACSQKKCAKQGDGDSRNGSPSLGRDSPDTMLASPQEEGEGPSSTTESSERSEPGLLIPEMKDTSMERLGQPLSKVIDQLNGQLDPSTWCSRAEPPDQSFRTGSPGDAPERPPLCDFSEGLSAPMDFYRFTVESPSTVTSGGGHHDPAGLGQPLHVPSSPEAAGQEEEGGGGEGQTPRPLEDTTREAQELEAQLSLVREGPVSEPEPGTQEVLCQLKRDQPSPCLSSAEDSGVDEGQGSPSEMVHSSEFRVDNNHLLLLMIHVFRENEEQLFKMIRMSTGHMEGNLQLLYVLLTDCYVYLLRKGATEKPYLVEEAVSYNELDYVSVGLDQQTVKLVCTNRRKQFLLDTADVALAEFFLASLKSAMIKGCREPPYPSILTDATMEKLALAKFVAQESKCEASAVTVRFYGLVHWEDPTDESLGPTPCHCSPPEGTITKEGMLHYKAGTSYLGKEHWKTCFVVLSNGILYQYPDRTDVIPLLSVNMGGEQCGGCRRANTTDRPHAFQVILSDRPCLELSAESEAEMAEWMQHLCQAVSKGVIPQGVAPSPCIPCCLVLTDDRLFTCHEDCQTSFFRSLGTAKLGDISAVSTEPGKEYCVLEFSQDSQQLLPPWVIYLSCTSELDRLLSALNSGWKTIYQVDLPHTAIQEASNKKKFEDALSLIHSAWQRSDSLCRGRASRDPWC

SEQ ID NO: 5478 - DNA, 1304 bp, Homo sapiens
ggcgacggtggcagcgccatggagccgggggaggtgaaggaccggatcctggagaacatctcgctgtcggtgaagaagttgcagagctattttgctgcatgtgaggatgagatccctgccatccggaaccatgacaaggtcctacagcgtctgtgtgagcacctggaccacgccctgctgtacggactgcaagacctctcctctggctactgggtgctcgtggtgcattttactcggagagaggccatcaagcagatcgaggtgctgcagcacgtggccaccaacctggggcgcagccgtgcctggctgtacctggccctcaacgagaactccttggagagctacctgcggttgttccaggagaacctgggcctgctgcataagtactacgtcaagaatgccctggtctgcagccacgatcacctgacgctcttcctgaccttggtgtccgggctagagttcattcgtttcgagctggatctggatgccccttacctagacctggccccctacatgcccgactactacaaacctcagtacctgctggactttgaagacccctgcagccagaagaaatgtgccaagcagggggacggtgacagccgcaacggcagcccaagccttgggcgggactcgccagacactatgcttgcctccccccaggaggagggagaggggccgagcagcaccacggagagcagcgagcgctccgagccgggcctgctgatccctgagatgaaggacacctccatggagcgcttggggcagcccctgagcaaggttatcgaccagctcaacgggcagctggaccccagcacctggtgctcccgtgctgagcccccagaccagtcctttcggaccggctctcccggggatgccccggagaggccgccgctttgcgactttagtgaggggctttcagccccaatggacttctaccgctttaccgtcgagagtccaagcactgttacatcaggtggcggccaccatgaccctgcagggcttggccaaccgctgcatgttcctagtagccctgaggctgctggccaagaagaagagggaggaggaggagagggacagacgcctcggcccctagaggataccacgagggaggctcaggagctggaggcccagctgtccctggtcagggaggggcctgtgtctgagccagagcctgggacccaggaggttctctgccagctcaagcgagaccagcccagcccgtgtctgagtagcgctgaggattctggggtggatgagggacaggggagcccttcggagatggtccattcctcggagttcag

SEQ ID NO: 5479 - protein, 427 aa, Homo sapiens
MEPGEVKDRILENISLSVKKLQSYFAACEDEIPAIRNHDKVLQRLCEHLDHALLYGLQDLSSGYWVLVVHFTRREAIKQIEVLQHVATNLGRSRAWLYLALNENSLESYLRLFQENLGLLHKYYVKNALVCSHDHLTLFLTLVSGLEFIRFELDLDAPYLDLAPYMPDYYKPQYLLDFEDPCSQKKCAKQGDGDSRNGSPSLGRDSPDTMLASPQEEGEGPSSTTESSERSEPGLLIPEMKDTSMERLGQPLSKVIDQLNGQLDPSTWCSRAEPPDQSFRTGSPGDAPERPPLCDFSEGLSAPMDFYRFTVESPSTVTSGGGHHDPAGLGQPLHVPSSPEAAGQEEEGGGGEGQTPRPLEDTTREAQELEAQLSLVREGPVSEPEPGTQEVLCQLKRDQPSPCLSSAEDSGVDEGQGSPSEMVHSSE

SEQ ID NO: 5480 - DNA, 1344 bp, Homo sapiens
gacaaggcagtttcagcctggtgcttctggggttctgaaaagtgtcatcagctccatgaagagccttcagccaccctcttcaagttctcaagtttctctccccatcacaccctgtacaaatgggatgctggcccacatagagccaaagaggctcccaggcacctcttggactgggctcaaaatggatgcagctgccccgtcctaatcaaatgaccttccttgggccaggcgcagtggctcacacctataatcccagcactttgggaggctcaggtgatccaccccacctcatcctctcaaagtgtgggattacaggcatgaaccactgcacctggtccaaatccctgttattaaagagcctcctaccctctgggccacttccagcctggaacaggggaggtgagggaacctggcctctgaacaggggaggtgagaactgccacaccctgaggatgaggggcacgtggctctccccgcattattagagacgtgattgctgagtaatgggtgacaggtgatccgttcccagataatgtgagtatgaaataccttaactctgtgagaaataagatgtggcattgggaaaaataaactatgacacttggccaagagtagcattgaagggtcccctgtttgagttaaattagcttggattccagaattccatcataacatcatgtaccctcttagcccctcttcttgcagcacacatgctggatattgtttttttttccctccgattctaacaactaacccccctcctgacacgcctgctgcagtcacttgacaagcagggcctgaccttcctctacagcctttcagagctccctgcggcctgagaactaacagcccagttgcactgcttgcctcagggcagggtgagatttctggagttcctggagcaggattcctgagctcactctggcagctcacccggggaggctctgtcttctccttggacctggaggaaggcaggacttggggcagctccaaactctgagcctggggtggccttcccctggtctttggcttatttacagagctggtgggcatgcgggccttgacacccaccacatctcatgatctgcccactcacctctcagggctcctcttgggtgcaactgcgtgtgctgaggagaatcacaggagccggagcaagaacacatgggcttggcaggagcctgctttgggaccgagagacgcggttttctgtatcttagaacttaggctctgagatccccggaaatctggaaaaagtccccgatgttgctggtcttttctggcagagctactcattgcctttagcctcctcttttgtccttatattaaaagacagcagactta

SEQ ID NO: 5481 - protein, 99 aa, Homo sapiens
MQLPRPNQMTFLGPGAVAHTYNPSTLGGSGDPPHLILSKCGITGMNHCTWSKSLLLKSLLPSGPLPAWNRGGEGTWPLNRGGENCHTLRMRGTWLSPHY

SEQ ID NO: 5482 - DNA, 1339 bp, Homo sapiens
gtggagggtggacgatggagacaagccactcaccaggccttgcagccccgcccccactcaaagctcaccaagacgcagtactccttgcccggctcggtggagacggcgctgatgtcgcccagcttggctgtgcccaaagagcggaagaagctggtctggcaatcctcatggcacgtaaagaggcggtcatccgtgaggaccaggcagcagggctcctgccaagcccatgtgttcttgctccggctcctgtgattctcctcagcacacgcagttgcacccaagaggagccctgagaggtccaaggagaagacagagcctccccgggtgagctgccagagtgagctcaggaatcctgctccaggaactccagaaatctcaccctgccctgaggcaagcagtgcaactgggctgttagttctcaggccgcagggagctctgaaaggctgtagaggaaggtcaggccctgcttgtcaagtgactgcagcaggcgtgtcaggaggggggttagttgttagaatcggagggaaaaaaaaacaatatccagcatgtgtgctgcaagaagaggggctaagagggtacatgatgttatgatggaattctggaatccaagctaatttaactcaaacaggggacccttcaatgctactcttggccaagtgtcatagtttatttttcccaatgccacatcttatttctcacagagttaaggtatttcatactcacattatctgggaacggatcacctgtcacccattactcagcaatcacgtctctaataatgcggggagagccacgtgcccctcatcctcagggtgtggcagttctcacctcccctgttcagaggccaggttccctcacctcccctgttccaggctggaagtggcccagagggtaggaggctctttaataacagggatttggaccaggtgcagtggttcatgcctgtaatcccacactttgagaggatgaggtggggtggatcacctgaggtcaggagtttgagaccagcctggccaacatggtgaaaccctgtctctactaaaaatacaaaaattagccgggcgtggtggcacacacctgtaatcccagctacttgggaggctgaggcaggagaattgcttgaacccgggaggtggaggttacagtaagccaagatcacaccactgcactccagcctgagcaacagagcgagactccgtctcaaaaagtaaaataaaataacataaagtaaaataacagggatctgctatggcctcagatttaagggggaaacattcaccttattggcaacatagcctttgctttgagtaatcgtggcaacctgggaatagctttgtga

SEQ ID NO: 5483 - protein, 92 aa, Homo sapiens
METSHSPGLAAPPPLKAHQDAVLLARLGGDGADVAQLGCAQRAEEAGLAILMARKEAVIREDQAAGLLPSPCVLAPAPVILLSTRSCTQEEP

SEQ ID NO: 5484 - DNA, 612 bp, Homo sapiens
ggactgggccttgggtgactgagggtggcctggcaggagagagctgtctgggggcagaggccaaggtgggcatgttggtaccggccccagcctgagcagacacacctgacagctggcccaggtggcgttctcttctcagcgggcacaaagggcatcccagggcaggcctggcagcaagtccttaccagccaaggtcactcctcaagtcctactcacccaggtgccctgaaggcctcccagctgcccgccctgtgggcatttgcacatatcctgacaagcctgaaagaagctccgggtgcccattgttcagtccaggtgcccattgttcccgggactgaggcccgggaaagggaagcgacgtggcagggccagcagcagaccctgggcctttctctagactgagcaccattccccgtgggtgtgctctcagcgccgcaccgaccttcacactgcagagatggatgccaactccctggcaggggcaggactgctgccgagcagccccacctgccctcccagccacaccccaagtctgtaagggccgctcccaggaacacctgctactgcacactccaaaccaataaagttttatattttgtttacttcaacgac

SEQ ID NO: 5485 - protein, 40 aa, Homo sapiens
MPTPWQGQDCCRAAPPALPATPQVCKGRSQEHLLLHTPNQ

SEQ ID NO: 5486 - DNA, 3099 bp, Homo sapiens
ggactgctgagatagaccagggacaccaggcagccacaggcctgtcagaccaggacccttaccctctagacatggcctcggtcccctgcaaaccccagccccgtagccctgcgaggttacagacagcctaaacgccaccaccacagggcctgtgccgtgcccctgacccgggcacagaaggccactggcccggaggccatggagacggtgcccccagcagtggacctggtgctgggtgcttctgcctgctgcctggcctgtgtcttcaccaaccccctggaggtggtgaagacgcggctgcagctgcagggggagctgcaggcccggggcacctacccacggccctaccatggcttcatagcctctgtcgctgctgtggcccgagcagacgggctgtggggcctgcagaaggggctggctgccggccttctgtaccaaggcctcatgaatggcgttcgtttctactgctacagcctggcgtgccaggctggcctcacgcagcaaccaggtggcaccgtggttgcgggagccgtggcgggggcactgggagccttcgtggggagccctgcttacctgatcaaaacgcagctgcaagctcagacagtggccgcagtggccgtgggacaccagcacaatcaccagactgtcctgggtgccttggagaccatctggcggcagcaagggctcttggggctgtggcagggcgttggtggggctgtgccccgagtcatggtgggctcagctgcccagctggccaccttcgcctctgccaaggcctgggtacagaagcaacagtggctccctgaggacagctggctggtggccctggctgggggcatgatcagcagcatagccgtggttgtcgtcatgactcccttcgatgtggtcagcacgcggctatacaatcagccggtggacacagctggcaggggccagctctatgggggcctcaccgactgcatggtgaagatctggcggcaggagggccccctggcactctacaagggcctgggccccgcctacctgcgcctgggcccccacaccatcctcagcatgctcttctgggacgagcttcggaaactggctgggcgggcccagcacaagggcacctagacgacggccctcacccccacgtcctgacacggccggcacttggccggaagtgagagcctgctccaggacaactggctgtcccggggcgggccatgggcccaggccctgccagaggtcccgggagagtgtggacagctctggtccatccagccccttggcccacccaggtccagagcatccacttcaagttaccacccattctgtcttccagacagttctcttccttctctgtactgcgtactgggtcaccacatcccagagccttgctcagttatagcaactgctgcgggcgtgcacatggcataggcccagtaacttacatacatcggctcacttaggcctcagacagcagcacgaggcaggcacttttacttcttttaccattagaaagccaaggcctagagtggtgggctttgaccacagccacacaattttgaagtggcagagccaggactggagcttagccctgctcaccctagacctatgcgcttgacaagtgcgtgactgtgacaggcccatgggcccggactgcccataggggtcactgtaccatggcaaaggctgaggtgcaccaggaggctgtggcgtcgtcacctgccttatttgctggagaagctgtagcaaagaaccacagactgggcgacttagacaatagaaatgtattttctcacagttctggaggctggatgctggagaccaaggtgtcagtgggctggtttcttctgaggcctctgtccatggcttgcagatgctgctttctctctgtgtctgcacatggtggtccctcgatgtgcgtctgggtcctgatctcctcctcttataaggacacaaatcatgttggcttagggcccaccctcatgaccccactttaatttttttttttttttttgagatgaagtctcactctgccacccaagctggagtgcagtggcacgatctcggttcactgcaaccttggcctcctaggttcaagcaattctcctgccccagcctcctgagtagctgggattacaggtgtgtgccaccacacccggccaatttttgtatctttagtagagatggggttttgccatgttggccagactggtctcgaactcctgacctcaagtgatccactggccttggcctcccaaagtgctgggattacaggcatgagccacctcacttggcccaattttaacttaattatctctgtcaagagcctatctccatatacagtcacatcctgagctactagggggtaggacttcaacatgcacttctgcaggggccgcagttcagccaacatcatctttttttttgagatggagtctcgctttgttgcccaggctggagtgcggtggtgcaatctcggctcaccacaacctccacctcccaggttcaagtgattctcctgcctcagcctcccgagttgctgggactataggtgtgcgccaccatgcccagctaattttgtatttttagtagagacaggctttcgctgtgttggccaggctggtcttgaatgcctgaccttgccgcccgcctcggcctcccaaaatgctgggattacaggcgtgagccaccgcgcctggcctcagccaacatcatctaagggctctcacggagggcctcccagctgcccgccctgtgggcatttgcacatatcctgacaagcctgaaagaagctccgggtgcccattgttcagtccaggtgcccattgttcccgggactgaggcccgggaaagggaagcgacgtggcagggccagcagcagaccctgggcctttctctagactgagcaccattccccgtgggtgtgctctcagcgccgcaccgaccttcacactgcagagatggatgccaactccctggcaggggcaggactgctgccgagcagccccacctgccctcccagccacaccccaagtctgtaagggccgctcccaggaacacctgctactgcacactccaaaccaataaagttttatattttgtttacttcaa

SEQ ID NO: 5487 - protein, 304 aa, Homo sapiens; identical to SEQ ID NO: 46

SEQ ID NO: 5488 - DNA, 613 bp, Homo sapiens
tatttcacttgacccctaagcttcaggctcgggaccatggagctgtgagtttcaggggcacgggggcagggcgccctcaacacacacagctcaccctggctctcccaggctccatccccacacccgtgtcctctctgctcccatagatcaaaacgcagctgcaagctcagacagtggccgcagtggccgtgggacaccagcacaatcaccagactgtcctgggtgccttggagaccatctggcggcagcaagggctcttggggctgtggcagggcgttggtggggctgtgccccgagtcatggtgggctcagctgcccagctggccaccttcgcctctgccaaggcctgggtacagaagcaacagtggctccctgaggacagctggctggtggccctggctgggggcatgatcagcagcatagccgtggttgtcgtcatgactcccttcgatgtggtcagcacgcggctatacaatcagccggtggacacagctggcaggggccagctctatgggggcctcaccgactgcatggtgaagatctggcggcaggagggccccctggcactctacaagggcctgggccccgcctacctgcgcctgggcccccacac

SEQ ID NO: 5489 - protein, 103 aa, Homo sapiens
MVGSAAQLATFASAKAWVQKQQWLPEDSWLVALAGGMISSIAVVVVMTPFDVVSTRLYNQPVDTAGRGQLYGGLTDCMVKIWRQEGPLALYKGLGPAYLRLGP

SEQ ID NO: 5490 - DNA, 406 bp, Homo sapiens
aggagccagaactggaattcaggcctgaccccacagccttcccatggcgccgcagcctcacagggccagctctatgggggcctcaccgactgcatggtgaagatctggcggcaggagggccccctggcactctacaagggcctgggccccgcctacctgcgcctgggcccccacaccatcctcagcatgctcttctgggacgagcttcggaaactggctgggcgggcccagcacaagggcacctagacgacggccctcacccccacgtcctgacacggccggcacttggccggaagtgagagcctgctccaggacaactggctgtcccggggcgggccatgggcccaggccctgccagaggtcccgggagagtgtggacagctctggtccatccagccccttggcc

SEQ ID NO: 5491 - protein, 50 aa, Homo sapiens [sequence omitted]

SEQ ID NO: 5492 - DNA, 1739 bp, Homo sapiens
accgactgcatggtgaagatctggcggcaggagggccccctggcactctacaagggcctgggccccgcctacctgcgcctgggcccccacaccatcctcagcatgctcttctgggacgagcttcggaaactggctgggcgggcccagcacaagggcacctagacgacggccctcacccccacgtcctgacacggccggcacttggccggaagtgagagcctgctccaggacaactggctgtcccggggcgggccatgggcccaggccctgccagaggtcccgggagagtgtggacagctctggtccatccagccccttggcccacccaggtccagagcatccacttcaagttaccacccattctgtcttccagacagttctcttccttctctgtactgcgtactgggtcaccacatcccagagccttgctcagttatagcaactgctgcgggcgtgcacatggcataggcccagtaacttacatacatcggctcacttaggcctcagacagcagcacgaggcaggcacttttacttcttttaccattagaaagccaaggcctagagtggtgggctttgaccacagccacacaattttgaagtggcagagccaggactggagcttagccctgctcaccctagacctatgcgcttgacaagtgcgtgactgtgacaggcccatgggcccggactgcccataggggtcactgtaccatggcaaaggctgaggtgcaccaggaggctgtggcgtcgtcacctgccttatttgctggagaagctgtagcaaagaaccacagactgggcgacttagacaatagaaatgtattttctcacagttctggaggctggatgctggagaccaaggtgtcagtgggctggtttcttctgaggcctctgtccatggcttgcagatgctgctttctctctgtgtctgcacatggtggtccctcgatgtgcgtctgggtcctgatctcctcctcttataaggacacaaatcatgttggcttagggcccaccctcatgaccccactttaatttttatcatctttttttttgagatggagtctcgctttgttgcccaggctggagtgcggtggtgcaatctcggctcaccacaacctccacctcccaggttcaagtgattctcctgcctcagcctcccgagttgctgggactataggtgtgcgccaccatgcccagctaattttgtatttttagtagagacaggctttcgctgtgttggccaggctggtcttgaatgcctgaccttgccgcccgcctcggcctcccaaaatgctgggattacaggcgtgagccaccgcgcctggcctcagccaacatcatctaagggctctcacggagggcctcccagctgcccgccctgtgggcatttgcacatatcctgacaagcctgaaagaagctccgggtgcccattgttcagtccaggtgcccattgttcccgggactgaggcccgggaaagggaagcgacgtggcagggccagcagcagaccctgggcctttctctagactgagcaccattccccgtgggtgtgctctcagcgccgcaccgaccttcacactgcagagatggatgccaactccctggcaggggcaggactgctgccgagcagccccacctgccctcccagccacaccccaagtctgtaagggccgctcccaggaacacctgctactgcacactccaaaccaataaagttttatattttgtttacttcaa

SEQ ID NO: 5493 - protein, 106 aa, Homo sapiens [sequence omitted]

SEQ ID NO: 5494 - DNA, 631 bp, Homo sapiens
ggctgtgccagggatccagaggctaaagcacattccagcaaaaacactggcccccgcttggaacccagagcccagtctgggtccggcaaggggctggccctgtgcccacctaactgagccatttccttccagactggggcacatttcctgcccggagggaacagagcacattcccaggcggcatggactgggtcctgcattgggggaggggattccgtaggcattttcccaaccccagcgaccacgccctgggatgagaggcctgtcctggtggtagggctaggagcacggttcaaagggtgctgctggagctgtccaaggggtggccattcttcggggaatgagctgaaaccacccggccctgccttgggtgcagcctgctctgtatcccaggtgtgctgagcgtagagcgagaaggatccttgagtcacccctgcctgctcccaagcagcagtcttcggaggaggagatcaggacccagacgcacatcgagggaccaccatgtgcagacacagagagaaagcagcatctgcaagccatggacagaggcctcagaagaaaccagcccactgacaccttggtctccagcatccagcctccagaactgtgagaaaatacatttctattgtct

SEQ ID NO: 5495 - protein, 94 aa, Homo sapiens
AETTRPCLGCSLLCIPGVLSVEREGSLSHPCLLPSSSLRRRRSGPRRTSRDHHVQTQRESSICKPWTEASEETSPLTPWSPASSLQNCEKIHFY

SEQ ID NO: 5496 - DNA, 1112 bp, Homo sapiens
tttttgtatttttagtagagacagagttttaccatattggtcaggctggtctcgaactcctgaccttgtgatctgcccaccttggcctcccaaagtgctgggattacaagtgtaagccactgcgcctgtcctccctcaaggaagatttcaagtaaagtggatgccagactttagcagggacagagaccagagaccagcccagagacacctgtcccttcaccccacactgcccaaatggggagcccgggcagcagctggctccaggcaccccgtgtgcctggagctgggaccttgcccttctgggcctcgaagggttaacacccctggctctcctcccctcccctcccctgggcctttgacccctcccagcctctctccttccctccaccgacacctttgcccagtgacgttggtctgtccttacgcagacctggccggaggctggggctccttccggggctgccatgttctctcttccatccctcccctcctggctccccggcctcccctccctcgagtggggctctagcctccttgactccctcctgcaaggcctgatcggggcccttggagtcttggtcctgaacagcctcctgaaagtttacttcttcgtgggctgtgccaatgacccgcagcggcgacccgaaaaggagcggcttcgggcccagtgggcctccctggaaacggtgcacctggcagggctggccctgtttctgacggtcgtggggtcccgggtggctgccctcgtggtgctcgagttctccctccgggccgtgtccacgctgctgtccctgggcaagggctcccagggtgccgccgagaggctgcagctctacctgctgtgccagtactcgctgggctgcgggctgacctgtggcctgagcttcctgcaggagggcgcccctcaccgcacgctgaacctgctgctgagcctcgggctggccacgctgctgggcctgggtgcccggcgcctccaccgccacgtctgccgcctctacgagctgcacagcagccagcgctactgtggggtgtgcctgggcctgctggcccatgcacatggcctcccccagctgctgggccgtgccctggccatagcctttgccgtgggtgac

SEQ ID NO: 5497 - protein, 215 aa, Homo sapiens
MFSLPSLPSWLPGLPSLEWGSSLLDSLLQGLIGALGVLVLNSLLKVYFFVGCANDPQRRPEKERLRAQWASLETVHLAGLALFLTVVGSRVAALVVLEFSLRAVSTLLSLGKGSQGAAERLQLYLLCQYSLGCGLTCGLSFLQEGAPHRTLNLLLSLGLATLLGLGARRLHRHVCRLYELHSSQRYCGVCLGLLAHAHGLPQLLGRALAIAFAVG

SEQ ID NO: 5498 - DNA, 663 bp, Homo sapiens
cgccgagaggctgcagctctacctgctgtgccagtactcgctgggctgcgggctgacctgtggcctgagcttcctgcaggagggcgcccctcaccgcacgctgaacctgctgctgagcctcgggctggccacgctgctgggcctgggtgcccggcgcctccaccgccacgtctgccgcctctacgagctgcacagcagccagcgctactgtggggtgtgcctgggcctgctggcccatgcacatggcctcccccagctgctgggccgtgccctggccatagcctttgccgtgggtgacctggcagctgtggccctcatcaaccaggacttcctgaccacctcggaggccatgcggttctggacaccgctcaccatctgctacacgctgctggtcatctacatgcaggaggagcagcggcagcaccccggcctgcagagccaggtgcagacggtgctggtgcgcatgggcggcctcttcgtgctgctgctgactgtgggtcgctggctggacctgctgggcatccttgtctccctactgggcgagctctggtgtctcgtgggcgtccgcaccctgcttgacctctgccagatacaggattttccatcccagaggcctccagtgtcaacaccaagccagcccctgccctcggcaccccagtccca

SEQ ID NO: 5499 - protein, 103 aa, Homo sapiens
MRFWTPLTICYTLLVIYMQEEQRQHPGLQSQVQTVLVRMGGLFVLLLTVGRWLDLLGILVSLLGELWCLVGVRTLLDLCQIQDFPSQRPPVSTPSQPLPSAPQ

SEQ ID NO: 5500 - DNA, 2314 bp, Homo sapiens
gttgcaggaagtttggcacctgccgatcggtgacatcgacacccgagctgctgcgggccaggacgaatccctccatccgggagcagtggtggcggtggaacaggtggcctggggtgctggaggcaggccaacctggagaggtaggcagtggctacctccactttacagatgaagacactgaggctcaggaggtggcgtgactgctccgggtctcacgcttagtaaacggccgcagaaccctggtcggtttgacgcaagaccctggcggatcccagagccaaacagagctggcctgaacctccaggacttcagcccttctaggagaatctgatcccaggtgagggaggtcacttggggtgtggcccagcaggcaggcgggactccagactgggaacggaagtcagccctgctggggctgggagctgaagcatctgttccttcctcgcgggtgtgagacaaggaagagtgatcattgccacaccaggagctgaagccatggcctcaaagcctgagaagagggtggcatcgtctgtctttatcaccctggcacccccgcgccgcgatgtggccgtggcggaggaagtgaggcaggcagtttgtgaggcccggcgtggccgcccctgggaggctcctgcccccatgaagacacccgaggctggcttggcggggaggcccagcccctggacaacccctggcagagctgcagccacagtgccggctgcacctatgcagctcttcaatggaggatgcccaccccctcctcctgtcctggatggtgaggacgtgcttcctgacctggacctcctcccaccccctccaccgccccctccagtgcttctgccttctgaagaggaggctcctgctccaatgggggcctcactcattgcagacttagagcagctgcacctgtccccgcccccgcccccaccacaggccccagcggagggaccttcagtccagcccggtcccctcaggcccatggaggaagagctgccacctcccccggcagaacctgttgagaaaggggcatccacagacatctgtgccttctgccacaagaccgtgtccccccgagagctggctgtggaggccatgaagaggcagtaccatgcccagtgcttcacgtgccgcacctgccgccgccagctggctgggcagagcttctaccagaaggatgggcgacccctctgcgaaccctgctaccaggacacactggagaggtgcggcaagtgtggcgaggtggtccgggaccacatcatcagggccctgggccaggccttccacccctcctgcttcacgtgtgtgacctgcgcccggtgcattggggatgagagctttgccctgggcagccagaacgaggtgtactgcctggacgacttctacaggaaattcgcccccgtctgcagcatctgtgaaaatcccatcatccctcgggatgggaaagatgccttcaaaatcgaatgcatgggaagaaacttccatgaaaattgctacaggtgtgaggactgcaggatcctcctgtctgtcgagcccacggaccaaggctgctaccccctgaacaaccatctcttctgcaagccatgccatgtgaagcggagtgctgcggggtgctgctgagagtgcccgctgggcagtgaacagaccactagccccggctggggcccttccctgacttggtttcccttcctaacctgctcttgcacactttccttctgagcctccatggagaccagcctgcaagccggcccagcctgtccaggatacagtggggctgagcacccccaggccttccactcctctaccctctgggcaccagaaggctcctggaccatgagcttcacccccagaattccctgctgaccctgccccacttccagggaaaagctgggggaggttggacccctctcactgactagctgtctggtaggggtgctaggaccagcctcgcctgtggggttgagctgtttgaggacaaactccaaggtcccttaaaaagtgccttttagaggctgggcatggtggctcacgcttgtaatcccagcactttgggaggccaaggtgggtggatcacctgaggtcaggagttcaagaccagcctggccaacatggtgaaaccctgtctctactaaaaatacaaaaattagccaggcatggtagcaggtgcctgtaatcccagctactggggaaagctgaggcaggagaattgcttcaatctggaaggcagaggttgcagtgagattgcaccattgcattccagcctgggcaacaagagggaaactccgtctcaaaaaaaaaaaagtgccttttaggccgg

SEQ ID NO: 5501 - protein, 373 aa, Homo sapiens; identical to SEQ ID NO: 54

SEQ ID NO: 5502 - DNA, 2431 bp, Homo sapiens
atgaagaacgcgaggggatgggcagcggggagggaaggaaacccaccccgactccccattctcctacccccactccccatccctcccattcccccatcgcccccatccccattcccccccattcccaccccctggcctgtgccaagggggaggggaggcgtcgtccagggaacaaagggagggggaaggggcggcgcggggcgcggccgggcaggttggggggcaggtaggggccgcttccgcggggcgggaatcccgcgccccctccccccgagcctcaccttttatggtaaagcggcgcggggcggcggggcggagggagccgagggggcggggagggcggacgggcggaggggacgggaggcccagcggctccgggctccgctggctcgggcgtcggatcggagccgccggggcgcgggcggcccagagctggcctgaacctccaggacttcagcccttctaggagaatctgatcccaggtgagggaggtcacttggggtgtggcccagcaggcaggcgggactccagactgggaacggaagtcagccctgctggggctgggagctgaagcatctgttccttcctcgcgggtgtgagacaaggaagagtgatcattgccacaccaggagctgaagccatggcctcaaagcctgagaagagggtggcatcgtctgtctttatcaccctggcacccccgcgccgcgatgtggccgtggcggaggaagtgaggcaggcagtttgtgaggcccggcgtggccgcccctgggaggctcctgcccccatgaagacacccgaggctggcttggcggggaggcccagcccctggacaacccctggcagagctgcagccacagtgccggctgcacctatgcagctcttcaatggaggatgcccaccccctcctcctgtcctggatggtgaggacgtgcttcctgacctggacctcctcccaccccctccaccgccccctccagtgcttctgccttctgaagaggaggctcctgctccaatgggggcctcactcattgcagacttagagcagctgcacctgtccccgcccccgcccccaccacaggccccagcggagggaccttcagtccagcccggtcccctcaggcccatggaggaagagctgccacctcccccggcagaacctgttgagaaaggggcatccacagacatctgtgccttctgccacaagaccgtgtccccccgagagctggctgtggaggccatgaagaggcagtaccatgcccagtgcttcacgtgccgcacctgccgccgccagctggctgggcagagcttctaccagaaggatgggcgacccctctgcgaaccctgctaccaggacacactggagaggtgcggcaagtgtggcgaggtggtccgggaccacatcatcagggccctgggccaggccttccacccctcctgcttcacgtgtgtgacctgcgcccggtgcattggggatgagagctttgccctgggcagccagaacgaggtgtactgcctggacgacttctacaggaaattcgcccccgtctgcagcatctgtgaaaatcccatcatccctcgggatgggaaagatgccttcaaaatcgaatgcatgggaagaaacttccatgaaaattgctacaggtgtgaggactgcaggatcctcctgtctgtcgagcccacggaccaaggctgctaccccctgaacaaccatctcttctgcaagccatgccatgtgaagcggagtgctgcggggtgctgctgagagtgcccgctgggcagtgaacagaccactagccccggctggggcccttccctgacttggtttcccttcctaacctgctcttgcacactttccttctgagcctccatggagaccagcctgcaagccggcccagcctgtccaggatacagtggggctgagcacccccaggccttccactcctctaccctctgggcaccagaaggctcctggaccatgagcttcacccccagaattccctgctgaccctgccccacttccagggaaaagctgggggaggttggacccctctcactgactagctgtctggtaggggtgctaggaccagcctcgcctgtggggttgagctgtttgaggacaaactccaaggtcccttaaaaagtgccttttagaggctgggcatggtggctcacgcttgtaatcccagcactttgggaggccaaggtgggtggatcacctgaggtcaggagttcaagaccagcctggccaacatggtgaaaccctgtctctactaaaaatacaaaaattagccaggcatggtagcaggtgcctgtaatcccagctactggggaaagctgaggcaggagaattgcttcaatctggaaggcagaggttgcagtgagattgcaccattgcattccagcctgggcaacaagagggaaactccgtctc

SEQ ID NO: 5503 - protein, 373 aa, Homo sapiens; identical to SEQ ID NO: 54

SEQ ID NO: 5504 - DNA, 3694 bp, Homo sapiens
atgaagaacgcgaggggatgggcagcggggagggaaggaaacccaccccgactccccattctcctacccccactccccatccctcccattcccccatcgcccccatccccattcccccccattcccaccccctggcctgtgccaagggggaggggaggcgtcgtccagggaacaaagggagggggaaggggcggcgcggggcgcggccgggcaggttggggggcaggtaggggccgcttccgcggggcgggaatcccgcgccccctccccccgagcctcaccttttatggtaaagcggcgcggggcggcggggcggagggagccgagggggcggggagggcggacgggcggaggggacgggaggcccagcggctccgggctccgctggctcgggcgtcggatcggagccgccggggcgcgggcggcccagagctggcctgaacctccaggacttcagcccttctaggagaatctgatcccaggtgagggaggtcacttggggtgtggcccagcaggcaggcgggactccagactgggaacggaagtcagccctgctggggctgggagctgaagcatctgttccttcctcgcgggtgtgagacaaggaagagtgatcattgccacaccaggagctgaagccatggcctcaaagcctgagaagagggtggcatcgtctgtctttatcaccctggcacccccgcgccgcgatgtggccgtggcggaggaagtgaggcaggcagtttgtgaggcccggcgtggccgcccctgggaggctcctgcccccatgaagacacccgaggctggcttggcggggaggcccagcccctggacaacccctggcagagctgcagccacagtgccggctgcacctatgcagctcttcaatggaggatgcccaccccctcctcctgtcctggatggtgaggacgtgcttcctgacctggacctcctcccaccccctccaccgccccctccagtgcttctgccttctgaagaggaggctcctgctccaatgggggcctcactcattgcagacttagagcagctgcacctgtccccgcccccgcccccaccacaggccccagcggagggaccttcagtccagcccggtcccctcaggcccatggaggaagagctgccacctcccccggcagaacctgttgagaaaggggcatccacagacatctgtgccttctgccacaagaccgtgtccccccgagagctggctgtggaggccatgaagaggcagtaccatgcccagtgcttcacgtgccgcacctgccgccgccagctggctgggcagagcttctaccagaaggatgggcgacccctctgcgaaccctgctaccaggacacactggagaggtgcggcaagtgtggcgaggtggtccgggaccacatcatcagggccctgggccaggccttccacccctcctgcttcacgtgtgtgacctgcgcccggtgcattggggatgagagctttgccctgggcagccagaacgaggtgtactgcctggacgacttctacaggaaattcgcccccgtctgcagcatctgtgaaaatcccatcatccctcgggatgggaaagatgccttcaaaatcgaatgcatgggaagaaacttccatgaaaattgctacaggtgtgaggactgcaggatcctcctgtctgtcgagcccacggaccaaggctgctaccccctgaacaaccatctcttctgcaagccatgccatgtgaagcggagtgctgcggggtgctgctgagagtgcccgctgggcagtgaacagaccactagccccggctggggcccttccctgacttggtttcccttcctaacctgctcttgcacactttccttctgagcctccatggagaccagcctgcaagccggcccagcctgtccaggatacagtggggctgagcacccccaggccttccactcctctaccctctgggcaccagaaggctcctggaccatgagcttcacccccagaattccctgctgaccctgccccacttccagggaaaagctgggggaggttggacccctctcactgactagctgtctggtaggggtgctaggaccagcctcgcctgtggggttgagctgtttgaggacaaactccaaggtcccttaaaaagtgccttttagaggctgggcatggtggctcacgcttgtaatcccagcactttgggaggccaaggtgggtggatcacctgaggtcaggagttcaagaccagcctggccaacatggtgaaaccctgtctctactaaaaatacaaaaattagccaggcatggtagcaggtgcctgtaatcccagctactggggaaagctgaggcaggagaattgcttcaatctggaaggcagaggttgcagtgagattgcaccattgcattccagcctgggcaacaagagggaaactccgtctcaaaaaaaaaaaagtgccttttaggccggatgtggtggctcatgcctgtaatcccagcactttgggaggccaaggcaggcagatcacttgaggtcaggagtttgagaccagcctggccaacacggcaaaaccccgtttctactaaaaatacaaaaattagctgggtgtggtggcgtgcgcctgtaatcccagctactcaggaggctgaggcaggagcattgcttgaacccgggaggcagaggttgcagtgagctgagatggcaccactgcactccagcctgggagacacagcgagactctgtctccaaaaaaaaaagtgctttttgaaaatgttgaggttgaaatgatgggaaccaacattctttggatttagtggggagcataatagcaaacacccccttggttcgcacatgtacaggaatgggacccagttggggcacagccatggacttccccgccctggaatgtgtggtgcaaagtggggccagggcccagacccaagaggagagggtggtccgcagacaccccgggatgtcagcatcccccgacctgccttctggcggcacctcccgggtgctgtgttgagtcagcaggcatggggtgagagcctggtatatgctgggaacagggtgcaggggccaagcgttcctccttcagccttgacttgggccatgcaccccctctcccccaaacacaaacaagcacttctccagtatggtgccaggacaggtgtcccttcagtcctctggttatgacctcaagtcctacttgggccctgcagcccagcctgtgttgtaacctctgcgtcctcaagaccacacctggaagattcttcttccctttgaaggagaatcatcattgttgctttatcacttctaagacattttgtacggcacggacaagttaaacagaatgtgcttccctccctggggtctcacacgctcccacgagaatgccacaggggccgtgcactgggcaggcttctctgtagaaccccaggggcttcggcccagaccacagcgtcttgccctgagcctagagcagggagtcccgaacttctgcattcacagaccacctccacaattgttataaccaaaggcctcctgttctgttatttcacttaaatcaacatgctattttgttttcactcacttctgactttagcctcgtgctgagccgtgtatccatgcagtcatgttcacgtgctagttacgtttttcttcttacacatgaaaataaatgcataagtgttagaagctcttcc

SEQ ID NO: 5505 - protein, 373 aa, Homo sapiens; identical to SEQ ID NO: 54

SEQ ID NO: 5506 - DNA, 3830 bp, Homo sapiens
atgaagaacgcgaggggatgggcagcggggagggaaggaaacccaccccgactccccattctcctacccccactccccatccctcccattcccccatcgcccccatccccattcccccccattcccaccccctggcctgtgccaagggggaggggaggcgtcgtccagggaacaaagggagggggaaggggcggcgcggggcgcggccgggcaggttggggggcaggtaggggccgcttccgcggggcgggaatcccgcgccccctccccccgagcctcaccttttatggtaaagcggcgcggggcggcggggcggagggagccgagggggcggggagggcggacgggcggaggggacgggaggcccagcggctccgggctccgctggctcgggcgtcggatcggagccgccggggcgcgggcggcccagagctggcctgaacctccaggacttcagcccttctaggagaatctgatcccaggtgagggaggtcacttggggtgtggcccagcaggcaggcgggactccagactgggaacggaagtcagccctgctggggctgggagctgaagcatctgttccttcctcgcgggtgtgagacaaggaagagtgatcattgccacaccaggagctgaagccatggcctcaaagcctgagaagagggtggcatcgtctgtctttatcaccctggcacccccgcgccgcgatgtggccgtggcggaggaagtgaggcaggcagtttgtgaggcccggcgtggccgcccctgggaggctcctgcccccatgaagacacccgaggctggcttggcggggaggcccagcccctggacaacccctggcagagctgcagccacagtgccggctgcacctatgcagctcttcaatggaggatgcccaccccctcctcctgtcctggatggtgaggacgtgcttcctgacctggacctcctcccaccccctccaccgccccctccagtgcttctgccttctgaagaggaggctcctgctccaatgggggcctcactcattgcagacttagagcagctgcacctgtccccgcccccgcccccaccacaggccccagcggagggaccttcagtccagcccggtcccctcaggcccatggaggaagagctgccacctcccccggcagaacctgttgagaaaggggcatccacagacatctgtgccttctgccacaagaccgtgtccccccgagagctggctgtggaggccatgaagaggcagtaccatgcccagtgcttcacgtgccgcacctgccgccgccagctggctgggcagagcttctaccagaaggatgggcgacccctctgcgaaccctgctaccaggacacactggagaggtgcggcaagtgtggcgaggtggtccgggaccacatcatcagggccctgggccaggccttccacccctcctgcttcacgtgtgtgacctgcgcccggtgcattggggatgagagctttgccctgggcagccagaacgaggtgtactgcctggacgacttctacaggaaattcgcccccgtctgcagcatctgtgaaaatcccatcatccctcgggatgggaaagatgccttcaaaatcgaatgcatgggaagaaacttccatgaaaattgctacaggtgtgaggactgcaggatcctcctgtctgtcgagcccacggaccaaggctgctaccccctgaacaaccatctcttctgcaagccatgccatgtgaagcggagtgctgcggggtgctgctgagagtgcccgctgggcagtgaacagaccactagccccggctggggcccttccctgacttggtttcccttcctaacctgctcttgcacactttccttctgagcctccatggagaccagcctgcaagccggcccagcctgtccaggatacagtggggctgagcacccccaggccttccactcctctaccctctgggcaccagaaggctcctggaccatgagcttcacccccagaattccctgctgaccctgccccacttccagggaaaagctgggggaggttggacccctctcactgactagctgtctggtaggggtgctaggaccagcctcgcctgtggggttgagctgtttgaggacaaactccaaggtcccttaaaaagtgccttttagaggctgggcatggtggctcacgcttgtaatcccagcactttgggaggccaaggtgggtggatcacctgaggtcaggagttcaagaccagcctggccaacatggtgaaaccctgtctctactaaaaatacaaaaattagccaggcatggtagcaggtgcctgtaatcccagctactggggaaagctgaggcaggagaattgcttcaatctggaaggcagaggttgcagtgagattgcaccattgcattccagcctgggcaacaagagggaaactccgtctcaaaaaaaaaaaagtgccttttaggccggatgtggtggctcatgcctgtaatcccagcactttgggaggccaaggcaggcagatcacttgaggtcaggagtttgagaccagcctggccaacacggcaaaaccccgtttctactaaaaatacaaaaattagctgggtgtggtggcgtgcgcctgtaatcccagctactcaggaggctgaggcaggagcattgcttgaacccgggaggcagaggttgcagtgagctgagatggcaccactgcactccagcctgggagacacagcgagactctgtctccaaaaaaaaaagtgctttttgaaaatgttgaggttgaaatgatgggaaccaacattctttggatttagtggggagcataatagcaaacacccccttggttcgcacatgtacaggaatgggacccagttggggcacagccatggacttccccgccctggaatgtgtggtgcaaagtggggccagggcccagacccaagaggagagggtggtccgcagacaccccgggatgtcagcatcccccgacctgccttctggcggcacctcccgggtgctgtgttgagtcagcaggcatggggtgagagcctggtatatgctgggaacagggtgcaggggccaagcgttcctccttcagccttgacttgggccatgcaccccctctcccccaaacacaaacaagcacttctccagtatggtgccaggacaggtgtcccttcagtcctctggttatgacctcaagtcctacttgggccctgcagcccagcctgtgttgtaacctctgcgtcctcaagaccacacctggaagattcttcttccctttgaaggagaatcatcattgttgctttatcacttctaagacattttgtacggcacggacaagttaaacagaatgtgcttccctccctggggtctcacacgctcccacgagaatgccacaggggccgtgcactgggcaggcttctctgtagaaccccaggggcttcggcccagaccacagcgtcttgccctgagcctagagcagggagtcccgaacttctgcattcacagaccacctccacaattgttataaccaaaggcctcctgttctgttatttcacttaaatcaacatgctattttgttttcactcacttctgactttagcctcgtgctgagccgtgtatccatgcagtcatgttcacgtgctagttacgtttttcttcttacacatgaaaataaatgcataagtgttagaagctcttccatgttgtgtgtaggctctcacacaggtaaacgctggcgtttggtagtagccctgggcatctgctcgctgtggcgggagtgtccgaagagtgctggggctcagctcagcagatggaggggctcatttcctgcctcat

SEQ ID NO: 5507 - protein, 373 aa, Homo sapiens; identical to SEQ ID NO: 54

SEQ ID NO: 5508 - DNA, 296 bp, Homo sapiens
tccctcccattcccccatcgcccccatccccattccccccctggaggggcctgcgggtggggggtgcggtcctcacgccctttgcgtcccagtctcttggtctctctccccggagtcggggagtcggcaggtccggggcgagggctcagtgaggccggcggagggccgagtcccagcccgggagcgggagccggggacccggcgcgcagggcggaagctcccgcacaaaaggccggagtcccgcacatggatcgaattaaagctccggcggcgcccagcggtgaccccggcggccg

SEQ ID NO: 5509 - protein, 97 aa, Homo sapiens
PSHSPIAPIPIPPLEGPAGGGCGPHALCVPVSWSLSPESGSRQVRGEGSVRPAEGRVPAREREPGTRRAGRKLPHKRPESRTWIELKLRRRPAVTPA

SEQ ID NO: 5510 - DNA, 775 bp, Homo sapiens
gaacctccaggacttcagcccttctaggagaatctgatcccaggtgagggaggtcacttggggtgtggcccagcaggcaggcgggtgctgtgttgagtcagcaggcatggggtgagagcctggtatatgctgggaacagggtgcaggggccaagcgttcctccttcagccttgacttgggccatgcaccccctctcccccaaacacaaacaagcacttctccagtatggtgccaggacaggtgtcccttcagtcctctggttatgacctcaagtcctacttgggccctgcagcccagcctgtgttgtaacctctgcgtcctcaagaccacacctggaagattcttcttccctttgaaggagaatcatcattgttgctttatcacttctaagacattttgtacggcacggacaagttaaacagaatgtgcttccctccctggggtctcacacgctcccacgagaatgccacaggggccgtgcactgggcaggcttctctgtagaaccccaggggcttcggcccagaccacagcgtcttgccctgagcctagagcagggagtcccgaacttctgcattcacagaccacctccacaattgttataaccaaaggcctcctgttctgttatttcacttaaatcaacatgctattttgttttcactcacttctgactttagcctcgtgctgagccgtgtatccatgcagtcatgttcacgtgctagttacgtttttcttcttacacatgaaaataaatgcataagtgttagaagctcttcc

SEQ ID NO: 5511 - protein, 59 aa, Homo sapiens
MCFPPWGLTRSHENATGAVHWAGFSVEPQGLRPRPQRLALSLEQGVPNFCIHRPPPQLL

SEQ ID NO: 5512 - DNA, 911 bp, Homo sapiens
gaacctccaggacttcagcccttctaggagaatctgatcccaggtgagggaggtcacttggggtgtggcccagcaggcaggcgggtgctgtgttgagtcagcaggcatggggtgagagcctggtatatgctgggaacagggtgcaggggccaagcgttcctccttcagccttgacttgggccatgcaccccctctcccccaaacacaaacaagcacttctccagtatggtgccaggacaggtgtcccttcagtcctctggttatgacctcaagtcctacttgggccctgcagcccagcctgtgttgtaacctctgcgtcctcaagaccacacctggaagattcttcttccctttgaaggagaatcatcattgttgctttatcacttctaagacattttgtacggcacggacaagttaaacagaatgtgcttccctccctggggtctcacacgctcccacgagaatgccacaggggccgtgcactgggcaggcttctctgtagaaccccaggggcttcggcccagaccacagcgtcttgccctgagcctagagcagggagtcccgaacttctgcattcacagaccacctccacaattgttataaccaaaggcctcctgttctgttatttcacttaaatcaacatgctattttgttttcactcacttctgactttagcctcgtgctgagccgtgtatccatgcagtcatgttcacgtgctagttacgtttttcttcttacacatgaaaataaatgcataagtgttagaagctcttccatgttgtgtgtaggctctcacacaggtaaacgctggcgtttggtagtagccctgggcatctgctcgctgtggcgggagtgtccgaagagtgctggggctcagctcagcagatggaggggctcatttcctgcctcat

SEQ ID NO: 5513 - protein, 70 aa, Homo sapiens
MQSCSRASYVFLLTHENKCISVRSSSMLCVGSHTGKRWRLVVALGICSLWRECPKSAGAQLSRWRGSFPA

SEQ ID NO: 5514 - DNA, 1146 bp, Homo sapiens
cctgggtgacaagagcaaaaaaaactccatctcaaaaaaaaaaaaaaaaaaagaagtactgaaaaaaaaacaaaaaagacagatgagatgggtcccagccccactgaacacagttctcaattcagacaatctccagtgacgctgggaaaccaggtctcattacacaggtctctccacctgctcctgccaagaagaaacagacatctctgcagtcccatagcaacgggactgaaattgctcaggaggaaattcgcccccgtctgcagcatctgtgaaaatcccatcatccctcgggatgggaaagatgccttcaaaatcgaatgcatgggaagaaacttccatgaaaattgctacaggtgtgaggactgcaggatcctcctgtctgtcgagcccacggaccaaggctgctaccccctgaacaaccatctcttctgcaagccatgccatgtgaagcggagtgctgcggggtgctgctgagagtgcccgctgggcagtgaacagaccactagccccggctggggcccttccctgacttggtttcccttcctaacctgctcttgcacactttccttctgagcctccatggagaccagcctgcaagccggcccagcctgtccaggatacagtggggctgagcacccccaggccttccactcctctaccctctgggcaccagaaggctcctggaccatgagcttcacccccagaattccctgctgaccctgccccacttccagggaaaagctgggggaggttggacccctctcactgactagctgtctggtaggggtgctaggaccagcctcgcctgtggggttgagctgtttgaggacaaactccaaggtcccttaaaaagtgccttttagaggctgggcatggtggctcacgcttgtaatcccagcactttgggaggccaaggtgggtggatcacctgaggtcaggagttcaagaccagcctggccaacatggtgaaaccctgtctctactaaaaatacaaaaattagccaggcatggtagcaggtgcctgtaatcccagctactggggaaagctgaggcaggagaattgcttcaatctggaaggcagaggttgcagtgagattgcaccattgcattccagcctgggcaacaagagggaaactccgtctc

SEQ ID NO: 5515 - protein, 129 aa, Homo sapiens
MGPSPTEHSSQFRQSPVTLGNQVSLHRSLHLLLPRRNRHLCSPIATGLKLLRRKFAPVCSICENPIIPRDGKDAFKIECMGRNFHENCYRCEDCRILLSVEPTDQGCYPLNNHLFCKPCHVKRSAAGCC

SEQ ID NO: 5516 - DNA, 2409 bp, Homo sapiens
cctgggtgacaagagcaaaaaaaactccatctcaaaaaaaaaaaaaaaaaaagaagtactgaaaaaaaaacaaaaaagacagatgagatgggtcccagccccactgaacacagttctcaattcagacaatctccagtgacgctgggaaaccaggtctcattacacaggtctctccacctgctcctgccaagaagaaacagacatctctgcagtcccatagcaacgggactgaaattgctcaggaggaaattcgcccccgtctgcagcatctgtgaaaatcccatcatccctcgggatgggaaagatgccttcaaaatcgaatgcatgggaagaaacttccatgaaaattgctacaggtgtgaggactgcaggatcctcctgtctgtcgagcccacggaccaaggctgctaccccctgaacaaccatctcttctgcaagccatgccatgtgaagcggagtgctgcggggtgctgctgagagtgcccgctgggcagtgaacagaccactagccccggctggggcccttccctgacttggtttcccttcctaacctgctcttgcacactttccttctgagcctccatggagaccagcctgcaagccggcccagcctgtccaggatacagtggggctgagcacccccaggccttccactcctctaccctctgggcaccagaaggctcctggaccatgagcttcacccccagaattccctgctgaccctgccccacttccagggaaaagctgggggaggttggacccctctcactgactagctgtctggtaggggtgctaggaccagcctcgcctgtggggttgagctgtttgaggacaaactccaaggtcccttaaaaagtgccttttagaggctgggcatggtggctcacgcttgtaatcccagcactttgggaggccaaggtgggtggatcacctgaggtcaggagttcaagaccagcctggccaacatggtgaaaccctgtctctactaaaaatacaaaaattagccaggcatggtagcaggtgcctgtaatcccagctactggggaaagctgaggcaggagaattgcttcaatctggaaggcagaggttgcagtgagattgcaccattgcattccagcctgggcaacaagagggaaactccgtctcaaaaaaaaaaaagtgccttttaggccggatgtggtggctcatgcctgtaatcccagcactttgggaggccaaggcaggcagatcacttgaggtcaggagtttgagaccagcctggccaacacggcaaaaccccgtttctactaaaaatacaaaaattagctgggtgtggtggcgtgcgcctgtaatcccagctactcaggaggctgaggcaggagcattgcttgaacccgggaggcagaggttgcagtgagctgagatggcaccactgcactccagcctgggagacacagcgagactctgtctccaaaaaaaaaagtgctttttgaaaatgttgaggttgaaatgatgggaaccaacattctttggatttagtggggagcataatagcaaacacccccttggttcgcacatgtacaggaatgggacccagttggggcacagccatggacttccccgccctggaatgtgtggtgcaaagtggggccagggcccagacccaagaggagagggtggtccgcagacaccccgggatgtcagcatcccccgacctgccttctggcggcacctcccgggtgctgtgttgagtcagcaggcatggggtgagagcctggtatatgctgggaacagggtgcaggggccaagcgttcctccttcagccttgacttgggccatgcaccccctctcccccaaacacaaacaagcacttctccagtatggtgccaggacaggtgtcccttcagtcctctggttatgacctcaagtcctacttgggccctgcagcccagcctgtgttgtaacctctgcgtcctcaagaccacacctggaagattcttcttccctttgaaggagaatcatcattgttgctttatcacttctaagacattttgtacggcacggacaagttaaacagaatgtgcttccctccctggggtctcacacgctcccacgagaatgccacaggggccgtgcactgggcaggcttctctgtagaaccccaggggcttcggcccagaccacagcgtcttgccctgagcctagagcagggagtcccgaacttctgcattcacagaccacctccacaattgttataaccaaaggcctcctgttctgttatttcacttaaatcaacatgctattttgttttcactcacttctgactttagcctcgtgctgagccgtgtatccatgcagtcatgttcacgtgctagttacgtttttcttcttacacatgaaaataaatgcataagtgttagaagctcttcc

SEQ ID NO: 5517 - protein, 129 aa, Homo sapiens; identical to SEQ ID NO: 5515

SEQ ID NO: 5518 - DNA, 2545 bp, Homo sapiens
cctgggtgacaagagcaaaaaaaactccatctcaaaaaaaaaaaaaaaaaaagaagtactgaaaaaaaaacaaaaaagacagatgagatgggtcccagccccactgaacacagttctcaattcagacaatctccagtgacgctgggaaaccaggtctcattacacaggtctctccacctgctcctgccaagaagaaacagacatctctgcagtcccatagcaacgggactgaaattgctcaggaggaaattcgcccccgtctgcagcatctgtgaaaatcccatcatccctcgggatgggaaagatgccttcaaaatcgaatgcatgggaagaaacttccatgaaaattgctacaggtgtgaggactgcaggatcctcctgtctgtcgagcccacggaccaaggctgctaccccctgaacaaccatctcttctgcaagccatgccatgtgaagcggagtgctgcggggtgctgctgagagtgcccgctgggcagtgaacagaccactagccccggctggggcccttccctgacttggtttcccttcctaacctgctcttgcacactttccttctgagcctccatggagaccagcctgcaagccggcccagcctgtccaggatacagtggggctgagcacccccaggccttccactcctctaccctctgggcaccagaaggctcctggaccatgagcttcacccccagaattccctgctgaccctgccccacttccagggaaaagctgggggaggttggacccctctcactgactagctgtctggtaggggtgctaggaccagcctcgcctgtggggttgagctgtttgaggacaaactccaaggtcccttaaaaagtgccttttagaggctgggcatggtggctcacgcttgtaatcccagcactttgggaggccaaggtgggtggatcacctgaggtcaggagttcaagaccagcctggccaacatggtgaaaccctgtctctactaaaaatacaaaaattagccaggcatggtagcaggtgcctgtaatcccagctactggggaaagctgaggcaggagaattgcttcaatctggaaggcagaggttgcagtgagattgcaccattgcattccagcctgggcaacaagagggaaactccgtctcaaaaaaaaaaaagtgccttttaggccggatgtggtggctcatgcctgtaatcccagcactttgggaggccaaggcaggcagatcacttgaggtcaggagtttgagaccagcctggccaacacggcaaaaccccgtttctactaaaaatacaaaaattagctgggtgtggtggcgtgcgcctgtaatcccagctactcaggaggctgaggcaggagcattgcttgaacccgggaggcagaggttgcagtgagctgagatggcaccactgcactccagcctgggagacacagcgagactctgtctccaaaaaaaaaagtgctttttgaaaatgttgaggttgaaatgatgggaaccaacattctttggatttagtggggagcataatagcaaacacccccttggttcgcacatgtacaggaatgggacccagttggggcacagccatggacttccccgccctggaatgtgtggtgcaaagtggggccagggcccagacccaagaggagagggtggtccgcagacaccccgggatgtcagcatcccccgacctgccttctggcggcacctcccgggtgctgtgttgagtcagcaggcatggggtgagagcctggtatatgctgggaacagggtgcaggggccaagcgttcctccttcagccttgacttgggccatgcaccccctctcccccaaacacaaacaagcacttctccagtatggtgccaggacaggtgtcccttcagtcctctggttatgacctcaagtcctacttgggccctgcagcccagcctgtgttgtaacctctgcgtcctcaagaccacacctggaagattcttcttccctttgaaggagaatcatcattgttgctttatcacttctaagacattttgtacggcacggacaagttaaacagaatgtgcttccctccctggggtctcacacgctcccacgagaatgccacaggggccgtgcactgggcaggcttctctgtagaaccccaggggcttcggcccagaccacagcgtcttgccctgagcctagagcagggagtcccgaacttctgcattcacagaccacctccacaattgttataaccaaaggcctcctgttctgttatttcacttaaatcaacatgctattttgttttcactcacttctgactttagcctcgtgctgagccgtgtatccatgcagtcatgttcacgtgctagttacgtttttcttcttacacatgaaaataaatgcataagtgttagaagctcttccatgttgtgtgtaggctctcacacaggtaaacgctggcgtttggtagtagccctgggcatctgctcgctgtggcgggagtgtccgaagagtgctggggctcagctcagcagatggaggggctcatttcctgcctcat

SEQ ID NO: 5519 - protein, 129 aa, Homo sapiens; identical to SEQ ID NO: 5515

SEQ ID NO: 5520 - DNA, 949 bp, Homo sapiens
gtggttgtggcatgaacgcctcccaagcatgggttcctttgcttctaggaaattcgcccccgtctgcagcatctgtgaaaatcccatcatccctcgggatgggaaagatgccttcaaaatcgaatgcatgggaagaaacttccatgaaaattgctacaggtgtgaggactgcaggatcctcctgtctgtcgagcccacggaccaaggctgctaccccctgaacaaccatctcttctgcaagccatgccatgtgaagcggagtgctgcggggtgctgctgagagtgcccgctgggcagtgaacagaccactagccccggctggggcccttccctgacttggtttcccttcctaacctgctcttgcacactttccttctgagcctccatggagaccagcctgcaagccggcccagcctgtccaggatacagtggggctgagcacccccaggccttccactcctctaccctctgggcaccagaaggctcctggaccatgagcttcacccccagaattccctgctgaccctgccccacttccagggaaaagctgggggaggttggacccctctcactgactagctgtctggtaggggtgctaggaccagcctcgcctgtggggttgagctgtttgaggacaaactccaaggtcccttaaaaagtgccttttagaggctgggcatggtggctcacgcttgtaatcccagcactttgggaggccaaggtgggtggatcacctgaggtcaggagttcaagaccagcctggccaacatggtgaaaccctgtctctactaaaaatacaaaaattagccaggcatggtagcaggtgcctgtaatcccagctactggggaaagctgaggcaggagaattgcttcaatctggaaggcagaggttgcagtgagattgcaccattgcattccagcctgggcaacaagagggaaactccgtctc

SEQ ID NO: 5521 - protein, 83 aa, Homo sapiens
MGSFASRKFAPVCSICENPIIPRDGKDAFKIECMGRNFHENCYRCEDCRILLSVEPTDQGCYPLNNHLFCKPCHVKRSAAGCC

SEQ ID NO: 5522 - DNA, 2212 bp, Homo sapiens
gtggttgtggcatgaacgcctcccaagcatgggttcctttgcttctaggaaattcgcccccgtctgcagcatctgtgaaaatcccatcatccctcgggatgggaaagatgccttcaaaatcgaatgcatgggaagaaacttccatgaaaattgctacaggtgtgaggactgcaggatcctcctgtctgtcgagcccacggaccaaggctgctaccccctgaacaaccatctcttctgcaagccatgccatgtgaagcggagtgctgcggggtgctgctgagagtgcccgctgggcagtgaacagaccactagccccggctggggcccttccctgacttggtttcccttcctaacctgctcttgcacactttccttctgagcctccatggagaccagcctgcaagccggcccagcctgtccaggatacagtggggctgagcacccccaggccttccactcctctaccctctgggcaccagaaggctcctggaccatgagcttcacccccagaattccctgctgaccctgccccacttccagggaaaagctgggggaggttggacccctctcactgactagctgtctggtaggggtgctaggaccagcctcgcctgtggggttgagctgtttgaggacaaactccaaggtcccttaaaaagtgccttttagaggctgggcatggtggctcacgcttgtaatcccagcactttgggaggccaaggtgggtggatcacctgaggtcaggagttcaagaccagcctggccaacatggtgaaaccctgtctctactaaaaatacaaaaattagccaggcatggtagcaggtgcctgtaatcccagctactggggaaagctgaggcaggagaattgcttcaatctggaaggcagaggttgcagtgagattgcaccattgcattccagcctgggcaacaagagggaaactccgtctcaaaaaaaaaaaagtgccttttaggccggatgtggtggctcatgcctgtaatcccagcactttgggaggccaaggcaggcagatcacttgaggtcaggagtttgagaccagcctggccaacacggcaaaaccccgtttctactaaaaatacaaaaattagctgggtgtggtggcgtgcgcctgtaatcccagctactcaggaggctgaggcaggagcattgcttgaacccgggaggcagaggttgcagtgagctgagatggcaccactgcactccagcctgggagacacagcgagactctgtctccaaaaaaaaaagtgctttttgaaaatgttgaggttgaaatgatgggaaccaacattctttggatttagtggggagcataatagcaaacacccccttggttcgcacatgtacaggaatgggacccagttggggcacagccatggacttccccgccctggaatgtgtggtgcaaagtggggccagggcccagacccaagaggagagggtggtccgcagacaccccgggatgtcagcatcccccgacctgccttctggcggcacctcccgggtgctgtgttgagtcagcaggcatggggtgagagcctggtatatgctgggaacagggtgcaggggccaagcgttcctccttcagccttgacttgggccatgcaccccctctcccccaaacacaaacaagcacttctccagtatggtgccaggacaggtgtcccttcagtcctctggttatgacctcaagtcctacttgggccctgcagcccagcctgtgttgtaacctctgcgtcctcaagaccacacctggaagattcttcttccctttgaaggagaatcatcattgttgctttatcacttctaagacattttgtacggcacggacaagttaaacagaatgtgcttccctccctggggtctcacacgctcccacgagaatgccacaggggccgtgcactgggcaggcttctctgtagaaccccaggggcttcggcccagaccacagcgtcttgccctgagcctagagcagggagtcccgaacttctgcattcacagaccacctccacaattgttataaccaaaggcctcctgttctgttatttcacttaaatcaacatgctattttgttttcactcacttctgactttagcctcgtgctgagccgtgtatccatgcagtcatgttcacgtgctagttacgtttttcttcttacacatgaaaataaatgcataagtgttagaagctcttcc

SEQ ID NO: 5523 - protein, 83 aa, Homo sapiens; identical to SEQ ID NO: 5521

SEQ ID NO: 5524 - DNA, 2348 bp, Homo sapiens
gtggttgtggcatgaacgcctcccaagcatgggttcctttgcttctaggaaattcgcccccgtctgcagcatctgtgaaaatcccatcatccctcgggatgggaaagatgccttcaaaatcgaatgcatgggaagaaacttccatgaaaattgctacaggtgtgaggactgcaggatcctcctgtctgtcgagcccacggaccaaggctgctaccccctgaacaaccatctcttctgcaagccatgccatgtgaagcggagtgctgcggggtgctgctgagagtgcccgctgggcagtgaacagaccactagccccggctggggcccttccctgacttggtttcccttcctaacctgctcttgcacactttccttctgagcctccatggagaccagcctgcaagccggcccagcctgtccaggatacagtggggctgagcacccccaggccttccactcctctaccctctgggcaccagaaggctcctggaccatgagcttcacccccagaattccctgctgaccctgccccacttccagggaaaagctgggggaggttggacccctctcactgactagctgtctggtaggggtgctaggaccagcctcgcctgtggggttgagctgtttgaggacaaactccaaggtcccttaaaaagtgccttttagaggctgggcatggtggctcacgcttgtaatcccagcactttgggaggccaaggtgggtggatcacctgaggtcaggagttcaagaccagcctggccaacatggtgaaaccctgtctctactaaaaatacaaaaattagccaggcatggtagcaggtgcctgtaatcccagctactggggaaagctgaggcaggagaattgcttcaatctggaaggcagaggttgcagtgagattgcaccattgcattccagcctgggcaacaagagggaaactccgtctcaaaaaaaaaaaagtgccttttaggccggatgtggtggctcatgcctgtaatcccagcactttgggaggccaaggcaggcagatcacttgaggtcaggagtttgagaccagcctggccaacacggcaaaaccccgtttctactaaaaatacaaaaattagctgggtgtggtggcgtgcgcctgtaatcccagctactcaggaggctgaggcaggagcattgcttgaacccgggaggcagaggttgcagtgagctgagatggcaccactgcactccagcctgggagacacagcgagactctgtctccaaaaaaaaaagtgctttttgaaaatgttgaggttgaaatgatgggaaccaacattctttggatttagtggggagcataatagcaaacacccccttggttcgcacatgtacaggaatgggacccagttggggcacagccatggacttccccgccctggaatgtgtggtgcaaagtggggccagggcccagacccaagaggagagggtggtccgcagacaccccgggatgtcagcatcccccgacctgccttctggcggcacctcccgggtgctgtgttgagtcagcaggcatggggtgagagcctggtatatgctgggaacagggtgcaggggccaagcgttcctccttcagccttgacttgggccatgcaccccctctcccccaaacacaaacaagcacttctccagtatggtgccaggacaggtgtcccttcagtcctctggttatgacctcaagtcctacttgggccctgcagcccagcctgtgttgtaacctctgcgtcctcaagaccacacctggaagattcttcttccctttgaaggagaatcatcattgttgctttatcacttctaagacattttgtacggcacggacaagttaaacagaatgtgcttccctccctggggtctcacacgctcccacgagaatgccacaggggccgtgcactgggcaggcttctctgtagaaccccaggggcttcggcccagaccacagcgtcttgccctgagcctagagcagggagtcccgaacttctgcattcacagaccacctccacaattgttataaccaaaggcctcctgttctgttatttcacttaaatcaacatgctattttgttttcactcacttctgactttagcctcgtgctgagccgtgtatccatgcagtcatgttcacgtgctagttacgtttttcttcttacacatgaaaataaatgcataagtgttagaagctcttccatgttgtgtgtaggctctcacacaggtaaacgctggcgtttggtagtagccctgggcatctgctcgctgtggcgggagtgtccgaagagtgctggggctcagctcagcagatggaggggctcatttcctgcctcat

SEQ ID NO: 5525 - protein, 83 aa, Homo sapiens; identical to SEQ ID NO: 5521

SEQ ID NO: 5526 - DNA, 814 bp, Homo sapiens
cttgaacttctggattcaagtgatccgccctcctcggcctcccaaagtgctgggactacaggcttgagccacctcgcccagctgaaagtgacactttaatactttcaggaaattataggagatgattgttaagagctcaggataaagagaagtttctggccgggaacggtggctcacacctgtaatcccagcactttcagtggcggagcacctgtggccaagagtttgagaccagcctggccaacatggtgaaaccccatctctactaaaaatacaaaaattgaggtgccgctgttgctgctcgtgttaaatctagaaccgtagccagacatgggactggaggacgagcaaaagatgcttaccgaatccggagatcctgaggaggaggaagaggaagaggaggaattagtggatcccctaacaacagtgagagagcaatgcgagcagttggagaaatgtgtaaaggcccgggagcggctagagctctatgatgagcatgtatcctctcgatcacatacagaagaggattgcacggaggagctctttgacttcttgcatgcaaaggaccattgcgtggcccacaaactctttaacaacttgaaataaatgtgtggacttaattcaccccagccttcatcatctgggcatcagaatatttccttatggtttcggatgtaccatttgtttcttatttgtgtaactgtaagttcacatgaacctcgtgggttttggcttaggctggtagcttctatgtaattcgcagtgattccatctaaataaaagttctgtgatctgcaaaaaaaaaaaaaaatta

SEQ ID NO: 5527 - protein, 91 aa, Homo sapiens; identical to SEQ ID NO: 56

SEQ ID NO: 5528 - DNA, 2165 bp, Homo sapiens
gtgagactctgtctcaaaaacaaaacaaaacaaaaacagaaagaatcagagtcaacaaatcagtatggatgcagattcctcagatgccaggaatcccaggataaatggcaggggtgaaccaaatacttcccattcttccctcaccaccctcctccatccaataaagaagtaaataaattcctcaagtcccctctgccccagtgcatggaatgtttacctgtggactaggactggtctacatgccaaacaggccttgcctcctgggcggcatgtttgcaggggatccttgctgatgatgttggcctcctcctgcaccctcccactccatggctgtctcacctgagagagctttcttccttttgcattaagtgtgagtcctgataaattcaaaaaagcctccaggtgacatcattttaacaccagttaacaatcacaaatctgggtgaatgagcctcagagtttttcttgacagtagtgtgcgtgcgtgtgtgtgtgcgtgttttccatggaaaaataaaatgtattacacaaactatcagtattaattacagaaaggtggccaggtgcagtgcctcacgcctgtaatcctggcactttgggaggccaaggcgggcagattgcctgagctcaggagtttgagaccagcctggtcaaacatggtgaaaccctgtatctactaaaaatacaaaacattagctgggcgtggtggcgcatgcctgtagtctcaggtactcggaagggtgaggcacaagaatcgcttgagtctggaaggtggaggttgcagtgagccgagaacacgccactaaactccagccggggtgacagagcaagactctgtctcaaaaaacaaacaaacaattaattacagaaaggtaagcctggccaataggtcaggaaaagcagccccactgcagatccacaccactacggaaacttgaggcaccacacacatgactttgctgactgggggcaaaggatgaactagtgagcaaacttgggaggctgagacaggaggatcgcttgaacctgggaggtagaggttgcagtgagccaagatcgcaccactgctctccagccaggtgacagagcgagactccagctcaaaaaaaaaaaaaaagtcaagatattaaatatgaaagcaacactttattttttattttattttattttaagacagggtctctctctgtcacccagactggagtacagtgacatgatctctgctcactgtgatctctgcctcccaggctcaaactatcctcccacatcagcctcccaaatagctgggactacaggggcccaccaccacacctgactaatttttgtatttttggtagagatgcggtttcaccatgttgcccagcctgatcttgaacttctggattcaagtgatccgccctcctcggcctcccaaagtgctgggactacaggcttgagccacctcgcccagctgaaagtgacactttaatactttcaggaaattataggagatgattgttaagagctcaggataaagagaagtttctggccgggaacggtggctcacacctgtaatcccagcactttcagtggcggagcacctgtggccaagagtttgagaccagcctggccaacatggtgaaaccccatctctactaaaaatacaaaaattgaggtgccgctgttgctgctcgtgttaaatctagaaccgtagccagacatgggactggaggacgagcaaaagatgcttaccgaatccggagatcctgaggaggaggaagaggaagaggaggaattagtggatcccctaacaacagtgagagagcaatgcgagcagttggagaaatgtgtaaaggcccgggagcggctagagctctatgatgagcatgtatcctctcgatcacatacagaagaggattgcacggaggagctctttgacttcttgcatgcaaaggaccattgcgtggcccacaaactctttaacaacttgaaataaatgtgtggacttaattcaccccagccttcatcatctgggcatcagaatatttccttatggtttcggatgtaccatttgtttcttatttgtgtaactgtaagttcacatgaacctcgtgggttttggcttaggctggtagcttctatgtaattcgcagtgattccatctaaataaaagttctgtgatctgc

SEQ ID NO: 5529 - protein, 91 aa, Homo sapiens; identical to SEQ ID NO: 56

SEQ ID NO: 5530 - DNA, 232 bp, Homo sapiens
aggtgccgctgttgctgctcgtgttaaatctagaaccgtagccagacatgggactggaggacgagcaaaagatgcttaccgaatccggagatcctgaggaggaggaagaggaagaggaggaattagtggatcccccacaaactctttaacaacttgaaataaatgtgtggacttaattcaccccagccttcatcatctgggcatcagaatatttccttatggtttcggatgt

SEQ ID NO: 5531 - protein, 33 aa, Homo sapiens
MGLEDEQKMLTESGDPEEEEEEEEELVDPPQTL

SEQ ID NO: 5532 - DNA, 1103 bp, Homo sapiens
tgttaccattgttgttgaacaaggcagtgggggaaaaagtagttaagattatgtggcacgatccttcaacatgacccagaactgggccataggaaacttgtacagactatcacatcagatgatggagagaaacatcactgagaatgcataaatccccggaggcagaatggttaatttcgtgaggcacagtcatgtctagacaaatctggtggggctatttagaaaaacacatatggtacttctggctttacaaggaaggggaccaagtcacattactcagcaaatatctttccttagtctgaacttggcttctaagattttctgagaactgagctttttttttttcttttttttgagatgaagtttcgctcttgttgcccaggctggagtgcaatgatgtgatcccggctcactgcaacctcagcttgggtgacagagtgagactttatctcaaaaaacaaacaaacaaaaaaacaacacagacagttctgtaatactatatggttttatagggcaaaactattttgtaaaatattattatactccatccatgaatttcaaagcagttgacagaatcattagagtcttggtgtattcctctatgcttttaaaaaaatccatttaagaaataaaaaagccgggcatggtggctcacgcctgtaatcccagcactttgggaggccgaggcatgtggatcacaaggtcaggagattgagaccatcatggctaacacggtgaaaccccatctctactaaaaatacaaaacattagctgggcatggtggtgggcgcctgtagtcccagctactcgggaggctgaggcaggagaatggtgtgaacccgggaggcggagcttgcagtgagccaagattgtgccactgcactccagcctgggcgacagagcgagactctgtctcaaaaacaaaaaaaagaaaagaagtaaaaaaagccgggcgtggtggctcatgcctgtaatcccagcactttgggaggccgaggcgagcagatcacgaggtcaggagtttgagaccagcctggccaagatagtgaaaccccatctctactaaaaatacaaaaaattagctgggcgtggtggggggcatc

SEQ ID NO: 5533 - protein, 36 aa, Homo sapiens
MSRQIWWGYLEKHIWYFWLYKEGDQVTLLSKYLSLV

SEQ ID NO: 5534 - DNA, 410 bp, Homo sapiens
tctagtccacgcccgcagccatgccgaccaagggcccgctgcagtcggtgcaggtcttcggacgcaagaagacagccacagctgtggcgcactgcaaacgcggcaatggtctcatcaagctgctggagccagttctgcttctcggcaaggagcggtttgctggtgtggacatctgtgtccgtatgaagggtggtggtcacgtggcccagatttatgctatccatcagtccatctccaaagccctggtggcctactaccagaaatatgtggatgaggcttccaagaaggagatcaaagacatcctcatccagtatgaccagaccctgctggtagctgatcctcgttgccgggagtccaaaaagtttggaggccctggtgcccatgctcgctaccagaaatcctaccgataa

SEQ ID NO: 5535 - protein, 129 aa, Homo sapiens; identical to SEQ ID NO: 62

SEQ ID NO: 5536 - DNA, 2931 bp, Homo sapiens
ttgaaatgctcgatgatcttctcttcccgcacgttctcgggccgggcgtggcggctcacacctgtaatctcagcactttggaaggccctggcggaaggatctcttgacgtcaggacttccaaaacagttgggcaacacagcaagaccccgttcccaggctgggggcaaagccgggctcggtggctcacgcctgtaattccagcactttgggaggccgaggtgggcggatcacctgagctcaggagttcgagaccagcctgaccaacatggtgaaacccatctctactaaacatacaaaaattacccgagcgtattggcgggcgcctgtagtcccagctacatgggaggctgaggcaggagaatcgcttgaacccgggaggcgaaggttgcagtgagccgagactgcgccactgcactacagcctggatgacaagagactcccgtctcaaaaaaaaaaaaaaaaagacacctttctttgggcttagtgagcaaacattctacgcagtgcctaatataagccggcccaggcaccacccaagccttcggccaggactgttttcccgtttcgagaaggctccatcacactccacacgggatccagtcaacagccgttccaaacatggcgcgggaaggggtggaagacaagccagcgcgacgccgtccagcctcatccccggggcacaaaggggagactaatctccaggaaactcggggtacagaatcgataaccccacaagaaactagtttccgcgagtgggccttaaggaaaaagtaggtcgggcacaagcgagctgttcagacgcacttcacagcaaagactcgcggacaacacagcgagacgaaaacggccccgtgcgcaggcgcgcggaaacacgactagcgcgcttcgggacgacccctcccccttccctcaaaggccaaggaagtggctccgacgcgcttgcgcgaggacggaatgttgaggggagggggaattctttcccttcattgtcagagagaaccgcccccgcacggcgagcgcgcgcgcgctcacgcaccactctcacactccggcgcgccaaaggctttccgcttggcgtctcgcgcatgcgcggagggggaagcagtggcgaaattggatgctttttgctgagtttctcagagaagtttctggaaagatggagccaaagggacgctggggggtggggagcgccaggaagcaagcgtttgaaagaaagcgaaaaaacccaagcgcaccgcgacacctccaaccttcaagccacggcccaagcagagcccaaggccactgagaccctcacgccagagaaaaagcacagggaccgcggcagccgctcctccctctgccactgctcagcccccgagactccccagcacggggagagggcagggggtagccatgagaaacctagagcgctcactggacttttgcgaggtggaaggaaagccgaaacccgccctttggagccgcctgtgcgcacgggccccgtcgagtgggctcagtacgttaggactcagcgtggccgccaaagcattggttgggggcgtctttcactaatttttcctaggttttctcttctatcgggctctgtggtcctttcaccacccatcttcactttggtggcctgacgctaacgctgcgagttggggaaaccgtagtaaccccgggcctgaggggcgtcccgggcggcggtgctccgtttcttccagcggttgcccctttaagaaaaagccccccggagaggggcccgtgtggctgagtaaaggtggcgtgcgcccgcacaaaggcgccgcgttgttggcgggctccggaccctgttgcccctgggcggggcggcgtgggaagaccggggcgcctgggcggggagaacgacgttggcgctagcggggcagggcagggggagggagtcacgggatttagcaggtgcttctccgcgaccgagcgactgccattttgtggtgcggccgccgccatttcgcgcggccgaggggcggggtgtgggcggagcggcgggcgcgcccgggctgtccctcggggcggcgggctaacgcggccgctttgttcttcgcttctcggctcgaggccccagtctcgaccgccgaccgcctcggaaccgggctgcatccgagctgccacgcggcgtgtgaaccttgaagcgcggccggggaatccgcaaggcgccgactctcttcctccttgcaagcccttcgaaagtgagatttctcaccccacccttgcagggtggagagaacacgtttcaaaaaggggatgcctagaactcagccgtgggaagtgcctgtctaaagccttgtgctggtgccagtagcaaacccgtgcgcgtgctcggctttgagcgatcatggagctctgcaaatagctcaactgcagagcgtgccccttagagctcctgtgctgctgggaggcctcataaaggtgccaaaaccaggtgtccccagcggttggcctctttaaaaagaaaaaaaaaaaaaggcggagtgggatgtccttgacgtgctgaaagacggagtagaatgagacgttggttttcattggctggccattaagcacgcactgcgcaactgttttccagatacgggtttatagcccattatttatatcggagccataaacttgaacaatagattggaatatcttatttttgcctgttgagaatatctcccatttaacttcttttgaaagttcagatgagtatataaataatacattgacccagtagaatctattgtgtgcgttccagcgtcatttcaaagagctattgtttttctgatttcaaaagaaatatttaaatgtgagtctttgtgttttaatgttaaccttgtggttcgaaatcaacaaagccaggaaattcaagagaactgctgctaaatttgtcttcttcctttgctttcgtacaaggtttttttgtttaattt

SEQ ID NO: 5537 - protein, 82 aa, Homo sapiens
MIFSSRTFSGRAWRLTPVISALWKALAEGSLDVRTSKTVGQHSKTPFPGWGQSRARWLTPVIPALWEAEVGGSPELRSSRPA

SEQ ID NO: 5538 - DNA, 427 bp, Homo sapiens
acaaatactatctgtagacaggtctgttaaatcattcctttactcagagacagcaagtccagcatgggcctatcgctggatgattgactccagagatgacttcacagaggagcgcctggccaagctgcaggacccattctctctataccgctgccacaccatcatgaactgcacaaggacctgtcctaagggtctgaatccagggaaagctattgcagagatcaagaaaatgatggcaacctataaggagaagaaagcttcagtttaactgtttccatgctaaacatgatttataaccagctcagagctgaacataatttatatctaatttgagttcctttaaagatcttggttttccatgaatacagcatgtataataaaaattttaagaaataaatgttattctactttattaacaaaaaaaaaa

SEQ ID NO: 5539 - protein, 62 aa, Homo sapiens [sequence omitted]

SEQ ID NO: 5540 - DNA, 1062 bp, Homo sapiens
aaaaaccaacttctctttctcattttcccacaaaaagagaagttacaggtttgtgtgaccacatgagcaatattgattcccagccatgtgaagattggataatgaagtacactcatacttgtcacttttgccagctgctccgagttggggatgtagaggtcctctaagtaacactgctagagcaggcctatggtcatgtgattaactcgtttcagcctgctgatctcaggctgctgagagcgctgtgtaagttcaaagaatcattaagtgggacaaatactatctgtagacaggtctgttaaatcattcctttactcagagacagcaagtccagcatgggtaggtgccatgaagacagataagagttatatgatacagtccctgccttcaccaaattataagctgggtaggaagctattgagcaatgtgaaataattaggagatgatacccagtgtgtataattaagcacccgggtaccaggtgcagtatggatcaaaggtttgcagggaccattaatcaagtgaagctacaagtgttgggaacctttccttgaaagatggacaagaattaaagagtatggagatgaggcatctaagctgagtgaattccctttcctctgcactcccagagctttgagttgagccagggtgccgctctggcctgttgattggcagctcagctaatcatccctggttttccaggcctatcgctggatgattgactccagagatgacttcacagaggagcgcctggccaagctgcaggacccattctctctataccgctgccacaccatcatgaactgcacaaggacctgtcctaagggtctgaatccagggaaagctattgcagagatcaagaaaatgatggcaacctataaggagaagaaagcttcagtttaactgtttccatgctaaacatgatttataaccagctcagagctgaacataatttatatctaatttgagttcctttaaagatcttggttttccatgaatacagcatgtataataaaaattttaagaaataaatgttattctactttattaacaaaaaaaaaa

SEQ ID NO: 5541 - protein, 62 aa, Homo sapiens [sequence omitted]

SEQ ID NO: 5542 - DNA, 1168 bp, Homo sapiens
gccttccctccgcccacccgggaaaccggaagccgcctcccacttggttgctcgtacgcggctagtgggtcctcagtggatgtaggctgggcgccgcgatgttcgacgggacaccggcggagagcgacctcggggttaaggggtggggctgacgtcaggagccaagatggcggcggtggtcgccctctccttgaggcgccggttgccggccacaacccttggcggagcctgcctgcaggcctcccgaggagcccagacagctgcagccacagctccccgtatcaagaaatttgccatctatcgatgggacccagacaaggctggagacaaacctcatatgcagacttatgaagttgaccttaataaatgtggccccatggtattggatgctttaatcaagattaagaatgaagttgactctactttgaccttccgaagatcatgcagagaaggcatctgtggctcttgtgcaatgaacatcaatggaggcaacactctagcttgcacccgaaggattgacaccaacctcaataaggtctcaaaaatctaccctcttccacacatgtatgtgataaaggatcttgttcccgatttgagcaacttctatgcacagtacaaatccattgagccttatttgaagaagaaggatgaatctcaggaaggcaagcagcagtatctgcagtccatagaagagcgtgagaaactggacgggctctacgagtgcattctctgtgcctgctgtagcaccagctgccccagctactggtggaacggagacaaatatctggggcctgcagttcttatgcaggcctatcgctggatgattgactccagagatgacttcacagaggagcgcctggccaagctgcaggacccattctctctataccgctgccacaccatcatgaactgcacaaggacctgtcctaagggtctgaatccagggaaagctattgcagagatcaagaaaatgatggcaacctataaggagaagaaagcttcagtttaactgtttccatgctaaacatgatttataaccagctcagagctgaacataatttatatctaatttgagttcctttaaagatcttggttttccatgaatacagcatgtataataaaaattttaagaaataaatgttattctactttattaacaaaaaaaaaa

SEQ ID NO: 5543 - protein, 280 aa, Homo sapiens
MAAVVALSLRRRLPATTLGGACLQASRGAQTAAATAPRIKKFAIYRWDPDKAGDKPHMQTYEVDLNKCGPMVLDALIKIKNEVDSTLTFRRSCREGICGSCAMNINGGNTLACTRRIDTNLNKVSKIYPLPHMYVIKDLVPDLSNFYAQYKSIEPYLKKKDESQEGKQQYLQSIEEREKLDGLYECILCACCSTSCPSYWWNGDKYLGPAVLMQAYRWMIDSRDDFTEERLAKLQDPFSLYRCHTIMNCTRTCPKGLNPGKAIAEIKKMMATYKEKKASV

SEQ ID NO: 5544 - DNA, 921 bp, Homo sapiens
gtacgcggctagtgggtcctcagtggatgtaggctgggcgccgcgatgttcgacgggacaccggcggagagcgacctcggggttaaggggtggggctgacgtcaggagccaagatggcggcggtggtcgccctctccttgaggcgccggttgccggccacaacccttggcggagcctgcctgcaggcctcccgaggagcccagacagctgcagccacagctccccgtatcaagaaatttgccatctatcgatgggacccagacaaggctggagacaaacctcatatgcagacttatgaagttgaccttaataaatgtggccccatggtattggatgctttaatcaagattaagaatgaagttgactctactttgaccttccgaagatcatgcagagaaggtgagcatttcattcctgttgggctccagatacttgtggtcttccaaagaggcttgggctggccaaagctgatagagacatctggaaaacagctgcagctctctgctgggtgaacttgctgtgcaacctaattccttttcttgggtaaatgcatccaaaattctaaccatggtgcaagttctggtttctgagtttactttccttcaggagcattctatcctgtggttactgcatctggcggtccctgtgagctgctccacgcttcaaggcctagctaggacctgctggctggcaccttccatgctgctgagctcttttattaagggagcagtggagagtttctgtctggcacttatgcttgtccagcaggggagatgtgtgagtctccctcagctcccagcatgacatgtccttggtagctgtgttctggattggctggtacagtgtctccctcagcatgtggttacttgtgctgctggtgccacatgagcccatttgaggcagtgtgcagactaacatttt

SEQ ID NO: 5545 - protein, 132 aa, Homo sapiens
MAAVVALSLRRRLPATTLGGACLQASRGAQTAAATAPRIKKFAIYRWDPDKAGDKPHMQTYEVDLNKCGPMVLDALIKIKNEVDSTLTFRRSCREGEHFIPVGLQILVVFQRGLGWPKLIETSGKQLQLSAG

SEQ ID NO: 5546 - DNA, 4638 bp, Homo sapiens
aggatgtgcttcaagttaagttgttactcaacggaaaacatattcaggatgctgcttgctatttgtgtgttttgttttgtttgagacgaggtctcgctctgtcacccaggctggagtgcagtggcatgatctcagctcactgcaacctccgccttgcgggcttaagcaatcctcccacctcagcctcccaacactttgggaggctgaggtgggaggattgcctgagaacaggaattcaagacatgcttgggcaacatagcaagaccctgactccacaaaaaaaaatttaaaaattagcctggcatggtagtgcacacctgtagtcgtagctactcagaggctgaggcaggaggaccgcttgagcccaggagtttgaggctgcagtgggccataatcatggcactgcactccagcctgggcaacagagtgagaccctgtctcaaaaaaaaaaaaatggggctgatatcggtaagaaacctgcctgtgatgtgcagagactgcctatggacacctgtgctgccatcatcagtgtgaggggaggaggatgggggaccagggaatggggaacaagacagacgttcttcttcctttgtgctcttgtgtttctcgagttttctgcccatgtgcacaaattgtcccctggattcgtctaacagttctccttggtgtccctgcaggatgaaattgagtttggctacatcgaggccccccataaaggcttccccgtggtgctggactctccccgagatggaaacctaaaggacttccctgtgaaggagctcctgggcccagattttggctacgtgacccgggagcccctctttgagtctgtcaccagccttgactcatttggaaacctggaggtcagtcccccagtgaccgtgaacggcaagacatacccgcttggccgcatcctcatcgggagcagctttcctctgtctggtggtcggaggatgaccaaggtggtgcgtgacttcctgaaggcccagcaggtgcaggcgcccgtggagctctactcagactggctgactgtgggccacgtggatgagttcatgtcctttgtccccatccccggcacaaaggtaagctagcctcccgaggctggagtgaatggggtagcagcaaaccaatatattacccgcccctgccagcagagggcaagagctagaggaactcgacagcataaaggaaggaggaagtaggctgaagctggtttgcatgttgttgctgtggcaggtaaaattttaaccccataaatccaaaatgttagcattgcaacacataatcagcctaaaaattattaacgagagatttaaattcttttctcatactaaatcttcaaaatctggcaaagattttactcacatgacacacctaaattcagactagccacagctcaagtgttcaatagtcacataaggctagtggctattgtgttggtggtaatgctctagagagaaataggttatgcacctgtggcactggaaagaggttctttcattttcttatgggtacaacttcataccctggaaattctctgcaaattgtgtggctgcttggcaacttggagatgtcctgtccaagtccacctttgactctgagccttgatctggtgacattgctgaggtagaggaaaggtgagaaatattcctctgaagcagagaacaccctccccgtcagcctttgccactcggcatgggaggcctgaggcaatgagcaggcaaggcactgggtcctcagcgcagggcctccccgtgctccttgggtgccttcccactgctgactctgtccctctggactgtctcttgcagaaattcctgctactcatggccagcacctcggcctgctacaagctcttccgagagaagcagaaggacggccatggagaggccatcatgttcaaaggcttgggtgggatgagcagcaagcgaatcaccatcaacaagattctgtccaacgagagccttgtgcaggagaacctgtacttccagcgctgcctagactggaaccgtgacatcctcaagaaggagctgggactgacagagcaggacatcattgacctgcccgctctgttcaagatggacgaggaccaccgtgccagagccttcttcccaaacatggtgaacatgatcgtgctggacaaggacctgggcatccccaagccattcgggccacaggttgaggaggaatgctgcctggagatgcacgtgcgtggcctcctggagcccctgggcctcgaatgcaccttcatcgacgacatttctgcctaccacaaatttctgggggaagtccactgtggcaccaacgtccgcaggaagcccttcaccttcaagtggtggcacatggtgccctgacctgccaggggccctggcgtttgcctccttcgcttagttctccagaccctccctcacacgcccagagccttctgctgacatggactggacagccccgctgggagacctttgggacgtggggtggaatttggggtatctgtgccttgccctccctgagaggggcctcagtgtcctctgaagccatccccagtgagcctcgactctgtccctgctgaaaatagctgggccagtgtctctgtagccctgacataaggaacagaacacaacaaaacacagcaaaccatgtgcccaaactgctccccaaagaattttgagtctctaatctgacactgaatgaggggagaagggaaggagattctgggattgccagttcttccagcagccatgctctgaaaatcaaggtagaatccatggaaagggaccccaggaccccgggaccctagacgtatcttgaactgccatcgtcatttcaaatacatctccctcagggtttccaggtggccacccccaattattcattccttaccaacctctcaaatcctcttggctttctctctgcagtgtggacactgttggctagtcctccccactccctgagggtccagtaagttagcttagaaccttcctggaaacatttcatctgagcaggtttccccacgtgtgggatgctccttttgcctcatctgtctcagggatgcaggctcccccgcatgcatggggatttctccccagaccagcatacttgtgacctgagagttcaatgcgtaaagatgcccctggtcagccatatccatcttctcttgcctggtccttgattctctggccgctccctgaccttcctccttccactgccttgactttcttcctttttattcctggtgccatctgtccaggcagctagacaagaacttgttcgccagcagccagattcaggccttcccaggggcataataagtgaccagcccctcctctccggacatcagatccaacacataaggaccctggcctaccctccagcccaacagccagttctgggtcagctgccaacttaggggtggtttgattatcccattgaaattcaccagtgcctttgccaaagaccctctcatttggacatacccagattcattccctggctccaactgaaaagactcagtttcaatcgttaaaagttcctttagggccagaagaataaatgaattataatcccattttgaagaaccgatttataaccaatgaaaaggttataatgtaatttatattcttggaggaacaagattttcatttgggattatttccttcaaccattcaacaaacatttgttgtatgccactaagcgccaggcacggcgttgggctctgcaaacacagtggttagtagcagtctggacctggtccctactggcatggaacccatcactccccaacatgcaaagcccacatttaaaggccagcctctgccccttcagtgatgcgctctttagaaatgccagtccactatattcagaaatccgcagggcacaaaacttccagcaagtcactgttgtggtgaaatgggcagtgggggtggggggtcttctttaaacaggcccccttcccatctacctagccagtacccatccaatgagtccccagagcctccagaagctgttgtctcctctctggggacagcagctcctgcctttggaggccaaagccccagatctctccagccccagagctgaaaacaccaagtgcctatttgagggtgtctgtctggagacttagagtttgtcatgtgtgtgtgtgtgtttggttaatgtgggtttatgggttttctttcttttttttctttttttttttagtctacattagggggaagtgagcgcctcccatgtgcagacagtgtgtctttatagatttttctaaggctttccccaatgatgtcggtaatttctgatgtttctgaagttcccaggactcacacacccgttcccatctcacttgcccacccagtgtgacaaccctcggtgtggatatacccccgtggactcatggctcttccccacccccactttctataaatgtaggcctagaatacgcttctctgttgcaaaactcagctaagttcctgcttccaccttgatgttgaaatatcttatgtaagagggcaggggatgtcgtgaagatggcaagaagaacacagtttcaaatttctggaaaagagcctgtggtggagatctaaagatgtttagggaagagctcgactaaagaacaatgaaataaatggtccaaggggaagtcat

SEQ ID NO: 5547 - protein, 213 aa, Homo sapiens [sequence omitted]

SEQ ID NO: 5548 - DNA, 4352 bp, Homo sapiens
agaaggcgcacctgctgcaggtgctcccggccgccccggaccagcgagcgcgggcactgcggcggggaggatgctgcgcgagcggaccgtgcggctgcagtacgggagccgcgtggaggcggtgtacgtgctgggcacctacctctggaccgatgtctacagcgcggccccagccggggcccaaaccttcagcctgaagcactcggaacacgtgtgggtggaggtggtgcgtgatggggaggctgaggaggtggccaccaatggcaagcagcgctggcttctctcgcccagcaccaccctgcgggtcaccatgagccaggcgagcaccgaggccagcagtgacaaggtcaccgtcaactactatgacgaggaagggagcattcccatcgaccaggcggggctcttcctcacagccattgagatctccctggatgtggacgcagaccgggatggtgtggtggagaagaacaacccaaagaaggcatcctggacctggggccccgagggccagggggccatcctgctggtgaactgtgaccgagagacaccctggttgcccaaggaggactgccgtgatgagaaggtctacagcaaggaagatctcaaggacatgtcccagatgatcctgcggaccaaaggccccgaccgcctccccgccggatacgagatagttctgtacatttccatgtcagactcagacaaagtgggcgtgttctacgtggagaacccgttcttcggccaacgctatatccacatcctgggccggcggaagctctaccatgtggtcaagtacacgggtggctccgcggagctgctgttcttcgtggaaggcctctgtttccccgacgagggcttctcaggcctggtctccatccatgtcagcctgctggagtacatggcccaggacattcccctgactcccatcttcacggacaccgtgatattccggattgctccgtggatcatgacccccaacatcctgcctcccgtgtcggtgtttgtgtgctgcatgaaggataattacctgttcctgaaagaggtgaagaaccttgtggagaaaaccaactgtgagctgaaggtctgcttccagtacctaaaccgaggcgatcgctggatccaggatgaaattgagtttggctacatcgaggccccccataaaggcttccccgtggtgctggactctccccgagatggaaacctaaaggacttccctgtgaaggagctcctgggcccagattttggctacgtgacccgggagcccctctttgagtctgtcaccagccttgactcatttggaaacctggaggtcagtcccccagtgaccgtgaacggcaagacatacccgcttggccgcatcctcatcgggagcagctttcctctgtctggtggtcggaggatgaccaaggtggtgcgtgacttcctgaaggcccagcaggtgcaggcgcccgtggagctctactcagactggctgactgtgggccacgtggatgagttcatgtcctttgtccccatccccggcacaaagaaattcctgctactcatggccagcacctcggcctgctacaagctcttccgagagaagcagaaggacggccatggagaggccatcatgttcaaaggcttgggtgggatgagcagcaagcgaatcaccatcaacaagattctgtccaacgagagccttgtgcaggagaacctgtacttccagcgctgcctagactggaaccgtgacatcctcaagaaggagctgggactgacagagcaggacatcattgacctgcccgctctgttcaagatggacgaggaccaccgtgccagagccttcttcccaaacatggtgaacatgatcgtgctggacaaggacctgggcatccccaagccattcgggccacaggttgaggaggaatgctgcctggagatgcacgtgcgtggcctcctggagcccctgggcctcgaatgcaccttcatcgacgacatttctgcctaccacaaatttctgggggaagtccactgtggcaccaacgtccgcaggaagcccttcaccttcaagtggtggcacatggtgccctgacctgccaggggccctggcgtttgcctccttcgcttagttctccagaccctccctcacacgcccagagccttctgctgacatggactggacagccccgctgggagacctttgggacgtggggtggaatttggggtatctgtgccttgccctccctgagaggggcctcagtgtcctctgaagccatccccagtgagcctcgactctgtccctgctgaaaatagctgggccagtgtctctgtagccctgacataaggaacagaacacaacaaaacacagcaaaccatgtgcccaaactgctccccaaagaattttgagtctctaatctgacactgaatgaggggagaagggaaggagattctgggattgccagttcttccagcagccatgctctgaaaatcaaggtagaatccatggaaagggaccccaggaccccgggaccctagacgtatcttgaactgccatcgtcatttcaaatacatctccctcagggtttccaggtggccacccccaattattcattccttaccaacctctcaaatcctcttggctttctctctgcagtgtggacactgttggctagtcctccccactccctgagggtccagtaagttagcttagaaccttcctggaaacatttcatctgagcaggtttccccacgtgtgggatgctccttttgcctcatctgtctcagggatgcaggctcccccgcatgcatggggatttctccccagaccagcatacttgtgacctgagagttcaatgcgtaaagatgcccctggtcagccatatccatcttctcttgcctggtccttgattctctggccgctccctgaccttcctccttccactgccttgactttcttcctttttattcctggtgccatctgtccaggcagctagacaagaacttgttcgccagcagccagattcaggccttcccaggggcataataagtgaccagcccctcctctccggacatcagatccaacacataaggaccctggcctaccctccagcccaacagccagttctgggtcagctgccaacttaggggtggtttgattatcccattgaaattcaccagtgcctttgccaaagaccctctcatttggacatacccagattcattccctggctccaactgaaaagactcagtttcaatcgttaaaagttcctttagggccagaagaataaatgaattataatcccattttgaagaaccgatttataaccaatgaaaaggttataatgtaatttatattcttggaggaacaagattttcatttgggattatttccttcaaccattcaacaaacatttgttgtatgccactaagcgccaggcacggcgttgggctctgcaaacacagtggttagtagcagtctggacctggtccctactggcatggaacccatcactccccaacatgcaaagcccacatttaaaggccagcctctgccccttcagtgatgcgctctttagaaatgccagtccactatattcagaaatccgcagggcacaaaacttccagcaagtcactgttgtggtgaaatgggcagtgggggtggggggtcttctttaaacaggcccccttcccatctacctagccagtacccatccaatgagtccccagagcctccagaagctgttgtctcctctctggggacagcagctcctgcctttggaggccaaagccccagatctctccagccccagagctgaaaacaccaagtgcctatttgagggtgtctgtctggagacttagagtttgtcatgtgtgtgtgtgtgtttggttaatgtgggtttatgggttttctttcttttttttctttttttttttagtctacattagggggaagtgagcgcctcccatgtgcagacagtgtgtctttatagatttttctaaggctttccccaatgatgtcggtaatttctgatgtttctgaagttcccaggactcacacacccgttcccatctcacttgcccacccagtgtgacaaccctcggtgtggatatacccccgtggactcatggctcttccccacccccactttctataaatgtaggcctagaatacgcttctctgttgcaaaactcagctaagttcctgcttccaccttgatgttgaaatatcttatgtaagagggcaggggatgtcgtgaagatggcaagaagaacacagtttcaaatttctggaaaagagcctgtggtggagatctaaagatgtttagggaagagctcgactaaagaacaatgaaataaatggtccaaggggaagtcat

SEQ ID NO: 5549 - protein, 665 aa, Homo sapiens
MLRERTVRLQYGSRVEAVYVLGTYLWTDVYSAAPAGAQTFSLKHSEHVWVEVVRDGEAEEVATNGKQRWLLSPSTTLRVTMSQASTEASSDKVTVNYYDEEGSIPIDQAGLFLTAIEISLDVDADRDGVVEKNNPKKASWTWGPEGQGAILLVNCDRETPWLPKEDCRDEKVYSKEDLKDMSQMILRTKGPDRLPAGYEIVLYISMSDSDKVGVFYVENPFFGQRYIHILGRRKLYHVVKYTGGSAELLFFVEGLCFPDEGFSGLVSIHVSLLEYMAQDIPLTPIFTDTVIFRIAPWIMTPNILPPVSVFVCCMKDNYLFLKEVKNLVEKTNCELKVCFQYLNRGDRWIQDEIEFGYIEAPHKGFPVVLDSPRDGNLKDFPVKELLGPDFGYVTREPLFESVTSLDSFGNLEVSPPVTVNGKTYPLGRILIGSSFPLSGGRRMTKVVRDFLKAQQVQAPVELYSDWLTVGHVDEFMSFVPIPGTKKFLLLMASTSACYKLFREKQKDGHGEAIMFKGLGGMSSKRITINKILSNESLVQENLYFQRCLDWNRDILKKELGLTEQDIIDLPALFKMDEDHRARAFFPNMVNMIVLDKDLGIPKPFGPQVEEECCLEMHVRGLLEPLGLECTFIDDISAYHKFLGEVHCGTNVRRKPFTFKWWHMVP

SEQ ID NO: 5550 - DNA, 1613 bp, Homo sapiens
agaaggcgcacctgctgcaggtgctcccggccgccccggaccagcgagcgcgggcactgcggcggggaggatgctgcgcgagcggaccgtgcggctgcagtacgggagccgcgtggaggcggtgtacgtgctgggcacctacctctggaccgatgtctacagcgcggccccagccggggcccaaaccttcagcctgaagcactcggaacacgtgtgggtggaggtggtgcgtgatggggaggctgaggaggtggccaccaatggcaagcagcgctggcttctctcgcccagcaccaccctgcgggtcaccatgagccaggcgagcaccgaggccagcagtgacaaggtcaccgtcaactactatgacgaggaagggagcattcccatcgaccaggcggggctcttcctcacagccattgagatctccctggatgtggacgcagaccgggatggtgtggtggagaagaacaacccaaagaaggcatcctggacctggggccccgagggccagggggccatcctgctggtgaactgtgaccgagagacaccctggttgcccaaggaggactgccgtgatgagaaggtctacagcaaggaagatctcaaggacatgtcccagatgatcctgcggaccaaaggccccgaccgcctccccgccggatacgagatagttctgtacatttccatgtcagactcagacaaagtgggcgtgttctacgtggagaacccgttcttcggccaacgctatatccacatcctgggccggcggaagctctaccatgtggtcaagtacacgggtggctccgcggagctgctgttcttcgtggaaggcctctgtttccccgacgagggcttctcaggcctggtctccatccatgtcagcctgctggagtacatggcccaggacattcccctgactcccatcttcacggacaccgtgatattccggattgctccgtggatcatgacccccaacatcctgcctcccgtgtcggtgtttgtgtgctgcatgaaggataattacctgttcctgaaagaggtgaagaaccttgtggagaaaaccaactgtgagctgaaggtctgcttccagtacctaaaccgaggcgatcgctggatccaggatgaaattgagtttggctacatcgaggccccccataaaggcttccccgtggtgctggactctccccgagatggaaacctaaaggacttccctgtgaaggagctcctgggcccagattttggctacgtgacccgggagcccctctttgagtctgtcaccagccttgactcatttggaaacctggaggtcagtcccccagtgaccgtgaacggcaagacatacccgcttggccgcatcctcatcgggagcagctttcctctgtaagagaagccaggctggggctaggggctgtgggagtggggaagtcactgtttctcttttggggtggcctgggttgctcacacatggagcaagtggctgggggaattattccctcccacgacttcctgttaagaggccgacactcttggaaagaaaatcaagctagcctttatatctttgtgtgatttaggatctaatatataactaaataaacaactcttttccccaagtg

SEQ ID NO: 5551 - protein, 437 aa, Homo sapiens
MLRERTVRLQYGSRVEAVYVLGTYLWTDVYSAAPAGAQTFSLKHSEHVWVEVVRDGEAEEVATNGKQRWLLSPSTTLRVTMSQASTEASSDKVTVNYYDEEGSIPIDQAGLFLTAIEISLDVDADRDGVVEKNNPKKASWTWGPEGQGAILLVNCDRETPWLPKEDCRDEKVYSKEDLKDMSQMILRTKGPDRLPAGYEIVLYISMSDSDKVGVFYVENPFFGQRYIHILGRRKLYHVVKYTGGSAELLFFVEGLCFPDEGFSGLVSIHVSLLEYMAQDIPLTPIFTDTVIFRIAPWIMTPNILPPVSVFVCCMKDNYLFLKEVKNLVEKTNCELKVCFQYLNRGDRWIQDEIEFGYIEAPHKGFPVVLDSPRDGNLKDFPVKELLGPDFGYVTREPLFESVTSLDSFGNLEVSPPVTVNGKTYPLGRILIGSSFPL

SEQ ID NO: 5552 - DNA, 4602 bp, Homo sapiens
attcttgaagacagctcgaccgtgatggaggagacaggcatttagaataagcatgaaataaaggtggctgttaaggggtcagctcccctcaccaaagtcacttttgatttacttacaaaagttttcttaagatttcttcagaacccaggtcaaaaggctgtggcaggaggccaggcagatcacagcgtccatgcctagatgctccctgacccccaggaaccagaagtgctgtctcctgaaggctctggaaacccggaatcagcctacgaggcaccagggccaccttggagggtggaaatgaggacctcaggccccagagggcatgcaggcgaggtgaagttcaggagagccaggaagtgtccccctcttcccggcctgctgtatcccaggacacagggcgtaagtgtggaggaggaagggctgcagggtgaggcagcccacactttggctcaggacagggatgggaccgggacatatgggaaaatagtctgggggtcctgggtaatggcaggagcatgagctcagggtcgggtggctgtcctggatgacctgtgggactctcttcctctccaagccacgctttcctcaactgtcccttccttgtgggatgcaagaggccacggcgagcgaaggcatgtgccaagagctgccactcaatgtgagtcagcgtgctggtcctccctccttttctccagggggcctaggacttttggggggagcctgaggacatgcttcgctgatgtcactgtgtggagtgtacaaatggccaccctgctgctcgttggttctatatgggcatccaggctggagagcagggggtggggagatggagatgccaccagcaggggactggttcctagaagagagggcgagtttgggtggtcccagaggtgttcttcccagaaaagagagcaggaggcaggaggtgggcatggagaatgtggaggggggcattgacagtgttctccaccacccatcagataagacctggagcctcattaccaaagacttaatgagattcgctttgttttcttatgagcaccacacctctctgggccttagactccttatccatgagcttcctgcctgcaccctaacattcagtgtcattggccgagttacccaatggctcccagcctcagtttcttcatctgcacattagggataagtacagccatccacctgggaggtgtcaagggggtgtggccgcagcacccagcccatgcacaagttcagtgatcattacctgtctcccccagccctgcctgagtgccaggatcagcaggcttgggaagggggagcccccagggatgtggaaagtggagagggagcacatgggctctggggcctcggggctcctgggctctgttctgcctgtctgggagctgtctcctgctctcccttgcagtgtctctgtctctcttcgttctgttcctccctctgtccttcagtttttccctctccatctcagtctctggttgtctcagtctctctttgcacctcactgtctctgcctttctctgcatctctcttcctttcctgggctctctctctctctttcatccctgttttgggctttctctgtctgtgtctctctgtttttcagtctgcttctttctgtctccgttcatttctctgtatgtctttgtcccctgcactcccattctcctcccatgctgtcctctctgggggctcctctggcttcactgggccacaggcccaggctggggtgtgaagaagcaggagctcccccgtcagatgacgctaggtgccccagtcagggcagtgggggccagacaaagagctctgcgaggggtggcaaaatcctcttcccagggaagggaatgtgggggctactggccagctgtgggatgggtggctgagaactctcataccactgtaaattctagatgtttttcacttatatcagcttcctgatccccctgagccaaaggcctagaaggtccctgtccctgtccttttggaatgtgcagtcttacttaccagagtgacaaggggaacagagttgaaacaggtggtttcccagcacaggagcctgtgggggctgcttagagaacagcacattccctgggagccagagccatctgggagggctttctggaggaggcagatcatgagggatcaggatggggactaatatgtgctgagtgcctggtggtgctttataagtatcagcagattgggagataagcatagccaccctgtggagacacctgggaggtgtcaaggggcatgcattgtaaaggcccagagtggtgaagcatccaccagctggtaagtggtagcctcgggtggggcctgtcgctgtccccatgctctgtccactactggtgtggcttgccccacttgtgaccatcgtttcttcccctccacccccagtgccacttcctctctccctcgttgtaggggaaagaacatgggctgtgtggccttggaccaattgcttgccctctctgggccttcttattggtgacagacagactggtgactttctgagaggatctatgcaacctcaggctcctgcacctgggttacagggtcttctggaggggaagagatgagcaggtaggctttgacacctgcctgctttgtcctgagtgtctactatgtcatctgctttaaatgcgaagtccctgggacttgcgagttatctctaagccttctcttttcctgactttctgggagtgtgtgtacccccattccctcaccccagccatcagggccctttctgagttgggcctccttcctagctctgggctaggccccaaccctggccctttccaaggccagcaggaactggaaggtccgtactcatgccctgggaggctccaggctctaaggggtgctggagtgatggagttgggcggctggtgctcagaggaccttaatggtgtggggacagctggaaactggttgtctcttgaaccctcttgccaccaggcctctgtccaggagggctgctgggggccaatgggccagacaccagacagtcacacctttggcagggctgaagtcggggggtgtgtgacacaatgggaggggctgggcctggcagtccctgcagcctataagcaccagcaacccatgaggggacacaggcaccctctggcctcatccttcttggagccagtgggatgtagcaactaaaatacaagctctgaagtttcatggactggagttgcatctctgcttccatcctaattagcaagagaccttggtcacgttgcttaaactctgacactagattttccccctctgcaaagcaaggacaatagcagtgctcccttcccgggtcagttgcaaggattaaggatgatgtctgcaaagtgcttagtcagagccggcatacggtaagtgctcaataaatgctggctcccattattagtatcccttccctccacgccctcaacacatccctttatcatgatggaataaccaattgcctggtaacaacatgttcacacttccacgctccccatcaaccatgctcacctataaggcaggctgcgaccagctcctcttcatctattcattgcctggcccatgctaggggcccaagaaatgtctgctgcatcaacgagtgattttgggaaaggtgctgagcccttctgtcccatgaagttcttgcgagacagtgtctcaccagcaacctggatcgtgagaaccacagcgggtgggccagatctagatggagagtgtccattgggcagagctgcttctgtgaaaggaaaggaagtttttcaagaaaccatgaggggggcccaagaatccaagtttctaactctgggatcggttttctgtcttttacctcggtttgcctctccctagctgtgtggtttatggcaagtcactctgtgcctctgtctccacgtgttcaaggaggcagccggtccaaggggccttcatagaaggggctgccgagatgtgagccctgcattggggggatgccccacagaggtgctgtcccccatcccctttccaggtatgagtgtcccccagctctgagtgaatcagtaggaggtgctggacctgggctgattctcacagtgggacctcaactctagccccgggttggctgacattagaggactttgggtcgttgttctggcagctgcaaggaagagccaatgtcagggagggaaaccccacattccctggcactatccaaacaaaggtttggttaaaacaaagaattctcatggagaagagtctgaaggacccaaaacacatatttctgtagacatcccatcccaaaataaacccatggatcaagccagacccaaatacaaggatgctgtgaaccacatggttgaatattccacactttccccatccattaaaccccacccagggtgggaaggggatggatttccctcagttctcagggcctagaagagcagggcttttttccctcaactggttgagttttactttgtgagcaccatgattcctaaaaccagttatattttctttttctcttgggccgccagggaactcacagcgaaatctaccaaccaaagaggatgtccatacctgtctttttctttcttccttcattttttgacttaatttcctcacttg

SEQ ID NO: 5553 - protein, 140 aa, Homo sapiens
MSLCGVYKWPPCCSLVLYGHPGWRAGGGEMEMPPAGDWFLEERASLGGPRGVLPRKESRRQEVGMENVEGGIDSVLHHPSDKTWSLITKDLMRFALFSYEHHTSLGLRLLIHELPACTLTFSVIGRVTQWLPASVSSSAH

SEQ ID NO: 5554 - DNA, 3848 bp, Homo sapiens
tcagaactcacacttcttcctggcaaagaagtgcccaggacgggagctggggagccagggctgatctaggaggctgggagccaggtgacaggatggccccaaagagagttgtgcagctgtccctgaagatgcctacccatgccgtgtgtgtggtgggagtcgaggcacatgtggacattcacagtgatgtgcccaagggtgccaacagcttcagggtctctggaagctccggggtggaggtcttcatggtctacaaccgcacacgtgtgaaagagcccataggcaaggcccgttggccgctagacactgatgcagacatggtcgtatctgtgggcacagccagtaaggaattaaaggacttcaaggtgagggtctcctactttggggagcaggaagaccaagctctgggccgcagcgtgctttacctcactggcgtcgatatttcccttgaggttgacacaggccgcacaggcaaggtgaagaggagccaaggggacaagaaaacctggcgctggggccctgagggctatggggctatcttgctggtgaactgtgaccgggacaatcacaggtccgcagagcctgacctcacccacagctggctgatgtcgctggctgacctgcaggacatgtccccaatgctgctgagctgcaatggccccgacaagctcttcgacagccacaagcttgtcttgaacgtgcccttttctgattccaaaagagtgagggtcttctgtgccaggggtgggaattctctctcggactacaaacaggtgctggggccccagtgtctgtcctatgaagttgagcgacagccaggggagcaggagatcaagttctatgtggaggggctgaccttccccgatgccgatttcctagggctggtttccctcagtgtcagcctggtggacccggggaccctgcccgaggtgaccctcttcacagacactgtgggcttccgcatggccccctggatcatgacgcccaacactcagcctcctgaggagctgtatgtgtgcagagtgatggacactcatggctccaatgagaaattcctggaggacatgtcttatctgacattgaaagccaactgcaagctgaccatctgccctcaagttgaaaatcgaaatgaccgctggatccaggacgagatggagtttggctacatcgaggcccctcacaaatccttccccgtggtctttgactcccccaggaacaggggcctgaaagatttcccctataagaggatcctgggtcctgactttggatatgttacccgggagatcccgctccctggtccctccagccttgactccttcggcaacctggacgtcagcccgcccgtcacggtgggcggcacggaataccccctgggccggatcctcatcgggagcagcttccccaagtccggtgggcggcagatggccagggcagtgcggaacttcctgaaggcacagcaggtgcaggcacccgtggagctctactcggactggctctctgtgggccatgtggacgagtttctgacctttgtgcctacctctgaccaaaagggcttccggctgctcctggctagccccagcgcttgcctcaaactcttccaagagaagaaagaagagggttatggggaggcagcccagtttgatgggttaaaacaccaggcaaaaagaagcattaatgagatgctggcagacagacacctccagagagacaatcttcatgcacagaaatgcattgactggaaccgtaatgtgctgaagcgggagctgggcctggcagagagtgacatcgtggacattccccagctcttcttcctgaaaaacttctacgcggaagccttcttcccagacatggttaacatggtggtcttaggcaagtacctgggcatccccaagccctacgggcccatcatcaatggccgctgctgcctggaggagaaggtgcagtccctgctggagcctctgggcctgcactgcatcttcattgatgactacttgtcctaccacgagctgcagggggagatccactgtggcaccaacgtgcgcaggaagccctttcccttcaaatggtggaacatggtgccctgagcctgcccccacccgccatcctctctgccctcttgctagggaaccctgccagggtgaaggcaaggaacaaccacctggcctccattctcttgggggagtcttggcactttgcaaacatcctggccaccatgggcaccaggacacagggatggataccacctaccctcgcctctggaatggcctacccaacccgagaagaatgcacctcattcttccctggcctctttcccacccacagcccccagaggctctagatcaacaatgttagcatgttccagaatggctgtgggaggcctagggagatgggccccacttagaattgctcccccttcattctgatgcctccctggggaacaaggataatgactttgcatctgcacctggaacggggcctgggggacctggggtctggtgtgccaggcaccaggctgcctctgctcttggaaaactaggaaaggggatcagaaacatcctctccccgctctaggtttcttctcccaaaggggacccaaggctgtgacacttacctccacccccatccagcacccttcagctgtgtgtggacaaacaaggacagaaaaacccagtgtccaagggccaatttaaatagaaaaaaagacaacaaaattttaatagctgactccgacctcagaagagtgattgctacctttctggaaagactttaattaccagagctggcttctcccagctcagaaatgctgagaagccaacgtgaggcctgaggacacacaaaggatgacggggcaggaggggatgaggtcagggtagcagagtgtgtgacgacggatttgggggcctagaggtgtccgtggttcctgggctgggattttggactctggatttgaagggagctggagcttccagatgtagcaggggtagggggccagatgttagaagagggtgtgtgtgttgggaggaaattaggttatctctgaaggtggagtttaatttcctttaatagtctttaattattccccttcattctgcaggcagtgggaggggaaggcttgcccggtctctctcagcaacccagggaccctgcacatagcttaggtttcatccctgaataaaccgctgtgcaggcccatgtcccctcccacagtagggaagacagctgccacgggaggttaatagcccggagtgaggtcactgagacatgcacaggcaggctggttcagctgggctgcagggcacgggcaggaggaagccagcctaccctcttcccccactgccagtgaggccattgtagggcagttggccctagggcttcggtccatctaggttttcagtggcccctgctgagacctcacactgagccaactactgtcactgttttaaccaacaaaagctagcctggaactgctatggttaaagtgggtgagcgggaacctgaaaatccccttctggaaggttctacagaactctatttgcaagctcctgctttaacctgagcgtcctctgctcaggatcataccccagcctgcactgagtcaagaaggagaaggaggctctgaaggggccgggggtgtgagctggggttgggactcccctgagaaagagctgtgggtaggaagggagtgagcattgcagagatagggctgggggtcggggccacactgagtgtgggaagctctggagttgctgctgggccatcgaggggccctggtgttggctctgagaatgttctgggtgaccagtcacctactttctgatcaataaaaatgtcgacatgcatttcttaca

SEQ ID NO: 5555 - protein, 663 aa, Homo sapiens
MAPKRVVQLSLKMPTHAVCVVGVEAHVDIHSDVPKGANSFRVSGSSGVEVFMVYNRTRVKEPIGKARWPLDTDADMVVSVGTASKELKDFKVRVSYFGEQEDQALGRSVLYLTGVDISLEVDTGRTGKVKRSQGDKKTWRWGPEGYGAILLVNCDRDNHRSAEPDLTHSWLMSLADLQDMSPMLLSCNGPDKLFDSHKLVLNVPFSDSKRVRVFCARGGNSLSDYKQVLGPQCLSYEVERQPGEQEIKFYVEGLTFPDADFLGLVSLSVSLVDPGTLPEVTLFTDTVGFRMAPWIMTPNTQPPEELYVCRVMDTHGSNEKFLEDMSYLTLKANCKLTICPQVENRNDRWIQDEMEFGYIEAPHKSFPVVFDSPRNRGLKDFPYKRILGPDFGYVTREIPLPGPSSLDSFGNLDVSPPVTVGGTEYPLGRILIGSSFPKSGGRQMARAVRNFLKAQQVQAPVELYSDWLSVGHVDEFLTFVPTSDQKGFRLLLASPSACLKLFQEKKEEGYGEAAQFDGLKHQAKRSINEMLADRHLQRDNLHAQKCIDWNRNVLKRELGLAESDIVDIPQLFFLKNFYAEAFFPDMVNMVVLGKYLGIPKPYGPIINGRCCLEEKVQSLLEPLGLHCIFIDDYLSYHELQGEIHCGTNVRRKPFPFKWWNMVP

SEQ ID NO: 5556 - DNA, 2685 bp, Homo sapiens
acacttcttcctggcaaagaagtgcccaggacgggagctggggagccagggctgatctaggaggctgggagccaggtgacaggatggccccaaagagagttgtgcagctgtccctgaagatgcctacccatgccgtgtgtgtggtgggagtcgaggcacatgtggacattcacagtgatgtgcccaagggtgccaacagcttcagggtctctggaagctccggggtggaggtcttcatggtctacaaccgcacacgtgtgaaagagcccataggcaaggcccgttggccgctagacactgatgcagacatggtcgtatctgtgggcacagccagtaaggaattaaaggacttcaaggtgagggtctcctactttggggagcaggaagaccaagctctgggccgcagcgtgctttacctcactggcgtcgatatttcccttgaggttgacacaggccgcacaggcaaggtgaagaggagccaaggggacaagaaaacctggcgctggggccctgagggctatggggctatcttgctggtgaactgtgaccgggacaatcacaggtccgcagagcctgacctcacccacagctggctgatgtcgctggctgacctgcaggacatgtccccaatgctgctgagctgcaatggccccgacaagctcttcgacagccacaagcttgtcttgaacgtgcccttttctgattccaaaagagtgagggtcttctgtgccaggggtgggaattctctctcggactacaaacaggtgctggggccccagtgtctgtcctatgaagttgagcgacagccaggggagcaggagatcaagttctatgtggaggggctgaccttccccgatgccgatttcctagggctggtttccctcagtgtcagcctggtggacccggggaccctgcccgaggtgaccctcttcacagacactgtgggcttccgcatggccccctggatcatgacgcccaacactcagcctcctgaggagctgtatgtgtgcagagtgatggacactcatggctccaatgagaaattcctggaggacatgtcttatctgacattgaaagccaactgcaagctgaccatctgccctcaagttgaaaatcgaaatgaccgctggatccaggacgagatggagtttggctacatcgaggcccctcacaaatccttccccgtggtctttgactcccccaggaacaggggcctgaaagatttcccctataagaggatcctgggtcctgactttggatatgttacccgggagatcccgctccctggtccctccagccttgactccttcggcaacctggacgtcagcccgcccgtcacggtgggcggcacggaataccccctgggccggatcctcatcgggagcagcttccccaagtccggtgggcggcagatggccagggcagtgcggaacttcctgaaggcacagcaggtgcaggcacccgtggagctctactcggactggctctctgtgggccatgtggacgagtttctgacctttgtgcctacctctgaccaaaagggcttccggctgctcctggctagccccagcgcttgcctcaaactcttccaagagaagaaagaagagggttatggggaggcagcccagtttgatgggttaaaacaccaggcaaaaagaagcattaatgagatgctggcagacagacacctccagagagacaatcttcatgcacagaaatgcattgactggaaccgtaatgtgctgaagcgggagctgggcctggcagagagtgacatcgtggacattccccagctcttcttcctgaaaaacttctacgcggaagccttcttcccagacatggttaacatggtggtcttaggcaagtacctgggcatccccaagccctacgggcccatcatcaatggccgctgctgcctggaggagaaggtgcagtccctgctggagcctctgggcctgcactgcatcttcattgatgactacttgtcctaccacgagctgcagggggagatccactgtggcaccaacgtgcgcaggaagccctttcccttcaaatggtggaacatggtgccctgagcctgcccccacccgccatcctctctgccctcttgctagggaaccctgccagggtgaaggcaaggaacaaccacctggcctccattctcttgggggagtcttggcactttgcaaacatcctggccaccatgggcaccaggacacagggatggataccacctaccctcgcctctggaatggcctacccaacccgagaagaatgcacctcattcttccctggcctctttcccacccacagcccccagaggctctagatcaacaatgttagcatgttccagaatggctgtgggaggcctagggagatgggccccacttagaattgctcccccttcattctgatgcctccctggggaacaaggataatgactttgcatctgcacctggaacggggcctgggggacctggggtctggtgtgccaggcaccaggctgcctctgctcttggaaaactaggaaaggggatcagaaacatcctctccccgctctaggtttcttctcccaaaggggacccaaggctgtgacacttacctccacccccatccagcacccttcagctgtgtgtggacaaacaaggacagaaaaacccagtgtccaagggccaatttaaatag

SEQ ID NO: 5557 - protein, 663 aa, Homo sapiens; identical to SEQ ID NO: 5555

SEQ ID NO: 5558 - DNA, 910 bp, Homo sapiens
gagcggtcagggtctgcagttgctatgaaggtggagctgatgggatttgctgaggggctggctgtgcgagtgagggaacaagaggagtgatgtgcccaagggtgccaacagcttcagggtctctggaagctccggggtggaggtcttcatggtctacaaccgcacacgtgtgaaagagcccataggcaaggcccgttggccgctagacactgatgcagacatggtcgtatctgtgggcacagccagtaaggaattaaaggacttcaaggtgagggtctcctactttggggagcaggaagaccaagctctgggccgcagcgtgctttacctcactggcgtcgatatttcccttgaggttgacacaggccgcacaggcaaggtgaagaggagccaaggggacaagaaaacctggcgctggggccctgagggctatggggctatcttgctggtgaactgtgaccgggacaatcacaggtccgcagagcctgacctcacccacagctggctgatgtcgctggctgacctgcaggacatgtccccaatgctgctgagctgcaatggccccgacaagctcttcgacagccacaagcttgtcttgaacgtgcccttttctgattccaaaagagtgagggtcttctgtgccagggcttacaaacaaccactccatcagtaccaaatatagtcctcaaggaggaggttcaacaacaacgagttccattttatggagaggaaaaccgaggctcagatgcaggaattcactatggcacaaccatctggggtggagcaggcattccaacccaggtgtcttgggtgcaccaaagctcctccttttaccattgccccacacccgttccctcctctggtcaatcagcgtggactgaactgcatgccaagcactgtccaggcaggg

SEQ ID NO: 5559 - protein, 177 aa, Homo sapiens
MVYNRTRVKEPIGKARWPLDTDADMVVSVGTASKELKDFKVRVSYFGEQEDQALGRSVLYLTGVDISLEVDTGRTGKVKRSQGDKKTWRWGPEGYGAILLVNCDRDNHRSAEPDLTHSWLMSLADLQDMSPMLLSCNGPDKLFDSHKLVLNVPFSDSKRVRVFCARAYKQPLHQYQI

SEQ ID NO: 5560 - DNA, 514 bp, Homo sapiens
ggacttcagagactgggggggtctccaggcctcctgtgcctctaagtagggctgtcaggatgtgtccctcatcacctctgcctccgccatctctgaaggtgatggccgtgcaggcttagggctatgttctgcaggtgagggtctcctactttggggagcaggaagaccaagctctgggccgcagcgtgctttacctcactggcgtcgatatttcccttgaggttgacacaggccgcacaggcaaggtgaagaggagccaaggggacaagaaaacctggcgctggggccctgagggctatggggctatcttgctggtgaactgtgaccgggacaatcacaggtccgcagagcctgacctcacccacagctggctgatgtcgctggctgacctgcaggacatgtccccaatgctgctgagctgcaatggccccgacaagctcttcgacagccacaagcttgtcttgaacgtgcccttttctgattccaaaagagtgagggtcttctgtgccagggg

SEQ ID NO: 5561 - protein, 45 aa, Homo sapiens
MSLADLQDMSPMLLSCNGPDKLFDSHKLVLNVPFSDSKRVRVFCA

SEQ ID NO: 5562 - DNA, 3127 bp, Homo sapiens
atgtagccccaggctgaagacggcctccaggcagtgctccctgagctatgtactgtctttctcttcttgcagggttaaaacaccaggcaaaaagaagcattaatgagatgctggcagacagacacctccagagagacaatcttcatgcacaggtgagaggcaggaccaccagctgctctaaggggtcctttcccttccagggagaagaagccccaggaactgggttgggtcagagattcagcgctggagctctcatggtcctgggggctgctggggcctgcaggtgggatagagcctctgccttcaggaacccacagtctgatggaagagacagagccatgccctcagagagctcccagcctaatgagggagacccggccccacgctggggcaatgacctattttcacagaagcaaatctgagcctctcatctgagaagtctggtgaaatgcgagagacacggtggggaaataggaccttgaggggcccagaggtggggtgggtaagattcagggggatcctgtgggaacaggtgaagcaaggtgtcaggaaggggcagggctcaccccaaggataaaaaatgcctgccccatgcaaggcgaaggggctagcacagagtcggtgctcagttaatggcaggagggcccttaccccttcccggtagtgcccagcgctttctcctaagctgctgagaagggacaggagcatcagccatgctgtggctggggctgggacagtgtgttgtgctgacaagaacatttgcatccagaaactgcctgggttcgaaccccagctttggcacatcctagccttgtgcacttgagcaggttgcctgagcctcagtttcccccggacagcaatggtttctattgcacaaagctgttgtgaggcttgaaggagctagcgggcccagagggctccacacgggcccagcgcacagtaggtgcttggccagtgttatgctcttcctagtcctgggctgcccagctgcctccttccccagaaatgcattgactggaaccgtaatgtgctgaagcgggagctgggcctggcagagagtgacatcgtggacattccccagctcttcttcctgaaaaacttctacgcggaagccttcttcccagacatggttaacatggtggtcttaggcaagtacctgggcatccccaagccctacgggcccatcatcaatggccgctgctgcctggaggagaaggtgcagtccctgctggagcctctgggcctgcactgcatcttcattgatgactacttgtcctaccacgagctgcagggggagatccactgtggcaccaacgtgcgcaggaagccctttcccttcaaatggtggaacatggtgccctgagcctgcccccacccgccatcctctctgccctcttgctagggaaccctgccagggtgaaggcaaggaacaaccacctggcctccattctcttgggggagtcttggcactttgcaaacatcctggccaccatgggcaccaggacacagggatggataccacctaccctcgcctctggaatggcctacccaacccgagaagaatgcacctcattcttccctggcctctttcccacccacagcccccagaggctctagatcaacaatgttagcatgttccagaatggctgtgggaggcctagggagatgggccccacttagaattgctcccccttcattctgatgcctccctggggaacaaggataatgactttgcatctgcacctggaacggggcctgggggacctggggtctggtgtgccaggcaccaggctgcctctgctcttggaaaactaggaaaggggatcagaaacatcctctccccgctctaggtttcttctcccaaaggggacccaaggctgtgacacttacctccacccccatccagcacccttcagctgtgtgtggacaaacaaggacagaaaaacccagtgtccaagggccaatttaaatagaaaaaaagacaacaaaattttaatagctgactccgacctcagaagagtgattgctacctttctggaaagactttaattaccagagctggcttctcccagctcagaaatgctgagaagccaacgtgaggcctgaggacacacaaaggatgacggggcaggaggggatgaggtcagggtagcagagtgtgtgacgacggatttgggggcctagaggtgtccgtggttcctgggctgggattttggactctggatttgaagggagctggagcttccagatgtagcaggggtagggggccagatgttagaagagggtgtgtgtgttgggaggaaattaggttatctctgaaggtggagtttaatttcctttaatagtctttaattattccccttcattctgcaggcagtgggaggggaaggcttgcccggtctctctcagcaacccagggaccctgcacatagcttaggtttcatccctgaataaaccgctgtgcaggcccatgtcccctcccacagtagggaagacagctgccacgggaggttaatagcccggagtgaggtcactgagacatgcacaggcaggctggttcagctgggctgcagggcacgggcaggaggaagccagcctaccctcttcccccactgccagtgaggccattgtagggcagttggccctagggcttcggtccatctaggttttcagtggcccctgctgagacctcacactgagccaactactgtcactgttttaaccaacaaaagctagcctggaactgctatggttaaagtgggtgagcgggaacctgaaaatccccttctggaaggttctacagaactctatttgcaagctcctgctttaacctgagcgtcctctgctcaggatcataccccagcctgcactgagtcaagaaggagaaggaggctctgaaggggccgggggtgtgagctggggttgggactcccctgagaaagagctgtgggtaggaagggagtgagcattgcagagatagggctgggggtcggggccacactgagtgtgggaagctctggagttgctgctgggccatcgaggggccctggtgttggctctgagaatgttctgggtgaccagtcacctactttctgatcaataaaaatgtcgacatgcatttcttaca

SEQ ID NO: 5563 - protein, 78 aa, Homo sapiens
MVNMVVLGKYLGIPKPYGPIINGRCCLEEKVQSLLEPLGLHCIFIDDYLSYHELQGEIHCGTNVRRKPFPFKWWNMVP

SEQ ID NO: 5564 - DNA, 489 bp, Homo sapiens
gctgctggggcctgcaggtgggatagagcctctgccttcaggaacccacagtctgatggaagagacagagccatgccctcagagagctcccagcctaatgagggagacccggccccacgctggggcaatgacctattttcacagaagcaaatctgagcctctcatctgagaagtctggtgaaaaatgcattgactggaaccgtaatgtgctgaagcgggagctgggcctggcagagagtgacatcgtggacattccccagctcttcttcctgaaaaacttctacgcggaagccttcttcccagacatggttaacatggtggtcttaggcaagtacctgggcatccccaagccctacgggccacactgagtgtgggaagctctggagttgctgctgggccatcgaggggccctggtgttggctctgagaatgttctgggtgaccagtcacctactttctgatcaataaaaatgtcgacatgcatttctta

SEQ ID NO: 5565 - protein, 37 aa, Homo sapiens
MEETEPCPQRAPSLMRETRPHAGAMTYFHRSKSEPLI

SEQ ID NO: 5566 - DNA, 3186 bp, Homo sapiens
agtgttggggttggcggccacagctaagtccaacaccagcatgtcgctgcagagaatcgtgcgtgtgtccctggagcatcccaccagcgcggtgtgtgtggctggcgtggagaccctcgtggacatttatgggtcagtgcctgagggcacagaaatgtttgaggtctatgggacgcctggcgtggacatctacatctctcccaacatggagaggggccgggagcgtgcagacaccaggcggtggcgctttgacgcgactttggagatcatcgtggtcatgaactcccccagcaatgacctcaacgacagccatgttcagatttcctaccactccagccatgagcctctgcccctggcctatgcggtgctctacctcacctgtgttgacatctctctggattgcgacctgaactgtgagggaaggcaggacaggaactttgtagacaagcggcagtgggtctgggggcccagtgggtatggcggcatcttgctggtgaactgtgaccgtgatgatccgagctgtgatgtccaggacaattgtgaccagcacgtgcactgcctgcaagacctggaagacatgtctgtcatggtcctgcggacgcagggccctgcagccctctttgatgaccacaaacttgtcctccatacctccagctatgatgccaaacgggcacaggtcttccacatctgcggtcctgaggatgtgtgtgaggcctataggcatgtgctgggccaagataaggtgtcctatgaggtaccccgcttgcatggggatgaggagcgcttcttcgtggaaggcctgtccttccctgatgccggcttcacaggactcatctccttccatgtcactctgctggacgactccaacgaggatttctcggcatcccctatcttcactgacactgtggtgttccgagtggcaccctggatcatgacgcccagcactctgccacccctagaggtgtatgtgtgccgtgtgaggaacaacacgtgttttgtggatgcggtggcagagctggccaggaaggccggctgcaagctgaccatctgcccacaggccgagaaccgcaacgaccgctggatccaggatgagatggagctgggctacgttcaggcgccgcacaagaccctcccggtggtctttgactccccaaggaatggggaactgcaggatttcccttacaaaagaatcctgggtccagattttggttacgtgactcgggaaccacgcgacaggtctgtgagtggcctggactcctttgggaacctggaggtcagccctccagtggtggccaatgggaaagagtaccccctggggaggatcctcattgggggcaacctgcctgggtcaagtggccgcagggtcacccaggtggtgcgggacttcctccatgcccagaaggtgcagccccccgtggagctctttgtggactggttggccgtgggccatgtggatgagtttctgagctttgtccctgcccccgatgggaagggcttccggatgctcctggccagccctggggcctgcttcaagctcttccaggaaaagcagaagtgtggccacgggagggccctcctgttccagggggttgttgatgatgagcaggtcaagaccatctccatcaaccaggtgctctccaataaagacctcatcaactacaataagtttgtgcagagctgcatcgactggaaccgtgaggtgctgaagcgggagctgggcctggcagagtgtgacatcattgacatcccacagctcttcaagaccgagaggaaaaaagcaacggccttcttccctgacttggtgaacatgctggtgctggggaagcacctgggcatccccaagccctttgggcccatcatcaatggctgctgctgcctggaggagaaggtgcggtccctgctggagccgctgggcctccactgcaccttcattgatgacttcactccataccacatgctgcatggggaggtgcactgtggcaccaatgtgtgcagaaagcccttctctttcaagtggtggaacatggtgccctgagacagctcccacccaccatcctgtccccctggggcgggcattggcccaggtggtggagacagagacaggcccctgaacgataagcaccaagagaccccaaggctccagatggaacactgagggtgaccgtccctctcagaagccttttccctggaagtgtccatgcctcacctgcaacccatgtggttctcagacttgaatcttctcggccccccaaaaagaaggacctcatttcttatagcctctcctgtgattcaacacaacccatggagatgtccccttctcactctgaaatcatccatttggggacaaatccacattggggtctagaaacatccacgtatctcatcagccatcttgtcctgtgcatcctaacagaggaaggatccatgattctgctttggtccaattgcttcctctctgcagaggaacaaccctaaaaccagaccactccacgcaggacaggcaggagagattcttcctaaagcctcccccataaaaagggagctgtggatccacttagatcagggcggaaccatctttcacccggccaagctcctgcccagatgttgaccctcacccagcgtgagctgtcacatagtaggagcttctagatgcatgtggaagcaatgagagttgtcccttagccttataaactccccatgatctgacatgcagaaatccagccttgtccagaatcctcctggaatttcttggagacgaaagtatctgggggattgttgggtactagggagactgggtacaagggtgaaaagtagttcccataatacacatggttgactatggtgatccaccttgtgatggttaatattaggtgtctggagaaggttgcttcattggccctgggacttctctctgcaggaggagagaacgctgcctctcctctggattggtctcaggctctctgttggcctttggtcagcgtttccacatcctgctctgctgcaggagagggggctaaggggctggatccaccaaggcagctcacagcgggaaaactctgggaatgaaccactgaattcaggggatgggggtgggggggcggttctcgaggtgtgtgccagctacacgtgtgttctgtatgggtccagctgcgtttccatcactcgctaataaatcaacagaaacac

SEQ ID NO: 5567 - protein, 664 aa, Homo sapiens
MSLQRIVRVSLEHPTSAVCVAGVETLVDIYGSVPEGTEMFEVYGTPGVDIYISPNMERGRERADTRRWRFDATLEIIVVMNSPSNDLNDSHVQISYHSSHEPLPLAYAVLYLTCVDISLDCDLNCEGRQDRNFVDKRQWVWGPSGYGGILLVNCDRDDPSCDVQDNCDQHVHCLQDLEDMSVMVLRTQGPAALFDDHKLVLHTSSYDAKRAQVFHICGPEDVCEAYRHVLGQDKVSYEVPRLHGDEERFFVEGLSFPDAGFTGLISFHVTLLDDSNEDFSASPIFTDTVVFRVAPWIMTPSTLPPLEVYVCRVRNNTCFVDAVAELARKAGCKLTICPQAENRNDRWIQDEMELGYVQAPHKTLPVVFDSPRNGELQDFPYKRILGPDFGYVTREPRDRSVSGLDSFGNLEVSPPVVANGKEYPLGRILIGGNLPGSSGRRVTQVVRDFLHAQKVQPPVELFVDWLAVGHVDEFLSFVPAPDGKGFRMLLASPGACFKLFQEKQKCGHGRALLFQGVVDDEQVKTISINQVLSNKDLINYNKFVQSCIDWNREVLKRELGLAECDIIDIPQLFKTERKKATAFFPDLVNMLVLGKHLGIPKPFGPIINGCCCLEEKVRSLLEPLGLHCTFIDDFTPYHMLHGEVHCGTNVCRKPFSFKWWNMVP

SEQ ID NO: 5568 - DNA, 2269 bp, Homo sapiens
tacagccagagggacgagctagcccgacgatggcccaggggacattgatccgtgtgaccccagagcagcccacccatgccgtgtgtgtgctgggcaccttgactcagcttgacatctgcagctctgcccctgaggactgcacgtccttcagcatcaacgcctccccaggggtggtcgtggatattgcccacggccctccagccaagaagaaatccacaggttcctccacatggcccctggaccctggggtagaggtgaccctgacgatgaaagtggccagtggtagcacaggcgaccagaaggttcagatttcatactacggacccaagactccaccagtcaaagctctactctacctcaccggggtggaaatctccttgtgcgcagacatcacccgcaccggcaaagtgaagccaaccagagctgtgaaagatcagaggacctggacctggggcccttgtggacagggtgccatcctgctggtgaactgtgacagagacaatctcgaatcttctgccatggactgcgaggatgatgaagtgcttgacagcgaagacctgcaggacatgtcgctgatgaccctgagcacgaagacccccaaggacttcttcacaaaccatacactggtgctccacgtggccaggtctgagatggacaaagtgagggtgtttcaggccacacggggcaaactgtcctccaagtgcagcgtagtcttgggtcccaagtggccctctcactacctgatggtccccggtggaaagcacaacatggacttctacgtggaggccctcgctttcccggacaccgacttcccggggctcattaccctcaccatctccctgctggacacgtccaacctggagctccccgaggctgtggtgttccaagacagcgtggtcttccgcgtggcgccctggatcatgacccccaacacccagcccccgcaggaggtgtacgcgtgcagtatttttgaaaatgaggacttcctgaagtcagtgactactctggccatgaaagccaagtgcaagctgaccatctgccctgaggaggagaacatggatgaccagtggatgcaggatgaaatggagatcggctacatccaagccccacacaaaacgctgcccgtggtcttcgactctccaaggaacagaggcctgaaggagtttcccatcaaacgcgtgatgggtccagattttggctatgtaactcgagggccccaaacagggggtatcagtggactggactcctttgggaacctggaagtgagccccccagtcacagtcaggggcaaggaatacccgctgggcaggattctcttcggggacagctgttatcccagcaatgacagccggcagatgcaccaggccctgcaggacttcctcagtgcccagcaggtgcaggcccctgtgaagctctattctgactggctgtccgtgggccacgtggacgagttcctgagctttgtgccagcacccgacaggaagggcttccggctgctcctggccagccccaggtcctgctacaaactgttccaggagcagcagaatgagggccacggggaggccctgctgttcgaagggatcaagaaaaaaaaacagcagaaaataaagaacattctgtcaaacaagacattgagagaacataattcatttgtggagagatgcatcgactggaaccgcgagctgctgaagcgggagctgggcctggccgagagtgacatcattgacatcccgcagctcttcaagctcaaagagttctctaaggcggaagcttttttccccaacatggtgaacatgctggtgctagggaagcacctgggcatccccaagcccttcgggcccgtcatcaacggccgctgctgcctggaggagaaggtgtgttccctgctggagccactgggcctccagtgcaccttcatcaacgacttcttcacctaccacatcaggcatggggaggtgcactgcggcaccaacgtgcgcagaaagcccttctccttcaagtggtggaacatggtgccctgagcccatcttccctggcgtcctctccctcctggccagatgtcgctgggtcctctgcagtgtggcaagcaagagctcttgtgaatattgtggctccctgggggcggccagccctcccagcagtggcttgctttcttctcctgtgatgtcccagtttcccactctgaagatcccaacatggtcctagcactgcacactcagttctgctctaagaagctgcaataaagtttttttaagtcactttgtacatg

SEQ ID NO: 5569 - protein, 663 aa, Homo sapiens
MAQGTLIRVTPEQPTHAVCVLGTLTQLDICSSAPEDCTSFSINASPGVVVDIAHGPPAKKKSTGSSTWPLDPGVEVTLTMKVASGSTGDQKVQISYYGPKTPPVKALLYLTGVEISLCADITRTGKVKPTRAVKDQRTWTWGPCGQGAILLVNCDRDNLESSAMDCEDDEVLDSEDLQDMSLMTLSTKTPKDFFTNHTLVLHVARSEMDKVRVFQATRGKLSSKCSVVLGPKWPSHYLMVPGGKHNMDFYVEALAFPDTDFPGLITLTISLLDTSNLELPEAVVFQDSVVFRVAPWIMTPNTQPPQEVYACSIFENEDFLKSVTTLAMKAKCKLTICPEEENMDDQWMQDEMEIGYIQAPHKTLPVVFDSPRNRGLKEFPIKRVMGPDFGYVTRGPQTGGISGLDSFGNLEVSPPVTVRGKEYPLGRILFGDSCYPSNDSRQMHQALQDFLSAQQVQAPVKLYSDWLSVGHVDEFLSFVPAPDRKGFRLLLASPRSCYKLFQEQQNEGHGEALLFEGIKKKKQQKIKNILSNKTLREHNSFVERCIDWNRELLKRELGLAESDIIDIPQLFKLKEFSKAEAFFPNMVNMLVLGKHLGIPKPFGPVINGRCCLEEKVCSLLEPLGLQCTFINDFFTYHIRHGEVHCGTNVRRKPFSFKWWNMVP

SEQ ID NO: 5570 - DNA, 841 bp, Homo sapiens
acagccagagggacgagctagcccgacgatggcccaggggacattgatccgtgtgaccccagagcagcccacccatgccgtgtgtgtgctgggcaccttgactcagcttgacatctgcagctctgcccctgaggactgcacgtccttcagcatcaacgcctccccaggggtggtcgtggatattgcccacggccctccagccaagaagaaatccacaggttcctccacatggcccctggaccctggggtagaggtgaccctgacgatgaaagtggccagtggtagcacaggcgaccagaaggttcagatttcatactacggacccaagactccaccagtcaaagctctactctacctcaccggggtggatggagtctcaccctgtcacccaggctggagtgcaatggcatgatctcggctcactgcaacctgcgtctcccaggttcaagcgatcctcctgcttcagcgtccctagtagctgggactacaggcgcttgccaccacgcctggctaatttttgtatttttagtagagatggagtttcaccatgttggccaggctggtctcgaacttctgacctcaggtgatctgcctgcctcaggctcccaaagtgctcggattactggcatgaaccactgcgccaggccctctattcctttttgatacctcaaatatctataacaaaaagtagataatgacactgtcttatacaagaatatagatagtgttcctcaaattccattatttatatctcatcttcaccatttctgccatatcaatgatccacctatactcatatttatgtaatgttcttctttaaataaaatccattcttaaactt

SEQ ID NO: 5571 - protein, 127 aa, Homo sapiens
MAQGTLIRVTPEQPTHAVCVLGTLTQLDICSSAPEDCTSFSINASPGVVVDIAHGPPAKKKSTGSSTWPLDPGVEVTLTMKVASGSTGDQKVQISYYGPKTPPVKALLYLTGVDGVSPCHPGWSAMA

SEQ ID NO: 5572 - DNA, 1097 bp, Homo sapiens
ggggtacccactagttcctgcctcataacttgttagatggattccatgagctaatgcctgctaagagcagatggaccggacgtgccaggagcctctgttcaggccacaggtgacccctgagccacctgtgtgtccctcccaatccttccaggctgagcttcaaattccagagcactaaggagctgcttttctgctctctctagtatttttgaaaatgaggacttcctgaagtcagtgactactctggccatgaaagccaagtgcaagctgaccatctgccctgaggaggagaacatggatgaccagtggatgcaggatgaaatggagatcggctacatccaagccccacacaaaacgctgcccgtggtcttcgactctccaaggaacagaggcctgaaggagtttcccatcaaacgcgtgatggtacctgcatggggtggggagggggcacagctgccgaaaccctcttgtcttgagactccctccttttagcctgccttccccgcccgcgcctgtagctgagtagcccagtgcaaggaggtggaattcctaccaaagtgggagcatgtaggtggggcttgttatttttttattaccaagataagatctggctcttcatttcccaaaacccttgtcacccgtgagctcagcttgatctccaggtaaccctgccgaggaggtggctcaggcttggacctccctgtgctcttgaagaagctcttgctgcaaggtggaggtggggccggggctggaatctttcccaatgcccagctggaggctctgtcttatgggtggtgtttggtcttcaggggctccatctgggatatgggggattttgggatcagtggatcagtggtcatttcctgggtgtgactttatcagccacaggctgtccatgtggaggtgggaagtgacgtattgctgactcatgcttgactagcctggcaggttgatgcaaactcagcacagaacaataataataatagttgcatttattgagaatgagttgtgtgttagccagtgctgcattctttacctgcactgactcatttaatttgataaactgttatggagattctatcaataggcccatttta

SEQ ID NO: 5573 - protein, 80 aa, Homo sapiens
MKAKCKLTICPEEENMDDQWMQDEMEIGYIQAPHKTLPVVFDSPRNRGLKEFPIKRVMVPAWGGEGAQLPKPSCLETPSF

SEQ ID NO: 5574 - DNA, 1995 bp, Homo sapiens
atggtcagcgtggagggccgagccatgtccttccagagtatcatccacctgtccctggacagccctgtccatgccgtttgtgtgttgggcacagaaatctgcttggatctcagcgggtgtgccccccagaagtgccagtgcttcaccatccatggctctgggagggtcttgatcgatgtggccaacacggtgatttctgagaaggaggacgccaccatctggtggcccctgtctgatcccacgtacgccacagtgaagatgacatcgcccagcccttccgtggatgcggataaggtctcggtcacatactatgggcccaacgaggatgcccccgtgggcacagctgtgctgtacctcactggcattgaggtctctctagaggtagacatctaccgcaatgggcaagttgagatgtcaagtgacaaacaggctaagcccaattgctgtgacattgctgaaggattagatacgtggaggggagggaaaaaatggatctggggtcccagcggttggggtgccatcctgcttgtgaattgcaaccctgctgatgtgggccagcaacttgaggacaagaaaaccaagaaagtgatcttttcagaggaaataacgaatctgtcccagatgactctgaatgtccaaggccccagctgtatcttaaagaaatatcggctagtcctccatacctccaaggaagagtcgaagaaggcgagagtctactggccccaaaaagacaactccagtacctttgagttggtgctggggcccgaccagcacgcctataccttggccctcctcgggaaccacttgaaggagactttctacgttgaagctatagcattcccatctgccgaattctcaggcctcatctcctactctgtgtccctggtggaggagtctcaagacccgtcaattccagagactgtgctgtacaaagacacggtggtgttccgggtggctccctgtgtcttcattccctgtacccaggatgagatggccttctgctacacccaggctccccacaagacaacgtccttgatcctcgacacacctcaggccgccgatctcgatgagttccccatgaagtactcactgagccctggtattggctacatgatccaggacactgaggaccataaagtggccagcatggattccattgggaacctgatggtgtccccacctgtcaaggtccaagggaaagagtacccgctgggcagagtcctcattggcagcagcttttaccccagcgcagagggccgggccatgagtaagaccctccgagacttcctctatgcccagcaggtccaagcgccggtggagctctactcagattggctaatgactggccacgtggatgagttcatgtgcttcatccccacagatgacaagaatgagggcaaaaagggcttcctgctgctcctggccagccccagtgcctgctataaactgttccgagagaaacagaaggaaggctatggcgacgctcttctgtttgatgagcttagagcagatcagctcctgtctaatggaagggaagccaaaaccatcgaccaacttctggctgatgaaagcctgaagaagcagaatgaatacgtggagaagtgcattcacctgaaccgtgacatcctgaagacggagctgggcctggtggaacaggacatcatcgagattccccagctgttctgcttggagaagctgactaacatcccctctgaccagcagcccaagaggtcctttgcgaggccatacttccctgacctgttgcggatgattgtgatgggcaagaacctggggatccccaagccttttgggccccaaatcaaggggacctgctgcctggaagaaaagatttgctgcttgctggagcccctgggcttcaagtgcaccttcatcaatgactttgactgttacctgacagaggtcggagacatctgtgcctgtgccaacatccgccgggtgccctttgccttcaaatggtggaagatggtaccttag

SEQ ID NO: 5575 - protein, 664 aa, Homo sapiens
MVSVEGRAMSFQSIIHLSLDSPVHAVCVLGTEICLDLSGCAPQKCQCFTIHGSGRVLIDVANTVISEKEDATIWWPLSDPTYATVKMTSPSPSVDADKVSVTYYGPNEDAPVGTAVLYLTGIEVSLEVDIYRNGQVEMSSDKQAKPNCCDIAEGLDTWRGGKKWIWGPSGWGAILLVNCNPADVGQQLEDKKTKKVIFSEEITNLSQMTLNVQGPSCILKKYRLVLHTSKEESKKARVYWPQKDNSSTFELVLGPDQHAYTLALLGNHLKETFYVEAIAFPSAEFSGLISYSVSLVEESQDPSIPETVLYKDTVVFRVAPCVFIPCTQDEMAFCYTQAPHKTTSLILDTPQAADLDEFPMKYSLSPGIGYMIQDTEDHKVASMDSIGNLMVSPPVKVQGKEYPLGRVLIGSSFYPSAEGRAMSKTLRDFLYAQQVQAPVELYSDWLMTGHVDEFMCFIPTDDKNEGKKGFLLLLASPSACYKLFREKQKEGYGDALLFDELRADQLLSNGREAKTIDQLLADESLKKQNEYVEKCIHLNRDILKTELGLVEQDIIEIPQLFCLEKLTNIPSDQQPKRSFARPYFPDLLRMIVMGKNLGIPKPFGPQIKGTCCLEEKICCLLEPLGFKCTFINDFDCYLTEVGDICACANIRRVPFAFKWWKMVP

SEQ ID NO: 5576 - DNA, 2111 bp, Homo sapiens
atggtcagcgtggagggccgagccatgtccttccagagtatcatccacctgtccctggacagccctgtccatgccgtttgtgtgttgggcacagaaatctgcttggatctcagcgggtgtgccccccagaagtgccagtgcttcaccatccatggctctgggagggtcttgatcgatgtggccaacacggtgatttctgagaaggaggacgccaccatctggtggcccctgtctgatcccacgtacgccacagtgaagatgacatcgcccagcccttccgtggatgcggataaggtctcggtcacatactatgggcccaacgaggatgcccccgtgggcacagctgtgctgtacctcactggcattgaggtctctctagaggtagacatctaccgcaatgggcaagttgagatgtcaagtgacaaacaggctaagaaaaaatggatctggggtcccagcggttggggtgccatcctgcttgtgaattgcaaccctgctgatgtgggccagcaacttgaggacaagaaaaccaagaaagtgatcttttcagaggaaataacgaatctgtcccagatgactctgaatgtccaaggccccagctgtatcttaaagaaatatcggctagtcctccatacctccaaggaagagtcgaagaaggcgagagtctactggccccaaaaagacaactccagtacctttgagttggtgctggggcccgaccagcacgcctataccttggccctcctcgggaaccacttgaaggagactttctacgttgaagctatagcattcccatctgccgaattctcaggcctcatctcctactctgtgtccctggtggaggagtctcaagacccgtcaattccagagactgtgctgtacaaagacacggtggtgttccgggtggctccctgtgtcttcattccctgtacccaggtgcctctggaggtttacctgtgcagggagctgcagctgcagggttttgtggacacagtgacgaagctgagtgagaagagcaacagccagggtggcatctgtctatgaggaccccaaccgcctgggcaggtggctccaggatgagatggccttctgctacacccaggctccccacaagacaacgtccttgatcctcgacacacctcaggccgccgatctcgatgagttccccatgaagtactcactgagccctggtattggctacatgatccaggacactgaggaccataaagtggccagcatggattccattgggaacctgatggtgtccccacctgtcaaggtccaagggaaagagtacccgctgggcagagtcctcattggcagcagcttttaccccagcgcagagggccgggccatgagtaagaccctccgagacttcctctatgcccagcaggtccaagcgccggtggagctctactcagattggctaatgactggccacgtggatgagttcatgtgcttcatccccacagatgacaagaatgagggcaaaaagggcttcctgctgctcctggccagccccagtgcctgctataaactgttccgagagaaacagaaggaaggctatggcgacgctcttctgtttgatgagcttagagcagatcagctcctgtctaatggaagggaagccaaaaccatcgaccaacttctggctgatgaaagcctgaagaagcagaatgaatacgtggagaagtgcattcacctgaaccgtgacatcctgaagacggagctgggcctggtggaacaggacatcatcgagattccccagctgttctgcttggagaagctgactaacatcccctctgaccagcagcccaagaggtcctttgcgaggccatacttccctgacctgttgcggatgattgtgatgggcaagaacctggggatccccaagccttttgggccccaaatcaaggggacctgctgcctggaagaaaagatttgctgcttgctggagcccctgggcttcaagtgcaccttcatcaatgactttgactgttacctgacagaggtcggagacatctgtgcctgtgccaacatccgccgggtgccctttgccttcaaatggtggaagatggtaccttagacccaggccctggagctgccagctc

SEQ ID NO: 5577 - protein, 347 aa, Homo sapiens
MVSVEGRAMSFQSIIHLSLDSPVHAVCVLGTEICLDLSGCAPQKCQCFTIHGSGRVLIDVANTVISEKEDATIWWPLSDPTYATVKMTSPSPSVDADKVSVTYYGPNEDAPVGTAVLYLTGIEVSLEVDIYRNGQVEMSSDKQAKKKWIWGPSGWGAILLVNCNPADVGQQLEDKKTKKVIFSEEITNLSQMTLNVQGPSCILKKYRLVLHTSKEESKKARVYWPQKDNSSTFELVLGPDQHAYTLALLGNHLKETFYVEAIAFPSAEFSGLISYSVSLVEESQDPSIPETVLYKDTVVFRVAPCVFIPCTQVPLEVYLCRELQLQGFVDTVTKLSEKSNSQGGICL

SEQ ID NO: 5578 - DNA, 1866 bp, Homo sapiens
gtcatttccatgtgcactgggacgggaagtcaaacgaggaatttaaaaaagcaaaagttgaccgaagatgggcctaggccggtgtcggttctgtttctccccttggctgcctgtacgcccacagccttctggctgcgacattatagaatcggccgtgtcccccctggtgggggattggggatctgtgtttagccatttatatctactttagctgttaaagaggtccaaatgaaaatcaggtgattgtggaaccatggggacttgggggtggggcagaggtgggaacatttgtatcagttgagtcagcttggtggctccctgtggagccagggctgagccttgtcacgcgcactcgccaattaagagatggaccagccagcagtcaagtgcattctccagtccttgcaagaaggatcagccctttctgtgccagcctcgatcgccttgtgctttggtctctttttctcccccccgcctggatcctgcctcgcgcgggccgtcctgttgctgagactcggggtaccgttctgctgacccagctccctttagtcacgtttgcttggctctggtaccaaatagttgggattaccgaagagtccccttccttgcgtgtcagcacggatgctgtgactgccacctgcgtcctcgtcaagtgcccgagctcgccgccgtgtgtgctgcgctgagtgagttatgaggtgcctttcccggaaccctcctctcgcctggacccaagagaggcgacagctgtggctggggctcttggtttccagagggtctggactggtttgggtgctttaaaatagatatttagttcagtggtgcttatgggggagatgggactagaacttaagtgtgagacttgggtggatgggaaagttaaatattggtctcttcaagttttttttttcttttgctttgttaccacttgtcactgtctccatgttaaaatgccaaaaatgatgtagttgttgttgcttttttccctattttccaccccagtcgctccttaccgtgactcctgcccttggagggcatgtagcagtgtctgtcctgccagtcccaaggccctgtgggaggagactggcctgcatctctctaagacttagtctgacgccacgcgcatctcttgttctgtgttcaatcagtagtccaggggagaagcttctgctacttcagagctttgctaaactaacctaatttgtccaaatcaccccaaaaccaccatctctgacgtaagcttccatgcgacagcctgatccgtttccctggacaggtctctttcctggaatgcagcccaggcacctgtgctcctggcacccttgaggtctctcctttgagccgtggtcaccgagagggttgaggacgcagcacccgaggtcccagcctttgcaggagcctccctgggcttagctggacttagatcttcggtggcctcatgtaaacgtggcagccagcctcttctagaaccctagcccagggactggagcaggaaagggaccttcaaagtgaagactgccttgtcccgcagctccttctggcttagattgaaaaatgggcttcctaatgggttaaatcctttaaaacaaggagttgtgggggaagggtgtcgtgcactcctagagaaaggtacacagttgcccggttgggaatgtgcttggcgctgaccctgcgggcatctgactggtcttccagctcaggaaaaagaatttgaaagaggcttagcgtgaaggggaatcaaagaggaggttgtgatttggtcgaaggtgcctggtttagtgctgtaattgtcttattattttttttatatatatatttcttggagtaaacattttaaataaacaacaacattgtctactgtcttgg

SEQ ID NO: 5579 - protein, 60 aa, Homo sapiens
MCTGTGSQTRNLKKQKLTEDGPRPVSVLFLPLAACTPTAFWLRHYRIGRVPPGGGLGICV

SEQ ID NO: 5580 - DNA, 4091 bp, Homo sapiens
cgcacatgtgtttctgttttgtgttgtagcatttgttctggaagctcgtatttacattttaagtgtatctggtgagtgggctggagccctcgtctgggccggaaaaaaaaaagccctccgatccgtcttttagttgcttctcttccttttttctctccggtttctcatcactccaaccagccgcgaccatgcccaggaagaaggcggcggcggcggcctgggaggagccgagctcgggcaacggcactgcccgcgccgggcccaggaaacgcggcggcccggcgggcaggaagcgcgagcggcccgagcgctgcagtagcagcagcggcggcggcagcagcggcgacgaggacggcctggagctcgacggggcccccggcgggggcaagcgcgcggcgcggccggcgacagcaggcaaggcgggcggcgcggccgtggtcatcaccgaacccgagcacaccaaggagcgcgtcaaacttgaagggtcaaagtgcaaagggcagcttttgatttttggggcaaccaactgggacttgattggtcgaaaagaagtgcctaaacagcaagctgcttaccgcaatctcggtcagaatttgtgggggccccacagatatgggtgcctggcgggggtccgggtgcggacagtggtctcgggctcgtgtgctgcacacagcctcctcatcaccacggaagggaagctgtggagctggggtcgaaatgagaaggggcagctgggacatggtgacaccaagagagtagaagcccctagactcatcgagggtcttagccacgaagtgattgtgtctgcagcatgtgggcggaaccacaccttggccttgacggaaacgggctccgtgtttgcgtttggggaaaacaagatggggcagctgggccttggcaaccagacagacgctgttcccagccccgcgcagataatgtacaacggccagccaattaccaaaatggcctgtggggctgaattcagtatgataatggactgcaaaggaaacctctattcctttgggtgccctgaatatggtcagctgggacacaactcagatgggaagttcatcgcccgggcacagcggatagagtacgactgtgaactagttccccggcgagtggccatcttcattgagaagacgaaagatggacagattctgcctgtaccaaacgtggttgtacgagacgtggcctgtggcgctaaccacacgctggtcctggactcccagaagcgagtcttctcctggggctttggtggctatggccggctgggccacgcagagcagaaggatgagatggtcccccgcctggtgaagctgtttgacttccctgggcgtggggcttcccagatctatgctggttacacctgctcctttgctgtcagtgaagtgggtggtctgtttttctggggggccaccaacacctcccgtgaatctaccatgtacccaaaagcagtgcaggacctctgcggctggagaatccggagcctggcttgtgggaagagcagcatcattgtggccgccgatgagagcaccatcagctggggtccgtcaccgacctttggggaactgggctacggggaccacaagcccaagtcttccactgcagcccaggaggtaaagactctggatggcattttctcagagcaggtcgccatgggctactcacactccttggtgatagcaagagatgaaagtgagactgagaaagagaagatcaagaaactgccagaatacaacccccgaaccctctgatgctcccggagactcctccgactccacacctctcgcggcagctgtcatttccatgtgcactgggacgggaagtcaaacgaggaatttaaaaaagcaaaagttgaccgaaggtgcatttttgtttagactccctgaggttccgttttacacatgatccaacgttaactacctttttttctgtatgctttccaaagtccttttttttcccttaatgttgaattaaaatacttgctcatagttgatttaccattcctacaaaagaggcagaaactttgagcaatctaggttttttttttttttaagttttttctttcttcctctcctgaatacactccccaaaacacccctttccagttacaattagcatcgtgatccaagcagatgccacatggaagaggaatcgccatttactcagaaaaaatgtcccttacaggaaccggcagcagctaggcagtcaccggcccgcctccatccaaaatcacgctcgcgtgcttcggaagcatccgggtcactccttctccgctttttcttgcagatgggcctaggccggtgtcggttctgtttctccccttggctgcctgtacgcccacagccttctggctgcgacattatagaatcggccgtgtcccccctggtgggggattggggatctgtgtttagccatttatatctactttagctgttaaagaggtccaaatgaaaatcaggtgattgtggaaccatggggacttgggggtggggcagaggtgggaacatttgtatcagttgagtcagcttggtggctccctgtggagccagggctgagccttgtcacgcgcactcgccaattaagagatggaccagccagcagtcaagtgcattctccagtccttgcaagaaggatcagccctttctgtgccagcctcgatcgccttgtgctttggtctctttttctcccccccgcctggatcctgcctcgcgcgggccgtcctgttgctgagactcggggtaccgttctgctgacccagctccctttagtcacgtttgcttggctctggtaccaaatagttgggattaccgaagagtccccttccttgcgtgtcagcacggatgctgtgactgccacctgcgtcctcgtcaagtgcccgagctcgccgccgtgtgtgctgcgctgagtgagttatgaggtgcctttcccggaaccctcctctcgcctggacccaagagaggcgacagctgtggctggggctcttggtttccagagggtctggactggtttgggtgctttaaaatagatatttagttcagtggtgcttatgggggagatgggactagaacttaagtgtgagacttgggtggatgggaaagttaaatattggtctcttcaagttttttttttcttttgctttgttaccacttgtcactgtctccatgttaaaatgccaaaaatgatgtagttgttgttgcttttttccctattttccaccccagtcgctccttaccgtgactcctgcccttggagggcatgtagcagtgtctgtcctgccagtcccaaggccctgtgggaggagactggcctgcatctctctaagacttagtctgacgccacgcgcatctcttgttctgtgttcaatcagtagtccaggggagaagcttctgctacttcagagctttgctaaactaacctaatttgtccaaatcaccccaaaaccaccatctctgacgtaagcttccatgcgacagcctgatccgtttccctggacaggtctctttcctggaatgcagcccaggcacctgtgctcctggcacccttgaggtctctcctttgagccgtggtcaccgagagggttgaggacgcagcacccgaggtcccagcctttgcaggagcctccctgggcttagctggacttagatcttcggtggcctcatgtaaacgtggcagccagcctcttctagaaccctagcccagggactggagcaggaaagggaccttcaaagtgaagactgccttgtcccgcagctccttctggcttagattgaaaaatgggcttcctaatgggttaaatcctttaaaacaaggagttgtgggggaagggtgtcgtgcactcctagagaaaggtacacagttgcccggttgggaatgtgcttggcgctgaccctgcgggcatctgactggtcttccagctcaggaaaaagaatttgaaagaggcttagcgtgaaggggaatcaaagaggaggttgtgatttggtcgaaggtgcctggtttagtgctgtaattgtcttattattttttttatatatatatttcttggagtaaacattttaaataaacaacaacattgtctactgtcttgg

SEQ ID NO: 5581 - protein, 522 aa, Homo sapiens; identical to SEQ ID NO: 76

SEQ ID NO: 5582 - DNA, 1200 bp, Homo sapiens
ccgaagagtccccttccttgcgtgtcagcacggatgctgtgactgccacctgcgtcctcgtcaagtgcccgagctcgccgccgtgtgtgctgcgctgagtgagttatgaggtgcctttcccggaaccctcctctcgcctggacccaagagaggcgacagctgtggctggggctcttggtttccagagggtctggactggtttgggtgctttaaaatagatatttagttcagtggtgcttatgggggagatgggactagaacttaagtgtgagacttgggtggatgggaaagttaaatattggtctcttcaagttttttttttcttttgctttgttaccacttgtcactgtctccatgttaaaatgccaaaaatgatgtagttgttgttgcttttttccctattttccaccccagtcgctccttaccgtgactcctgcccttggagggcatgtagcagtgtctgtcctgccagtcccaaggccctgtgggaggagactggcctgcatctctctaagacttagtctgacgccacgcgcatctcttgttctgtgttcaatcagtagtccaggggagaagcttctgctacttcagagctttgctaaactaacctaatttgtccaaatcaccccaaaaccaccatctctgacgtaagcttccatgcgacagcctgatccgtttccctggacaggtctctttcctggaatgcagcccaggcacctgtgctcctggcacccttgaggtctctcctttgagccgtggtcaccgagagggttgaggacgcagcacccgaggtcccagcctttgcaggagcctccctgggcttagctggacttagatcttcggtggcctcatgtaaacgtggcagccagctccttctggcttagattgaaaaatgggcttcctaatgggttaaatcctttaaaacaaggagttgtgggggaagggtgtcgtgcactcctagagaaaggtacacagttgcccggttgggaatgtgcttggcgctgaccctgcgggcatctgactggtcttccagctcaggaaaaagaatttgaaagaggcttagcgtgaaggggaatcaaagaggaggttgtgatttggtcgaaggtgcctggtttagtgctgtaattgtcttattattttttttatatatatatttcttggagtaaacattttaaataaacaacaacattgtctactgtc

SEQ ID NO: 5583 - protein, 46 aa, Homo sapiens
MGEMGLELKCETWVDGKVKYWSLQVFFFFCFVTTCHCLHVKMPKMM

SEQ ID NO: 5584 - DNA, 1105 bp, Homo sapiens
tgtgctttggtctctttttctcccccccgcctggatcctgcctcgcgcgggccgtcctgttgctgagactcggggtaccgttctgctgacccagctccctttagtcacgtttgcttggctctggtaccaaatagttgggattaccgaagagtccccttccttgcgtgtcagcacggatgctgtgactgccacctgcgtcctcgtcaagtgcccgagctcgccgccgtgtgtgctgcgctgagtgagttatgaggtgcctttcccggaaccctcctctcgcctggacccaagagaggcgacagctgtggctggggctcttggtttccagagggtctggactggtttgggtgctttaaaatagatatttagttcagtggtgcttatgggggagatgggactagaacttaagtgtgagacttgggtggatgggaaagttaaatattggtctcttcaagttttttttttcttttgctttgttaccacttgtcactgtctccatgttaaaatgccaaaaatgatgtagttgttgttgcttttttccctattttccaccccagtcgctccttaccgtgactcctgcccttggagggcatgtagcagtgtctgtcctgccagtcccaaggccctgtgggaggagactggcctgcatctctctaagacttagtctgacgccacgcgcatctcttgttctgtgttcaatcagtagtccaggggagaagcttctgctacttcagagctttgctaaactaacctaatttgtccaaatcaccccaaaaccaccatctctgacgtaagcttccatgcgacagcctgatccgtttccctggacaggtctctttcctggaatgcagcccaggcactcctagagaaaggtacacagttgcccggttgggaatgtgcttggcgctgaccctgcgggcatctgactggtcttccagctcaggaaaaagaatttgaaagaggcttagcgtgaaggggaatcaaagaggaggttgtgatttggtcgaaggtgcctggtttagtgctgtaattgtcttattattttttttatatatatatttcttggagtaaacattttaaataaacaacaacattgtctactgtc

SEQ ID NO: 5585 - protein, 46 aa, Homo sapiens; identical to SEQ ID NO: 5583

SEQ ID NO: 5586 - DNA, 1624 bp, Homo sapiens
acattatagaatcggccgtgtcccccctggtgggggattggggatctgtgtttagccatttatatctactttagctgttaaagaggtccaaatgaaaatcaggtgattgtggaaccatggggacttgggggtggggcagaggtgggaacatttgtatcagttgagtcagcttggtggctccctgtggagccagggctgagccttgtcacgcgcactcgccaattaagagatggaccagccagcagtcaagtgcattctccagtccttgcaagaaggatcagccctttctgtgccagcctcgatcgccttgtgctttggtctctttttctcccccccgcctggatcctgcctcgcgcgggccgtcctgttgctgagactcggggtaccgttctgctgacccagctccctttagtcacgtttgcttggctctggtaccaaatagttgggattaccgaagagtccccttccttgcgtgtcagcacggatgctgtgactgccacctgcgtcctcgtcaagtgcccgagctcgccgccgtgtgtgctgcgctgagtgagttatgaggtgcctttcccggaaccctcctctcgcctggacccaagagaggcgacagctgtggctggggctcttggtttccagagggtctggactggtttgggtgctttaaaatagatatttagttcagtggtgcttatgggggagatgggactagaacttaagtgtgagacttgggtggatgggaaagttaaatattggtctcttcaagttttttttttcttttgctttgttaccacttgtcactgtctccatgttaaaatgccaaaaatgatgtagttgttgttgcttttttccctattttccaccccagtcgctccttaccgtgactcctgcccttggagggcatgtagcagtgtctgtcctgccagtcccaaggccctgtgggaggagactggcctgcatctctctaagacttagtctgacgccacgcgcatctcttgttctgtgttcaatcagtagtccaggggagaagcttctgctacttcagagctttgctaaactaacctaatttgtccaaatcaccccaaaaccaccatctctgacgtaagcttccatgcgacagcctgatccgtttccctggacaggtctctttcctggaatgcagcccaggcacctgtgctcctggcacccttgaggtctctcctcatgtaaacgtggcagccagcctcttctagaaccctagcccagggactggagcaggaaagggaccttcaaagtgaagactgccttgtcccgcagctccttctggcttagattgaaaaatgggcttcctaatgggttaaatcctttaaaacaaggagttgtgggggaagggtgtcgtgcactcctagagaaaggtacacagttgcccggttgggaatgtgcttggcgctgaccctgcgggcatctgactggtcttccagctcaggaaaaagaatttgaaagaggcttagcgtgaaggggaatcaaagaggaggttgtgatttggtcgaaggtgcctggtttagtgctgtaattgtcttattattttttttatatatatatttcttggagtaaacattttaaataaacaacaacattgtctactgtc

SEQ ID NO: 5587 - protein, 55 aa, Homo sapiens
MDQPAVKCILQSLQEGSALSVPASIALCFGLFFSPPPGSCLARAVLLLRLGVPFC

SEQ ID NO: 5588 - DNA, 1240 bp, Homo sapiens
acattatagaatcggccgtgtcccccctggtgggggattggggatctgtgtttagccatttatatctactttagctgttaaagaggtccaaatgaaaatcaggtgattgtggaaccatggggacttgggggtggggcagaggtgggaacatttgtatcagttgagtcagcttggtggctccctgtggagccagggctgagccttgtcacgcgcactcgccaattaagagatggaccagccagcagtcaagtgcattctccagtccttgcaagaaggatcagccctttctgtgccagcctcgatcgccttgtgctttggtctctttttctcccccccgcctggatcctgcctcgcgcgggccgtcctgttgctgagactcggggtaccgttctgctgacccagctccctttagtcacgtttgcttggctctggtaccaaatagttgggattaccgaagagtccccttccttgcgtgtcagcacggatgctgtgactgccacctgcgtcctcgtcaagtgcccgagctcgccgccgtgtgtgctgcgctgagtgagttatgaggtgcctttcccggaaccctcctctcgcctggacccaagagaggcgacagctgtggctggggctcttggtttccagagggtctggactggtttgggtgctttaaaatagatatttagttcagtggtgcttatgggggagatgggactagaacttaagtgtgagacttgggtggatgggaaagttaaatattggtctcttcaagttttttttttcttttgctttgttaccacttgtcactgtctccatgttaaaatgccaaaaatgatgtagttgttgttgcttttttccctattttccaccccagtcgctccttaccgtgactcctgcccttggagggcatgtagcagtgtctgtcctgccagtcccaaggccctgtgggaggagactggcctgcatctctctaagacttagtctgacgccacgcgcatctcttgttctgtgttcaatcagtagtccaggggagaagcttctgctacttcagagctttgctaaactaacctaatttgtccaaatcaccccaaaaccaccatctctgacgtaagcttccatgcgacagcctgatccgtttccctggacaggtctctttcctggtttagtgctgtaattgtcttattattttttttatatatatatttcttggagtaaacattttaaataaacaacaacattgtctactgtc

SEQ ID NO: 5589 - protein, 55 aa, Homo sapiens; identical to SEQ ID NO: 5587

SEQ ID NO: 5590 - DNA, 1804 bp, Homo sapiens
gatgccacatggaagaggaatcgccatttactcagaaaaaatgtcccttacaggaaccggcagcagctaggcagtcaccggcccgcctccatccaaaatcacgctcgcgtgcttcggaagcatccgggtcactccttctccgctttttcttgcagatgggcctaggccggtgtcggttctgtttctccccttggctgcctgtacgcccacagccttctggctgcgacattatagaatcggccgtgtcccccctggtgggggattggggatctgtgtttagccatttatatctactttagctgttaaagaggtccaaatgaaaatcaggtgattgtggaaccatggggacttgggggtggggcagaggtgggaacatttgtatcagttgagtcagcttggtggctccctgtggagccagggctgagccttgtcacgcgcactcgccaattaagagatggaccagccagcagtcaagtgcattctccagtccttgcaagaaggatcagccctttctgtgccagcctcgatcgccttgtgctttggtctctttttctcccccccgcctggatcctgcctcgcgcgggccgtcctgttgctgagactcggggtaccgttctgctgacccagctccctttagtcacgtttgcttggctctggtaccaaatagttgggattaccgaagagtccccttccttgcgtgtcagcacggatgctgtgactgccacctgcgtcctcgtcaagtgcccgagctcgccgccgtgtgtgctgcgctgagtgagttatgaggtgcctttcccggaaccctcctctcgcctggacccaagagaggcgacagctgtggctggggctcttggtttccagagggtctggactggtttgggtgctttaaaatagatatttagttcagtggtgcttatgggggagatgggactagaacttaagtgtgagacttgggtggatgggaaagttaaatattggtctcttcaagttttttttttcttttgctttgttaccacttgtcactgtctccatgttaaaatgccaaaaatgatgtagttgttgttgcttttttccctattttccaccccagtcgctccttaccgtgactcctgcccttggagggcatgtagcagtgtctgtcctgccagtcccaaggccctgtgggaggagactggcctgcatctctctaagacttagtctgacgccacgcgcatctcttgttctgtgttcaatcagtagtccaggggagaagcttctgctacttcagagctttgctaaactaacctaatttgtccaaatcaccccaaaaccaccatctctgacgtaagcttccatgcgacagcctgatccgtttccctggattagatcttcggtggcctcatgtaaacgtggcagccagcctcttctagaaccctagcccagggactggagcaggaaagggaccttcaaagtgaagactgccttgtcccgcagctccttctggcttagattgaaaaatgggcttcctaatgggttaaatcctttaaaacaaggagttgtgggggaagggtgtcgtgcactcctagagaaaggtacacagttgcccggttgggaatgtgcttggcgctgaccctgcgggcatctgactggtcttccagctcaggaaaaagaatttgaaagaggcttagcgtgaaggggaatcaaagaggaggttgtgatttggtcgaaggtgcctggtttagtgctgtaattgtcttattattttttttatatatatatttcttggagtaaacattttaaataaacaacaacattgtctactgtc

SEQ ID NO: 5591 - protein, 96 aa, Homo sapiens
MEEESPFTQKKCPLQEPAAARQSPARLHPKSRSRASEASGSLLLRFFLQMGLGRCRFCFSPWLPVRPQPSGCDIIESAVSPLVGDWGSVFSHLYLL

SEQ ID NO: 5592 - DNA, 1419 bp, Homo sapiens
gatgccacatggaagaggaatcgccatttactcagaaaaaatgtcccttacaggaaccggcagcagctaggcagtcaccggcccgcctccatccaaaatcacgctcgcgtgcttcggaagcatccgggtcactccttctccgctttttcttgcagatgggcctaggccggtgtcggttctgtttctccccttggctgcctgtacgcccacagccttctggctgcgacattatagaatcggccgtgtcccccctggtgggggattggggatctgtgtttagccatttatatctactttagctgttaaagaggtccaaatgaaaatcaggtgattgtggaaccatggggacttgggggtggggcagaggtgggaacatttgtatcagttgagtcagcttggtggctccctgtggagccagggctgagccttgtcacgcgcactcgccaattaagagatggaccagccagcagtcaagtgcattctccagtccttgcaagaaggatcagccctttctgtgccagcctcgatcgccttgtgctttggtctctttttctcccccccgcctggatcctgcctcgcgcgggccgtcctgttgctgagactcggggtaccgttctgctgacccagctccctttagtcacgtttgcttggctctggtaccaaatagttgggattaccgaagagtccccttccttgcgtgtcagcacggatgctgtgactgccacctgcgtcctcgtcaagtgcccgagctcgccgccgtgtgtgctgcgctgagtgagttatgaggtgcctttcccggaaccctcctctcgcctggacccaagagaggcgacagctgtggctggggctcttggtttccagagggtctggactggtttgggtgctttaaaatagatatttagttcagtggtgcttatgggggagatgggactagaacttaagtgtgagacttgggtggatgggaaagttaaatattggtctcttcaagttttttttttcttttgctttgttaccacttgtcactgtctccatgttaaaatgccaaaaatgatgtagttgttgttgcttttttccctattttccaccccagtcgctccttaccgtgactcctgcccttggagggcatgtagcagtgtctgtcctgccagtcccaaggccctgtgggaggagactggcctgcatctctctaagacttagtctgacgccacgcgcatctcttgttctgtgttcaatcagtagtccaggggagaagcttctgctacttcagagctttgctaaactaacctaatttgtccaaatcaccccaaaaccaccatctctgacgtgcctggtttagtgctgtaattgtcttattattttttttatatatatatttcttggagtaaacattttaaataaacaacaacattgtctactgtc

SEQ ID NO: 5593 - protein, 96 aa, Homo sapiens; identical to SEQ ID NO: 5591

SEQ ID NO: 5594 - DNA, 2029 bp, Homo sapiens
cccgtccattgtgcgccgctgccccgtgtctccctccagccgcgaccatgcccaggaagaaggcggcggcggcggcctgggaggagccgagctcgggcaacggcactgcccgcgccgggcccaggaaacgcggcggcccggcgggcaggaagcgcgagcggcccgagcgctgcagtagcagcagcggcggcggcagcagcggcgacgaggacggcctggagctcgacggggcccccggcgggggcaagcgcgcggcgcggccggcgacagcaggcaaggcgggcggcgcggccgtggtcatcaccgaacccgagcacaccaaggagcgcgtcaaacttgaagggtcaaagtgcaaagggcagcttttgatttttggggcaaccaactgggacttgattggtcgaaaagaagtgcctaaacagcaagctgcttaccgcaatctcggtcagaatttgtgggggccccacagatatgggtgcctggcgggggtccgggtgcggacagtggtctcgggctcgtgtgctgcacacagcctcctcatcaccacggaagggaagctgtggagctggggtcgaaatgagaaggggcagctgggacatggtgacaccaagagagtagaagcccctagactcatcgagggtcttagccacgaagtgattgtgtctgcagcatgtgggcggaaccacaccttggccttgacggaaacgggctccgtgtttgcgtttggggaaaacaagatggggcagctgggccttggcaaccagacagacgctgttcccagccccgcgcagataatgtacaacggccagccaattaccaaaatggcctgtggggctgaattcagtatgataatggactgcaaaggaaacctctattcctttgggtgccctgaatatggtcagctgggacacaactcagatgggaagttcatcgcccgggcacagcggatagagtacgactgtgaactagttccccggcgagtggccatcttcattgagaagacgaaagatggacagattctgcctgtaccaaacgtggttgtacgagacgtggcctgtggcgctaaccacacgctggtcctggactcccagaagcgagtcttctcctggggctttggtggctatggccggctgggccacgcagagcagaaggatgagatggtcccccgcctggtgaagctgtttgacttccctgggcgtggggcttcccagatctatgctggttacacctgctcctttgctgtcagtgaagtgggtggtctgtttttctggggggccaccaacacctcccgtgaatctaccatgtacccaaaagcagtgcaggacctctgcggctggagaatccggagcctggcttgtgggaagagcagcatcattgtggccgccgatgagagcaccatcagctggggtccgtcaccgacctttggggaactgggctacggggaccacaagcccaagtcttccactgcagcccaggaggtaaagactctggatggcattttctcagagcaggtcgccatgggctactcacactccttggtgatagcaagagatgaaagtgagactgagaaagagaagatcaagaaactgccagaatacaacccccgaaccctctgatgctcccggagactcctccgactccacacctctcgcggcagctgtcatttccatgtgcactgggacgggaagtcaaacgaggaatttaaaaaagcaaaagttgaccgaaggtgcatttttgtttagactccctgaggttccgttttacacatgatccaacgttaactacctttttttctgtatgctttccaaagtccttttttttcccttaatgttgaattaaaatacttgctcatagttgatttaccattcctacaaaagaggcagaaactttgagcaatctaggttttttttttttttaagttttttctttcttcctctcctgaatacactccccaaaacacccctttccagttacaattagcatcgtgatccaagcagatgccacatggaagaggaatcgccatttactc

SEQ ID NO: 5595 - protein, 522 aa, Homo sapiens; identical to SEQ ID NO: 76

SEQ ID NO: 5596 - DNA, 2778 bp, Homo sapiens
gtactcaccctctgggctcctgcctgctacttcaactgacagacgggacccttcccagtagaagggggctgcccctgtcacttgtgctcccttcccggaggactgcgattggactgcacaggattgaggtgtgtagctgggacggtgctggtctgagctggaccttgtctgatggcttcctccaaccctcctccacagcctgccataggtaccgtacccagggcttcctgtccctctcatcctttcttagaagggggccgctgggggccggcggagggccttgctctggagcagcatggcgccgggtgggaagtctgctctgctggctgctggccctgcctgggccgcatcctctatctcacgttccttgtctacaaaatagaagtaactttctgctcacggaggaggctctgagcaagggtcaatccttttcctgtctccctgagatccgccggagaggtgaacacacgggggtctcaggctgaagcttataaatcaggggtgaggaactgaggttggaggagagggttgcgccatagggtcaggccgttgaacagtggtagcattgccgcatttagtgaaaaaaagagaaagtaaaagaaaaatacagccaggcatggtgtctcatgcctgtaatcccagcactttgggaggccgaggcgggcagatcacttgaggtcacgagttcgggaccagcctggccaacatggtgaaatcccatctctacaaaaatacaaaaattagctgggtatggtgtggcacttgtaatctcagctacttgagaggctgaggcaggagaattgcttgaacctgggagatggaggttgcagtgagccaagatcacaccactgcactccagcctgggtgacagagcaagactgtctcaaaaaaaaaaaaaaaaaaaaaaagaaaagagaaaaagaaaaatacatacttatactaacaaaattattcgtcgtttatctgaaattcaagtctgtgtcctgtatgttatttggcaaccctggcactggggcctcagacactgcaggtggaatccaggccccgcctgggaggaaatgggcccagggctgtttcacccaggcagcagcttcctgtcctcttgtatcactatgagagaggcagaattgcagatggtaatgagtgagggctttgtcctcagccccatctgagtttgaatcctgaccctgccacttagactgtggggctggttaagtgacatgttgtctctgtggcttagtttcatcatcagtaaacatggggacaatgataccctctcctgggctgttgcaaggtttaaatatatgtcaggcgtgggcatggggtaatcaattgctcactgacgggagtgcttatcatcgtgggtgtcagcaggacagacagcgtgtgccatgccctgcacccctgggagagccaaatgatgcatctcctcctccctgagcctcggggttcttcttgggcggggggtggggagcagcacagcagacctgtcttccctgtggcaatgggtggcttcctagggtccctcgcctcctggactcgcttgtattttctcacaaggaccgggtctgtccaggaacatcagaggcatgagtgaccagctctggctgtgccacctttgcaggctattaggaagggcttccttcagctctcagctgtgctgggatgggcctcctgagttttccttctgataaggagcaatgcctgattgccggggggaggatagaaggcggccttggagacaagcacatctcacctcccaattcatgactgggatttgggtcccagcatgcctggccttgccccatcccgcccctgctgccatgggcacctgttccctttcctctccccaccaagaggcctgaacctgaacatggggagtgagaaaaaaaaatttatgactaagtcaattctgttctgttcagcaaacatttgacaaatatttgttgttccagctctttctaatattgctggctagtatcatctgggtgaacccagctctttgccattttctcattctctgagagcttcccattaccttcccaaattaaattcaaattcctgagtaggggattccccacgcaccttgtcaactgtctaatgaccttcattcctgcgcgtgtcttcagcacccccggggcacttggtgtttgttctctgtctttgctgtggcctctgcctggaatccacgctttagttggagcttgtcaggccttttctcatcctttaaggctcagtgcgagggcagcctcatcctcggagcccttcctgaagccccagagagccccagccccttcctcttggcaccgtctcagtctctgaggtttttggttttctcctgctggctctgtcctgtcagcctcacagtgagctccggaggggagctcacagtcacccaccccgaaccccaggactgtgtcttacctttccttccccctccctgcccactggatgctgggagctgctcactgcatgcatggataactgaagctatttgtactcttaaagggaggaggtgcaggccaggcacagtggctcatgcctataatcctagcactttgagaaaccttgcttgagctccagagtttgagaccagtctggacaacagagtggaaccctgtctctacaaaaaatgaaaaaaaaaaaaaatagctgggcatggtgatgctacctgggagtctgaagtaggaggatcacttgagcccaggaggttgaggctgcagtgagccatgatcgcaccactgccctccagcctgggtgacagagtgagcttcattt

SEQ ID NO: 5597 - protein, 80 aa, Homo sapiens
MASSNPPPQPAIGTVPRASCPSHPFLEGGRWGPAEGLALEQHGAGWEVCSAGCWPCLGRILYLTFLVYKIEVTFCSRRRL

SEQ ID NO: 5598 - DNA, 4493 bp, Homo sapiens
gcgccgtcccggccatgggcgcccgcggcggcctgcggagctggaggcgcggcgccggccgccaggcgcctttgtgagcggcgcggacgacaaaggcgcgggcccgggcagccgaggtgtgtagctgggacggtgctggtctgagctggaccttgtctgatggcttcctccaaccctcctccacagcctgccataggagatcagctggttccaggagtcccaggcccctcctctgaggcagaggacgacccaggagaggcgtttgagtttgatgacagtgatgatgaagaggacaccagcgcagccctgggcgtccccagccttgctcctgagagggacacagaccccccactgatccacttggactccatccctgtcactgacccagacccagcagctgctccacccggcacaggggtgccagcctgggtgagcaatggggatgcagcggacgcagccttctccggggcccggcactccagctggaagcggaagagttcccgtcgcattgaccggttcactttccccgccctggaagaggatgtgatttatgacgacgtcccctgcgagagcccagatgcgcatcagcccggggcagagaggaacctgctctacgaggatgcgcaccgggctggggcccctcggcaggcggaggacctaggctggagctccagtgagttcgagagctacagcgaggactcgggggaggaggccaagccggaggtcgaggtcgagcccgccaagcaccgagtgtccttccagcccaagctttctccagacctgactaggctaaaggagagatacgccaggactaagagagacatcttggctttgagagttggggggagagacatgcaggagctgaagcacaagtacgattgtaagatgacccagctcatgaaggccgccaagagcgggaccaaggatgggctggagaagacacggatggccgtgatgcgcaaagtctccttcctgcacaggaaggacgtcctcggtgactcggaggaggaggacatggggctcctggaggtcagcgtttcggacatcaagcccccagccccagagctgggccccatgccagagggcctgagccctcagcaggtggtccggaggcatatcctgggctccatcgtgcagagcgaaggcagctacgtggagtctctgaagcggatactccaggactaccgcaaccccctgatggagatggagcccaaggcgctgagcgcccgcaagtgccaggtggtgttcttccgcgtgaaggagatcctgcactgccactccatgttccagatcgccctgtcctcccgcgtggctgagtgggattccaccgagaagatcggggacctcttcgtggcctcgttttccaagtccatggtgctagatgtgtacagtgactacgtgaacaacttcaccagtgccatgtccatcatcaagaaggcctgcctcaccaagcctgccttcctcgagttcctcaagcgacggcaggtgtgcagcccagaccgtgtcaccctctacgggctgatggtcaagcccatccagaggttcccacagttcatactcctgcttcaggacatgctgaagaacacccccaggggccatccggacaggctgtcgctgcagctggccctcacagagctggagacgctggctgagaagctgaacgagcagaagcggctggctgaccaggtggctgagatccagcagctgaccaagagcgtcagtgaccgcagcagcctcaacaagctgttgacctcaggccagcggcagctgctcctgtgtgagacgttgacggagaccgtgtacggtgaccgcgggcagctaattaagtccaaggagcgtcgggtcttcctgctcaacgacatgcttgtctgtgccaacatcaacttcaagcctgccaaccacaggggccagctggagatcagcagcctggtgcccctggggcccaagtatgtggtgaagtggaacacggcgctgccccaggtgcaggtggtggaggtgggccaggacggtggcacctatgacaaggacaatgtgctcatccagcactcaggcgccaagaaggcctctgcctcagggcaggctcagaataaggtgtacctcggccccccacgcctcttccaggagctgcaggacctgcagaaggacctggccgtggtggagcagatcacgcttctcatcagcacgctgcacggcacctaccagaacctgaacatgactgtggctcaagactggtgcctggccctgcagaggctgatgcgggtgaaggaggaagagatccactcggccaacaagtgccgtctcaggctcctgcttcctgggaaacccgacaagtccggccgccccattagcttcatggtggttttcatcacccccaaccccctgagcaagatttcctgggtcaacaggttacatttggccaaaatcggactccgggaggagaaccagccaggctggctatgcccggatgaggacaagaagagcaaagccccattctggtgcccgatcctggcctgctgcatccctgccttctcctcccgggcactcagcctgcagcttggggccctggtccacagtcctgtcaactgtcccctgctgggtttctcagcagtcagcacctcccttccacagggctacctctgggtcgggggcggacaggaaggcgcagggggccaggtggaaatcttttccttgaaccggccctcgccccgcaccgtcaagtccttcccactggcagcccctgtgctctgcatggagtatatcccggagctggaggaggaggcggagagcagagacgagagcccgacagttgctgacccctcggccacggtgcatccaaccatctgcctcgggctccaggatggcagcatcctcctctacagcagtgtggacactggcacccagtgcctggtgagctgcaggagcccaggtctgcagcctgtgctctgcctgcgacacagccccttccacctgctcgctggcctgcaggatgggacccttgctgcttaccctcggaccagcggaggtgtcctgtgggacctggagagccctcccgtgtgcctgactgtggggcccgggcctgtccgcaccctgttgagcctggaggatgccgtgtgggccagctgtgggccctgggtcactgtcctggaagccaccaccctgcagcctcagcaaagcttcgaggcgcaccaggacgaggcagtgagcgtgacacacatggtgaaggcgggcagcggcgtctggatggccttctcctccggcacctccatccgcctcttccacactgagaccctggagcatctgcaagagatcaacatcgccaccaggaccaccttcctcctgccaggccagaagcacttgtgtgtcaccagcctcctgatctgccagggtctgctctgggtgggcactgaccagggtgtcatcgtcctgctgcccgtgcctcggctggaaggcatccccaagatcacagggaaaggcatggtctcactcaacgggcactgtgggcctgtggccttcctggctgtggctaccagcatcctggcccctgacatcctgcggagtgaccaggaggaggctgaggggccccgggctgaggaggacaagccagacgggcaggcacacgagcccatgcccgatagccacgtgggccgagagctgacccgcaagaagggcatcctcttgcagtaccgcctgcgctccaccgcacacctcccgggcccgctgctctccatgcgggagccggcgcctgctgatggcgcagctttggagcacagcgaggaggacggctccatttacgagatggccgacgaccccgacatctgggtgcgcagccggccctgcgcccgcgacgcccaccgcaaggagatttgctctgtggccatcatctccggcgggcagggctaccgcaactttggcagcgctctgggcagcagtgggaggcaggccccgtgtggggagacggacagcaccctcctcatctggcaggtgcccttgatgctatagcgcctcccctctcccctcagagggcacagctgcaggcctgaccaaggccacgcccggctctcgtgctctaggacctgcacgggacttgtggatgggcctggactctccagaaactacttgggcagagcaaaggaaaacctcttgttttaaaaaaatttttttcagagtgttttggggaggagttttagggcttggggagagggaggacacatctggaggaaatggccttctttttaaaagcaaaaaacacaaaacctcacaactgcctggcaagcccagtatcacttgtttgggccctagcgggactccaaggcagccacacgcccctcctggaagggtgtgtgcgtgtgagtgtgtgcgagtgtgtgggctggtgtgtgaatatctataaataagtatatatggtgtatattatatgtgtataaataaagtctgtacatattggagctctgggagatgctggaataaaagacaagagttacatctggacttgg

SEQ ID NO: 5599 - protein, 1279 aa, Homo sapiens
MASSNPPPQPAIGDQLVPGVPGPSSEAEDDPGEAFEFDDSDDEEDTSAALGVPSLAPERDTDPPLIHLDSIPVTDPDPAAAPPGTGVPAWVSNGDAADAAFSGARHSSWKRKSSRRIDRFTFPALEEDVIYDDVPCESPDAHQPGAERNLLYEDAHRAGAPRQAEDLGWSSSEFESYSEDSGEEAKPEVEVEPAKHRVSFQPKLSPDLTRLKERYARTKRDILALRVGGRDMQELKHKYDCKMTQLMKAAKSGTKDGLEKTRMAVMRKVSFLHRKDVLGDSEEEDMGLLEVSVSDIKPPAPELGPMPEGLSPQQVVRRHILGSIVQSEGSYVESLKRILQDYRNPLMEMEPKALSARKCQVVFFRVKEILHCHSMFQIALSSRVAEWDSTEKIGDLFVASFSKSMVLDVYSDYVNNFTSAMSIIKKACLTKPAFLEFLKRRQVCSPDRVTLYGLMVKPIQRFPQFILLLQDMLKNTPRGHPDRLSLQLALTELETLAEKLNEQKRLADQVAEIQQLTKSVSDRSSLNKLLTSGQRQLLLCETLTETVYGDRGQLIKSKERRVFLLNDMLVCANINFKPANHRGQLEISSLVPLGPKYVVKWNTALPQVQVVEVGQDGGTYDKDNVLIQHSGAKKASASGQAQNKVYLGPPRLFQELQDLQKDLAVVEQITLLISTLHGTYQNLNMTVAQDWCLALQRLMRVKEEEIHSANKCRLRLLLPGKPDKSGRPISFMVVFITPNPLSKISWVNRLHLAKIGLREENQPGWLCPDEDKKSKAPFWCPILACCIPAFSSRALSLQLGALVHSPVNCPLLGFSAVSTSLPQGYLWVGGGQEGAGGQVEIFSLNRPSPRTVKSFPLAAPVLCMEYIPELEEEAESRDESPTVADPSATVHPTICLGLQDGSILLYSSVDTGTQCLVSCRSPGLQPVLCLRHSPFHLLAGLQDGTLAAYPRTSGGVLWDLESPPVCLTVGPGPVRTLLSLEDAVWASCGPWVTVLEATTLQPQQSFEAHQDEAVSVTHMVKAGSGVWMAFSSGTSIRLFHTETLEHLQEINIATRTTFLLPGQKHLCVTSLLICQGLLWVGTDQGVIVLLPVPRLEGIPKITGKGMVSLNGHCGPVAFLAVATSILAPDILRSDQEEAEGPRAEEDKPDGQAHEPMPDSHVGRELTRKKGILLQYRLRSTAHLPGPLLSMREPAPADGAALEHSEEDGSIYEMADDPDIWVRSRPCARDAHRKEICSVAIISGGQGYRNFGSALGSSGRQAPCGETDSTLLIWQVPLML

SEQ ID NO: 5600 - DNA, 3565 bp, Homo sapiens
gagatggagtttcactcttgttgctcaggctggaatgcagtggcgtgatctctgctcactgcaacctccacctcctgggttcaagtgattctcctgcctcagcctctgggattacagtagctgggattacaggtgcctgccaccacacctggctaattttttgtattttagtagagatggggtttcactatgttggccaggctggtcttgaactgctgacctcaggtggtccacctgcctcagcctctcaaagtgctggaattacaattatgagccactgtgactggccataaattttatacatatatatgtgtgtatatatatatataataattttttttttgagatggagttttggctcttgttgctcaggctggagtgcaatggcatgatctcggctcactacaacctctgcctcccacgcacgttcaagcgattctcatgcctcagcctcccgagtagctgggactacaggcgtgcaccactactcccggctaatttttgtatttttagtagagacggggtttcaccatgtgggccaggctggtctcaaactcctgacctcaggtgatctgcccacctcagcctcccaaagtgctgggattacaggcgtgagccaccatgcccagcctgtaaattatattttataaagtaataaatactcaatttttttcctaattattttattctattattacctgtgcttttgtggttatttgctgctttgtgtgtgtgtgcgttggggagtgtattagttctttttcatactgctattttcatactgctatgaagaaatacctgagactaggtaatttgtaaagaaaaagagatttaatggactcacagttccacatggctggggaggtctcacaatcatggtagaaggcgaaggaggagcaaaggcacattttacatggtggcaggcgagagagcctgtgtaagggaactgtcctttataaaaccttcaggtcttgggagacttattcactatcatgagaacagcatggggaaaacctgcccctgtgattcaattacctcccaccacgtccctcccatgacatgcagggattatgggagctacaattcaagatgagatttgggtggggacgcagccaaaccatatcaaggggtgtgagtgtgggtgtgggtgtgtgtgtaatgtacgtagtggtgtgctactgcatatctcaactccattcagtgatgtcacattggcagcttgaaattggccagagtgagagtatttatatcacagaaattggcaaacactgcaaatcagaatcttttcccctgaagagcctgtttaccagcacaccactgggaatccagcaatgagcaactcagtccctccctttgaacttacattttggtgtgatggcgctccaggactgatcttagtgtcctcattgctgaggggcagctgctgggcagggcctgctttggtgatagaggttgtaaattgccctcaaatcacaggagctctccattccagcaagtgagttgttaccatgcaccaggaagagaggaaatgggacaaggaggaaattcagttaattgagagctgactttgccattgagtaaccctattcaggatgactcaggcatctgggaggaaaagcagcagtggtgtctgaggacagaccgtggacaaattaagtagcttggggcttgtggagttgtgatgtccaggacatgggtggctagagctgacataggcaacagtgggcatgacctgtccatatggattcaggacctgcatgagagagtagaggcatgaattattgagagttcagtctggctctggtgtcaggtgaatcaaaagtctgcagggcttgaaacagagtaggggaagcattgaaccttcctcaagtcaggaggcacagcatcatctgggtgccagcaaaggaaatctgacaaacctcacctgtcaggggccttgtgctgtgtggatcaccctgcttccctaaaaatctttgaggtttcttggtagtttcctgctgtccctgaagcttgctggtcttccagcccctgcatctgtggctggtggattctcaaaaaaaatccatgttaatatcaagcacaaaacttaattgggaagaggggtctcctgttctccccccattgctaattgataccagaaaagctgcttctgtccttcatttaggcagataattgagaacttgtttgcttaaaggcaactgattttgactttatgcctataggtgccagatatttttcatgcatcaattcatttaatttccatgccgatcctgcaagtacgtcctattttccgatcttatcgatgaggaaattgagtctcagagacttatccaagggcactgtgtttgtaagtggcaggatttgaacccggcaggccctgagatctttctgcagtcccgtgctcccctcctttatgcggttttccttttccctttgaggaggggagggagagattcatcacatgcctggaatctcagcacactttgcctttcttagttcggagttaatgtatgtttttttaattcagtgttggcaaggcccagtctggtcatagctgggtttgttaccttgtggctcaggggcaaggatgagaatagaattctggtacccacacgggctccctaggcctggtgtcaggaaagagctaatactaatggctcataattgcagagtggcaggcaccttggtagtgcatggctcgtgggagctttctcagttctcagctactccaagaggtggggtgcatcattatctctgttttgcctccattgaacttgcccagggttgagcaaccaagagttagaagcaccacattctgctcgccccggagtcctgcctctccactcttgtgtctttccttgagcagcgccaaccctcccagggcctggcccggctgtgcctttgacagcccctagcagcagtgcccatatgctatggaaaatggggaaggataattgaccacttggccacaggcccagggtctgcccacctcttggttagagccagcactgagctccctgccatggggttcatcttcccactggcctgttggttgagaggatggtctcagaccaggccccaacaccaccttcttgcagatacatccccagtccagggcagtgcaggtggtttgtgatggtgccagcccatgttggcatgttgggcccaagatgaggtggcatttctgagttttggaacccctctttctccttgagagcctggccccagagtgccctcctctctgtaaaagtcctggttctagtcgctggctgattggtatgcatcccagaatcccggccattagcatacaaggcgggagccagctctcattactcccctctcttcattgtttgaagtgggcagacttggagtgagctttggaaatgtgggctttttattcaatttccctagaaaaacaatggttaaattaagtaggaaaataacagtctcccgaaattgaagaaaaatattcctgaacctagacattacccacaacctttgaatttcttttaaaacaggcatttgttttactttaagttatacatgtatcgcatgaccactgaag

SEQ ID NO: 5601 - protein, 31 aa, Homo sapiens
MSRTWVARADIGNSGHDLSIWIQDLHERVEA

SEQ ID NO: 5602 - DNA, 4599 bp, Homo sapiens
attagaaatttgggtgcttcctcgcaccagcacatttcaagtgctcaatagtcgcatgtggcccgtggctcccattttggacagggcagatacagagtgtttctgtcattgcagagccttctctttgctggtgctgctgtatgctggagaagatgcgggtgctagggctggggcttgggaggacaaaggactggctgaggggacagcagctctgtcaggcctgggttcccccagcacctcggatgcccacttccctcttctgggcacgcggtctccttacgtctcatgttctgcttagcttgctacgctcgtgtccatggatcccctccccactgccagaggaagctgcctcttctttctggcaacttcagccttttctccttttcccggatggtggctcagtaagaaacctggctgtttcgggggaggcaagggacgggtccctcacctgggtttggcggatgggatgggggtgtgcacacacctcctttagttgctcctaaggtcatgttcaacattcgtggagtgcatttttctgctcagggagctttcccagacccggaatgtttggtgctcacagaccctggcaaggatcggtattgctgttcctcagttttgcctggggaaatggaggctcagtgacgttcagtgacgtgcccagagtcatgccattggcgggtggcccagggctccaggtctccagcacccctcggccccctcctcaccaggtcacatcatctcctggattagaaatctgctcacatagtctgtcctgaaaggaaaaaaatcggttacagcctcctgttgcccctaaagagggagatccccgggcatgaacgcaccttctcacccccactgtcgtccttggcctttgctcacggacctgggagggaagggtctgggtggttctgatctctgcaggccgaggcctggggaggcgggtggccctcggtagcaggcatcccaggccgtcccttccctgatgagcctctctacctttgctcagatgacccagctcatgaaggccgccaagagcgggaccaaggatgggctggagaagacacggatggccgtgatgcgcaaagtctccttcctgcacaggaaggacgtcctcggtgactcggaggaggaggacatggggctcctggaggtcagcgtttcggacatcaagcccccagccccagagctgggccccatgccagagggcctgagccctcagcaggtggtccggaggcatatcctgggctccatcgtgcagagcgaaggcagctacgtggagtctctgaagcggatactccaggactaccgcaaccccctgatggagatggagcccaaggcgctgagcgcccgcaagtgccaggtggtgttcttccgcgtgaaggagatcctgcactgccactccatgttccagatcgccctgtcctcccgcgtggctgagtgggattccaccgagaagatcggggacctcttcgtggcctcgttttccaagtccatggtgctagatgtgtacagtgactacgtgaacaacttcaccagtgccatgtccatcatcaagaaggcctgcctcaccaagcctgccttcctcgagttcctcaagcgacggcaggtgtgcagcccagaccgtgtcaccctctacgggctgatggtcaagcccatccagaggttcccacagttcatactcctgcttcaggacatgctgaagaacacccccaggggccatccggacaggctgtcgctgcagctggccctcacagagctggagacgctggctgagaagctgaacgagcagaagcggctggctgaccaggtggctgagatccagcagctgaccaagagcgtcagtgaccgcagcagcctcaacaagctgttgacctcaggccagcggcagctgctcctgtgtgagacgttgacggagaccgtgtacggtgaccgcgggcagctaattaagtccaaggagcgtcgggtcttcctgctcaacgacatgcttgtctgtgccaacatcaacttcaagggccagctggagatcagcagcctggtgcccctggggcccaagtatgtggtgaagtggaacacggcgctgccccaggtgcaggtggtggaggtgggccaggacggtggcacctatgacaaggacaatgtgctcatccagcactcaggcgccaagaaggcctctgcctcagggcaggctcagaataaggtgtacctcggccccccacgcctcttccaggagctgcaggacctgcagaaggacctggccgtggtggagcagatcacgcttctcatcagcacgctgcacggcacctaccagaacctgaacatgactgtggctcaagactggtgcctggccctgcagaggctgatgcgggtgaaggaggaagagatccactcggccaacaagtgccgtctcaggctcctgcttcctgggaaacccgacaagtccggccgccccattagcttcatggtggttttcatcacccccaaccccctgagcaagatttcctgggtcaacaggttacatttggccaaaatcggactccgggaggagaaccagccaggctggctatgcccggatgaggacaagaagagcaaagccccattctggtgcccgatcctggcctgctgcatccctgccttctcctcccgggcactcagcctgcagcttggggccctggtccacagtcctgtcaactgtcccctgctgggtttctcagcagtcagcacctcccttccacagggctacctctgggtcgggggcggacaggaaggcgcagggggccaggtggaaatcttttccttgaaccggccctcgccccgcaccgtcaagtccttcccactggcagcccctgtgctctgcatggagtatatcccggagctggaggaggaggcggagagcagagacgagagcccgacagttgctgacccctcggccacggtgcatccaaccatctgcctcgggctccaggatggcagcatcctcctctacagcagtgtggacactggcacccagtgcctggtgagctgcaggagcccaggtctgcagcctgtgctctgcctgcgacacagccccttccacctgctcgctggcctgcaggatgggacccttgctgcttaccctcggaccagcggaggtgtcctgtgggacctggagagccctcccgtgtgcctgactgtggggcccgggcctgtccgcaccctgttgagcctggaggatgccgtgtgggccagctgtgggccctgggtcactgtcctggaagccaccaccctgcagcctcagcaaagcttcgaggcgcaccaggacgaggcagtgagcgtgacacacatggtgaaggcgggcagcggcgtctggatggccttctcctccggcacctccatccgcctcttccacactgagaccctggagcatctgcaagagatcaacatcgccaccaggaccaccttcctcctgccaggccagaagcacttgtgtgtcaccagcctcctgatctgccagggtctgctctgggtgggcactgaccagggtgtcatcgtcctgctgcccgtgcctcggctggaaggcatccccaagatcacagggaaaggcatggtctcactcaacgggcactgtgggcctgtggccttcctggctgtggctaccagcatcctggcccctgacatcctgcggagtgaccaggaggaggctgaggggccccgggctgaggaggacaagccagacgggcaggcacacgagcccatgcccgatagccacgtgggccgagagctgacccgcaagaagggcatcctcttgcagtaccgcctgcgctccaccgcacacctcccgggcccgctgctctccatgcgggagccggcgcctgctgatggcgcagctttggagcacagcgaggaggacggctccatttacgagatggccgacgaccccgacatctgggtgcgcagccggccctgcgcccgcgacgcccaccgcaaggagatttgctctgtggccatcatctccggcgggcagggctaccgcaactttggcagcgctctgggcagcagtgggaggcaggccccgtgtggggagacggacagcaccctcctcatctggcaggtgcccttgatgctatagcgcctcccctctcccctcagagggcacagctgcaggcctgaccaaggccacgcccggctctcgtgctctaggacctgcacgggacttgtggatgggcctggactctccagaaactacttgggcagagcaaaggaaaacctcttgttttaaaaaaatttttttcagagtgttttggggaggagttttagggcttggggagagggaggacacatctggaggaaatggccttctttttaaaagcaaaaaacacaaaacctcacaactgcctggcaagcccagtatcacttgtttgggccctagcgggactccaaggcagccacacgcccctcctggaagggtgtgtgcgtgtgagtgtgtgcgagtgtgtgggctggtgtgtgaatatctataaataagtatatatggtgtatattatatgtgtataaataaagtctgtacatattggagctctgggagatgctggaataaaagacaagagttacatctggacttgg

SEQ ID NO: 5603 - protein, 1040 aa, Homo sapiens
MSLSTFAQMTQLMKAAKSGTKDGLEKTRMAVMRKVSFLHRKDVLGDSEEEDMGLLEVSVSDIKPPAPELGPMPEGLSPQQVVRRHILGSIVQSEGSYVESLKRILQDYRNPLMEMEPKALSARKCQVVFFRVKEILHCHSMFQIALSSRVAEWDSTEKIGDLFVASFSKSMVLDVYSDYVNNFTSAMSIIKKACLTKPAFLEFLKRRQVCSPDRVTLYGLMVKPIQRFPQFILLLQDMLKNTPRGHPDRLSLQLALTELETLAEKLNEQKRLADQVAEIQQLTKSVSDRSSLNKLLTSGQRQLLLCETLTETVYGDRGQLIKSKERRVFLLNDMLVCANINFKGQLEISSLVPLGPKYVVKWNTALPQVQVVEVGQDGGTYDKDNVLIQHSGAKKASASGQAQNKVYLGPPRLFQELQDLQKDLAVVEQITLLISTLHGTYQNLNMTVAQDWCLALQRLMRVKEEEIHSANKCRLRLLLPGKPDKSGRPISFMVVFITPNPLSKISWVNRLHLAKIGLREENQPGWLCPDEDKKSKAPFWCPILACCIPAFSSRALSLQLGALVHSPVNCPLLGFSAVSTSLPQGYLWVGGGQEGAGGQVEIFSLNRPSPRTVKSFPLAAPVLCMEYIPELEEEAESRDESPTVADPSATVHPTICLGLQDGSILLYSSVDTGTQCLVSCRSPGLQPVLCLRHSPFHLLAGLQDGTLAAYPRTSGGVLWDLESPPVCLTVGPGPVRTLLSLEDAVWASCGPWVTVLEATTLQPQQSFEAHQDEAVSVTHMVKAGSGVWMAFSSGTSIRLFHTETLEHLQEINIATRTTFLLPGQKHLCVTSLLICQGLLWVGTDQGVIVLLPVPRLEGIPKITGKGMVSLNGHCGPVAFLAVATSILAPDILRSDQEEAEGPRAEEDKPDGQAHEPMPDSHVGRELTRKKGILLQYRLRSTAHLPGPLLSMREPAPADGAALEHSEEDGSIYEMADDPDIWVRSRPCARDAHRKEICSVAIISGGQGYRNFGSALGSSGRQAPCGETDSTLLIWQVPLML

SEQ ID NO: 5604 - DNA, 3481 bp, Homo sapiens
attaatagccgtggcagggctcgaatcacaggccaagaatgttacccagcagctcgtgggggaagaggaagctgcgaggcaggctggggtgggtgcggagtgatgcccggggcgtgatgtgggcccggcaggagggtctgcaccacccccacccccacgccgtcatccgctgtccctcctcctcctcctcctctgtctcctgctcaggtgactcggaggaggaggacatggggctcctggaggtcagcgtttcggacatcaagcccccagccccagagctgggccccatgccagagggcctgagccctcagcaggtggtccggaggcatatcctgggctccatcgtgcagagcgaaggcagctacgtggagtctctgaagcggatactccaggactaccgcaaccccctgatggagatggagcccaaggcgctgagcgcccgcaagtgccaggtggtgttcttccgcgtgaaggagatcctgcactgccactccatgttccagatcgccctgtcctcccgcgtggctgagtgggattccaccgagaagatcggggacctcttcgtggcctcggacatgctgaagaacacccccaggggccatccggacaggctgtcgctgcagctggccctcacagagctggagacgctggctgagaagctgaacgagcagaagcggctggctgaccaggtggctgagatccagcagctgaccaagagcgtcagtgaccgcagcagcctcaacaagctgttgacctcaggccagcggcagctgctcctgtgtgagacgttgacggagaccgtgtacggtgaccgcgggcagctaattaagtccaaggagcgtcgggtcttcctgctcaacgacatgcttgtctgtgccaacatcaacttcaagggccagctggagatcagcagcctggtgcccctggggcccaagtatgtggtgaagtggaacacggcgctgccccaggtgcaggtggtggaggtgggccaggacggtggcacctatgacaaggacaatgtgctcatccagcactcaggcgccaagaaggcctctgcctcagggcaggctcagaataaggtgtacctcggccccccacgcctcttccaggagctgcaggacctgcagaaggacctggccgtggtggagcagatcacgcttctcatcagcacgctgcacggcacctaccagaacctgaacatgactgtggctcaagactggtgcctggccctgcagaggctgatgcgggtgaaggaggaagagatccactcggccaacaagtgccgtctcaggctcctgcttcctgggaaacccgacaagtccggccgccccattagcttcatggtggttttcatcacccccaaccccctgagcaagatttcctgggtcaacaggttacatttggccaaaatcggactccgggaggagaaccagccaggctggctatgcccggatgaggacaagaagagcaaagccccattctggtgcccgatcctggcctgctgcatccctgccttctcctcccgggcactcagcctgcagcttggggccctggtccacagtcctgtcaactgtcccctgctgggtttctcagcagtcagcacctcccttccacagggctacctctgggtcgggggcggacaggaaggcgcagggggccaggtggaaatcttttccttgaaccggccctcgccccgcaccgtcaagtccttcccactggcagcccctgtgctctgcatggagtatatcccggagctggaggaggaggcggagagcagagacgagagcccgacagttgctgacccctcggccacggtgcatccaaccatctgcctcgggctccaggatggcagcatcctcctctacagcagtgtggacactggcacccagtgcctggtgagctgcaggagcccaggtctgcagcctgtgctctgcctgcgacacagccccttccacctgctcgctggcctgcaggatgggacccttgctgcttaccctcggaccagcggaggtgtcctgtgggacctggagagccctcccgtgtgcctgactgtggggcccgggcctgtccgcaccctgttgagcctggaggatgccgtgtgggccagctgtgggccctgggtcactgtcctggaagccaccaccctgcagcctcagcaaagcttcgaggcgcaccaggacgaggcagtgagcgtgacacacatggtgaaggcgggcagcggcgtctggatggccttctcctccggcacctccatccgcctcttccacactgagaccctggagcatctgcaagagatcaacatcgccaccaggaccaccttcctcctgccaggccagaagcacttgtgtgtcaccagcctcctgatctgccagggtctgctctgggtgggcactgaccagggtgtcatcgtcctgctgcccgtgcctcggctggaaggcatccccaagatcacagggaaaggcatggtctcactcaacgggcactgtgggcctgtggccttcctggctgtggctaccagcatcctggcccctgacatcctgcggagtgaccaggaggaggctgaggggccccgggctgaggaggacaagccagacgggcaggcacacgagcccatgcccgatagccacgtgggccgagagctgacccgcaagaagggcatcctcttgcagtaccgcctgcgctccaccgcacacctcccgggcccgctgctctccatgcgggagccggcgcctgctgatggcgcagctttggagcacagcgaggaggacggctccatttacgagatggccgacgaccccgacatctgggtgcgcagccggccctgcgcccgcgacgcccaccgcaaggagatttgctctgtggccatcatctccggcgggcagggctaccgcaactttggcagcgctctgggcagcagtgggaggcaggccccgtgtggggagacggacagcaccctcctcatctggcaggtgcccttgatgctatagcgcctcccctctcccctcagagggcacagctgcaggcctgaccaaggccacgcccggctctcgtgctctaggacctgcacgggacttgtggatgggcctggactctccagaaactacttgggcagagcaaaggaaaacctcttgttttaaaaaaatttttttcagagtgttttggggaggagttttagggcttggggagagggaggacacatctggaggaaatggccttctttttaaaagcaaaaaacacaaaacctcacaactgcctggcaagcccagtatcacttgtttgggccctagcgggactccaaggcagccacacgcccctcctggaagggtgtgtgcgtgtgagtgtgtgcgagtgtgtgggctggtgtgtgaatatctataaataagtatatatggtgtatattatatgtgtataaataaagtctgtacatattggagctctgggagatgctggaataaaagacaagagttacatctggacttgg

SEQ ID NO: 5605 - protein, 982 aa, Homo sapiens
MLPSSSWGKRKLRGRLGWVRSDARGVMWARQEGLHHPHPHAVIRCPSSSSSSVSCSGDSEEEDMGLLEVSVSDIKPPAPELGPMPEGLSPQQVVRRHILGSIVQSEGSYVESLKRILQDYRNPLMEMEPKALSARKCQVVFFRVKEILHCHSMFQIALSSRVAEWDSTEKIGDLFVASDMLKNTPRGHPDRLSLQLALTELETLAEKLNEQKRLADQVAEIQQLTKSVSDRSSLNKLLTSGQRQLLLCETLTETVYGDRGQLIKSKERRVFLLNDMLVCANINFKGQLEISSLVPLGPKYVVKWNTALPQVQVVEVGQDGGTYDKDNVLIQHSGAKKASASGQAQNKVYLGPPRLFQELQDLQKDLAVVEQITLLISTLHGTYQNLNMTVAQDWCLALQRLMRVKEEEIHSANKCRLRLLLPGKPDKSGRPISFMVVFITPNPLSKISWVNRLHLAKIGLREENQPGWLCPDEDKKSKAPFWCPILACCIPAFSSRALSLQLGALVHSPVNCPLLGFSAVSTSLPQGYLWVGGGQEGAGGQVEIFSLNRPSPRTVKSFPLAAPVLCMEYIPELEEEAESRDESPTVADPSATVHPTICLGLQDGSILLYSSVDTGTQCLVSCRSPGLQPVLCLRHSPFHLLAGLQDGTLAAYPRTSGGVLWDLESPPVCLTVGPGPVRTLLSLEDAVWASCGPWVTVLEATTLQPQQSFEAHQDEAVSVTHMVKAGSGVWMAFSSGTSIRLFHTETLEHLQEINIATRTTFLLPGQKHLCVTSLLICQGLLWVGTDQGVIVLLPVPRLEGIPKITGKGMVSLNGHCGPVAFLAVATSILAPDILRSDQEEAEGPRAEEDKPDGQAHEPMPDSHVGRELTRKKGILLQYRLRSTAHLPGPLLSMREPAPADGAALEHSEEDGSIYEMADDPDIWVRSRPCARDAHRKEICSVAIISGGQGYRNFGSALGSSGRQAPCGETDSTLLIWQVPLML

SEQ ID NO: 5606 - DNA, 3584 bp, Homo sapiens
cgagaagtgcttccaagcgtccattttgagccttggaaactacgacgaccaaagggccacgggttcatgggtcgtttctcatttccgtcgagttaaacgtctggggctgcttctgaggaatcagcttgactggccagcaagttcagctccggcaagtcatttgattcacccggtgatgaaatgggggtcaaccagtctgtgggctttccacctgtcacaggaccccacctcgtaggctgtggggatgtgatggagggtcagaatctccaggggagcttctttcgactcttctacccctgccaaaaggcagaggagaccatggagcagcccctgtggattccccgctatgagtactgcactggcctggccgagtacctgcagtttaataagcgctgcgggggcttgctgttcaacctggcggtgggatcttgtcgcctgcctgttagctggaatggcccctttaagacaaaggactctggataccccttgatcatcttctcccatggcctaggagccttcaggactttgtattcagccttctgcatggagctggcctcacgtggctttgtggttgctgtgccagagcacagggaccggtcagcggcaaccacctatttctgcaagcaggccccagaagagaaccagcccaccaatgaatcgctgcaggaggaatggatccctttccgtcgagttgaggaaggggagaaggaatttcatgttcggaatccccaggtgcatcagcgggtaagcgagtgtttacgggtgttgaagatcctgcaagaggtcactgctgggcagactgtcttcaacatcttgcctggtggcttggatctgatgactttgaagggcaacattgacatgagccgtgtggctgtgatgggacattcatttggaggggccacagctattctggctttggccaaggagacccaatttcggtgtgcggtggctctggatgcttggatgtttcctctggaacgtgacttttaccccaaggcccgaggacctgtgttctttatcaatactgagaaattccagacaatggagagtgtcaatttgatgaagaagatatgtgcccagcatgaacagtctaggatcataaccgttcttggttctgttcatcggagtcaaactgactttgcttttgtgactggcaacttgattggtaaattcttctccactgaaacccgtgggagcctggacccctatgaagggcaggaggttatggtacgggccatgttggccttcctgcagaagcacctcgacctgaaagaagactataatcaatggaacaaccttattgaaggcattggaccgtcgctcaccccaggggccccccaccatctgtccagcctgtaggcacaactggccatttgtaaagtcacttcagccaagttttcatttgggagctacccaagggcacccatgagctcctatcaagaagtgatcaacgtgaccccttttcacagattgaaaggtgtaatcacactgctgcttggataactgggtactttgatcttagatttgatcttaaaatcactttgggactgggatcccttgctgattgacaaacagactttctgggaccttgatggagtggggaacaagcagtagagtgggactgggggagacccaggccccgggctgagcactgtgaggcctggatgtgaagactcagcccagcgaagctcattcccttacccccggccagtgctgctgcttcagtggaagagatgaagccaaaggacagaatgaaaatccctaccttcagagactctagcccagcccaacaccatctcttcctacctctcagccttctccctccccagggccacttgttgaagtctgagcactttatgtaaatttctaggtgtgagccgtgatcacattttctatttatttccaagtcttctcattgtatggaacatagtactacttatacttacagtagtaagttatacttgtgagcccacagagtggcagacagcatggctctcacagcacagggagaaaaactgaggtacacagaggtacctcagaagctctggatgtctttgggggttttgctaagtgtatcttgataggaaacaacaaaagcaggttgagatggggaagatgacagaacaacagtgttaaatggccatttgcacaggcctttgccacaacagagaagtagtttggtcagctaaaactcagctgcagcctggacagtagagcgagaccccatcttaaaaataaagaaggctgggcgtggtggctcatgcctgtaatcccaacactttgggaggccaaggcaggcagatcacttaaggccaggagttcaagaccacctggccaacatggtgaaaccccgtctctactaaaaatacaaaaaattagcctggcgtaatggcaggcgcctataatcccagctactcaggaggctgaagcagaagaatcacttgaacctaggaggcggaggttgcagtgagtcaagatcgcgccactgcactccagcctgggtgacagagcaagactctgtcttaaaaaaaaaaaaaagaaaaagaaaaatttaaaataaataaaatttaaaaacgcagaaggccactcccagagaggcctaggagtaccttggtcattttttcttgcctcaaatattataaacctccaacttgctcagaatcagggtgcttttattgtctgttttctggctctgaggcccttgccccaaatttaagtcagatacagactgaatttccattctgttctgtttataatatgaatgatattaatactcttgtttgcttaatgttatgttggaattttctgtttaatctgcagtagagcaagatggagagccatctggaattgacttccttctgtctttcttctgtgttcgcttactacttgggcccatgtgggaaaaaaactttaaaaggaaggaagtcttcttagggatccagttcaaagctatttgggggcatcaaactgaaactctcttctccactactcaagacttcgtgcctcagtccaagtaggtaagagcaaaagggaaatgcatctctacacaatggcccatggtcagggccaccagagcaagctgggcctagatctccacctgtcagtgactggccattctaagaggtgaaacagcagatcgttgaggctgtgagggaggatctttgaattcccatgagacatagcataagaagggtatcattaaagccctgggctctaaagttacagagcctggttttgagtcctggctccaccactgccaactgggtaaatttgagcaaatggtattctctttcttatctcagctcctgcgtttctaaaatgagggtctgcgttatgaatagttaggaggattaagtgagaggatgtataacccatgggttacttaaaagtatatttcctaccttccaaacatgagatttttctagttatagtttcttttctagcttgattgctttgtggtcagagaaaatgacccatatggtttccatccttcaaaatttgttgaaacttggttgttggcctagtatgagatcaatgttgtaaatgtgccatgtatgtttaaaaagactatatattctgaagaa

SEQ ID NO: 5607 - protein, 392 aa, Homo sapiens; identical to SEQ ID NO: 82

SEQ ID NO: 5608 - DNA, 2503 bp, Homo sapiens
gcaacaggaagccgagaggaaaccagcaagcggctgctgttctgtgttcccccatccagccagcaagttcagctccggcaagtcatttgattcacccggtgatgaaatgggggtcaaccagtctgtgggctttccacctgtcacaggaccccacctcgtaggctgtggggatgtgatggagggtcagaatctccaggggagcttctttcgactcttctacccctgccaaaaggcagaggagaccatggagcagcccctgtggattccccgctatgagtactgcactggcctggccgagtacctgcagtttaataagcgctgcgggggcttgctgttcaacctggcggtgggatcttgtcgcctgcctgttagctggaatggcccctttaagacaaaggactctggataccccttgatcatcttctcccatggcctaggagccttcaggactttgtattcagccttctgcatggagctggcctcacgtggctttgtggttgctgtgccagagcacagggaccggtcagcggcaaccacctatttctgcaagcaggccccagaagagaaccagcccaccaatgaatcgctgcaggaggaatggatccctttccgtcgagttgaggaaggggagaaggaatttcatgttcggaatccccaggtgcatcagcgggtaagcgagtgtttacgggtgttgaagatcctgcaagaggtcactgctgggcagactgtcttcaacatcttgcctggtggcttggatctgatgactttgaagggcaacattgacatgagccgtgtggctgtgatgggacattcatttggaggggccacagctattctggctttggccaaggagacccaatttcggtgtgcggtggctctggatgcttggatgtttcctctggaacgtgacttttaccccaaggcccgaggacctgtgttctttatcaatactgagaaattccagacaatggagagtgtcaatttgatgaagaagatatgtgcccagcatgaacagtctaggatcataaccgttcttggttctgttcatcggagtcaaactgactttgcttttgtgactggcaacttgattggtaaattcttctccactgaaacccgtgggagcctggacccctatgaagggcaggaggttatggtacgggccatgttggccttcctgcagaagcacctcgacctgaaagaagactataatcaatggaacaaccttattgaaggcattggaccgtcgctcaccccaggggccccccaccatctgtccagcctgtaggcacaactggccatttgtaaagtcacttcagccaagttttcatttgggagctacccaagggcacccatgagctcctatcaagaagtgatcaacgtgaccccttttcacagattgaaaggtgtaatcacactgctgcttggataactgggtactttgatcttagatttgatcttaaaatcactttgggactgggatcccttgctgattgacaaacagactttctgggaccttgatggagtggggaacaagcagtagagtgggactgggggagacccaggccccgggctgagcactgtgaggcctggatgtgaagactcagcccagcgaagctcattcccttacccccggccagtgctgctgcttcagtggaagagatgaagccaaaggacagaatgaaaatccctaccttcagagactctagcccagcccaacaccatctcttcctacctctcagccttctccctccccagggccacttgttgaagtctgagcactttatgtaaatttctaggtgtgagccgtgatcacattttctatttatttccaagtcttctcattgtatggaacatagtactacttatacttacagtagtaagttatacttgtgagcccacagagtggcagacagcatggctctcacagcacagggagaaaaactgaggtacacagaggtacctcagaagctctggatgtctttgggggttttgctaagtgtatcttgataggaaacaacaaaagcaggttgagatggggaagatgacagaacaacagtgttaaatggccatttgcacaggcctttgccacaacagagaagtagtttggtcagctaaaactcagctgcagcctggacagtagagcgagaccccatcttaaaaataaagaaggctgggcgtggtggctcatgcctgtaatcccaacactttgggaggccaaggcaggcagatcacttaaggccaggagttcaagaccacctggccaacatggtgaaaccccgtctctactaaaaatacaaaaaattagcctggcgtaatggcaggcgcctataatcccagctactcaggaggctgaagcagaagaatcacttgaacctaggaggcggaggttgcagtgagtcaagatcgcgccactgcactccagcctgggtgacagagcaagactctgtcttaaaaaaaaaaaaaagaaaaagaaaaatttaaaataaataaaatttaaaaacgc

SEQ ID NO: 5609 - protein, 392 aa, Homo sapiens; identical to SEQ ID NO: 82

SEQ ID NO: 5610 - DNA, 354 bp, Homo sapiens
atcttctgggctcaagagatcttcctacctcagtgtcctgagtagctgggactacaggcacacaccaccacacaattttgtttttttagtagagacggggtcttgctatgttgcccaggctggtctcaaactcctgaactcaagcgatcctcccactgtggccttccaaagtgctggagatataggtgtgagccacggcacccagtcagaaccacagctcttgacagctctgaccttgtgtgtgttcagccttgtcacctatgagaataggactgtgtttgagttgctccctcagtcccttaccctggtgccaaactgcagtttgaaaaatcctggagagggattccaggcctg

SEQ ID NO: 5611 - protein, 116 aa, Homo sapiens
SSGLKRSSYLSVLSSWDYRHTPPHNFVFLVETGSCYVAQAGLKLLNSSDPPTVAFQSAGDIGVSHGTQSEPQLLTALTLCVFSLVTYENRTVFELLPQSLTLVPNCSLKNPGEGFQ

SEQ ID NO: 5612 - DNA, 4017 bp, Homo sapiens
agttgccgactggagagggatgggaggagataccatagggtttggggggcttggcacagcggccctggcctctgcactgtgatagctccaagccagatggtgcaaggcagctgctgggctgcggggaagaggggctgcacttcctgagctggtgcagcggcagagtggataaggatcaggaccccgagccctcctggccctccaaggcagggggacaccggctgcacccaggctgtgacctcagctgacgccgatgatccacatgggatgcagggtctaattttagctccagccacaggggccacagcccagaagcgtctgccagcgggcacaggggcagccagggctgctcaggcaaggggaggagtgggaagaccagcccagctccctccagcctgtccctggccaagccgcctcctgtgggagctctgactggtccccatggcctggcagacagccctcctctcagttgagggcaaggtcaaggggtgcagccaggagggcagggggacacggccctgcattctggacaggggttgcgtcagccagagcagtgcccaggggcaggggtccctgctgggagggaaaaggctggcttggttgtccaaaggccgagaaggcagagtcctgagagcaggggggccaggccagcaagctgggtcccacctggcctcctcctgcctggctggtgactcactatctgaccttagacaggcggcctggtctcgatgggcctcagtcttcccatctgtacaatgacagcacaggactagcaggtcggtcccagctctggtctcccgccccaggccctgctcttcctgcttgctggcagaggcctcccagcttccctagccctgactgtgggtggccacatgcagtcgtggaggagaagaaagtccctgtggctggcactgtcagcctcctggctcctgcttgtcctgctgggaggcttctcccttctccgcctggcattgcctcccagacctcggcccggggcttcccaaggctggccccgctggctggatgcagagctcctgcagagcttctcccagcctggagagctcccagaagatgccgtttcacctcctcaagcccctcatggtggcagctgcaactgggaatcttgctttgatacctcaaagtgcaggggcgatggccttaaggtattcgtgtacccagcggttggaaccatctctgagactcatcgcaggatcctggcttccattgagggctctcgcttctacacattcagccctgctggggcctgcctcctcctcctcctcagcctggacgcccagactggagagtgcagctcaatgcctctgcaatggaacaggggcaggaaccatctggtcctccgtctccacccggctccctgccccaggaccttccagctgggacaggctatggtggctgaggccagccccacggtggactccttccggcccggctttgatgtggccctcccttttctccctgaagcccacccgttgcgaggtggggctcctggccagctgcggcaacacagcccccagcccggggtagccctgctagccctggaagaggagaggggtgggtggcgcacagcagacactggctcctctgcctgcccctgggatgggcgctgtgagcaagaccctggacctgggcagacccagcgccaggagacgctgcccaatgccaccttctgcctcatctctggccaccgtcccgaggctgcctcgcgcttcctccaagccctgcaggccggctgcatcccagtgcttctcagcccccgctgggagctgcccttctccgaggtcatcgactggaccaaggcagccatcgtagctgatgagaggctcccacttcaggtcctggctgccctccaggagatgtcccctgcacgggtcctcgccctgcgtcagcagacccagtttctatgggatgcctacttctcctcagtggagaaggtcatccataccactctggaggttattcaggaccggatttttggaacatcagctcacccctcactgctgtggaacagccccccaggggcactcctggccctgtctactttttccacaagcccccaggacttccccttctactacctgcaacagggctcccgccctgagggcagattcagcgccctgatctgggtggggcccccaggccagccccctctgaagctcatccaggcggtggcaggctcccagcactgtgcccagatcttggttctctggagcaatgagaggccactcccatccaggtggccggagacagctgtgcccttgacagtcattgatgggcacaggaaggttagtgatcgcttctacccatatagcaccatcagaacagatgccatcctcagcctcgatgcccgcagcagtctttccacaagtgaggtggactttgcctttctggtgtggcagagcttcccagagcggatggtgggcttcctgacgtcgagccatttctgggacgaggcccatggtggctggggctacactgctgagaggaccaacgaattctccatggttctcaccacagccgccttctaccataggtattaccacactctcttcacccactccctgcccaaggctctgaggaccctggcagatgaggcacccacctgtgtggacgtcctgatgaatttcatagtagcagcagtcaccaagctgccccctatcaaggtgccctatggcaagcagcgccaggaggctgctccactggcgcctgggggcccggggcccaggccaaagccgcctgccccagcccccgactgcatcaaccagatagcggcagcgttcggccacatgcccttgctgtcctctcgtctgcgtctggacccggtgctgtttaaggacccggtgtccgtgcagcgcaagaagtaccgcagcctggagaagccctaggggggcgacccgcggagaccccagcagaggtcgcagcccagctcccagggggcccggcgcctgccggcgggctccgctcttgggacaccggagaacctatcatgtcagccagcgggcccacacgtcggaccccggttggccaatcacaacaggggggcgtggccttaccttctcctgctcgccctcagccgcggagcctctgcggaggctgagccccgcgaccggagcgccgctctccgcttctccacccagctaacttctgctcgtctttcagagcattgtctcctccagggacttgcctggccctcctccccctccgcccccaatgggttcggtctcctttgcgctttcgcagtccagtgtttgccgcggttcccgcacggtcaggccccaggactggcttgcgagccccggggggcgggtcgtgtcgtgtccttttctctctggctaggcaggtgtgccgcaaatatttgacgaatagatggatggcagacattaactgcgtgcctggccctatgagggcggcggcgggacagggtgagcggagagacagaactgtccccgccccaccccgccacccattcctagggttcctagtcccgggaaggcaactacccaaagacgcctgggttgtcaggctcaatccttgagcctcaaccaaggagcagaggggtgcgggtaaacgaggagtggggcgaggaaagcgggatgggaacaagtggcctgtccccgcacggcccgcggctcagcctcggccgtctgccctgcactaccaaggccgaccactagaggtcagcgtcgcgccgcactcttcacccgcatgtccagagggcggccgggatgtggagggtgagcgctgtgggcagctcgggggctgaaagctgggaagagaaatctgaagaacagccccatctctttcgcctgcacacttggaactcagcaagaagggactgtttctaggtgggctgggcgcgagcagggactgtcccgagcggtataggtgagaatggagttggggggggacactaggtcctccggggttcacccacctggagctggaattatcacttccgaaataaagcgcgtgtccttgccccctcacgctccaggctat

SEQ ID NO: 5613 - protein, 676 aa, Homo sapiens
MQSWRRRKSLWLALSASWLLLVLLGGFSLLRLALPPRPRPGASQGWPRWLDAELLQSFSQPGELPEDAVSPPQAPHGGSCNWESCFDTSKCRGDGLKVFVYPAVGTISETHRRILASIEGSRFYTFSPAGACLLLLLSLDAQTGECSSMPLQWNRGRNHLVLRLHPAPCPRTFQLGQAMVAEASPTVDSFRPGFDVALPFLPEAHPLRGGAPGQLRQHSPQPGVALLALEEERGGWRTADTGSSACPWDGRCEQDPGPGQTQRQETLPNATFCLISGHRPEAASRFLQALQAGCIPVLLSPRWELPFSEVIDWTKAAIVADERLPLQVLAALQEMSPARVLALRQQTQFLWDAYFSSVEKVIHTTLEVIQDRIFGTSAHPSLLWNSPPGALLALSTFSTSPQDFPFYYLQQGSRPEGRFSALIWVGPPGQPPLKLIQAVAGSQHCAQILVLWSNERPLPSRWPETAVPLTVIDGHRKVSDRFYPYSTIRTDAILSLDARSSLSTSEVDFAFLVWQSFPERMVGFLTSSHFWDEAHGGWGYTAERTNEFSMVLTTAAFYHRYYHTLFTHSLPKALRTLADEAPTCVDVLMNFIVAAVTKLPPIKVPYGKQRQEAAPLAPGGPGPRPKPPAPAPDCINQIAAAFGHMPLLSSRLRLDPVLFKDPVSVQRKKYRSLEKP

SEQ ID NO: 5614 - DNA, 1401 bp, Homo sapiens
ggagaagaaagtccctgtggctggcactgtcagcctcctggctcctgcttgtcctgctgggaggcttctcccttctccgcctggcattgcctcccagacctcggcccggggcttcccaaggctggccccgctggctggatgcagagctcctgcagagcttctcccagcctggagagctcccagaagatgccgtttcacctcctcaagcccctcatggtggcagctgcaactgggaatcttgctttgatacctcaaagtgcaggggcgatggccttaaggtattcgtgtacccagcggttggaaccatctctgagactcatcgcaggatcctggcttccattgagggctctcgcttctacacattcagccctgctggggcctgcctcctcctcctcctcagcctggacgcccagactggagagtgcagctcaatgcctctgcaatggaacaggggcaggaaccatctggtcctccgtctccacccggctccctgccccaggaccttccagctgggacaggctatggtggctgaggccagccccacggtggactccttccggcccggctttgatgtggccctcccttttctccctgaagcccacccgttgcgaggtggggctcctggccagctgcggcaacacagcccccagcccggggtagccctgctagccctggaagaggagaggggtgggtggcgcacagcagacactggctcctctgcctgcccctgggatgggcgctgtgagcaagaccctggacctgggcagacccagcgccaggagacgctgcccaatgccaccttctgcctcatctctggccaccgtcccgaggctgcctcgcgcttcctccaagccctgcaggtcctggctgccctccaggagatgtcccctgcacgggtcctcgccctgcgtcagcagacccagtttctatgggatgcctacttctcctcagtggagaaggtcatccataccactctggaggttattcaggaccggatttttggaacatcagctcacccctcactgctgtggaacagccccccaggggcactcctggccctgtctactttttccacaagcccccaggacttccccttctactacctgcaacagggtatgccctggggatgggacaacctgaagtcccctcagctctacccagggctgccccagcctcatctggagagccccaccaagaccctttccaagccctaacatttttcctggcccccggggattccctactcaggtcattcttcatggggttctgttccctcccactctaatagcctgtgtctcattcccccaggctcccgccctgagggcagattcagcgccctgatctgggtggggcccccaggccagccccctctgaagctcatccaggcggtggcaggctccc

SEQ ID NO: 5615 - protein, 260 aa, Homo sapiens
MPLQWNRGRNHLVLRLHPAPCPRTFQLGQAMVAEASPTVDSFRPGFDVALPFLPEAHPLRGGAPGQLRQHSPQPGVALLALEEERGGWRTADTGSSACPWDGRCEQDPGPGQTQRQETLPNATFCLISGHRPEAASRFLQALQVLAALQEMSPARVLALRQQTQFLWDAYFSSVEKVIHTTLEVIQDRIFGTSAHPSLLWNSPPGALLALSTFSTSPQDFPFYYLQQGMPWGWDNLKSPQLYPGLPQPHLESPTKTLSKP

SEQ ID NO: 5616 - DNA, 2361 bp, Homo sapiens
cggggcgcagcggctgacccgagacacgggagcgcttggcacgcggagccagagccggagctgcagccgcagcgggagccgggggagctcaggggccgcaggagccgggccggagtgagcgcacctcgcggggccctcggggcaggtgggtgagcgccacccggagtcccgcgcgcaactttcagggcgcactcggcggggcggctgcgcggctgccgggactcggcgcgggactgcatggaggccaaggagaagcagcatctgttggacgccaggccggcaatccggtcatacacgggatctctgtggcaggaaggggctggctggattcctctgccccgacctggcctggacttgcaggccattgagctggctgcccagagcaaccatcactgccatgctcagaagggtcctgacagtcactgtgaccccaagaaggggaaggcccagcgccagctgtatgtagcctctgccatctgcctgttgttcatgatcggagaagtcgttggtgggtacctggcacacagcttggctgtcatgactgacgcagcacacctgctcactgactttgccagcatgctcatcagcctcttctccctctggatgtcctcccggccagccaccaagaccatgaactttggctggcagagagctgagatcttgggagccctggtctctgtactgtccatctgggtcgtgacgggggtactggtgtacctggctgtggagcggctgatctctggggactatgaaattgacggggggaccatgctgatcacgtcgggctgcgctgtggctgtgaacatcataatggggttgacccttcaccagtctggccatgggcacagccacggcaccaccaaccagcaggaggagaaccccagcgtccgagctgccttcatccatgtgatcggcgactttatgcagagcatgggtgtcctagtggcagcctatattttatacttcaagccagaatacaagtatgtagaccccatcttccaggaatggagctcttcccagcctcccatctgactacagccagggtggggactcagcgggtataaagctagtgtgaccctgctcttccagctcctgggccagctctggaagggctgtatttgggcctaatcctcagcaaatgttctaccactcgcaggggcaaaggtggtgagccacgggacgtccaaggggaggctggccccagcgcgcccatactgcctgcctcatgccccattctcagcctggctggcctttgcctttatgaatctgagcccctccatctgcctatagcaataggcacgggggtgaggaccctcacactctcatttgagcctccctgaggcagggagccaggaggcacctgaggcctatctgtgccttagtcacttcagctatgagccaaatgttccctttcctggaggggagaggcttcttactaggtaagagacaggtttcctctttccttatttcctcagctgtgccaacacaaaaaacaactttggcacaggtggtgggcagggggtagagagatttcagcttgggttctgcactaacagcctccaagccccctggcacttctgttgccctgagagtgtcccaggggattcagagtctccagaaagatatggctgggccaactctgttgcctacctggcctgacccagtcggagcctgacatggtggagggaaagggagacaagtggggctgcactcggtccagaggccagctaggagggaaaccgcagcttcctggggcttgtgtgtgaagattcctgacttaggggtggcttttgtttacaagatgcaagaggggaaacctgtccccgactcatcgagacaacatgcccagttatcagggagtcctgtgtcacaaggtctgtctctgccattgtaagcaagtgccttgggcgagctggcctctgccccacagtctcatctgtacaccgacagggttgatgcctccctcacagggttgagaacaagagccagttggccaagtacctgtggttgttgaagattggttacttttaccatcctggggacagggaactctgtggcccgaggctgcctcactgaggagtcaggtgggcttcccagcctccccaggggcagtgctgagtttgtcttgactgttctggcccaaggtgggaggaggtgggtttggtcacttgcctcccactttaaatctctgtctttccatctgtgaaatgacctctttgtgccttcccagcactgtcatcctgatcgcctgtgttctaggtaggtgggtccttcagcccctccaggtctgtgaaaagtctgtggaaagcactggcctggagaggggtggggggttgctggtgggtgctccattccaccaca

SEQ ID NO: 5617 - protein, 264 aa, Homo sapiens
MEAKEKQHLLDARPAIRSYTGSLWQEGAGWIPLPRPGLDLQAIELAAQSNHHCHAQKGPDSHCDPKKGKAQRQLYVASAICLLFMIGEVVGGYLAHSLAVMTDAAHLLTDFASMLISLFSLWMSSRPATKTMNFGWQRAEILGALVSVLSIWVVTGVLVYLAVERLISGDYEIDGGTMLITSGCAVAVNIIMGLTLHQSGHGHSHGTTNQQEENPSVRAAFIHVIGDFMQSMGVLVAAYILYFKPEYKYVDPIFQEWSSSQPPI

SEQ ID NO: 5618 - DNA, 1999 bp, Homo sapiens
cggggcgcagcggctgacccgagacacgggagcgcttggcacgcggagccagagccggagctgcagccgcagcgggagccgggggagctcaggggccgcaggagccgggccggagtgagcgcacctcgcggggccctcggggcaggtgggtgagcgccacccggagtcccgcgcgcaactttcagggcgcactcggcggggcggctgcgcggctgccgggactcggcgcgggactgcatggaggccaaggagaagcagcatctgttggacgccaggccggcaatccggtcatacacgggatctctgtggcaggaaggggctggctggattcctctgccccgacctggcctggacttgcaggccattgagctggctgcccagagcaaccatcactgccatgctcagaagggtcctgacagtcactgtgaccccaagaaggggaaggcccagcgccagctgtatgtagcctctgccatctgcctgttgttcatgatcggagaagtcgttggtgggtacctggcacacagcttggctgtcatgactgacgcagcacacctgctcactgactttgccagcatgctcatcagcctcttctccctctggatgtcctcccggccagccaccaagaccatgaactttggctggcagagagctgagatcttgggagccctggtctctgtactgtccatctgggtcgtgacgggggtactggtgtacctggctgtggagcggctgatctctggggactatgaaattgacggggggaccatgctgatcacgtcgggctgcgctgtggctgtgaacatcataatggggttgacccttcaccagtctggccatgggcacagccacggcaccaccaaccagcaggaggagaaccccagcgtccgagctgccttcatccatgtgatcggcgactttatgcagagcatgggtgtcctagtggcagcctatattttatacttcaagccagaatacaagtatgtagaccccatcttccaggaatggagctcttcccagcctcccatctgactacagccagggtggggactcagcgggtataaagctagtgtgaccctgctcttccagctcctgggccagctctggaagggctgtatttgggcctaatcctcagcaaatgttctaccactcgcaggggcaaaggtggtgagccacgggacgtccaaggggaggctggccccagcgcgcccatactgcctgcctcatgccccattctcagcctggctggcctttgcctttatgaatctgagcccctccatctgcctatagcaataggcacgggggtgaggaccctcacactctcatttgagcctccctgaggcagggagccaggaggcacctgaggcctatctgtgccttagtcacttcagctatgagccaaatgttccctttcctggaggggagaggcttcttactaggtaagagacaggtttcctctttccttatttcctcagctgtgccaacacaaaaaacaactttggcacaggtggtgggcagggggtagagagatttcagcttgggttctgcactaacagcctccaagccccctggcacttctgttgccctgagagtgtcccaggggattcagagtctccagaaagatatggctgggccaactctgttgcctacctggcctgacccagtcggagcctgacatggtggagggaaagggagacaagtggggctgcactcggtccagaggccagctaggagggaaaccgcagcttcctggggcttgtgtgtgaagattcctgacttaggggtggcttttgtttacaagatgcaagaggggaaacctgtccccgactcatcgagacaacatgcccagttatcagggagtcctgtgtcacaaggtctgtctctgccattgtaagcaagtgccttgggcgagctggcctctgccccacagtctcatctgtacaccgacagggttgatgcctccctcacagggttgagaacaagagccagttggccaagt

SEQ ID NO: 5619 - protein, 264 aa, Homo sapiens; identical to SEQ ID NO: 5617

SEQ ID NO: 5620 - DNA, 2493 bp, Homo sapiens
cggggcgcagcggctgacccgagacacgggagcgcttggcacgcggagccagagccggagctgcagccgcagcgggagccgggggagctcaggggccgcaggagccgggccggagtgagcgcacctcgcggggccctcggggcaggtgggtgagcgccacccggagtcccgcgcgcaactttcagggcgcactcggcggggcggctgcgcggctgccgggactcggcgcgggactgcatggaggccaaggagaagcagcatctgttggacgccaggccggcaatccggtcatacacgggatctctgtggcaggaaggggctggctggattcctctgccccgacctggcctggacttgcaggccattgagctggctgcccagagcaaccatcactgccatgctcagaagggtcctgacagtcactgtgaccccaagaaggggaaggcccagcgccagctgtatgtagcctctgccatctgcctgttgttcatgatcggagaagtcgttggtgggtacctggcacacagcttggctgtcatgactgacgcagcacacctgctcactgactttgccagcatgctcatcagcctcttctccctctggatgtcctcccggccagccaccaagaccatgaactttggctggcagagagctgagatcttgggagccctggtctctgtactgtccatctgggtcgtgacgggggtactggtgtacctggctgtggagcggctgatctctggggactatgaaattgacggggggaccatgctgatcacgtcgggctgcgctgtggctgtgaacatcataatggggttgacccttcaccagtctggccatgggcacagccacggcaccaccaaccagcaggaggagaaccccagcgtccgagctgccttcatccatgtgatcggcgactttatgcagagcatgggtgtcctagtggcagcctatattttatacttcaagccagaatacaagtatgtagaccccatctgcaccttcgtcttctccatcctggtcctggggacaaccttgaccatcctgagagatgtgatcctggtgttgatggaagggacccccaagggcgttgacttcacagctgttcgtgatctgctgctgtcggtggagggggtagaagccctgcacagcctgcatatctgggcactgacggtggcccagcctgttctgtctgtccacatcgccattgctcagaatacagacgcccaggctgtgctgaagacagccagcagccgcctccaagggaagttccacttccacaccgtgaccatccagatcgaggactactcggaggacatgaaggactgtcaggcatgccagggcccctcagactgactgctcagccaggcaccaactggggcatgaacaggacctgcaggtggctggactgagtgtcccccaggcccagccaggactttgcctaccccagctgtgttgtaaaccaggtccccctcctgacctctgccccactccaggaatggagctcttcccagcctcccatctgactacagccagggtggggactcagcgggtataaagctagtgtgaccctgctcttccagctcctgggccagctctggaagggctgtatttgggcctaatcctcagcaaatgttctaccactcgcaggggcaaaggtggtgagccacgggacgtccaaggggaggctggccccagcgcgcccatactgcctgcctcatgccccattctcagcctggctggcctttgcctttatgaatctgagcccctccatctgcctatagcaataggcacgggggtgaggaccctcacactctcatttgagcctccctgaggcagggagccaggaggcacctgaggcctatctgtgccttagtcacttcagctatgagccaaatgttccctttcctggaggggagaggcttcttactaggtaagagacaggtttcctctttccttatttcctcagctgtgccaacacaaaaaacaactttggcacaggtggtgggcagggggtagagagatttcagcttgggttctgcactaacagcctccaagccccctggcacttctgttgccctgagagtgtcccaggggattcagagtctccagaaagatatggctgggccaactctgttgcctacctggcctgacccagtcggagcctgacatggtggagggaaagggagacaagtggggctgcactcggtccagaggccagctaggagggaaaccgcagcttcctggggcttgtgtgtgaagattcctgacttaggggtggcttttgtttacaagatgcaagaggggaaacctgtccccgactcatcgagacaacatgcccagttatcagggagtcctgtgtcacaaggtctgtctctgccattgtaagcaagtgccttgggcgagctggcctctgccccacagtctcatctgtacaccgacagggttgatgcctccctcacagggttgagaacaagagccagttggccaagt

SEQ ID NO: 5621 - protein, 372 aa, Homo sapiens; identical to SEQ ID NO: 86

SEQ ID NO: 5622 - DNA, 1408 bp, Homo sapiens
gagacacgggagcgcttggcacgcggagccagagccggagctgcagccgcagcgggagccgggggagctcaggggccgcaggagccgggccggagtgagcgcacctcgcggggccctcggggcaggtgggtgagcgccacccggagtcccgcgcgcaactttcagggcgcactcggcggggcggctgcgcggctgccgggactcggcgcgggactgcatggaggccaaggagaagcagcatctgttggacgccaggccggcaatccggtcatacacgggatctctgtggcaggaaggggctggctggattcctctgccccgacctggcctggacttgcaggccattgagctggctgcccagagcaaccatcactgccatgctcagaagggtcctgacagtcactgtgaccccaagaaggggaaggcccagcgccagctgtatgtagcctctgccatctgcctgttgttcatgatcggagaagtcgttgagatcttgggagccctggtctctgtactgtccatctgggtcgtgacgggggtactggtgtacctggctgtggagcggctgatctctggggactatgaaattgacggggggaccatgctgatcacgtcgggctgcgctgtggctgtgaacatcataatggggttgacccttcaccagtctggccatgggcacagccacggcaccaccaaccagcaggaggagaaccccagcgtccgagctgccttcatccatgtgatcggcgactttatgcagagcatgggtgtcctagtggcagcctatattttatacttcaagccagaatacaagtatgtagaccccatctgcaccttcgtcttctccatcctggtcctggggacaaccttgaccatcctgagagatgtgatcctggtgttgatggaagggacccccaagggcgttgacttcacagctgttcgtgatctgctgctgtcggtggagggggtagaagccctgcacagcctgcatatctgggcactgacggtggcccagcctgttctgtctgtccacatcgccattgctcagaatacagacgcccaggctgtgctgaagacagccagcagccgcctccaagggaagttccacttccacaccgtgaccatccagatcgaggactactcggaggacatgaaggactgtcaggcatgccagggcccctcagactgactgctcagccaggcaccaactggggcatgaacaggacctgcaggtggctggactgagtgtcccccaggcccagccaggactttgcctaccccagctgtgttgtaaaccaggtccccctcctgacctctgccccactccaggaatggagctcttcccagcctcccatctgactacagccagggtggggactcagcgggtataaagctagtgtgaccctgc

SEQ ID NO: 5623 - protein, 323 aa, Homo sapiens; identical to SEQ ID NO: 88

SEQ ID NO: 5624 - DNA, 516 bp, Homo sapiens
ccagggtcttcacctcctctggcctctgaagggccccgggccccaggactcccattcccctatcatccccgtctgaatacaggcttctcacctctggtttgtcgagctcggagcgtccttagctatttttcccagtggacacaaggcctcacagagaaatgggactagagtcggccctccttacctcatctcagagctgagcgttccctctcttcccctctggccaggtcatacacgggatctctgtggcaggaaggggctggctggattcctctgccccgacctggcctggacttgcaggccattgagctggctgcccagagcaaccatcactgccatgctcagaagggtcctgacagtcactgtgaccccaagaaggggaaggcccagcgccagctgtatgtagcctctgccatctgcctgttgttcatgatcggagaagtcgttggtgggtacctggcacacagcttggctgtcatgactgacgcagcacacctgctcactgactttgccagc

SEQ ID NO: 5625 - protein, 38 aa, Homo sapiens
PQEGEGPAPAVCSLCHLPVVHDRRSRWWVPGTQLGCHD

SEQ ID NO: 5626 - DNA, 1772 bp, Homo sapiens
gacagaattcgggcaccaggagaaggaagccaacaggatccgacccggtgttttgtgacaaaggcaagacccccaggtctacttagagcaaagttagtagaggaggcagctaggcgtggctctcattccttcccacagaatggattataagtcgagcctgatccaggatgggaatcccatggagaacttggagaagcagctgatctgccctatctgcctggagatgtttaccaagccagtggtcatcttgccgtgccagcacaacctgtgccggaagtgtgccaatgacatcttccaggctgcaaatccctactggaccagccggggcagctcagtgtccatgtctggaggccgtttccgctgccccacctgccgccacgaggtgatcatggatcgtcacggagtgtacggcctgcagaggaacctgctggtggagaacatcatcgacatctacaaacaggagtgctccagtcggccgctgcagaagggcagtcaccccatgtgcaaggagcacgaagatgagaaaatcaacatctactgtctcacgtgtgaggtgcccacctgctccatgtgcaaggtgtttgggatccacaaggcctgcgaggtggccccattgcagagtgtcttccagggacaaaagactgaactgaataactgtatctccatgctggtggcggggaatgaccgtgtgcagaccatcatcactcagctggaggattcccgtcgagtgaccaaggagaacagtcaccaggtaaaggaagagctgagccagaagtttgacacgttgtatgccatcctggatgagaagaaaagtgagttgctgcagcggatcacgcaggagcaggagaaaaagcttagcttcatcgaggccctcatccagcagtaccaggagcagctggacaagtccacaaagctggtggaaactgccatccagtccctggacgagcctgggggagccaccttcctcttgactgccaagcaactcatcaaaagcattgtggaagcttccaagggctgccagctggggaagacagagcagggctttgagaacatggacttctttactttggatttagagcacatagcagacgccctgagagccattgactttgggacagatgaggaagaggaagaattcattgaagaagaagatcaggaagaggaagagtccacagaagggaaggaagaaggacaccagtaaggagctggatgaatgagaggcccccagatgcagagagactggagagggtggggaggggcccagcggccttggtgacaggcccagggtgggaggggtcggggcccctggaggggcaatggggaggtgatgtcttctctctgctcagagagcagggactagggtaggaccctcaccgctgcgtccagcagacactgaaccagaattggaaacgtgcttgaaacaatcacacaggacacttttctacattggtgcaaaatggaatattttgtacatttttaaaatgtgatttttgtatatacttgtatatgtatgccaatttggtgctttttgtaaaggaacttttgtataataatgcctggtcgttgggtgacctgcgattgtcagaaagaggggaaggaagccaggttgatacagctgcccacttcctttcctgagcaggaggatggggtagcactcacagggacgatgtgctgtatttcagtgcctatcccagacatacggggtggtaactgagtttgtgttatatgttgttttaataaatgcacaatgctctcttcctgttcttcaaagg

SEQ ID NO: 5627 - protein, 353 aa, Homo sapiens; identical to SEQ ID NO: 90

SEQ ID NO: 5628 - DNA, 1118 bp, Homo sapiens
gcacccagccccgcgccgccgccgccgccgccgtctccgcaactgcaccgcccgcaaacatggctcagtgactcggagaaaagctgcagtctccctcccggcggggcggacgccaggcctccttggtcgggccgcacctccccgcaggcccgccaaagagcaccgcgccccgcaggcacccgagacccgcgcggaagatgcaccgggcgttccaccccagcgagccccgcaccccagcccgcagctcgaaacctcgaccttgaagatggtgagtagccagccaaagtacgatctaatacgggaggtaggccgaggtagttacggtgttgtgtatgaagcagtcatcagaaagacctctgcacgggtggcagtgaagaaaattcgatgtcacgcacctgaaaatgttgaactagcccttcgtgagttctgggcactaagcagtatcaagagccaacatccaaatgtgattcacttggaggaatgcatcctacaaaaggatgggatggtgcaaaagatgtcccacggctctaattcttccctttatttacagcttgtagaaacttcattaaaaggagaaattgcctttgatcccagaagcgcctattatttgtggtttgtgatggatttttgtgacggaggagatatgaatgagtatctgttgtccaggaaacccaatcgtaaaactaacaccagcttcatgcttcagctgagcagtgccctggctttcttgcataaaaaccagatcatccaccgagatcttaagcctgataacatcctgatttctcaaaccaggttggataccagtgacttggaacctaccctcaaagtggctgattttggtctaagtaaagtttgttcagcctctgggcagaacccagaagaacctgtcagtgtaaacaagtgtttcctttccacagcatgtggaacagatttttacatggctcctgaagtttgggaaggacattacacagcaaaagctgacatctttgctctggggattatcatctgggcaatgctggaaaggatcacattcatagacacagagacaaagaaggaactcttggggagttatgtaaaacaaggaactgagattgtgcctgttggggaggcacttctgg

SEQ ID NO: 5629 - protein, 283 aa, Homo sapiens
MVSSQPKYDLIREVGRGSYGVVYEAVIRKTSARVAVKKIRCHAPENVELALREFWALSSIKSQHPNVIHLEECILQKDGMVQKMSHGSNSSLYLQLVETSLKGEIAFDPRSAYYLWFVMDFCDGGDMNEYLLSRKPNRKTNTSFMLQLSSALAFLHKNQIIHRDLKPDNILISQTRLDTSDLEPTLKVADFGLSKVCSASGQNPEEPVSVNKCFLSTACGTDFYMAPEVWEGHYTAKADIFALGIIIWAMLERITFIDTETKKELLGSYVKQGTEIVPVGEAL

SEQ ID NO: 5630 - DNA, 963 bp, Homo sapiens
tgactggaggcggcggcagcggaggcgcgagctgcccgataatggcggcctgcagagcccatgagagggagaagcggcagcgtctaccctgagaaacctcgaccttgaagatggtgagtagccagccaaagtacgatctaatacgggaggtaggccgaggtagttacggtgttgtgtatgaagcagtcatcagaaagacctctgcacgggtggcagtgaagaaaattcgatgtcacgcacctgaaaatgttgaactagcccttcgtgagttctgggcactaagcagtatcaagagccaacatccaaatgtgattcacttggaggaatgcatcctacaaaaggatgggatggtgcaaaagatgtcccacggctctaattcttccctttatttacagcttgtagaaacttcattaaaaggagaaattgcctttgatcccagaagcgcctattatttgtggtttgtgatggatttttgtgacggaggagatatgaatgagtatctgttgtccaggaaacccaatcgtaaaactaacaccagcttcatgcttcagctgagcagtgccctggctttcttgcataaaaaccagatcatccaccgagatcttaagcctgataacatcctgatttctcaaaccaggttggataccagtgacttggaacctaccctcaaagtggctgattttggtctaagtaaagtttgttcagcctctgggcagaacccagaagaacctgtcagtgtaaacaagtgtttcctttccacagcatgtggaacagatttttacatggctcctgaagtttgggaaggacattacacagcaaaagctgacatctttgctctggggattatcatctgggcaatgctggaaaggatcacattcatagacacagagacaaagaaggaactcttggggagttatgtaaaacaaggaactgagattgtgcctgttggggaggcacttctgg

SEQ ID NO: 5631 - protein, 283 aa, Homo sapiens; identical to SEQ ID NO: 5629

SEQ ID NO: 5632 - DNA, 4293 bp, Homo sapiens
ggaggcggcggcagcggaggcgcgagctgcccgataatggcggcctgcagagcccatgagagggagaagcggcagcgtctaccctgaggaaggtgctcttccccatggggactgtaccaggctggagaggacatggcactgcttcagagacacgaaccaccttgagtggatgtgattggcgatccccgtagagcaggaaagctcgtctgctgtgcagccggcgcagaggattctgtggcaggaaattagacactaggaaattcagtagcgatttgaaggaaacctcgaccttgaagatggtgagtagccagccaaagtacgatctaatacgggaggtaggccgaggtagttacggtgttgtgtatgaagcagtcatcagaaagacctctgcacgggtggcagtgaagaaaattcgatgtcacgcacctgaaaatgttgaactagcccttcgtgagttctgggcactaagcagtatcaagagccaacatccaaatgtgattcacttggaggaatgcatcctacaaaaggatgggatggtgcaaaagatgtcccacggctctaattcttccctttatttacagcttgtagaaacttcattaaaaggagaaattgcctttgatcccagaagcgcctattatttgtggtttgtgatggatttttgtgacggaggagatatgaatgagtatctgttgtccaggaaacccaatcgtaaaactaacaccagcttcatgcttcagctgagcagtgccctggctttcttgcataaaaaccagatcatccaccgagatcttaagcctgataacatcctgatttctcaaaccaggttggataccagtgacttggaacctaccctcaaagtggctgattttggtctaagtaaagtttgttcagcctctgggcagaacccagaagaacctgtcagtgtaaacaagtgtttcctttccacagcatgtggaacagatttttacatggctcctgaagtttgggaaggacattacacagcaaaagctgacatctttgctctggggattatcatctgggcaatgctggaaaggatcacattcatagacacagagacaaagaaggaactcttggggagttatgtaaaacaaggaactgagattgtgcctgttggggaggcacttctggaaaatcccaaaatggaacttctcattcctgtgaagaaaaaatctatgaatgggcgaatgaaacaactgattaaggaaatgctggctgcaaaccctcaggatcgtccagatgcttttgaactagaactcagattagtacaaattgcatttaaagatagcagctgggaaacgtgacacatattatttgcaaataccatggatgatatgctgcttctgtttaacagtgatgcaacattatgtggctgaaaaagaatataaaaagctagactctaccctctaagggtttagattttttgtgggattttttttttcctcatttttcttaaatccaagttggccgttttattagtatgtttcaaatgtgtattaccaatgtgggtgtaaatttttaaaaaatgattattgatagaagtttggcaggaaaattctttaagagctaacaagagaagagagtccagttttctggaaatatgtctttaagtattttagacattcctcgtcagtattaggaatttccatgggaaaagaggtttgcatgctggtaatgcaacctttgaaactttgtaaaggaaacatatatgtatatatttatgtatatgtaagtatgtgaatgtgcgcattttgcattccatatgaaaaaaatgccacgtctgtttaaattatttgatgtaggtttgggtttttgagatttgctggtgaagtcagtgacgaaaaataaaccttcccttatcttcctactctgcccctccccctaatgaaatcatattaagttgtttttttttttttttgtaatatacagctttttttttaaggcatcattttcgagggtctaaaattatctggtaaaacaaatgaaattaagtgatccaaagctgctgaagtatgtttgaactctccagtgccctatagctgcaagagttgaattagtcatgcagtcatatggcagcaggttggtgattcagtccgaccttctttaggtaaccgagcatttatttaaccaactataccactgcattgggacgtctgcacttgagcttctacaatctgatataaatctgaatacaggattattctgtttgaaaactttgctatgtgtgaactgtaatacttgatacatttttggtttgaagactttgtctaagcctcattatactgaagttgaagaaaccaaatgagctccaccctcactttgcctgccctgatatgatcacttgttgagtcactggagttcctttcattttggcactgatgctgttttctcttgtctgatttgaaacagtactggtaataatatggttgttgaaaatgtgatcacctttatctaaagtgggagaagatacatacacagtatggcaaatggataaaatattgtggcatcaactacttttaaagtagaaaagctatccattttatacaatcactgatacagtctatgtcaaaaaaccaacagaccattattcctcttgaagttagtttgattttatctttgtatggttgtctacaatttgttttcctgtaaatgcagatagttaaaatctaaaggatagaatgctttcctaaaacagaacattagcctttaaggttaaatagactttacattgtatctaagttaatctttataaagcactagaatttttggtcaaaagtcaaaatagtattagaatattgaaattattgatagctttcataatctcagcttttttgaacttccacaatttttggaatatgtcataatttttttccctgtttcaaatgtgttcagaggaaatagaatgtaaaacatcacaaaaaaaattgcagtacataaaatttctggactatgttagttacttgatctggaagtttaaaatttggactaaaaggttttattgaaataaagcctcttaaaatgaaaaatcatatacttttaacatcacttttaagctaataaatataagaattcttttggaaattagaggtggaaacacactggaacctcatgataattgaccctctggatcaccagattagtttaatttaacagatatgtccaaggaagttgagctatagggagtaagaaaaagcatcatgataacgtctagtcaataacatggcacttcagcagagattcatagatgatggtatgcccatgcatcatttgctcttcaaatatctatgtgcttggagccacagtttcctaagcgcatagtttttggtcctgcctcatgtaaaatagttaatgattatcatttacttggaaagattttacctgtgaagtgaaattctttcattgggggtaagggtatgaggtgatcaggaagtttcttctggaattttatcaagtccttgtattctaaaatagccaagcaaaatgatagtaaattctttgtctttgttctttcagtcagaggtatttattaagtacctactgtgtgctcagcactaaaggtttgttgataaaatgacaattaaaaaatggcatttagccaaaggccttttcagccaggagtaagaaaagatggttagtgatatttggaaatacctggatatttgctagaggaaaaatgaaagcaaaacttcgtacacagtgccttgcccataataggtactcaataagcaattgttcctcatagagtcttttgccatgatttatggtgttttttgaaatttgtcttaattgaaaaaagaccaaatatttcaaatgagcttataggcagctgtggccagtgaaaatatggggttgtacagttagttcctagaatgttattttgcactagttgtcacttagaaagatggggttcctgtagattttttggtgctaagggatactttgtcattatgatgaagtaagtgttaagtgtcagataaatagcacacagaatagttctttctgctggtctgttttttctcttcgttgttgttgtttttaattgtaaattgttatcaatcaaactattgtagcagctacaaagtaattcaccagcatgacaaaatggtcaaaaaataagtcatcagcacttaagaaatgaaagcaacttttgaaattttctgttaaaattgtcaaatatattttatgaagaatttataaaaggggaaaatgattgtaatttattgttcatgacttttttttttaaataaagtgagtttcaacaaaaaaaaaactgaa

SEQ ID NO: 5633 - protein, 341 aa, Homo sapiens; identical to SEQ ID NO: 92

SEQ ID NO: 5634 - DNA, 1526 bp, Homo sapiens
gagtgaggtttggctgccaccaaagttacttctagtccttgctgtccactcctgccctcagtctggacctgcccaaggacccctgcaattaggcctcccatgcagaggtcagtgagagcccaagccaattgctctaggccccgtggctggctacttatggggcactgtcctgaccagctctgctaagatgctcctggcccctccctccaccccgtccagaggacggacccccagcgccgtggagaggctggaagccgacaaagccaagtatgtcaagacgcaccaggtgatagctaggcgacaggagccagccctgcgtgggagtcctgggccgctcacgccgcacccctgcaacgagctggggccccctgcatcgcccaggacgcccaggccggtccgccggggaagcggcaggcggctgccgaggcctgattccctcatcttctaccgccagaagcgggactgcaaggcttcggtgaacaaagagaacgccaagggccagggtctggtgcggcgcctctttctgggtgccccgcgggacgctgccccgagcagcccggcctccacagagcgacctgcggcttcagggggttgggctgcgccccaggatgccccggaagcggcgggaaagcgggcgctgtgtcccacgtgctcgctgcccctgtcggagaaggagcgcttcttcaactactgcggcctggagcgcgcgctggtggaggtgctgggcgcagagcgcttctccccgcagagctggggagccgacgccagcccgcaggccggaacttcgccgccgcccggctccggggacgccagcgactggacatccagcgacaggggcgtggacagcccgggcggcgcgggcggcggcggcggctcggaggcagcgggctcggcgcgggaccggcgccccccggtgtcggtggtggagcgcaacgcgcgcgtcatccagtggctgtacggctgccagcgcgcccgcggaccgccgcgcgagtccgaggtgtgaccgccgcggctccggactggccccgggactggccccgggcacggaaaaggacacccctcttctggcgcgctgggtgcctttgcgtaagcccttccttctggaactcagtttcgcgtctgaaccttggggaggtggaacaagttgctgccgaaggcccttccctgctcccgcggcgaagggggagggagaggcctcttggtccctgtggagacccggtctggggagtcacgattggggtgggagatgagcaaacctgctgaataaagttaaaacgttatttaaatggggagctgaggaaggagcaaacgggttttcgcggttaaacccgtgggttttggaatgtgtgttcccggctgtgtgatcctgggcaagaacttgacctccctggacgcagcggcacccctcggttattaaggagggaggagtaggggatagaagtatttcaaaatagttgtaatgcgcatggcaaagtgcccagcatatagaaagtgctcaataaacgataactgctgtgacttctacc

SEQ ID NO: 5635 - protein, 271 aa, Homo sapiens
MLLAPPSTPSRGRTPSAVERLEADKAKYVKTHQVIARRQEPALRGSPGPLTPHPCNELGPPASPRTPRPVRRGSGRRLPRPDSLIFYRQKRDCKASVNKENAKGQGLVRRLFLGAPRDAAPSSPASTERPAASGGWAAPQDAPEAAGKRALCPTCSLPLSEKERFFNYCGLERALVEVLGAERFSPQSWGADASPQAGTSPPPGSGDASDWTSSDRGVDSPGGAGGGGGSEAAGSARDRRPPVSVVERNARVIQWLYGCQRARGPPRESEV

SEQ ID NO: 5636 - DNA, 512 bp, Homo sapiens
cgtctcaaaaaataaaaataaaaataaaaaaagaaaagaaggaaacctttcctgccagccggcaggctcctgccactgcctccctttcctgcaaggacacacaagttcgcctattttcatcacaggttcgcacctccaagcctgcatccttcatgcacctccttcctttgcctgggttgccgttccttttctctctgttcttccttctcggagataacgtatattctcctccaggaagccgtcctgaatgcccccagtcagcctcacctgctctgagctcccaagtacagtcctatttttgggcctcaatttgtcaccttttgtgggacccgctggtactctgggttctctagttaatctttgacctttttcctagtacagggacggcgcacatagtagggccacaggcacagtttgttgaattaaatgaggctggagagggcgatggacgcagtcctctggagctctccaacttcctggaaagttgtaccttaaataaaaaacccatcctg

SEQ ID NO: 5637 - protein, 66 aa, Homo sapiens
MHLLPLPGLPFLFSLFFLLGDNVYSPPGSRPECPQSASPALSSQVQSYFWASICHLLWDPLVLWVL

SEQ ID NO: 5638 - DNA, 1300 bp, Homo sapiens
caactgacccctgaggcacaccctctgtgcacctccagatgcaggtagctggtgagctgaaggcagagccccggagtctgctggcaggagttgtggctacagtgctagctgtcctcggcctgggtggctcctgctatgccgtctggaagatggtggggcagcggcgggtgccacgggccccgtaacgaagaagagagactctcacttggatgctggggggctcgacgctcagctgcttcagcctgggagaaagaaaaacaggagttgggagctgaccaggtgagagccctatctgctgagcacccatccatcaatcctctccttactccttcataccttttcttgtggtctttggatcggaagtgggtcttcaggttggtggaatcgatgaagtacctcctgtaggaatggaagtgagaaggagagtgaggaggtgatagtctcccaagtgcacctatctccctagccctagcttgtccctgacgccaggatccgggtctgagaaacgggaggcgggcggacccacgggtcccaagagagaagactctgcgctgcctggggcttcaacttcacatctcccggccggtaccgcggaccctcctccgccccaggccgggctcgtccgggactcacgcgcaggccagacagcggtgcagaccgccccctggcaggtcggggtcgaactcggcgtttgggtcgggctggggtcgtgcggatccctgaggccgcagctcgcggtgaatctcatccaagtccggccgccgccgcttcgccttcatctgccgggctagagagtgcgctcggtgcgcgcctgtccggcgggagcgacccatggccagaaacagcccggccggccaaggggccaggagcagggcagggagcacacgtgtgagcacttccgggccgatcagctacgtcaggccacgccggggggctaggcaggctcggccggaccgcctctgatgacgtcactctcggccagcggctcgagcgccgccaggcggccgtcgacgtcagtgaccgagctcaggacgggctcccagaagtgtgcccactgaagggcatggccccgcgggccctcgctggggaggcgcggggtggtgcgtgcgcctgggggtttcggggccgtcttgctgccctgctcttcctggcctggtccaaccagtatcagtgccaacctgtactcctgtcatcccttcctgtttcccagaccttggactccgcggtgggggtgggatgctttatctctggaaagcactgataaatgtctgtgtcatgaataaattagtaaatgactgag

SEQ ID NO: 5639 - protein, 89 aa, Homo sapiens
MPSGRWWGSGGCHGPRNEEERLSLGCWGARRSAASAWEKEKQELGADQVRALSAEHPSINPLLTPSYLFLWSLDRKWVFRLVESMKYLL

SEQ ID NO: 5640 - DNA, 1124 bp, Homo sapiens
caccatgcgatttcgacgcttgacccctggttacttccgggtgttacagatgcaggtagctggtgagctgaaggcagagccccggagtctgctggcaggagttgtggctacagtgctagctgtcctcggcctgggtggctcctgctatgccgtctggaagatggtggggcagcggcgggtgccacgggccccgtaacgaagaagagagactctcacttggatgctggggggctcgacgctcagctgcttcagcctgggagaaagaaaaacaggagttgggagctgaccagccctagcttgtccctgacgccaggatccgggtctgagaaacgggaggcgggcggacccacgggtcccaagagagaagactctgcgctgcctggggcttcaacttcacatctcccggccggtaccgcggaccctcctccgccccaggccgggctcgtccgggactcacgcgcaggccagacagcggtgcagaccgccccctggcaggtcggggtcgaactcggcgtttgggtcgggctggggtcgtgcggatccctgaggccgcagctcgcggtgaatctcatccaagtccggccgccgccgcttcgccttcatctgccgggctagagagtgcgctcggtgcgcgcctgtccggcgggagcgacccatggccagaaacagcccggccggccaaggggccaggagcagggcagggagcacacgtgtgagcacttccgggccgatcagctacgtcaggccacgccggggggctaggcaggctcggccggaccgcctctgatgacgtcactctcggccagcggctcgagcgccgccaggcggccgtcgacgtcagtgaccgagctcaggacgggctcccagaagtgtgcccactgaagggcatggccccgcgggccctcgctggggaggcgcggggtggtgcgtgcgcctgggggtttcggggccgtcttgctgccctgctcttcctggcctggtccaaccagtatcagtgccaacctgtactcctgtcatcccttcctgtttcccagaccttggactccgcggtgggggtgggatgctttatctctggaaagcactgataaatgtctgtgtcatgaataaattagtaaatgactgag

SEQ ID NO: 5641 - protein, 63 aa, Homo sapiens
MRFRRLTPGYFRVLQMQVAGELKAEPRSLLAGVVATVLAVLGLGGSCYAVWKMVGQRRVPRAP

SEQ ID NO: 5642 - DNA, 1467 bp, Homo sapiens
ggcaggcgcgggtgagcatcctctgagagcttgggtcttgcgtatgtggaaggtcagagacccctctaccctagtttccacttcttggtgtcatgaagaccactggtcttcacgtccgctcccaccctacaggccgccagggagaccagtgccgcccaccatgcgatttcgacgcttgacccctggttacttccgggtgttacagatgcaggtagctggtgagctgaaggcagagccccggagtctgctggcaggagttgtggctacagtgctagctgtcctcggcctgggtggctcctgctatgccgtctggaagatggtggggcagcggcgggtgccacgggccccgtaacgaagaagagagactctcacttggatgctggggggctcgacgctcagctgcttcagcctgggagaaagaaaaacaggagttgggagctgaccaggtgagagccctatctgctgagcacccatccatcaatcctctccttactccttcataccttttcttgtggtctttggatcggaagtgggtcttcaggttggtggaatcgatgaagtacctcctgtaggaatggaagtgagaaggagagtgaggaggtgatagtctcccaagtgcacctatctccctagccctagcttgtccctgacgccaggatccgggtctgagaaacgggaggcgggcggacccacgggtcccaagagagaagactctgcgctgcctggggcttcaacttcacatctcccggccggtaccgcggaccctcctccgccccaggccgggctcgtccgggactcacgcgcaggccagacagcggtgcagaccgccccctggcaggtcggggtcgaactcggcgtttgggtcgggctggggtcgtgcggatccctgaggccgcagctcgcggtgaatctcatccaagtccggccgccgccgcttcgccttcatctgccgggctagagagtgcgctcggtgcgcgcctgtccggcgggagcgacccatggccagaaacagcccggccggccaaggggccaggagcagggcagggagcacacgtgtgagcacttccgggccgatcagctacgtcaggccacgccggggggctaggcaggctcggccggaccgcctctgatgacgtcactctcggccagcggctcgagcgccgccaggcggccgtcgacgtcagtgaccgagctcaggacgggctcccagaagtgtgcccactgaagggcatggccccgcgggccctcgctggggaggcgcggggtggtgcgtgcgcctgggggtttcggggccgtcttgctgccctgctcttcctggcctggtccaaccagtatcagtgccaacctgtactcctgtcatcccttcctgtttcccagaccttggactccgcggtgggggtgggatgctttatctctggaaagcactgataaatgtctgtgtcatgaataaattagtaaatgactgag

SEQ ID NO: 5643 - protein, 102 aa, Homo sapiens
MWKVRDPSTLVSTSWCHEDHWSSRPLPPYRPPGRPVPPTMRFRRLTPGYFRVLQMQVAGELKAEPRSLLAGVVATVLAVLGLGGSCYAVWKMVGQRRVPRAP

SEQ ID NO: 5644 - DNA, 652 bp, Homo sapiens
gtggcctgacgtagctgatcggcccggaagtgctcacacgtgtgctccctgccctgctcctggccccttggccggccgggctgtttctggccatgggtcgctcccgccggacaggcgcgcaccgagcgcactctctagcccggcagatgaaggcgaagcggcggcggccggacttggatgagattcaccgcgagctgcggcctcagggatccgcacgaccccagcccgacccaaacgccgagttcgaccccgacctgccagggggcggtctgcaccgctgtctggcctgcgcgaggtacttcatcgattccaccaacctgaagacccacttccgatccaaagaccacaagaaaaggctgaagcagctgagcgtcgagccctacagtcaggaagaggcggagagggcagcgggtatgggatcctatgtgccccccaggcggctggcagtgcccacggaagtgtccactgaggtccctgagatggatacctctacctgacatggcctgaagatgcagggcagaggaattgcccatggacagtgacgcaaggactaggctgggagggagcgtgccaaccccttttgcctctgggtttggggagcggagggcctcttcttggtgccctgccccaaataaaggaactggacaaagag

SEQ ID NO: 5645 - protein, 134 aa, Homo sapiens
MGRSRRTGAHRAHSLARQMKAKRRRPDLDEIHRELRPQGSARPQPDPNAEFDPDLPGGGLHRCLACARYFIDSTNLKTHFRSKDHKKRLKQLSVEPYSQEEAERAAGMGSYVPPRRLAVPTEVSTEVPEMDTST

SEQ ID NO: 5646 - DNA, 674 bp, Homo sapiens
gtggcctgacgtagctgatcggcccggaagtgctcacacgtgtgctccctgccctgctcctggccccttggccggccgggctgtttctggccatgggtcgctcccgccggacaggcgcgcaccgagcgcactctctagcccggcagatgaaggcgaagcggcggcggccggacttggatgagattcaccgcgagctgcggcctcagggatccgcacgaccccagcccgacccaaacgccgagttcgaccccgacctgccagggggcggtctgcaccgctgtctggcctgcgcgaggtacttcatcgattccaccaacctgaagacccacttccgatccaaagaccacaagaaaagcgggtatgggatcctatgtgccccccaggcggctggcagtgcccacggaagtgtccactgaggtccctgagatggatacctctacctgacatggcctgaagatgcagggcagaggaattgcccatggacagtgacgcaaggactaggctgggagggagcgtgccaaccccttttgcctctgggtttggggagcggagggcctcttcttggtgccctgccccaaataaaggaactggacaaagagaacttgcctccaactctaacttccaggccgctgtctcaaactcctgccctggaagggcttctctactactttctg

SEQ ID NO: 5647 - protein, 107 aa, Homo sapiens
MGRSRRTGAHRAHSLARQMKAKRRRPDLDEIHRELRPQGSARPQPDPNAEFDPDLPGGGLHRCLACARYFIDSTNLKTHFRSKDHKKSGYGILCAPQAAGSAHGSVH

SEQ ID NO: 5648 - DNA, 1064 bp, Homo sapiens
gtggcctgacgtagctgatcggcccggaagtgctcacacgtgtgctccctgccctgctcctggccccttggccggccgggctgtttctggccatgggtcgctcccgccggacaggcgcgcaccgagcgcactctctagcccggcagatgaaggcgaagcggcggcggccggacttggatgagattcaccgcgagctgcggcctcagggatccgcacgaccccagcccgacccaaacgccgagttcgaccccgacctgccagggggcggtctgcaccgctgtctggcctgcgcgaggtacttcatcgattccaccaacctgaagacccacttccgatccaaagaccacaagaaaaggctgaagcagctgagcgtcgagccctacagtcaggaagaggcggagagggcagcgggtatgggatcctatgtgccccccaggcggctggcagtgcccacggaagtgtccactgaggtccctgagatggatacctctacctgacatggcctgaagatgcagggcagaggaattgcccatggacagtgacgcaaggactaggctgggagggagcgtgccaaccccttttgcctctgggtttggggagcggagggcctcttcttggtgccctgccccaaataaaggaactggacaaagagaacttgcctccaactctaacttccaggccgctgtctcaaactcctgccctggaagggcttctctactactttctgtacaccaggcctagggtgtctactccccacttggtctatctctgccttccctctgaggtcctagcatctgaactggagcacccagatggaggcctgatgcagtgtggggtggcgggagtgggatcagattactctgtcctgcttctgacagagactgatccccagaaaagaaggcttctgagattgcacccccctcccgagtcacctacccccagcatccaagtgagagtctctcttcttcgttacggggcccgtggcacccgccgctgccccaccatcttccagacggcatagcaggagccacccaggccgaggacagctagcactgtagccacaa

SEQ ID NO: 5649 - protein, 134 aa, Homo sapiens; identical to SEQ ID NO: 5645

SEQ ID NO: 5650 - DNA, 718 bp, Homo sapiens
agtgctcacacgtgtgctccctgccctgctcctggccccttggccggccgggctgtttctggccatgggtcgctcccgccggacaggcgcgcaccgagcgcactctctagcccggcagatgaaggcgaagcggcggcggccggacttggatgagattcaccgcgagctgcggcctcagggatccgcacgaccccagcccgacccaaacgccgagttcgaccccgacctgccagggggcggtctgcaccgctgtctggcctgcgcgaggtacttcatcgattccaccaacctgaagacccacttccgatccaaagaccacaagaaaaggtatgaaggagtaaggagaggattgatggatgggtgctcagcagatagggctctcacctggtcagctcccaactcctgtttttctttctcccaggctgaagcagctgagcgtcgagccctacagtcaggaagaggcggagagggcagcgggtatgggatcctatgtgccccccaggcggctggcagtgcccacggaagtgtccactgaggtccctgagatggatacctctacctgacatggcctgaagatgcagggcagaggaattgcccatggacagtgacgcaaggactaggctgggagggagcgtgccaaccccttttgcctctgggtttggggagcggagggcctcttcttggtgccctgccccaaataaaggaactggacaaagag

SEQ ID NO: 5651 - protein, 156 aa, Homo sapiens
MGRSRRTGAHRAHSLARQMKAKRRRPDLDEIHRELRPQGSARPQPDPNAEFDPDLPGGGLHRCLACARYFIDSTNLKTHFRSKDHKKRYEGVRRGLMDGCSADRALTWSAPNSCFSFSQAEAAERRALQSGRGGEGSGYGILCAPQAAGSAHGSVH

SEQ ID NO: 5652 - DNA, 793 bp, Homo sapiens
agtgctcacacgtgtgctccctgccctgctcctggccccttggccggccgggctgtttctggccatgggtcgctcccgccggacaggcgcgcaccgagcgcactctctagcccggcagatgaaggcgaagcggcggcggccggacttggatgagattcaccgcgagctgcggcctcagggatccgcacgaccccagcccgacccaaacgccgagttcgaccccgacctgccagggggcggtctgcaccgctgtctggcctgcgcgaggtacttcatcgattccaccaacctgaagacccacttccgatccaaagaccacaagaaaaggtatgaaggagtaaggagaggattgatggatgggtgctcagcagatagggctctcacctggtcagctcccaactcctgtttttctttctcccaggctgaagcagctgagcgtcgagccctacagtcaggaagaggcggagagggcagcgggtatgggatcctatgtgccccccaggcggctggcagtgcccacggaagtgtccactgaggtccctgagatggatacctctacctgacatggcctgaagatgcagggcagaggaattgcccatggacagtgacgcaaggactaggctgggagggagcgtgccaaccccttttgcctctgggtttggggagcggagggcctcttcttggtgccctgccccaaataaaggaactggacaaagagaacttgcctccaactctaacttccaggccgctgtctcaaactcctgccctggaagggcttctctactactttctg

SEQ ID NO: 5653 - protein, 156 aa, Homo sapiens; identical to SEQ ID NO: 5651

SEQ ID NO: 5654 - DNA, 2542 bp, Homo sapiens
ggagcggaaattccggcgacagcagggcaaaacaggagctgattcgagctggcagagctgggccatggaaccggtagagacctggacccccggaaaggtggcaacttggctgagaggtcttgacgactccctgcaggactatccctttgaggactggcagctgcctggcaagaacctgctccagctctgcccccaaagcctcgaggctctggctgtgcggtctctgggacaccaggagctcatcctgggcggggtggaacagctccaggccctgagctccaggctacagacagagaacctgcaaagcctgacagagggacttctgggggcaacccatgacttccagagcatagtccaaggctgcctgggggactgtgccaagacccctattgatgtcctctgtgcagctgtggagctgttgcatgaagctgacgccctcctcttctggctcagcaggtacctcttctcccacttaaatgatttctcagcatgccaggagatccgagacttgttggaggagctgagccaggtcttgcatgaggatggtccagcggctgagaaggagggcacagtcctgaggatctgcagccacgtggctgggatctgccacaacatcctggtctgctgccccaaggagctgctggaacagaaggccgtgctcgagcaggtgcagctggacagtccattgggcctagaaattcacaccaccagcaattgccagcactttgtgtcccaagtggacacccaggttcccactgactcccgactgcagatccagcctggagacgaggttgtccagatcaacgagcaggtggtggtgggatggccccgtaagaacatggtgagggaactgctgcgggagccagccggactcagcttagtgctgaagaagatcccgataccggagacccccccacagacgccccctcaggtcctggactccccgcaccagaggagcccatcactgtctctggccccactgtctcccagggccccatctgaagacgtctttgcctttgacctgtcttcaaaccccagtcccggacccagccctgcctggacagactctgcctcccttggccctgagcccctgcccatccccccggaacccccagccatactcccagcaggggtagcagggactccagggctccctgaatcccctgacaagagtcctgttggtcggaagaaatcaaaaggcctggcgacccggctgagccgccggcgggtgtcatgccgtgagctgggccggccggactgtgacggctggctcctgttgcgaaaggcaccgggcggcttcatgggcccgcgctggcgccgccgctggtttgtgctcaagggacacacgctctactggtaccgccagccccaggatgagaaggctgagggcctcatcaatgtctccaactatagtctggaaagtggacatgatcagaagaagaaatatgtgtttcagctcacccatgatgtgtacaaacccttcatcttcgctgctgataccctgacagatctgagcatgtgggtgcgtcatctcattacctgcatctccaagtaccagtctccaggccgggcccccccaccccgagaggaagactgctacagtgagaccgaagcagaggacccggacgatgaggctgggtcccactcagcctcgcccagccctgctcaagctgggagtcccctccatggagacacatcacctgcagccacccccacacagcgcagcccacggacctcctttggctctctgacagacagcagtgaagaggcactggaaggaatggtacgggggctgaggcagggtggcgtgtccctcctaggccagccacagcccctgacccaggaacagtggcggagctctttcatgcggcgcaaccgagaccctcagctcaatgagcgagtgcaccgtgtgcgggcgctacagagcacactcaaggcaaagctgcaggagctgcaggtcctagaagaagtgctgggtgaccctgagctgacaggagagaagttccgccagtggaaggagcagaaccgggagctgtactcagagggcctgggggcctggggagtggcacaggctgaaggcagctcccacatcttgacctctgactccacagaacagtccccccactccctgccctctgaccctgaagagcactcccatctctgccccctgacctcagagagcagcctccgacctcctgacctctgaccctggccagcactctagctcctgacctttgacccgagggccacctcaaccccagcttctgacgtgtccaggacagagcatccctggattctgttcagggtgggaagtagtactgctagtcatggtctcaccccgagctgacccctctgcctgggctttgtgccaccctctcccttgccaaagaagaaactctccccccaaatcctccaacctctggggccacagccctgcccctccagttccttggcagttctcccccaaaccaggtctgtacaggtgttctttattttacatgagggctactttccaaccaaataaagtcaatttttctaagaa

SEQ ID NO: 5655 - protein, 713 aa, Homo sapiens
MEPVETWTPGKVATWLRGLDDSLQDYPFEDWQLPGKNLLQLCPQSLEALAVRSLGHQELILGGVEQLQALSSRLQTENLQSLTEGLLGATHDFQSIVQGCLGDCAKTPIDVLCAAVELLHEADALLFWLSRYLFSHLNDFSACQEIRDLLEELSQVLHEDGPAAEKEGTVLRICSHVAGICHNILVCCPKELLEQKAVLEQVQLDSPLGLEIHTTSNCQHFVSQVDTQVPTDSRLQIQPGDEVVQINEQVVVGWPRKNMVRELLREPAGLSLVLKKIPIPETPPQTPPQVLDSPHQRSPSLSLAPLSPRAPSEDVFAFDLSSNPSPGPSPAWTDSASLGPEPLPIPPEPPAILPAGVAGTPGLPESPDKSPVGRKKSKGLATRLSRRRVSCRELGRPDCDGWLLLRKAPGGFMGPRWRRRWFVLKGHTLYWYRQPQDEKAEGLINVSNYSLESGHDQKKKYVFQLTHDVYKPFIFAADTLTDLSMWVRHLITCISKYQSPGRAPPPREEDCYSETEAEDPDDEAGSHSASPSPAQAGSPLHGDTSPAATPTQRSPRTSFGSLTDSSEEALEGMVRGLRQGGVSLLGQPQPLTQEQWRSSFMRRNRDPQLNERVHRVRALQSTLKAKLQELQVLEEVLGDPELTGEKFRQWKEQNRELYSEGLGAWGVAQAEGSSHILTSDSTEQSPHSLPSDPEEHSHLCPLTSESSLRPPDL

SEQ ID NO: 5656 - DNA, 581 bp, Homo sapiens
agggcaaaacaggagctgattcgagctggcagagctgggccatggaaccggtagagacctggacccccggaaaggtggcaacttggctgagaggtcttgacgactccctgcaggactatccctttgaggactggcagctgcctggcaagaacctgctccagctctgcccccaaagcctcgaggctctggctgtgcggtctctgggacaccaggagctcatcctgggcggggtggaacagctccaggccctgagctccaggctacagacagagaacctgcaaagcctgacagagggacttctgggggcaacccatgacttccagagcatagtccaaggctgcctgggggactgtgccaagacccctattgatgtcctctgtgcagctgtggagctgttgcatgaagctgacgccctcctcttctggctcagcaggtacccgggttggggtgacgagtgagggactattgtcatccttggcctccttcagggcgtgggagagaaaaacagatcttggctcttgttcagatatggtgagccaggcgtggtggcttaggtctgtaatcccagcactttgggaggc

SEQ ID NO: 5657 - protein, 138 aa, Homo sapiens
MEPVETWTPGKVATWLRGLDDSLQDYPFEDWQLPGKNLLQLCPQSLEALAVRSLGHQELILGGVEQLQALSSRLQTENLQSLTEGLLGATHDFQSIVQGCLGDCAKTPIDVLCAAVELLHEADALLFWLSRYPGWGDE

SEQ ID NO: 5658 - DNA, 1419 bp, Homo sapiens; identical to SEQ ID NO: 99

SEQ ID NO: 5659 - protein, 472 aa, Homo sapiens; identical to SEQ ID NO: 100

SEQ ID NO: 5660 - DNA, 1947 bp, Homo sapiens
atggagactgactacttaaaatgtgggtcctggcagcttcctagaggagaggaagattttgcgggtcagatgaatgaagtctggaccatcagcagcacagagaagggcacccagcggattttgctgctgctgttgctacttactggagatggcgccctcaacctgcctgaagcatacaacaccagctgctcctccaacctctccacaaacagcagctctaatgggtccactgagcagacaacttcaatacaaaaaactcaggaagagaaattaaacacaactatcagcacaacctccaagggtacactgctgccaaattccatcatgacttctacattgaaggaccagggagggatatcaagaaccacagctttatccagcacggcctcttcagttgagaccccaaaacagaatcaggaaactccaattataactccatcagcatcaaacaccacagtcaatgggacacaatcatcagtgtccattggctttcaggaatcagacacaatcacatccccaacagcactgaacacaccaggcagtgatgttcaatcatctgggtccatggcaaccactgtctctgggaagtcagctataactacatccccaacagcaaagagcacgccaggccatcatgttcaatcatccgggtccatggcaaccactgtctctgggaagtcagctataactacatccccaacagcactgaacaaaaccactggcataaaagaatcttcacccatgacagccagcgaagttatgcacactaccttgctaaacacaaccactctcgggacaactcttcttggaacaactacatctgagactcaggaaggaaaaactacagctgcatccttatccccaacaaccacctccatgataagcaagttgtctggaacacatcataacacagtctcacagacaccttcccatctggcagaatcaacctccagtgttgccactgctataatccagtcacatgagatgacagctgctcattccacaggccttctccccaggtcctcggaaacaacaaaatcctctgctgtaactggggccagtcaaacctcccctaaacacacccagagtagtggtcccagagttggagcctgtgctttggatgagtatgcaggtagcaggggagtttgtatgtgcaatgacagctactacttccacgcggaactgtccagggtgtcggtgagcctacactgctggccgcagaaaatcgaggtggtcctgagcagctgcatcctgcagactcgccgctggatgctgatgaaagatgccttctcaggatgctccagcatcagcaagatagaacagggtctccgtgtccaggtcttcctgttagagaagaaggagggtacctgtggacttcgcctctctaccaacagcagccacgccctgtactctctggaggtgcagcttctgcaggttctccctggcttcatcagcaatgactccacaatgctcagcttcagctgcacgtataccctggtggtgaatgtcagccagacccacccctaccaggtattctccttcccatatagcaccatccatgttctgggcactggggacaccatcatcatcttgggcatcttcacagaccttcagctcttaactctgcttgaaaacagaactgttcctcttggcatgcccttctacgtagtcctcaagacaataagcagtgatttgccctggtgctgccccgtcagcaaccggctgctccagggcctgcgggccaacggggcctctctggaggtgaccttggccttcaacctgatccgcttctcgaccagcgatacactgtacctgcacggccgagtgaccctgtgtgacacgcgggcaagacgcccatgccaaccagtgagtgggcagccccgggacctcctgcgcagccgccgcagccttgcctgcaaagcagttcctgccgggcaggctgggtag

SEQ ID NO: 5661 - protein, 648 aa, Homo sapiens [sequence omitted]

SEQ ID NO: 5662 - DNA, 1077 bp, Homo sapiens
agttcctgccgggcaggctgggtagccggactcccagctgcgccgtcttcacggaagcggtgctgatgcgggacctgggggactgcggtgctggggactggccagtcctaccgggggcggggcttgtggaagactgggcgggattttgaagacctaggtcttgtggatggtgaactcacttggggcggggagggaggtggggctaccctggggtcttgggcaaagtcctcgcctggccggcttcgctacccttgtgcttgcgttgcccacaagcttgtagtcagaagaactcgcctgggagggatcgctcctgggagatccgaacgcgggagggcctggagcgcggcggcagctggatagcattcgggcccatccgaataagcgctacttgagaggctgaggcagaaggatcgcttgagaccaggagtttgagggtgcagtgaactatgatggcgccaccacactccagcctgggagacagagtgagaccctgtctctaaaagaaaaaagaaaattcaagatacagagccagacaggagcctggatggccatctttcttctgatagcaataagctggatgctgggatagaagcctgatacctcctccaaccctagtccttggcctctagtttactcgcctgaggcaagggtagagtggaggaagatttagggaaagcaagtagtccgttttattgttacggaccagagaggttgggggtgcagatgaaaccaacatctggttggccgggcacggtggctcacacctgtaatcccagcactttgggaggccgaggcgggcggatcatgaagtcaggagatcgagaccatcctagctaacacggtgaaaccccgtctctactaaaaacacaaaaaatttgccgggcgtggtggcgggagcctgtagtctcagttactcaggaggctgagacaggagaatggcatgaacccgggaggcagaggttgcagtgagccgagatcgcgccactgcactccagcctgggtgacagagcgagactccatctcaaaaaaaataaataaataaaaataaaaaaaataaaaaataaaaaattcatttgc

SEQ ID NO: 5663 - protein, 37 aa, Homo sapiens
MKPTSGWPGTVAHTCNPSTLGGRGGRIMKSGDRDHPS

SEQ ID NO: 5664 - DNA, 3972 bp, Homo sapiens
gacgcgcgttctgtggcgcgcggcctggcgggcgtgcaacggccgttagaggagctgagggagggaaccaccgctcaccgcagacgtggtggctgcagtcagtcttcccgagtgagggatttcgccgcccgctttcaggcccgtttggcttaaataactgtgattgatggccatgcaggagaaatatccaactgaggggatctctcacgtcacttcaccgagttccgatgtgattcagaagggcagttccctggggactgaatggcagaccccagttatctcggagccctttcggagccgcttcagccgctgttcaagtgtagccgacagtggggacacagccattggtacatcatgctcagatattgcggaggatttttgcagctcaagtggcagtcctcctttccagcccatcaaaagccacgtaaccattccaacagcccatgtgatgccttctactttagggacctctcctgccaagccaaattctacacctgttggaccctcttcctctaaactccctttgtcagggttggctgaaagtgtgggaatgacaagaaatggagacctcggtgcaatgaaacattctccaggcctatctagagatctcatgtatttctctggtgctactggagaaaatggaattgagcagtcctggtttccagcagtgggccatgaaagacaagaagaggcgaggaagtttgatattcctagcatggaatctaccctcaatcagtcggcaatgatggagacactttattcagatcctcaccaccgagtccgcttccacaacccaagaaccagcacaagtaaggagttgtacagagtgttgcctgaggccaagaaggcaccgggcagcggggcagtgtttgagcggaatggaccacattctaatagcagtggggtcctccctttgggactccagcctgctcccgggctctccaagcctctgccctctcaggtgtggcagccgagtcctgacacttggcatccccgagagcaatcttgtgaactcagcacttgtcggcagcagctggaattgattcgtttacagatggagcaaatgcagcttcagaatggagccatctgccaccatcctgctgcttttggtccttcactgcccatcttagagccagcacagtggatcagcatcttgaacagtaatgaacaccttctgaaggaaaaagagcttctcattgacaagcagaggaaacacatctctcagctggagcagaaagtgcgagagagcgaactgcaagtccacagtgccctcttgggccgccctgccccctttggtgatgtctgcttgctgaggctacaggaattgcagcgagaaaacactttcttacgtgcacagtttgcacagaagacagaagccttgagcagagaaaagattgaccttgaaaagaaactctctgcttctgaagttgaagtccagctcatcagagagtcgctcaaagtggcgttgcagaagcattctgaggaagtgaagaaacaggaagaaagggtcaaaggtcgtgataaacatatcaataatttgaaaaagaaatgccagaaggaatcagagcagaaccgggagaagcagcagcgtattgagaccttggagcgctacctggctgacctgcccacactggaagaccatcagaagcagagccagcagcttaaggattctgagttgaagagcacagagctgcaggagaaagtgactgagctggagagtttgctggaggagacccaggcaatctgcagagagaaggagattcaactggaaagcctgaggcagagagaagcagaattctcctccgctggacatagcctgcaagataaacagtctgtggaggagaccagtggagaaggtccagaagtggaaatggagtcctggcagaagcgatacgattcgctccaaaagattgtggagaagcagcagcagaagatggatcagttgcgctcacaagtacagagcctagagcaggaagtggctcaagaagaaggaacaagccaggccctgagagaggaggcccagcgaagggattcagccctgcagcagctgcgcacagccgtgaaggagctttcagtgcaaaaccaggacttgattgagaagaatctgacactccaggaacacctgcgccaggcccaaccagggtctccaccttcaccagacacggcccagctggcacttgagctgcaccaggagttggccagttgccttcaagatctgcaggctgtctgtagcattgtgacccagagggcccagggccatgaccccaatctctccctgctcctgggcattcactcagcacagcacccagagactcagctagatttgcagaagccagatgtgatcaagaggaaactagaagaggttcaacagctgcgtcgtgacattgaggacttaaggaccaccatgtcagacagatatgcccaggacatgggagaaaactgtgtcacacagtgaggaattctgggggattcccccagggaggagctgggctgctgagagcctagtccagcaggtttctgccctgacattctcttgtctgctattcccagagaggtctcagaggggaggggagagcctgcatctgggggccaagggctgattagggaactgtgtcctacccacactggcatgttggattacgtttgtcctgttaattcactctagacggtgagttactaattaacttttggcaggtacaacagataagtcctcacaaactgttcccagccctaggctgacatgagagacgaacaggctgtccacctttcttctccatccaatgggatggatccatgttcattcccacttcacaccttggtcctgctgattagagagctcatcagaggggcctggaaaggctgagcaagtaccagtgacaatggccatttaagaattctcaggccccatgtgccagccttcttgggaactgagctggctttctgggttttctcatgcctggtcttactgcttcttcctcagggctcttgttctcccagaagcctcagggtaatgtgttggttagcacgtaactactaggattggggccctagggattatagccaggactctaatctgcctaccatgccatttaacaagagatcccactctccagctgccttgtgtccctagggtcctggccatgtgtttagtgtgctaaactttctcctttgttctcaggccttccaggtagtccccttcctggacttaagagtgcaaactcttctctgtggttctagccttgggcagaattatatcccagagaccacagagcaactgtcaagctgcttaccccctcacccagggctacagcctgtgcccagccctctaatttgtgcctctcttgtgttgggggtggtgggggttattcctttccctttcctgctctggcctccttgaaagttcagagtacccagtacaagtcagctttaaagtacagcttttagtgtttcctgggttgtttctctggggctttagtgagggacctttgccctctggtttttcttgcctcctggtttagggagcatctcacacttgttagtatctggttgttgggccagccgtgcctcctctagatctggagccaggccaggcaggggccacgtgtgggccagtcagccactacaagatttttgctaagctttgggctgttggcagcatcttggacctcatgcctgggcctgaatgaggctctttcttaagtgtttttacaagtttgtgttttatttatggagtgacttatcccttccattcagagcagccccacccagccagcccttcagcctctgggctcctgctgcttaaaggcagagccgcctggttggtctccaccctgtgcattgggagcccagccaccatgctgacgggtatttttcctcataaagtttataaccagttatttatatgaatctttgttatgtccatttgtttgtattgcgtattttgattataaaataaagtatcttaacagactc

SEQ ID NO: 5665 - protein, 762 aa, Homo sapiens; identical to SEQ ID NO: 102

SEQ ID NO: 5666 - DNA, 4256 bp, Homo sapiens
gacgcgcgttctgtggcgcgcggcctggcgggcgtgcaacggccgttagaggagctgagggagggaaccaccgctcaccgcagacgtggtggctgcagtcagtcttcccgagtgagggatttcgccgcccgctttcaggcccgtttggcttaaataactgtgattgatggccatgcaggagaaatatccaactgaggggatctctcacgtcacttcaccgagttccgatgtgattcagaagggcagttccctggggactgaatggcagaccccagttatctcggagccctttcggagccgcttcagccgctgttcaagtgtagccgacagtggggacacagccattggtacatcatgctcagatattgcggaggatttttgcagctcaagtggcagtcctcctttccagcccatcaaaagccacgtaaccattccaacagcccatgtgatgccttctactttagggacctctcctgccaagccaaattctacacctgttggaccctcttcctctaaactccctttgtcagggttggctgaaagtgtgggaatgacaagaaatggagacctcggtgcaatgaaacattctccaggcctatctagagatctcatgtatttctctggtgctactggagaaaatggaattgagcagtcctggtttccagcagtgggccatgaaagacaagaagaggcgaggaagtttgatattcctagcatggaatctaccctcaatcagtcggcaatgatggagacactttattcagatcctcaccaccgagtccgcttccacaacccaagaaccagcacaagtaaggagttgtacagagtgttgcctgaggccaagaaggcaccgggcagcggggcagtgtttgagcggaatggaccacattctaatagcagtggggtcctccctttgggactccagcctgctcccgggctctccaagcctctgccctctcaggtgtggcagccgagtcctgacacttggcatccccgagagcaatcttgtgaactcagcacttgtcggcagcagctggaattgattcgtttacagatggagcaaatgcagcttcagaatggagccatctgccaccatcctgctgcttttggtccttcactgcccatcttagagccagcacagtggatcagcatcttgaacagtaatgaacaccttctgaaggaaaaagagcttctcattgacaagcagaggaaacacatctctcagctggagcagaaagtgcgagagagcgaactgcaagtccacagtgccctcttgggccgccctgccccctttggtgatgtctgcttgctgaggctacaggaattgcagcgagaaaacactttcttacgtgcacagtttgcacagaagacagaagccttgagcagagaaaagattgaccttgaaaagaaactctctgcttctgaagttgaagtccagctcatcagagagtcgctcaaagtggcgttgcagaagcattctgaggaagtgaagaaacaggaagaaagggtcaaaggtcgtgataaacatatcaataatttgaaaaagaaatgccagaaggaatcagagcagaaccgggagaagcagcagcgtattgagaccttggagcgctacctggctgacctgcccacactggaagaccatcagaagcagagccagcagcttaaggattctgagttgaagagcacagagctgcaggagaaagtgactgagctggagagtttgctggaggagacccaggcaatctgcagagagaaggagattcaactggaaagcctgaggcagagagaagcagaattctcctccgctggacatagcctgcaagataaacagtctgtggaggagaccagtggagaaggtccagaagtggaaatggagtcctggcagaagcgatacgattcgctccaaaagattgtggagaagcagcagcagaagatggatcagttgcgctcacaagtacagagcctagagcaggaagtggctcaagaagaaggaacaagccaggccctgagagaggaggcccagcgaagggattcagccctgcagcagctgcgcacagccgtgaaggagctttcagtgcaaaaccaggacttgattgagaagaatctgacactccaggaacacctgcgccaggcccaaccagggtctccaccttcaccagacacggcccagctggcacttgagctgcaccaggagttggccagttgccttcaagatctgcaggctgtctgtagcattgtgacccagagggcccagggccatgaccccaatctctccctgctcctgggcattcactcagcacagcacccagagactcagctagatttgcagaagccagatgtgatcaagaggaaactagaagaggttcaacagctgcgtcgtgacattgaggacttaaggaccaccatgtcagacagatatgcccaggacatgggagaaaactgtgtcacacagtgaggaattctgggggattcccccagggaggagctgggctgctgagagcctagtccagcaggtttctgccctgacattctcttgtctgctattcccagagaggtctcagaggggaggggagagcctgcatctgggggccaagggctgattagggaactgtgtcctacccacactggcatgttggattacgtttgtcctgttaattcactctagacggtgagttactaattaacttttggcaggtacaacagataagtcctcacaaactgttcccagccctaggctgacatgagagacgaacaggctgtccacctttcttctccatccaatgggatggatccatgttcattcccacttcacaccttggtcctgctgattagagagctcatcagaggggcctggaaaggctgagcaagtaccagtgacaatggccatttaagaattctcaggccccatgtgccagccttcttgggaactgagctggctttctgggttttctcatgcctggtcttactgcttcttcctcagggctcttgttctcccagaagcctcagggtaatgtgttggttagcacgtaactactaggattggggccctagggattatagccaggactctaatctgcctaccatgccatttaacaagagatcccactctccagctgccttgtgtccctagggtcctggccatgtgtttagtgtgctaaactttctcctttgttctcaggccttccaggtagtccccttcctggacttaagagtgcaaactcttctctgtggttctagccttgggcagaattatatcccagagaccacagagcaactgtcaagctgcttaccccctcacccagggctacagcctgtgcccagccctctaatttgtgcctctcttgtgttgggggtggtgggggttattcctttccctttcctgctctggcctccttgaaagttcagagtacccagtacaacccagccaccatgctgacgggtatttttcctcataaagtttataaccagttatttatatgaatctttgttatgtccatttgtttgtattgcgtattttgattataaaataaagtatcttaacagactcctcagttttccatacccttccatcaccaccaccacgctattctacccctcactttggcttgttagagccaaacacctgggtgttcagccaggtcccccaggcagcagcgtggaggaacctttggcaggtccagccagcctcatgtccctatctatctctgccacctctgctcctctgtcgttctatagaaccagatctcttcccactcactttctcttgggcaaaccttccctgagtcataacagaagtttgtcactggaaagtttcagcagtcctctcaggaagttggcagcctctgggttgctgtgaggaagtggctttaccagagcaagggttgtctttctgggctgttaacctgcctgagccctggaccagggggacatctgagaagcatgatgttgagtgccagacagctaggtctccaaagttgggctcgttgctggagtctgccccctcaaccgctgaattcttgctgggagtagtagcagtttgggaatgccatctgcagcatggagctggggttgagcttggaccaccccaagacctggggtggatcttaagggtcagcttgagcctaggctctcgagtcctgacatcatcctctaccgccacgctttccagctgtcagccttggtctccatctggttccttgagggtgtggcctctgcgtcctgctatcacccttccttgtctaaaccttcccacctga

SEQ ID NO: 5667 - protein, 762 aa, Homo sapiens; identical to SEQ ID NO: 102

SEQ ID NO: 5668 - DNA, 561 bp, Homo sapiens
ctatacaaggttcacatttctacctatttccaactttcaagtactactctgagggggactactgcaagcaaacaataagggaggaatgtgaggtaacatacttattgctttcagcaggcagaaaactgaataaggaaataaggaataccaatttcttctcttttcaactatattcagtactcgttcccaaatcaagcatatctaccacggagaagagcgactaccaacttgtttctttttctccccagcaaccaacacagagaacactcagataacaacaacaaatactataattgttcccagaattatgtaagtatagatcagctacgaccttctcattaaacaacttttttttttgaaatgggtctcaaaacaaacacacaaaaagagttaagattaggatcatggtatgtaacaaacatagcagtttaaaaaatgtctaggcctgggcgtggtggctcacgcctgtaatcccagcactttgagaagccgaggtgggcagatcgtgaggtcaggagatcgagaccattctggctaacacggtgaaaccccgtctctact

SEQ ID NO: 5669 - protein, 90 aa, Homo sapiens
IQGSHFYLFPTFKYYSEGDYCKQTIREECEVTYLLLSAGRKLNKEIRNTNFFSFQLYSVLVPKSSISTTEKSDYQLVSFSPQQPTQRTLR

SEQ ID NO: 5670 - DNA, 435 bp, Homo sapiens
agtcaggtttggggtatgggagagagaacagaatcctgcctcagatgccatactccctgtcctgcatactgagcaagactgtctagttcgcttcattcttcagatagtttggactcgttgctcaccttcctgggggagcttttggaggtcgcagaagattctggtgactcttggaaaggatatttttattagatttgattatagctgagagttgtccagcttccagaagagtaggacctaactcattttccttaaatttttgcagctcaagtggcagtcctcctttccagcccatcaaaagccacgtaaccattccaacagcccatgtgatgccttctactttagggacctctcctgccaagccaaattctacacctgttggaccctcttcctctaaactccctttgtcagggttggctgaaagtgtgggaatga

SEQ ID NO: 5671 - protein, 34 aa, Homo sapiens
MPSTLGTSPAKPNSTPVGPSSSKLPLSGLAESVG

SEQ ID NO: 5672 - DNA, 570 bp, Homo sapiens
ggaccaaaagcagcaggatggtggcagatggctccattctgaagctgaaaggcaagtaggcccagatgagcttgatcttgacccatacacgcctgaaaacacctgagcagtaatcagctgggtctgtagtcaaagcccaacttggctcagcctgatgaggcccaatgtttatgaaataattttagctctgaggcatgactggaaagaacctgccaggaaggcttctgccaactgaacactccctgttcaaaaaggctctagtttctaagaaaaggtcagttatcttttattatctagcaacagaggcaaaccaggagctaggatgtcctcaccaaccaaggaaggggaatatgtctgctcccttccttcccactcttcagcagcacaaggattttttaaaagaaaatatgctgggtgcggtggctcacgcctgtaatcccagcactttggaaggccaaggtgggcagattgcccaagctcaggagttctaaaccacatggtgaaaccctgtttctactaataatacaaaaaagagctgggcgtgttggcacgcacctgtagtcccagcta

SEQ ID NO: 5673 - protein, 98 aa, Homo sapiens [sequence omitted]

SEQ ID NO: 5674 - DNA, 2387 bp, Homo sapiens
caccattgttccatctgcgaggagcaccctttctgcagaaagtaaaaattgccttgctgaggaaattaaatatagcttaaggattctgagttgaagagcacagagctgcaggagaaagtgactgagctggagagtttgctggaggagacccaggcaatctgcagagagaaggagattcaactggaaagcctgaggcagagagaagcagaattctcctccgctggacatagcctgcaagataaacagtctgtggaggagaccagtggagaaggtccagaagtggaaatggagtcctggcagaagcgatacgattcgctccaaaagattgtggagaagcagcagcagaagatggatcagttgcgctcacaagtacagagcctagagcaggaagtggctcaagaagaaggaacaagccaggccctgagagaggaggcccagcgaagggattcagccctgcagcagctgcgcacagccgtgaaggagctttcagtgcaaaaccaggacttgattgagaagaatctgacactccaggaacacctgcgccaggcccaaccagggtctccaccttcaccagacacggcccagctggcacttgagctgcaccaggagttggccagttgccttcaagatctgcaggctgtctgtagcattgtgacccagagggcccagggccatgaccccaatctctccctgctcctgggcattcactcagcacagcacccagagactcagctagatttgcagaagccagatgtgatcaagaggaaactagaagaggttcaacagctgcgtcgtgacattgaggacttaaggaccaccatgtcagacagatatgcccaggacatgggagaaaactgtgtcacacagtgaggaattctgggggattcccccagggaggagctgggctgctgagagcctagtccagcaggtttctgccctgacattctcttgtctgctattcccagagaggtctcagaggggaggggagagcctgcatctgggggccaagggctgattagggaactgtgtcctacccacactggcatgttggattacgtttgtcctgttaattcactctagacggtgagttactaattaacttttggcaggtacaacagataagtcctcacaaactgttcccagccctaggctgacatgagagacgaacaggctgtccacctttcttctccatccaatgggatggatccatgttcattcccacttcacaccttggtcctgctgattagagagctcatcagaggggcctggaaaggctgagcaagtaccagtgacaatggccatttaagaattctcaggccccatgtgccagccttcttgggaactgagctggctttctgggttttctcatgcctggtcttactgcttcttcctcagggctcttgttctcccagaagcctcagggtaatgtgttggttagcacgtaactactaggattggggccctagggattatagccaggactctaatctgcctaccatgccatttaacaagagatcccactctccagctgccttgtgtccctagggtcctggccatgtgtttagtgtgctaaactttctcctttgttctcaggccttccaggtagtccccttcctggacttaagagtgcaaactcttctctgtggttctagccttgggcagaattatatcccagagaccacagagcaactgtcaagctgcttaccccctcacccagggctacagcctgtgcccagccctctaatttgtgcctctcttgtgttgggggtggtgggggttattcctttccctttcctgctctggcctccttgaaagttcagagtacccagtacaagtcagctttaaagtacagcttttagtgtttcctgggttgtttctctggggctttagtgagggacctttgccctctggtttttcttgcctcctggtttagggagcatctcacacttgttagtatctggttgttgggccagccgtgcctcctctagatctggagccaggccaggcaggggccacgtgtgggccagtcagccactacaagatttttgctaagctttgggctgttggcagcatcttggacctcatgcctgggcctgaatgaggctctttcttaagtgtttttacaagtttgtgttttatttatggagtgacttatcccttccattcagagcagccccacccagccagcccttcagcctctgggctcctgctgcttaaaggcagagccgcctggttggtctccaccctgtgcattgggagcccagccaccatgctgacgggtatttttcctcataaagtttataaccagttatttatatgaatctttgttatgtccatttgtttgtattgcgtattttgattataaaataaagtatcttaacagactc

SEQ ID NO: 5675 - protein, 194 aa, Homo sapiens
MESWQKRYDSLQKIVEKQQQKMDQLRSQVQSLEQEVAQEEGTSQALREEAQRRDSALQQLRTAVKELSVQNQDLIEKNLTLQEHLRQAQPGSPPSPDTAQLALELHQELASCLQDLQAVCSIVTQRAQGHDPNLSLLLGIHSAQHPETQLDLQKPDVIKRKLEEVQQLRRDIEDLRTTMSDRYAQDMGENCVTQ

SEQ ID NO: 5676 - DNA, 3095 bp, Homo sapiens
accattgttccatctgcgaggagcaccctttctgcagaaagtaaaaattgccttgctgaggaaattaaatatagcttaaggattctgagttgaagagcacagagctgcaggagaaagtgactgagctggagagtttgctggaggagacccaggcaatctgcagagagaaggagattcaactggaaagcctgaggcagagagaagcagaattctcctccgctggacatagcctgcaagataaacagtctgtggaggagaccagtggagaaggtccagaagtggaaatggagtcctggcagaagcgatacgattcgctccaaaagattgtggagaagcagcagcagaagatggatcagttgcgctcacaagtacagagcctagagcaggaagtggctcaagaagaaggaacaagccaggccctgagagaggaggcccagcgaagggattcagccctgcagcagctgcgcacagccgtgaaggagctttcagtgcaaaaccaggacttgattgagaagaatctgacactccaggaacacctgcgccaggcccaaccagggtctccaccttcaccagacacggcccagctggcacttgagctgcaccaggagttggccagttgccttcaagatctgcaggctgtctgtagcattgtgacccagagggcccagggccatgaccccaatctctccctgctcctgggcattcactcagcacagcacccagagactcagctagatttgcagaagccagatgtgatcaagaggaaactagaagaggttcaacagctgcgtcgtgacattgaggacttaaggaccaccatgtcagacagatatgcccaggacatgggagaaaactgtgtcacacagtgaggaattctgggggattcccccagggaggagctgggctgctgagagcctagtccagcaggtttctgccctgacattctcttgtctgctattcccagagaggtctcagaggggaggggagagcctgcatctgggggccaagggctgattagggaactgtgtcctacccacactggcatgttggattacgtttgtcctgttaattcactctagacggtgagttactaattaacttttggcaggtacaacagataagtcctcacaaactgttcccagccctaggctgacatgagagacgaacaggctgtccacctttcttctccatccaatgggatggatccatgttcattcccacttcacaccttggtcctgctgattagagagctcatcagaggggcctggaaaggctgagcaagtaccagtgacaatggccatttaagaattctcaggccccatgtgccagccttcttgggaactgagctggctttctgggttttctcatgcctggtcttactgcttcttcctcagggctcttgttctcccagaagcctcagggtaatgtgttggttagcacgtaactactaggattggggccctagggattatagccaggactctaatctgcctaccatgccatttaacaagagatcccactctccagctgccttgtgtccctagggtcctggccatgtgtttagtgtgctaaactttctcctttgttctcaggccttccaggtagtccccttcctggacttaagagtgcaaactcttctctgtggttctagccttgggcagaattatatcccagagaccacagagcaactgtcaagctgcttaccccctcacccagggctacagcctgtgcccagccctctaatttgtgcctctcttgtgttgggggtggtgggggttattcctttccctttcctgctctggcctccttgaaagttcagagtacccagtacaagtcagctttaaagtacagcttttagtgtttcctgggttgtttctctggggctttagtgagggacctttgccctctggtttttcttgcctcctggtttagggagcatctcacacttgttagtatctggttgttgggccagccgtgcctcctctagatctggagccaggccaggcaggggccacgtgtgggccagtcagccactacaagatttttgctaagctttgggctgttggcagcatcttggacctcatgcctgggcctgaatgaggctctttcttaagtgtttttacaagtttgtgttttatttatggagtgacttatcccttccattcagagcagccccacccagccagcccttcagcctctgggctcctgctgcttaaaggcagagccgcctggttggtctccaccctgtgcattgggagcccagccaccatgctgacgggtatttttcctcataaagtttataaccagttatttatatgaatctttgttatgtccatttgtttgtattgcgtattttgattataaaataaagtatcttaacagactcctcagttttccatacccttccatcaccaccaccacgctattctacccctcactttggcttgttagagccaaacacctgggtgttcagccaggtcccccaggcagcagcgtggaggaacctttggcaggtccagccagcctcatgtccctatctatctctgccacctctgctcctctgtcgttctatagaaccagatctcttcccactcactttctcttgggcaaaccttccctgagtcataacagaagtttgtcactggaaagtttcagcagtcctctcaggaagttggcagcctctgggttgctgtgaggaagtggctttaccagagcaagggttgtctttctgggctgttaacctgcctgagccctggaccagggggacatctgagaagcatgatgttgagtgccagacagctaggtctccaaagttgggctcgttgctggagtctgccccctcaaccgctgaattcttgctgggagtagtagcagtttgggaatgccatctgcagcatggagctggggttgagcttggaccaccccaagacctggggtggatcttaagggtcagcttgagcctaggctctcgagtcctgacatcatcctctaccgccacgctttccagctgtcagccttggtctccatctggttccttgagggtgtggcctctgcgtcctgctatcacccttccttgtctaaaccttcccacctga

SEQ ID NO: 5677 - protein, 194 aa, Homo sapiens; identical to SEQ ID NO: 5675

SEQ ID NO: 5678 - DNA, 568 bp, Homo sapiens
tttctgcagaaagtaaaaattgccttgctgaggaaattaaatatagcttaaggattctgagttgaagagcacagagctgcaggagaaagtgactgagctggagagtttgctggaggagacccaggcaatctgcagagagaaggagattcaactggaaagcctgaggcagagagaagcagaattctcctccgctggacatagcctgcaagataaacagtctgtggaggagaccagtggagaaggtccagaagtggaaatggagtcctggcagaagcgatacgattcgctccaaaagattgtggagaagcagcagcagaagatggatcagttgcgctcacaagtacagagtctcgctcttgtcgcccaggctggagtgcaatggcgcaatctcggctcactgtaacctctgcctcccaggttcaagcaattctcctgcctcagcctcccgagtagctggtattacgggtgcccaccatcacgcccggctaatttttgtattttttgtagagacggggtttcaccacgttggccagactggtctcgaactcctgacctcaggtgatctgcc

SEQ ID NO: 5679 - protein, 48 aa, Homo sapiens
MESWQKRYDSLQKIVEKQQQKMDQLRSQVQSLALVAQAGVQWRNLGSL

SEQ ID NO: 5680 - DNA, 443 bp, Homo sapiens
gaggagaccagtggagaaggtccagaagtggaaatggagtcctggcagaagcgatacgattcgctccaaaagattgtggagaagcagcagcagaagatggatcagttgcgctcacaagtacaggtgagcaggaatccttgggacatggtgggcagaacttaatgatggaatctctagaatttagccaatatttattttgttctctgccatgcaggttgctcagtgttagggatacaaaaagaatgagacccagtcagtgcttttgagccttgctgagaggacacaaatatagtagggagtttcagcacagtactgtgagagcagtccccacagtatcctgggggagtgcaggagagtcagtgggaggaagggaggtaaaagagaggtttctggagatcctgaacctacaaggatgaggagttagccaggcaaacaagaggagc

SEQ ID NO: 5681 - protein, 42 aa, Homo sapiens
MESWQKRYDSLQKIVEKQQQKMDQLRSQVQVSRNPWDMVGRT

SEQ ID NO: 5682 - DNA, 1769 bp, Homo sapiens
agctttcagtgcaaaaccaggacttgattgagaagaatctgacactccaggaacacctgcgccaggcccaaccagggtctccactccccagcagcacagcacccagagactcagctagatttgcagaagccagatgtgatcaagaggaaactagaagaggttcaacagctgcgtcgtgacattgaggacttaaggaccaccatgtcagacagatatgcccaggacatgggagaaaactgtgtcacacagtgaggaattctgggggattcccccagggaggagctgggctgctgagagcctagtccagcaggtttctgccctgacattctcttgtctgctattcccagagaggtctcagaggggaggggagagcctgcatctgggggccaagggctgattagggaactgtgtcctacccacactggcatgttggattacgtttgtcctgttaattcactctagacggtgagttactaattaacttttggcaggtacaacagataagtcctcacaaactgttcccagccctaggctgacatgagagacgaacaggctgtccacctttcttctccatccaatgggatggatccatgttcattcccacttcacaccttggtcctgctgattagagagctcatcagaggggcctggaaaggctgagcaagtaccagtgacaatggccatttaagaattctcaggccccatgtgccagccttcttgggaactgagctggctttctgggttttctcatgcctggtcttactgcttcttcctcagggctcttgttctcccagaagcctcagggtaatgtgttggttagcacgtaactactaggattggggccctagggattatagccaggactctaatctgcctaccatgccatttaacaagagatcccactctccagctgccttgtgtccctagggtcctggccatgtgtttagtgtgctaaactttctcctttgttctcaggccttccaggtagtccccttcctggacttaagagtgcaaactcttctctgtggttctagccttgggcagaattatatcccagagaccacagagcaactgtcaagctgcttaccccctcacccagggctacagcctgtgcccagccctctaatttgtgcctctcttgtgttgggggtggtgggggttattcctttccctttcctgctctggcctccttgaaagttcagagtacccagtacaagtcagctttaaagtacagcttttagtgtttcctgggttgtttctctggggctttagtgagggacctttgccctctggtttttcttgcctcctggtttagggagcatctcacacttgttagtatctggttgttgggccagccgtgcctcctctagatctggagccaggccaggcaggggccacgtgtgggccagtcagccactacaagatttttgctaagctttgggctgttggcagcatcttggacctcatgcctgggcctgaatgaggctctttcttaagtgtttttacaagtttgtgttttatttatggagtgacttatcccttccattcagagcagccccacccagccagcccttcagcctctgggctcctgctgcttaaaggcagagccgcctggttggtctccaccctgtgcattgggagcccagccaccatgctgacgggtatttttcctcataaagtttataaccagttatttatatgaatctttgttatgtccatttgtttgtattgcgtattttgattataaaataaagtatcttaacagactc

SEQ ID NO: 5683 - protein, 60 aa, Homo sapiens [sequence omitted]

SEQ ID NO: 5684 - DNA, 2478 bp, Homo sapiens
agctttcagtgcaaaaccaggacttgattgagaagaatctgacactccaggaacacctgcgccaggcccaaccagggtctccactccccagcagcacagcacccagagactcagctagatttgcagaagccagatgtgatcaagaggaaactagaagaggttcaacagctgcgtcgtgacattgaggacttaaggaccaccatgtcagacagatatgcccaggacatgggagaaaactgtgtcacacagtgaggaattctgggggattcccccagggaggagctgggctgctgagagcctagtccagcaggtttctgccctgacattctcttgtctgctattcccagagaggtctcagaggggaggggagagcctgcatctgggggccaagggctgattagggaactgtgtcctacccacactggcatgttggattacgtttgtcctgttaattcactctagacggtgagttactaattaacttttggcaggtacaacagataagtcctcacaaactgttcccagccctaggctgacatgagagacgaacaggctgtccacctttcttctccatccaatgggatggatccatgttcattcccacttcacaccttggtcctgctgattagagagctcatcagaggggcctggaaaggctgagcaagtaccagtgacaatggccatttaagaattctcaggccccatgtgccagccttcttgggaactgagctggctttctgggttttctcatgcctggtcttactgcttcttcctcagggctcttgttctcccagaagcctcagggtaatgtgttggttagcacgtaactactaggattggggccctagggattatagccaggactctaatctgcctaccatgccatttaacaagagatcccactctccagctgccttgtgtccctagggtcctggccatgtgtttagtgtgctaaactttctcctttgttctcaggccttccaggtagtccccttcctggacttaagagtgcaaactcttctctgtggttctagccttgggcagaattatatcccagagaccacagagcaactgtcaagctgcttaccccctcacccagggctacagcctgtgcccagccctctaatttgtgcctctcttgtgttgggggtggtgggggttattcctttccctttcctgctctggcctccttgaaagttcagagtacccagtacaagtcagctttaaagtacagcttttagtgtttcctgggttgtttctctggggctttagtgagggacctttgccctctggtttttcttgcctcctggtttagggagcatctcacacttgttagtatctggttgttgggccagccgtgcctcctctagatctggagccaggccaggcaggggccacgtgtgggccagtcagccactacaagatttttgctaagctttgggctgttggcagcatcttggacctcatgcctgggcctgaatgaggctctttcttaagtgtttttacaagtttgtgttttatttatggagtgacttatcccttccattcagagcagccccacccagccagcccttcagcctctgggctcctgctgcttaaaggcagagccgcctggttggtctccaccctgtgcattgggagcccagccaccatgctgacgggtatttttcctcataaagtttataaccagttatttatatgaatctttgttatgtccatttgtttgtattgcgtattttgattataaaataaagtatcttaacagactcctcagttttccatacccttccatcaccaccaccacgctattctacccctcactttggcttgttagagccaaacacctgggtgttcagccaggtcccccaggcagcagcgtggaggaacctttggcaggtccagccagcctcatgtccctatctatctctgccacctctgctcctctgtcgttctatagaaccagatctcttcccactcactttctcttgggcaaaccttccctgagtcataacagaagtttgtcactggaaagtttcagcagtcctctcaggaagttggcagcctctgggttgctgtgaggaagtggctttaccagagcaagggttgtctttctgggctgttaacctgcctgagccctggaccagggggacatctgagaagcatgatgttgagtgccagacagctaggtctccaaagttgggctcgttgctggagtctgccccctcaaccgctgaattcttgctgggagtagtagcagtttgggaatgccatctgcagcatggagctggggttgagcttggaccaccccaagacctggggtggatcttaagggtcagcttgagcctaggctctcgagtcctgacatcatcctctaccgccacgctttccagctgtcagccttggtctccatctggttccttgagggtgtggcctctgcgtcctgctatcacccttccttgtctaaaccttcccacctga

SEQ ID NO: 5685 - protein, 60 aa, Homo sapiens [sequence omitted]

SEQ ID NO: 5686 - DNA, 603 bp, Homo sapiens
cacaaactgttcccagccctaggctgacatgagagacgaacaggctgtccacctttcttctccatccaatgggatggatccatgttcattcccacttcacaccttggtcctgctgattagagagctcatcagaggggcctggaaaggctgagcaagtaccagtgacaatggccatttaagaattctcaggccccatgtgccagccttcttgggaactgagctggctttctgggttttctcatgcctggtcttactgcttcttcctcagggctcttgttctcccagaagcctcagggtaatgtgttggttagcacgtaactactagggtcctggccatgtgtttagtgtgctaaactttctcctttgttctcaggccttccaggtagtccccttcctggacttaagagtgcaaactcttctctgtggttctagccttgggcagaattatatcccagagaccacagagcaactgtcaagctgcttaccccctcacccagggctacagcctgtgcccagccctctaatttgtgcctctcttgtgttgggggtggtgggggttattcctttccctttcctgctctggcctccttgaaagttcagagt

SEQ ID NO: 5687 - protein, 40 aa, Homo sapiens
MRDEQAVHLSSPSNGMDPCSFPLHTLVLLIRELIRGAWKG

SEQ ID NO: 5688 - DNA, 2139 bp, Homo sapiens
cgggtatttttcctcataaagtttataaccagttatttatatgaatctttgttatgtccatttgtttgtattgcgtattttgattataaaataaagtatcttaacagactcctcagttttccatacccttccatcaccaccaccacgctattctacccctcactttggcttgttagagccaaacacctgggtgttcagccaggtcccccaggcagcagcgtggaggaacctttggcaggtccagccagcctcatgtccctatctatctctgccacctctgctcctctgtcgttctatagaaccagatctcttcccactcactttctcttgggcaaaccttccctgagtcataacagaagtttgtcactggaaagtttcagcagtcctctcaggaagttggcagcctctgggttgctgtgaggaagtggctttaccagagcaagggttgtctttctgggctgttaacctgcctgagccctggaccagggggacatctgagaagcatgatgttgagtgccagacagctaggtctccaaagttgggctcgttgctggagtctgccccctcaaccgctgaattcttgctgggagtagtagcagtttgggaatgccatctgcagcatggagctggggttgagcttggaccaccccaagacctggggtggatcttaagggtcagcttgagcctaggctctcgagtcctgacatcatcctctaccgccacgctttccagctgtcagccttggtctccatctggttccttgagggtgtggcctctgcgtcctgctatcacccttccttgtctaaaccttcccacctgagtggagaggaacttgggggaaaatctctaagcatgggctcttcctgctgtcctatgcttcctatcccctagggttagtggtgcgtgttgggtggtggagcgagggatcccttggagcaaggttcttagagaactttgggtctgaaagcagctcaaaccttccaaagccccaagcttccctgtgctattagagcacctcctcctggagagagcggctctcgtggctggggagttggatgcaccaaacctgtgtgcggctggagagggaggcttctgccagaccctctcccgggcctgtcctgccacccaggcccctccccagtctcacactgagctccagatcagggaagggccgaaaaggacgatcagggcagccgcagaaggggcgccctgcgtgggacgggtccgttgcgcgcctggtaaccgagggggaagggaaggggcctctggcgtgcggggcggtgtcgcgcaggtcccaccccgcctgcccgcgccgcccattggtcccgagcgcgatgacttggcgggcggagcaggaaggaaaccgctcccgagcacggcggcggcgtcgtctcccggcagtgcagctgccgctaccgccgccctctgcccgccggcccgtctgtctacccccagcatgagcggcctgcgcgtctacagcacgtcggtcaccggctcccgcgaaatcaagtcccagcagagcgaggtgacccgaatcctggatgggaagcgcatccaataccagctagtggacatctcccaggacaacgccctgagggatgagatgcgagccttggcaggcaaccccaaggccaccccaccccagattgtcaacggggaccagtactgtggggactatgagctcttcgtggaggctgtggaacaaaacacgctgcaggagttcctgaagctggcttgagtcaagcctgtccagagttcccctgctggactccatcaccacactccccccagccttcacctggccatgaaggaccttttgaccaactccctgtcattcctaacctaaccttagagtccctcccccaatgcaggccacttctcctccctcctctctaaatgtagtcccctctcctccatctaaaggcaacattccttacccattagtctcagaaattgtcttaagcaacagccccaaatgctggctgcccccagccaagcattggggccgccatcctgcctggcactggctgatgggcacctctgttggttccatcagccagagctctgccaaaggccccgcagtccctctcccaggaggaccctagaggcaattaaatgatgtcctgttccattggcact

SEQ ID NO: 5689 - protein, 93 aa, Homo sapiens; identical to SEQ ID NO: 104

SEQ ID NO: 5690 - DNA, 874 bp, Homo sapiens
tctcccggcagtgcagctgccgctaccgccgccctctgcccgccggcccgtctgtctacccccagcatgagcggcctgcgcgtctacagcacgtcggtcaccggctcccgcgaaatcaagtcccagcagagcgaggtgacccgaatcctggatgggaagcgcatccaataccagctagtggacatctcccaggacaacgccctgagggatgagatgcgagccttggcaggcaaccccaaggccaccccaccccagattgtcaacggggaccagtactgtggggtatgggctgggggacgggggggtggggggagtgttggaagaggactctagccagggtcatatctgccacaaagcacttgggccccctgcattcaggtgaccacccctcgcctccccttctccaggactatgagctcttcgtggaggctgtggaacaaaacacgctgcaggagttcctgaagctggcttgagtcaagcctgtccagagttcccctgctggactccatcaccacactccccccagccttcacctggccatgaaggaccttttgaccaactccctgtcattcctaacctaaccttagagtccctcccccaatgcaggccacttctcctccctcctctctaaatgtagtcccctctcctccatctaaaggcaacattccttacccattagtctcagaaattgtcttaagcaacagccccaaatgctggctgcccccagccaagcattggggccgccatcctgcctggcactggctgatgggcacctctgttggttccatcagccagagctctgccaaaggccccgcagtccctctcccaggaggaccctagaggcaattaaatgatgtcctgttccattggcact

SEQ ID NO: 5691 - protein, 88 aa, Homo sapiens
MSGLRVYSTSVTGSREIKSQQSEVTRILDGKRIQYQLVDISQDNALRDEMRALAGNPKATPPQIVNGDQYCGVWAGGRGGGGSVGRGL

SEQ ID NO: 5692 - DNA, 2525 bp, Homo sapiens
gacaacaagatggcggcgctgcgggacggctagcggccctgcgtgggagttcctgacagctggattctagaagtagaactatgagctcacctttggcctcccttagcaagacccgaaaagtgcccctgccctcggagcctatgaatcctgggaggcgaggaatccgcatctatggagatgaagatgaggtggacatgttgagtgatgggtgtggctcagaagaaaagatctcagtcccttcctgctatggcggcataggtgcccctgtgagtcggcaaggggactcattggcgccccctgaggtggactttgacaggctgctggccagcctgcaggatcttagtgagctggtggtagagggtgacacccaagtgacaccagtgcccggcggggcacggctgcgtaccctcgagcccatcccgctgaagctctaccggaatggcatcatgatgttcgacgggcccttccagcccttctacgatccctccacacagcgctgcctccgagacatattggatggcttctttccctcagagctccagcgactgtaccccaatggggtcccctttaaggtgagtgacttgcgcaatcaggtctacctggaggatggactggaccccttcccaggcgagggccgtgtggtgggcaggcagctgatgcacaaggccttggacagggtggaggagcacccaggctccaggatgactgctgagaaatttctgaacaggctccccaagtttgtgatccggcaaggcgaggtgattgacatccggggccccatcagggacaccttgcagaactgctgcccattgcctgcccggatccaggagattgtggtggagacgcccaccttggccgctgagcgagagaggagccaggagtcacccaacacgccggcacccccgctctccatgctgcgcatcaagtctgagaatggggaacaggccttcctactgatgatgcagcctgacaacaccattggggacgtgcgagctctgctagcgcaggccagggtcatggatgcctctgcctttgagatcttcagcacattcccgcccaccctctaccaggacgatacactcacgctgcaggctgcaggccttgtgcccaaagcagcactgctgctgcgggcacgccgagccccgaagtccagcctgaaattcagtcctggtccctgtcccggtcccggtcccggccccagtcccggtcccggtcccggccccagtcccggtcccggtcccggccccagtccctgtcctggacccagtcccagcccccaataaagcacccgccccctcaacccgctgctccgccaggctcttgggtgggccatctcgccaggcacgtaggaaaggcctgggaccagctgggccagggagggggcggtgccgacccgccccttggtaactcgagccccggctggcgggcctggctgctgggtctttgtcttctaggttcctctttctcccaagaagggctaagtggatcctgtgaagggagggatgcagtggggggaaggagctggccccagctgggtttacattctcagctgggacagcagagcctcactgtgtatgtgtgcagccagcagatacctgtgcacaggcacagacccaccaactcgtggggacacttcaacaccgcacaaagccattttgccactagacccatgcccccaaattagcagaactgcagctgggtacccacctcccatgatacactcattcttagccattgtgctccaacacaggcgcatgggatggccacactcactgacaggcatggagatgtgcactacacaccaaggcacaagcatgatatggacacatgcatgtgaactggagggtggcccacccagacatctccagaaaccactggtccatacaggtatttgtgtgtcagacatatccaaacacatgcactaacaaacacagaggtgacagtcacaagagaacagctcagccacccttcccacagagcagtctcagcacagtcacaactaccaaccttgcccagggcagggacccaggaggcccaggccacaaccaaccagacacagtgccaatggaacaggacatcatttaattgcctctagggtcctcctgggagagggactgcggggcctttggcagagctctggctgatggaaccaacagaggtgcccatcagccagtgccaggcaggatggcggccccaatgcttggctgggggcagccagcatttggggctgttgcttaagacaatttctgagactaatgggtaaggaatgttgcctttagatggaggagaggggactacatttagagaggagggaggagaagtggcctgcattgggggagggactctaaggttaggttaggaatgacagggagttggtcaaaaggtccttcatggccaggtgaaggctggggggagtgtggtgatggagtccagcaggggaactctggacaggcttgactcaagccagcttcaggaactcctgcagcgtgttttgttccacagcctccacgaagagctcatagtcc

SEQ ID NO: 5693 - protein, 400 aa, Homo sapiens
MSSPLASLSKTRKVPLPSEPMNPGRRGIRIYGDEDEVDMLSDGCGSEEKISVPSCYGGIGAPVSRQGDSLAPPEVDFDRLLASLQDLSELVVEGDTQVTPVPGGARLRTLEPIPLKLYRNGIMMFDGPFQPFYDPSTQRCLRDILDGFFPSELQRLYPNGVPFKVSDLRNQVYLEDGLDPFPGEGRVVGRQLMHKALDRVEEHPGSRMTAEKFLNRLPKFVIRQGEVIDIRGPIRDTLQNCCPLPARIQEIVVETPTLAAERERSQESPNTPAPPLSMLRIKSENGEQAFLLMMQPDNTIGDVRALLAQARVMDASAFEIFSTFPPTLYQDDTLTLQAAGLVPKAALLLRARRAPKSSLKFSPGPCPGPGPGPSPGPGPGPSPGPGPGPSPCPGPSPSPQ

SEQ ID NO: 5694 - DNA, 2642 bp, Homo sapiens
gacaacaagatggcggcgctgcgggacggctagcggccctgcgtgggagttcctgacagctggattctagaagtagaactatgagctcacctttggcctcccttagcaagacccgaaaagtgcccctgccctcggagcctatgaatcctgggaggcgaggaatccgcatctatggagatgaagatgaggtggacatgttgagtgatgggtgtggctcagaagaaaagatctcagtcccttcctgctatggcggcataggtgcccctgtgagtcggcaagtccctgcatcccatgactcggagctgatggccttcatgacgaggaagttgtgggacctggagcagcaggtgaaggcccagactgatgagatactgtccaaggatcagaagatagcggccctagaggacctggtgcagaccctccggccacacccagccgaggcaaccctgcagcggcaggaggaactggagacgatgtgtgtgcagctgcagcggcaggtcagggagatggagcggttcctcagtgactatggcctgcagtgggtgggcgagcccatggaccaggaggactcagagagcaagacagtctcagagcatggcgagagggactggatgacagccaagaagttctggaagccaggggactcattggcgccccctgaggtggactttgacaggctgctggccagcctgcaggatcttagtgagctggtggtagagggtgacacccaagtgacaccagtgcccggcggggcacggctgcgtaccctcgagcccatcccgctgaagctctaccggaatggcatcatgatgttcgacgggcccttccagcccttctacgatccctccacacagcgctgcctccgagacatattggatggcttctttccctcagagctccagcgactgtaccccaatggggtcccctttaaggtgataagctgctcctcaaaccacacctttggggattttgaagggagtggggatacacagcctccccagacacctcccattctgaggggaagccgctgcactccctgggggaccccagtctgatgccctccaggaggataagtctgaagccgggctgggaagggagcggagaggcccgaaacagagcagcaggcagcgccctctgctggcaccctggagacagcctcggctgcggggcccctgccttctagtcctccccagctttcaggacaccttgacaacctggggtccctgcagaagtggcccggctgtcccccaagtctcctgaagctatctgggtagggtgggaggcagtgctgtgagccacaaatgcaaagcagaggggacagatgttgggactcaaagacatgaggtagagctggccccatgggtaggtgccaccaccagagcccatgaggcttcgtgttctagaaggtggtgggttagtgccgcactgagggcgtgtccgggagggagcatgtgtcaccagggctcaggaaacagcatgagtcatgacgcgggggtgtttaaggcattcgtgccacagcggggacctcggagctatgccttgataaggcaagtgaggttacatgtacgatgatgcggtttgtgctgcagactggaaaaaagcaggggctttgtcctctcctgaccccctcacactctgccttcacggtaggctcctgagaggggggtctccaaggagggtgtcagtactgcagcttcagctggcgtggatggggtgcttacaggagcagcagggctgagggagatgacagcagtacgaaccgtggctctcctgaggcctgggtttcctcatatgtaaaatgggggttgcattagaccatacccttggcctgtgtttaggcaaatagggatgaaagtggggccaagggctgaagagctgggtccgctgccgtcgttgcccttctttcttgccaggtgagtgacttgcgcaatcaggtctacctggaggatggactggaccccttcccaggcgagggccgtgtggtgggcaggcagctgatgcacaaggccttggacagggtggaggagcacccaggctccaggatgactgctgagaaatttctgaacaggctccccaagtttgtgatccggcaaggcgaggtgattgacatccggggccccatcagggacaccttgcagaactgctgcccattgcctgcccggatccaggagattgtggtggagacgcccaccttggccgctgagcgagagaggagccaggagtcacccaacacgccggcacccccgctctccatgctgcgcatcaagtctgagaatggggaacaggccttcctactgatgatgcagcctgacaacaccattggggacgtgcgagctctgctagcgcaggccagggtcatggatgcctctgcctttgagatcttcagcacattcccgcccaccctctaccaggacgatacactcacgctgcaggctgcaggccttgtgcccaaagcagcactgctgctgcgggcacgccgagccccgaagtccagcctgaaattcagtcctggtccctgtcccggtcccggtcccggccccagtcccggtcccggtcccggccccagtcccggtcccggtcccggccccagtccctgtcctggacccagtcccagcccccaataaagcacccgccccctcaac

SEQ ID NO: 5695 - protein, 324 aa, Homo sapiens
MSSPLASLSKTRKVPLPSEPMNPGRRGIRIYGDEDEVDMLSDGCGSEEKISVPSCYGGIGAPVSRQVPASHDSELMAFMTRKLWDLEQQVKAQTDEILSKDQKIAALEDLVQTLRPHPAEATLQRQEELETMCVQLQRQVREMERFLSDYGLQWVGEPMDQEDSESKTVSEHGERDWMTAKKFWKPGDSLAPPEVDFDRLLASLQDLSELVVEGDTQVTPVPGGARLRTLEPIPLKLYRNGIMMFDGPFQPFYDPSTQRCLRDILDGFFPSELQRLYPNGVPFKVISCSSNHTFGDFEGSGDTQPPQTPPILRGSRCTPWGTPV

SEQ ID NO: 5696 - DNA, 1642 bp, Homo sapiens
gtactttcccaagcaccaccaggccaaaggtctctcagttcagagcagaaagccgtatacccagaggagcaggcagataacagaaacttccagaaacctctgtggagacagtggaagaggcaaaagggagttcctgacagctggattctagaagtagaactatgagctcacctttggcctcccttagcaagacccgaaaagtgcccctgccctcggagcctatgaatcctgggaggcgaggaatccgcatctatggagatgtccctgcatcccatgactcggagctgatggccttcatgacgaggaagttgtgggacctggagcagcaggtgaaggcccagactgatgagatactgtccaaggatcagaagatagcggccctagaggacctggtgcagaccctccggccacacccagccgaggcaaccctgcagcggcaggaggaactggagacgatgtgtgtgcagctgcagcggcaggtcagggagatggagcggttcctcagtgactatggcctgcagtgggtgggcgagcccatggaccaggaggactcagagagcaagacagtctcagagcatggcgagagggactggatgacagccaagaagttctggaagccaggggactcattggcgccccctgaggtggactttgacaggctgctggccagcctgcaggatcttagtgagctggtggtagagggtgacacccaagtgacaccagtgcccggcggggcacggctgcgtaccctcgagcccatcccgctgaagctctaccggaatggcatcatgatgttcgacgggcccttccagcccttctacgatccctccacacagcgctgcctccgagacatattggatggcttctttccctcagagctccagcgactgtaccccaatggggtcccctttaaggtgagtgacttgcgcaatcaggtctacctggaggatggactggaccccttcccaggcgagggccgtgtggtgggcaggcagctgatgcacaaggccttggacagggtggaggagcacccaggctccaggatgactgctgagaaatttctgaacaggctccccaagtttgtgatccggcaaggcgaggtgattgacatccggggccccatcagggacaccttgcagaactgctgcccattgcctgcccggatccaggagattgtggtggagacgcccaccttggccgctgagcgagagaggagccaggagtcacccaacacgccggcacccccgctctccatgctgcgcatcaagtctgagaatggggaacaggccttcctactgatgatgcagcctgacaacaccattggggacgtgcgagctctgctagcgcaggccagggtcatggatgcctctgcctttgagatcttcagcacattcccgcccaccctctaccaggacgatacactcacgctgcaggctgcaggccttgtgcccaaagcagcactgctgctgcgggcacgccgagccccgaagtccagcctgaaattcagtcctggtccctgtcccggtcccggtcccggccccagtcccggtcccggtcccggccccagtcccggtcccggtcccggccccagtccctgtcctggacccagtcccagcccccaataaagcacccgccccctcaa

SEQ ID NO: 5697 - protein, 487 aa, Homo sapiens
MSSPLASLSKTRKVPLPSEPMNPGRRGIRIYGDVPASHDSELMAFMTRKLWDLEQQVKAQTDEILSKDQKIAALEDLVQTLRPHPAEATLQRQEELETMCVQLQRQVREMERFLSDYGLQWVGEPMDQEDSESKTVSEHGERDWMTAKKFWKPGDSLAPPEVDFDRLLASLQDLSELVVEGDTQVTPVPGGARLRTLEPIPLKLYRNGIMMFDGPFQPFYDPSTQRCLRDILDGFFPSELQRLYPNGVPFKVSDLRNQVYLEDGLDPFPGEGRVVGRQLMHKALDRVEEHPGSRMTAEKFLNRLPKFVIRQGEVIDIRGPIRDTLQNCCPLPARIQEIVVETPTLAAERERSQESPNTPAPPLSMLRIKSENGEQAFLLMMQPDNTIGDVRALLAQARVMDASAFEIFSTFPPTLYQDDTLTLQAAGLVPKAALLLRARRAPKSSLKFSPGPCPGPGPGPSPGPGPGPSPGPGPGPSPCPGPSPSPQ

SEQ ID NO: 5698 - DNA, 2327 bp, Homo sapiens
aacaagatggcggcgctgcgggacggctagcggccctgcgtgtccctgcatcccatgactcggagctgatggccttcatgacgaggaagttgtgggacctggagcagcaggtgaaggcccagactgatgagatactgtccaaggatcagaagatagcggccctagaggacctggtgcagaccctccggccacacccagcggttcctcagtgactatggcctgcagtgggtgggcgagcccatggaccaggaggactcagagagcaagacagtctcagagcatggcgagagggactggatgacagccaagaagttctggaagccaggggactcattggcgccccctgaggtggactttgacaggctgctggccagcctgcaggatcttagtgagctggtggtagagggtgacacccaagtgacaccagtgcccggcggggcacggctgcgtaccctcgagcccatcccgctgaagctctaccggaatggcatcatgatgttcgacgggcccttccagcccttctacgatccctccacacagcgctgcctccgagacatattggatggcttctttccctcagagctccagcgactgtaccccaatggggtcccctttaaggtgataagctgctcctcaaaccacacctttggggattttgaagggagtggggatacacagcctccccagacacctcccattctgaggggaagccgctgcactccctgggggaccccagtctgatgccctccaggaggataagtctgaagccgggctgggaagggagcggagaggcccgaaacagagcagcaggcagcgccctctgctggcaccctggagacagcctcggctgcggggcccctgccttctagtcctccccagctttcaggacaccttgacaacctggggtccctgcagaagtggcccggctgtcccccaagtctcctgaagctatctgggtagggtgggaggcagtgctgtgagccacaaatgcaaagcagaggggacagatgttgggactcaaagacatgaggtagagctggccccatgggtaggtgccaccaccagagcccatgaggcttcgtgttctagaaggtggtgggttagtgccgcactgagggcgtgtccgggagggagcatgtgtcaccagggctcaggaaacagcatgagtcatgacgcgggggtgtttaaggcattcgtgccacagcggggacctcggagctatgccttgataaggcaagtgaggttacatgtacgatgatgcggtttgtgctgcagactggaaaaaagcaggggctttgtcctctcctgaccccctcacactctgccttcacggtaggctcctgagaggggggtctccaaggagggtgtcagtactgcagcttcagctggcgtggatggggtgcttacaggagcagcagggctgagggagatgacagcagtacgaaccgtggctctcctgaggcctgggtttcctcatatgtaaaatgggggttgcattagaccatacccttggcctgtgtttaggcaaatagggatgaaagtggggccaagggctgaagagctgggtccgctgccgtcgttgcccttctttcttgccaggtgagtgacttgcgcaatcaggtctacctggaggatggactggaccccttcccaggcgagggccgtgtggtgggcaggcagctgatgcacaaggccttggacagggtggaggagcacccaggctccaggatgactgctgagaaatttctgaacaggctccccaagtttgtgatccggcaaggcgaggtgattgacatccggggccccatcagggacaccttgcagaactgctgcccattgcctgcccggatccaggagattgtggtggagacgcccaccttggccgctgagcgagagaggagccaggagtcacccaacacgccggcacccccgctctccatgctgcgcatcaagtctgagaatggggaacaggccttcctactgatgatgcagcctgacaacaccattggggacgtgcgagctctgctagcgcaggccagggtcatggatgcctctgcctttgagatcttcagcacattcccgcccaccctctaccaggacgatacactcacgctgcaggctgcaggccttgtgcccaaagcagcactgctgctgcgggcacgccgagccccgaagtccagcctgaaattcagtcctggtccctgtcccggtcccggtcccggccccagtcccggtcccggtcccggccccagtcccggtcccggtcccggccccagtccctgtcctggacccagtcccagcccccaataaagcacccgccccctcaa

SEQ ID NO: 5699 - protein, 208 aa, Homo sapiens
MHKALDRVEEHPGSRMTAEKFLNRLPKFVIRQGEVIDIRGPIRDTLQNCCPLPARIQEIVVETPTLAAERERSQESPNTPAPPLSMLRIKSENGEQAFLLMMQPDNTIGDVRALLAQARVMDASAFEIFSTFPPTLYQDDTLTLQAAGLVPKAALLLRARRAPKSSLKFSPGPCPGPGPGPSPGPGPGPSPGPGPGPSPCPGPSPSPQ

SEQ ID NO: 5700 - DNA, 2542 bp, Homo sapiens
gacaacaagatggcggcgctgcgggacggctagcggccctgcgtgggagttcctgacagctggattctagaagtagaactatgagctcacctttggcctcccttagcaagacccgaaaagtgcccctgccctcggagcctatgaatcctgggaggcgaggaatccgcatctatggagatgtccctgcatcccatgactcggagctgatggccttcatgacgaggaagttgtgggacctggagcagcaggtgaaggcccagactgatgagatactgtccaaggatcagaagatagcggccctagaggacctggtgcagaccctccggccacacccagccgaggcaaccctgcagcggcaggaggaactggagacgatgtgtgtgcagctgcagcggcaggtcagggagatggagcggttcctcagtgactatggcctgcagtgggtgggcgagcccatggaccaggaggactcagagagcaagacagtctcagagcatggcgagagggactggatgacagccaagaagttctggaagccaggggactcattggcgccccctgaggtggactttgacaggctgctggccagcctgcaggatcttagtgagctggtggtagagggtgacacccaagtgacaccagtgcccggcggggcacggctgcgtaccctcgagcccatcccgctgaagctctaccggaatggcatcatgatgttcgacgggcccttccagcccttctacgatccctccacacagcgctgcctccgagacatattggatggcttctttccctcagagctccagcgactgtaccccaatggggtcccctttaaggtgataagctgctcctcaaaccacacctttggggattttgaagggagtggggatacacagcctccccagacacctcccattctgaggggaagccgctgcactccctgggggaccccagtctgatgccctccaggaggataagtctgaagccgggctgggaagggagcggagaggcccgaaacagagcagcaggcagcgccctctgctggcaccctggagacagcctcggctgcggggcccctgccttctagtcctccccagctttcaggacaccttgacaacctggggtccctgcagaagtggcccggctgtcccccaagtctcctgaagctatctgggtagggtgggaggcagtgctgtgagccacaaatgcaaagcagaggggacagatgttgggactcaaagacatgaggtagagctggccccatgggtaggtgccaccaccagagcccatgaggcttcgtgttctagaaggtggtgggttagtgccgcactgagggcgtgtccgggagggagcatgtgtcaccagggctcaggaaacagcatgagtcatgacgcgggggtgtttaaggcattcgtgccacagcggggacctcggagctatgccttgataaggcaagtgaggttacatgtacgatgatgcggtttgtgctgcagactggaaaaaagcaggggctttgtcctctcctgaccccctcacactctgccttcacggtaggctcctgagaggggggtctccaaggagggtgtcagtactgcagcttcagctggcgtggatggggtgcttacaggagcagcagggctgagggagatgacagcagtacgaaccgtggctctcctgaggcctgggtttcctcatatgtaaaatgggggttgcattagaccatacccttggcctgtgtttaggcaaatagggatgaaagtggggccaagggctgaagagctgggtccgctgccgtcgttgcccttctttcttgccaggtgagtgacttgcgcaatcaggtctacctggaggatggactggaccccttcccaggcgagggccgtgtggtgggcaggcagctgatgcacaaggccttggacagggtggaggagcacccaggctccaggatgactgctgagaaatttctgaacaggctccccaagtttgtgatccggcaaggcgaggtgattgacatccggggccccatcagggacaccttgcagaactgctgcccattgcctgcccggatccaggagattgtggtggagacgcccaccttggccgctgagcgagagaggagccaggagtcacccaacacgccggcacccccgctctccatgctgcgcatcaagtctgagaatggggaacaggccttcctactgatgatgcagcctgacaacaccattggggacgtgcgagctctgctagcgcaggccagggtcatggatgcctctgcctttgagatcttcagcacattcccgcccaccctctaccaggacgatacactcacgctgcaggctgcaggccttgtgcccaaagcagcactgctgctgcgggcacgccgagccccgaagtccagcctgaaattcagtcctggtccctgtcccggtcccggtcccggccccagtcccggtcccggtcccggccccagtcccggtcccggtcccggccccagtccctgtcctggacccagtcccagcccccaataaagcacccgccccctcaa

SEQ ID NO: 5701 - protein, 291 aa, Homo sapiens
MSSPLASLSKTRKVPLPSEPMNPGRRGIRIYGDVPASHDSELMAFMTRKLWDLEQQVKAQTDEILSKDQKIAALEDLVQTLRPHPAEATLQRQEELETMCVQLQRQVREMERFLSDYGLQWVGEPMDQEDSESKTVSEHGERDWMTAKKFWKPGDSLAPPEVDFDRLLASLQDLSELVVEGDTQVTPVPGGARLRTLEPIPLKLYRNGIMMFDGPFQPFYDPSTQRCLRDILDGFFPSELQRLYPNGVPFKVISCSSNHTFGDFEGSGDTQPPQTPPILRGSRCTPWGTPV

SEQ ID NO: 5702 - DNA, 1794 bp, Homo sapiens
aaaccgcgtgacaacaagatggcggcgctgcgggacggctagcggccctgcgtgtactttcccaagcaccaccaggccaaaggtctctcagttcagagcagaaagccgtatacccagaggagcaggcagataacagaaacttccagaaacctctgtggagacagtggaagaggcaaaagggagttcctgacagctggattctagaagtagaactatgagctcacctttggcctcccttagcaagacccgaaaagtgcccctgccctcggagcctatgaatcctgggaggcgaggaatccgcatctatggagatgaagatgaggtggacatgttgagtgatgggtgtggctcagaagaaaagatctcagtcccttcctgctatggcggcataggtgcccctgtgagtcggcaagtccctgcatcccatgactcggagctgatggccttcatgacgaggaagttgtgggacctggagcagcaggtgaaggcccagactgatgagatactgtccaaggatcagaagatagcggccctagaggacctggtgcagaccctccggccacacccagccgaggcaaccctgcagcggcaggaggaactggagacgatgtgtgtgcagctgcagcggcaggtcagggagatggagcggttcctcagtgactatggcctgcagtgggtgggcgagcccatggaccaggaggactcagagagcaagacagtctcagagcatggcgagagggactggatgacagccaagaagttctggaagccaggggactcattggcgccccctgaggtggactttgacaggctgctggccagcctgcaggatcttagtgagctggtggtagagggtgacacccaagtgacaccagtgcccggcggggcacggctgcgtaccctcgagcccatcccgctgaagctctaccggaatggcatcatgatgttcgacgggcccttccagcccttctacgatccctccacacagcgctgcctccgagacatattggatggcttctttccctcagagctccagcgactgtaccccaatggggtcccctttaaggtgagtgacttgcgcaatcaggtctacctggaggatggactggaccccttcccaggcgagggccgtgtggtgggcaggcagctgatgcacaaggccttggacagggtggaggagcacccaggctccaggatgactgctgagaaatttctgaacaggctccccaagtttgtgatccggcaaggcgaggtgattgacatccggggccccatcagggacaccttgcagaactgctgcccattgcctgcccggatccaggagattgtggtggagacgcccaccttggccgctgagcgagagaggagccaggagtcacccaacacgccggcacccccgctctccatgctgcgcatcaagtctgagaatggggaacaggccttcctactgatgatgcagcctgacaacaccattggggacgtgcgagctctgctagcgcaggccagggtcatggatgcctctgcctttgagatcttcagcacattcccgcccaccctctaccaggacgatacactcacgctgcaggctgcaggccttgtgcccaaagcagcactgctgctgcgggcacgccgagccccgaagtccagcctgaaattcagtcctggtccctgtcccggtcccggtcccggccccagtcccggtcccggtcccggccccagtcccggtcccggtcccggccccagtccctgtcctggacccagtcccagcccccaataaagcacccgccccctcaa

SEQ ID NO: 5703 - protein, 520 aa, Homo sapiens
MSSPLASLSKTRKVPLPSEPMNPGRRGIRIYGDEDEVDMLSDGCGSEEKISVPSCYGGIGAPVSRQVPASHDSELMAFMTRKLWDLEQQVKAQTDEILSKDQKIAALEDLVQTLRPHPAEATLQRQEELETMCVQLQRQVREMERFLSDYGLQWVGEPMDQEDSESKTVSEHGERDWMTAKKFWKPGDSLAPPEVDFDRLLASLQDLSELVVEGDTQVTPVPGGARLRTLEPIPLKLYRNGIMMFDGPFQPFYDPSTQRCLRDILDGFFPSELQRLYPNGVPFKVSDLRNQVYLEDGLDPFPGEGRVVGRQLMHKALDRVEEHPGSRMTAEKFLNRLPKFVIRQGEVIDIRGPIRDTLQNCCPLPARIQEIVVETPTLAAERERSQESPNTPAPPLSMLRIKSENGEQAFLLMMQPDNTIGDVRALLAQARVMDASAFEIFSTFPPTLYQDDTLTLQAAGLVPKAALLLRARRAPKSSLKFSPGPCPGPGPGPSPGPGPGPSPGPGPGPSPCPGPSPSPQ

SEQ ID NO: 5704 - DNA, 1337 bp, Homo sapiens
aaaccgcgtgacaacaagatggcggcgctgcgggacggctagcggccctgcgtggaggcgaggaatccgcatctatggagatgtccctgcatcccatgactcggagctgatggccttcatgacgaggaagttgtgggacctggagcagcaggtgaaggcccagactgatgagatactgtccaaggatcagaagatagcggccctagaggacctggtgcagaccctccggccacacccagccgaggcaaccctgcagcggcaggaggaactggagacgatgtgtgtgcagctgcagcggcaggtcagggagatggaggggactcattggcgccccctgaggtggactttgacaggctgctggccagcctgcaggatcttagtgagctggtggtagagggtgacacccaagtgacaccagtgcccggcggggcacggctgcgtaccctcgagcccatcccgctgaagctctaccggaatggcatcatgatgttcgacgggcccttccagcccttctacgatccctccacacagcgctgcctccgagacatattggatggcttctttccctcagagctccagcgactgtaccccaatggggtcccctttaaggtgagtgacttgcgcaatcaggtctacctggaggatggactggaccccttcccaggcgagggccgtgtggtgggcaggcagctgatgcacaaggccttggacagggtggaggagcacccaggctccaggatgactgctgagaaatttctgaacaggctccccaagtttgtgatccggcaaggcgaggtgattgacatccggggccccatcagggacaccttgcagaactgctgcccattgcctgcccggatccaggagattgtggtggagacgcccaccttggccgctgagcgagagaggagccaggagtcacccaacacgccggcacccccgctctccatgctgcgcatcaagtctgagaatggggaacaggccttcctactgatgatgcagcctgacaacaccattggggacgtgcgagctctgctagcgcaggccagggtcatggatgcctctgcctttgagatcttcagcacattcccgcccaccctctaccaggacgatacactcacgctgcaggctgcaggccttgtgcccaaagcagcactgctgctgcgggcacgccgagccccgaagtccagcctgaaattcagtcctggtccctgtcccggtcccggtcccggccccagtcccggtcccggtcccggccccagtcccggtcccggtcccggccccagtccctgtcctggacccagtcccagcccccaataaagcacccgccccctcaa

SEQ ID NO: 5705 - protein, 278 aa, Homo sapiens
MMFDGPFQPFYDPSTQRCLRDILDGFFPSELQRLYPNGVPFKVSDLRNQVYLEDGLDPFPGEGRVVGRQLMHKALDRVEEHPGSRMTAEKFLNRLPKFVIRQGEVIDIRGPIRDTLQNCCPLPARIQEIVVETPTLAAERERSQESPNTPAPPLSMLRIKSENGEQAFLLMMQPDNTIGDVRALLAQARVMDASAFEIFSTFPPTLYQDDTLTLQAAGLVPKAALLLRARRAPKSSLKFSPGPCPGPGPGPSPGPGPGPSPGPGPGPSPCPGPSPSPQ

SEQ ID NO: 5706 - DNA, 1103 bp, Homo sapiens
agaagtgcacgggtcctggtcgcctaggaaaccgcgtgacaacaagatggcggcgctgcgggacggctagcggccctgcgtggggactcattggcgccccctgaggtggactttgacaggctgctggccagcctgcaggatcttagtgagctggtggtagagggtgacacccaagtgacaccagtgcccggcggggcacggctgcgtaccctcgagcccatcccgctgaagctctaccggaatggcatcatgatgttcgacgggcccttccagcccttctacgatccctccacacagcgctgcctccgagacatattggatggcttctttccctcagagctccagcgactgtaccccaatggggtcccctttaaggtgagtgacttgcgcaatcaggtctacctggaggatggactggaccccttcccaggcgagggccgtgtggtgggcaggcagctgatgcacaaggccttggacagggtggaggagcacccaggctccaggatgactgctgagaaatttctgaacaggctccccaagtttgtgatccggcaaggcgaggtgattgacatccggggccccatcagggacaccttgcagaactgctgcccattgcctgcccggatccaggagattgtggtggagacgcccaccttggccgctgagcgagagaggagccaggagtcacccaacacgccggcacccccgctctccatgctgcgcatcaagtctgagaatggggaacaggccttcctactgatgatgcagcctgacaacaccattggggacgtgcgagctctgctagcgcaggccagggtcatggatgcctctgcctttgagatcttcagcacattcccgcccaccctctaccaggacgatacactcacgctgcaggctgcaggccttgtgcccaaagcagcactgctgctgcgggcacgccgagccccgaagtccagcctgaaattcagtcctggtccctgtcccggtcccggtcccggccccagtcccggtcccggtcccggccccagtcccggtcccggtcccggccccagtccctgtcctggacccagtcccagcccccaataaagcacccgccccctcaa

SEQ ID NO: 5707 - protein, 278 aa, Homo sapiens; identical to SEQ ID NO: 5705

SEQ ID NO: 5708 - DNA, 2357 bp, Homo sapiens
tgtccttaatgcttgatggagctgcaactagaactgttcttgatggagattaagctggttttgatggtgatcaagctgttcttgatcaagaacttgatggctccggtctgctgtactgactcccctctgggcacctgggatgctaccaaagctgcctcctggaatagcagtcgcttttgagactccagttgtttctgaaatgggagagtcctgtcttctttgcattcctgaacatccaggcttctctctggcaggggagtgggggttagagtgtcccctgtcacctccataaccacagcaggctccacttggacatctcctggcctctccccaaaggaccatctccccagactccctgtgggccgatgccttcctcactcagggttgtcttcccaagtctcttagttctctattattccacaacaccccttgggtgccccaacgcgcctagcaccctgtaagtgctccccagctgtggatacaggtttctctcagggcagcccgcaagcagtgcagccccagccagaagagctggaaggctgggcggccaggcccgctgtgtccccagttttcctgttggagtccatctgctgtgctctcaggagagaaggctgggtctctgggagctcacatcctgtatgccctccctccatgccaagcaactttggggagtcctggcagtggtgccaggcgttgctcttacctgtaccataaccaggaggctgatggttgctcaggcctccctcaaactagccaatgagaagtgcacgggtcctggtcgcctaggaaaccgcgtgacaacaagatggcggcgctgcgggacggctagcggccctgcgtgggagttcctgacagctggattctagaagtagaactatgagctcacctttggcctcccttagcaagacccgaaaagtgcccctgccctcggagcctatgaatcctgggaggcgaggaatccgcatctatggagatgtccctgcatcccatgactcggagctgatggccttcatgacgaggaagttgtgggacctggagcagcaggtgaaggcccagactgatgagatactgtccaaggatcagaagatagcggccctagaggacctggtgcagaccctccggccacacccagccgaggcaaccctgcagcggcaggaggaactggagacgatgtgtgtgcagctgcagcggcaggtcagggagatggagcggttcctcagtgactatggcctgcagtgggtgggcgagcccatggaccaggaggactcagagagcaagacagtctcagagcatggcgagagggactggatgacagccaagaagttctggaagccaggggactcattggcgccccctgaggtggactttgacaggctgctggccagcctgcaggatcttagtgagctggtggtagagggtgacacccaagtgacaccagtgcccggcggggcacggctgcgtaccctcgagcccatcccgctgaagctctaccggaatggcatcatgatgttcgacgggcccttccagcccttctacgatccctccacacagcgctgcctccgagacatattggatggcttctttccctcagagctccagcgactgtaccccaatggggtcccctttaaggtgagtgacttgcgcaatcaggtctacctggaggatggactggaccccttcccaggcgagggccgtgtggtgggcaggcagctgatgcacaaggccttggacagggtggaggagcacccaggctccaggatgactgctgagaaatttctgaacaggctccccaagtttgtgatccggcaaggcgaggtgattgacatccggggccccatcagggacaccttgcagaactgctgcccattgcctgcccggatccaggagattgtggtggagacgcccaccttggccgctgagcgagagaggagccaggagtcacccaacacgccggcacccccgctctccatgctgcgcatcaagtctgagaatggggaacaggccttcctactgatgatgcagcctgacaacaccattggggacgtgcgagctctgctagcgcaggccagggtcatggatgcctctgcctttgagatcttcagcacattcccgcccaccctctaccaggacgatacactcacgctgcaggctgcaggccttgtgcccaaagcagcactgctgctgcgggcacgccgagccccgaagtccagcctgaaattcagtcctggtccctgtcccggtcccggtcccggccccagtcccggtcccggtcccggccccagtcccggtcccggtcccggccccagtccctgtcctggacccagtcccagcccccaataaagcacccgccccctcaa

SEQ ID NO: 5709 - protein, 487 aa, Homo sapiens; identical to SEQ ID NO: 5697

SEQ ID NO: 5710 - DNA, 2599 bp, Homo sapiens
gctcccggcgagcgggcggagagcgggggccgcactggggagtgtgggctgggccgcagatgtcatgtggcctgtgttttggaccgtggttcgtacctatgctccttatgtcacattccctgttgccttcgtggtcggggctgtgggttaccacctggaatggttcatcaggggaaaggacccccagcccgtggaggaggaaaagagcatctcagagcgccgggaggatcgcaagctggatgagcttctaggcaaggaccacacgcaggtggctggaatgaggctgtgaggctccagcagccgttttgtgccacgaggcagtagaaacctgggttcctgatgactgtggagctgccgaactaatctggacctccagattccatacctgcaagacacatgaacatctgtcttatccatccctggagaggatccctggagaggagcaaacccaggccatccggattttctgcatgggagacctggctgaccgctgcctgggctgctttcaagtctcaccgaattatgaagtcaactactgggtgtttagaatgtctcaagttcaaagactagcaggctagaagcagacatctgagagaacttcgggcaccttagcaggaggaatattaagatgtggcatgctgggcttatcgggagactggatagggatcagaaggaatacatttctattctgcgagctgcagagctcaggagtcgttctgatatcaggcccattgctgactctgctaggaaatgtggaaagctgcagctgcagacagctggctgtgcctgcttcactggagttctcagctctcttacacctgtctgtttagaaaggagcagacaggctgtgaagctctgcaggattcttttcagtgctggggcagaaggagaaatggtggggacagccactctgggcatcagaaccgaatacctgctccccactcctctcagttgcacagcccagctcctggcttcactgcagtgggaagggagatgaaggactcttgaactcagaatatgactgaccaagacccttacagctggggtggaggtagggggctgaaggcaggttctggaggtggagattgagtcttccagttgttttcctggcaacagcgggaacaatagattctaggttctggctggctcaggagttggggtgtctgacctgtctttcctcagtcccttctgctatagatactgatagtcctctgccaccaggctctgcctaccaagtccctgagctcttcctgacctagcctggctctgagaggggagccagcatggcagagggtgggcctggtaccagttgtgtctccctgaatacaggatctgagagctggggagctatggacacccagagcccatcagcctggtctctcccctcactgtaggttcccaggccagtggctggttcctgattttacctagtcttctgcactgggataagaacctgacatccagcttcccctttgggagtaaggcctcttccacgggctgctcctggtctgtgttttccactgcagtctgggagcctacttcccccatgaaggccctaaccccacccatgaagacactacatgaattactgtccagactggactccagatgcagcctcggattagacccaatttggcctcatctccttggagctgtctagtaatttggaatacacgctgctccctacttagccacctgcaaagcagggtccatctcccagcctggttctgccttttcctcagtcttatatgtgtgtgtctgagtacatgtgtcagtcagtgatcatgccaggacggccagctggacttgtgtcagcatgcacatatgttccttgaggctgtcccgtgcaggcgtgcactgagttctcagcccagttctgaagcgtgtttgtgaatatgcccagatacatcatgaacattgctgggatgctaggagggggatcagtatgaatgacattgcatgtcctcaagtacacaggtatgtgtctacgcacacgcacaaacctctctaatatgtatgtatgcacgtgtacatgtgtataatatggctaagtgtgtgtctgggagtatttgaccatgtctgatgtgaatcttctgcccattctgaaaggaaaggggacatgggcccactctccctttttgtagttacactgtggtcagggctggcttgtgacagagggagtcaaggtgagtgcccctctgaacttctgggatctttctgcctaacattctgagacttccccagctgttccctagtcctgcagccttggctgtcagtacttcaagattatctggccaggcgtggtggctcatgcctgtaatcccagcattttgggaggccgaggcgggcagatcatttgaagtcaggagtttgagaccaggccaacatggtgagaccccatctctactaaaaataaaaaaattagccaggtgtactggcacgtgcctgtaatcccagctacttgggaggctgaggcaggagaatcacttgaatccaggagacagaggctgaagtgagtcgagattgcaccactgcactccagcctgggtgacagagtgacacttggtctcaaaaacaaacgaacaaacaacaaacaaac

SEQ ID NO: 5711 - protein, 122 aa, Homo sapiens
MWHAGLIGRLDRDQKEYISILRAAELRSRSDIRPIADSARKCGKLQLQTAGCACFTGVLSSLTPVCLERSRQAVKLCRILFSAGAEGEMVGTATLGIRTEYLLPTPLSCTAQLLASLQWEGR

SEQ ID NO: 5712 - DNA, 599 bp, Homo sapiens
ataagtttatcctggacaatttccatattgctggacatttgaattgtttctggttggtcactcgtttagatactgcaacgaatatcttatatgaagcttttcctgcgttttggaataaacagtaaaaatagtaaatgtcattttggatgaaatgggataaatgagcagttttgaggatctcatgcataacaccaaatgtctttccaaaagggctctaggagtttctactaaatcttaccactgaagacgttgctggtaaggctgtgaggggagtaaaagcagagagcaggaagaagcataagaagctgttgcctcttgaagcctactgatgtttaactaaagtcagcacagggcagtagtgagcatttgatgaattgatctgcagttttcctaagcacagattgtctttcctgctctgcttctctagccctgtgttcattcttccactgcaagaatgttgttaaataaggcactgggattggtgtgtctgtatccccccctagactgtgagttccttgagggcagggaccaattcttactcctctgccccttgcagagtacctcacaaatgatcattgtcaataaatgttgaatgaatt

SEQ ID NO: 5713 - protein, 45 aa, Homo sapiens
MLLNKALGLVCLYPPLDCEFLEGRDQFLLLCPLQSTSQMIIVNKC

SEQ ID NO: 5714 - DNA, 1775 bp, Homo sapiens
cggttttcttccatgcttgctgattcaccttggaggcatgtgaccctctttttgactggccttccagtcacagttcactgaaacacatgagtgagtggatgtgcttggggctttttgctccccgcttacccccgtctcttcccagcccaatgatggtggtggctttagtatagggtcctctccgagcacggcaggaatcacttctctccctgcagcggttcagtgtctggtgcttttccactctttctagactctttcctgtgcctgttgctgtgttagcacaagtcggctgggcagctgccagaacaagcctgccagggagccttttgactctggtcagctccccagggctccaggctggtgggactgccgctgagtgaaacatcatggaattagccttgccagagtctgggttgggagccaggcagtgaaaatgtaaaagcccctccgtcttgctcacttttccttttctactttgctttagatctctaagcacttgtagggtagggagccagggcagtgtagcagaggaaaaataaagtggattctagagtctgacaggctcgagttatgaatactgccttaacaattaactggatgaccttgggcaagtcacttagcccttctgaacctcaatatcctcacaacaaccagtaggtactcagtaaatgttagcagctttaattgtattgcaggaagaacctatgtttcctgcaatagttgtgtgtatccttgtgaccctggtgaggtggggatctaggggagagagcagccttggctgagggacaacagggaccctcatagacctggtggttgagggctgcttagaaatatttcacagagagaactggcttgcataagaaccaagaagcacaagctggtcaggagattgcaggctccacacctgccttagtggtagttccatcagtgcagtctgcaaagtcagagggaagcagattggccagaatgcccaggaggtcacagatcaggagaattgggaggggaaagagccttggacttggaggcaagcgatctgagtgatgacctggggtatgccgcttcacctctactggccttggtttccctgcaaaatggggaacgtgttccctgctgatcgtgtgaaaagagtgagacaaccagtttagagtgctctgaaaacatgcaagtgctagatattacagcccagtaaaacctcctttatctagttgggatggcagccagtctgaataataaaatacaaatacatgtgctattatttctttcctgtacagagcgtattttatagtatttgctaagtagaagtctttaggggaatcagtttgaagagtgaagagtaattagtaaccggtgtatcagttttcatcctgttccagcagtgcctctggtacttaaaaaacagtttattctttttgaattaaacttgttaacatcaattatgtgttaatcagatcctttttacataatacaaaagtaaactctggctttgttttttgttaaaaaatgcctaatgggcccttctaattattcagatttaaaaaaatctttactagcgccccagcaagggcaccttttccatgtagaagaatccaaagtccttagggcccttattccctctctcactgcccagtttcttcacttccaacccctgctgcaattccgtttctccttctctgagcctaagctgctaagtgcagctggagtaatttgcataaccatctcgcccggccctcttccttcatgggttgtggatgcaacagagtctgcaacacttcaag

SEQ ID NO: 5715 - protein, 88 aa, Homo sapiens
MGPSNYSDLKKSLLAPQQGHLFHVEESKVLRALIPSLTAQFLHFQPLLQFRFSFSEPKLLSAAGVICITISPGPLPSWVVDATESATL

SEQ ID NO: 5716 - DNA, 2592 bp, Homo sapiens
ctgcgctccgagagagccggcggccagtgggcagggtcacagggcaaggtcccgcgggccgctgggtgcggcgacttccgtgctcccggcgagcgggcggagagcgggggccgcactggggagtgtgggctgggccgcagatgtcatgtggcctgtgttttggaccgtggttcgtacctatgctccttatgtcacattccctgttgccttcgtggtcggggctgtgggttaccacctggaatggttcatcaggggaaaggacccccagcccgtggaggaggaaaagagcatctcagagcgccgggaggatcgcaagctggatgagcttctaggcaaggaccacacgcaggtggtgagccttaaggacaagctagaatttgccccgaaagctgtgctgaacagaaaccgcccagagaagaattaatggaggacacagggccctatggtcctactgtgggtggtgacttgtcctgctaccatgttgacagagccccagaacccacatctaattggctttgttgcttattctggcccttcccacaccacacagccacacaaatactggctgctccttgatggccaggcagacccagcagcagccgaggggccagtgaagaggaaggccgcatctgttgtgtggtggccacaagcactcaggcatctgagtttactggtgcactgctgggaggagagttatgagatgaacattggctgtcaatctctgtgggcaggcggtttggcctctagtgggaatggctgggatttgggcgttgcctttaggagggatacctgcatgtctagttccagtctgcactggaaagaattcaaatatgcacctggctcccttcactattttgccctatcctttgtgctcattcttactgaaatctgtcttgtcagctcaggaatgggattcccccaggaaggaaagcacttttctgttctgggaagcccagactgttcactttggggcagggacgaacatgtgcctcgtgaatttgcttgaaaacagtcaccatcttctacccccatcactgtatagtgaaaaacctgattaaagtggtatctgagaaccataatgatcgaatcttatcatccaggtggtatttgggggtcttcttaggagttaggcaagtacaggcattttagagcaggataacattggtattaaagggtgccaaggagccctggaaactgctttactagtgcggttgcactgaaccctggaggcacagattcccaggaacctttttaccattattacaattggctgcagcaccttcaagtctaaatggaggtagacctcacatacacacacatagacgcctttccctataaaagtatatacgcacattcaagaaaatttggtagggattttaaaaaggtcacccatgttcccagctcgttaataacaaccgttaacattttgttgtcttttactaattctctgcataggttttagagatagttatcattactgtacatttaattttatatacttttctcactattatcattttcccattttacatggtcatcataattggttttttggagacagggtctcactctgtcacacaggctggagtgcagtacaattacggctcagtgcaaccttgacctcctgggctcaagtgatcctctcacttcagctcctcaagtagatgggactacaggagtatgccaccatgcccagctaatttttttatttttttgtagaaccaggtctcactatgttgcccaggctagtctcaaactcctgggctcaagtgatcctccggccttggcctgtagtttcttttttctttttttttggagatggactctcattctgtcacccgggctggagtgcagtggcgtgatcttggctgactgcaacttctgcctcctgggttcaagcgattctcctacctcagcttcctaagtagctgggattacaggcgtgcgccatcgtgcctggctagtttttgtgtttttagtaaagacaggggtttcaccatcttggccaggctggtctcgaactcctgacctcaagcgatcccatctgcctcggcctcccaaagtgctgggattacaggtgtgaggcaccgtgcctggcagtctgtagtttttttttgttgttgttgttgttgttgttttaaatatggagtctcgctgtattgcccaggctggagtgcagtggcgcgatcttggttcactgcaacctccacctcttgggttcaagcgattctcctgcctcagcctcctgagtagctgggattacaggtgtgcgccgctacgcctggctaatttttgtatttttagtagagacagggtttcaccatgttggtcaggctggtctcaaacttctgaccttgtgatctgcctgccttggcctcctaaagtgctgggattacaggcgtgagccaccgtgcctggctgtagttgtttataatagcaacataattgtctatcaagtgggagtatgacataagtttatcctggacaatttccatattgctggacatttgaattgtttctggttggtcactcgtttagatactgcaacgaatatcttatatgaagcttttcctgcgttttggaataaacagt

SEQ ID NO: 5717 - protein, 63 aa, Homo sapiens
MSCGLCFGPWFVPMLLMSHSLLPSWSGLWVTTWNGSSGERTPSPWRRKRASQSAGRIASWMSF

SEQ ID NO: 5718 - DNA, 1834 bp, Homo sapiens
gcgggggccgcactggggagtgtgggctgggccgcaggtgagcgcgcggtcccggcgagcaggtcgggtcagcccaggccagtaacctctgagttacgggaggagtgatcgctagggtccaccccggtcccggccagatctgccagctcccctctctggcgggtgttctggtgccaagtctgggagcccaggtagccctccgcagacagggcttctcggcacctcaatgaggacggacgttgatgaggccatgaatgagatgtcatgtggcctgtgttttggaccgtggttcgtacctatgctccttatgtcacattccctgttgccttcgtggtcggggctgtgggttaccacctggaatggttcatcaggggaaaggacccccagcccgtggaggaggaaaagagcatctcagagcgccgggaggatcgcaagctggatgagcttctaggcaaggaccacacgcaggtggtgagccttaaggacaagctagaatttgccccgaaagctgtgctgaacagaaaccgcccagagaagaattaatggaggacacagggccctatggtcctactgtgggtggtgacttgtcctgctaccatgttgacagagccccagaacccacatctaattggctttgttgcttattctggcccttcccacaccacacagccacacaaatactggctgctccttgatggccaggcagacccagcagcagccgaggggccagtgaagaggaaggccgcatctgttgtgtggtggccacaagcactcaggcatctgagtttactggtgcactgctgggaggagagttatgagatgaacattggctgtcaatctctgtgggcaggcggtttggcctctagtgggaatggctgggatttgggcgttgcctttaggagggatacctgcatgtctagttccagtctgcactggaaagaattcaaatatgcacctggctcccttcactattttgccctatcctttgtgctcattcttactgaaatctgtcttgtcagctcaggaatgggattcccccaggaaggaaagcacttttctgttctgggaagcccagactgttcactttggggcagggacgaacatgtgcctcgtgaatttgcttgaaaacagtcaccatcttctacccccatcactgtatagtgaaaaacctgattaaagtggtatctgagaaccataatgatcgaatcttatcatccaggtggtatttgggggtcttcttaggagttaggcaagtacaggcattttagagcaggataacattggtattaaagggtgccaaggagccctggaaactgctttactagtgcggttgcactgaaccctggaggcacagattcccaggaacctttttaccattattacaattggctgcagcaccttcaagtctaaatggaggtagacctcacatacacacacatagacgcctttccctataaaagtatatacgcacattcaagaaaatttggtagggattttaaaaaggtcacccatgttcccagctcgttaataacaaccgttaacattttgttgtcttttactaattctctgcataggttttagagatagttatcattactgtacatttaattttatatacttttctcactattatcattttcccattttacatggtcatcataattggttttttggagacagggtctcactctgtcacacaggctggagtgcagtacaattacggctcagtgcaaccttgacctcctgggctcaagtgatcctctcacttcagctcctcaagtagatgggactacaggagtatgccaccatgcccagctaatttttttattttttt

SEQ ID NO: 5719 - protein, 74 aa, Homo sapiens
MRTDVDEAMNEMSCGLCFGPWFVPMLLMSHSLLPSWSGLWVTTWNGSSGERTPSPWRRKRASQSAGRIASWMSF

SEQ ID NO: 5720 - DNA, 2662 bp, Homo sapiens
cttccgtgctcccggcgagcgggcggagagcgggggccgcactggggagtgtgggctgggccgcaggtgagcgcgcggtcccggcgagcaggtcgggtcagcccaggccagtaacctctgagttacgggaggagtgatcgctagggtccaccccggtcccggccagatctgccagctcccctctctggcgggtgttctggtgccaagtctgggagcccaggtagccctccgcagacagggcttctcggcacctcaatgaggacggacgttgatgaggccatgaatgaggtgggctagggacaggggaccgggagactcacagaagggagaagggtagccatttggatggaccttcgccttacttgcgctcccattcctggactgcgctctagtgactgtcagggctaattcttccgccttctcaggcctcctgtgtccttgttagtagttcttgaatttgggactacggcttctggcctcgttgggcctccgggccctcgcactggggcaggtttcccagcagcccagttgacctttaccggatgcttttggcagacgtcctccatgccgggctggaaatatgcgtcacagtgtttttcagacacttttgcctctttcattgtgataccctgcctggggacgactatgatggagtctttaggtttttgtaatcagcaaaggcatctgttatgctcctgccaccttttgggggagagtgggtggaggatgttgtgattttacactagggagtttgggctgtcattcattcgttcagcagaccttttttgggcactctgccaggcagggtaggagaggtgcctggatggatagggcataattgggccagacagacacggttcttagccttttggagcttaaagtgtcttgagaaacgcagacagggaaaaggaacgacttttcatattgtgaaaccaggagattcatcgtagattgtgtttcatggggaaaaggtggccggctgtgctcatggagaaatttcatagagcagagaaaggcatctttttcccttcttgaaatgttggcagactaggtcctggggtcaacaataggcttgaagctctattagatgtcatgtggcctgtgttttggaccgtggttcgtacctatgctccttatgtcacattccctgttgccttcgtggtcggggctgtgggttaccacctggaatggttcatcaggggaaaggacccccagcccgtggaggaggaaaagagcatctcagagcgccgggaggatcgcaagctggatgagcttctaggcaaggaccacacgcaggtggtgagccttaaggacaagctagaatttgccccgaaagctgtgctgaacagaaaccgcccagagaagaattaatggaggacacagggccctatggtcctactgtgggtggtgacttgtcctgctaccatgttgacagagccccagaacccacatctaattggctttgttgcttattctggcccttcccacaccacacagccacacaaatactggctgctccttgatggccaggcagacccagcagcagccgaggggccagtgaagaggaaggccgcatctgttgtgtggtggccacaagcactcaggcatctgagtttactggtgcactgctgggaggagagttatgagatgaacattggctgtcaatctctgtgggcaggcggtttggcctctagtgggaatggctgggatttgggcgttgcctttaggagggatacctgcatgtctagttccagtctgcactggaaagaattcaaatatgcacctggctcccttcactattttgccctatcctttgtgctcattcttactgaaatctgtcttgtcagctcaggaatgggattcccccaggaaggaaagcacttttctgttctgggaagcccagactgttcactttggggcagggacgaacatgtgcctcgtgaatttgcttgaaaacagtcaccatcttctacccccatcactgtatagtgaaaaacctgattaaagtggtatctgagaaccataatgatcgaatcttatcatccaggtggtatttgggggtcttcttaggagttaggcaagtacaggcattttagagcaggataacattggtattaaagggtgccaaggagccctggaaactgctttactagtgcggttgcactgaaccctggaggcacagattcccaggaacctttttaccattattacaattggctgcagcaccttcaagtctaaatggaggtagacctcacatacacacacatagacgcctttccctataaaagtatatacgcacattcaagaaaatttggtagggattttaaaaaggtcacccatgttcccagctcgttaataacaaccgttaacattttgttgtcttttactaattctctgcataggttttagagatagttatcattactgtacatttaattttatatacttttctcactattatcattttcccattttacatggtcatcataattggttttttggagacagggtctcactctgtcacacaggctggagtgcagtacaattacggctcagtgcaaccttgacctcctgggctcaagtgatcctctcacttcagctcctcaagtagatgggactacaggagtatgccaccatgcccagctaatttttttattttttt

SEQ ID NO: 5721 - protein, 63 aa, Homo sapiens; identical to SEQ ID NO: 5717

SEQ ID NO: 5722 - DNA, 1563 bp, Homo sapiens
ccgcgggccgctgggtgcggcgacttccgtgctcccggcgagcgggcggagagcgggggccgcactggggagtgtgggctgggccgcagatgtcatgtggcctgtgttttggaccgtggttcgtacctatgctccttatgtcacattccctgttgccttcgtggtcggggctgtgggttaccacctggaatggttcatcaggggaaaggacccccagcccgtggaggaggaaaagagcatctcagagcgccgggaggatcgcaagctggatgagcttctaggcaaggaccacacgcaggtggtgagccttaaggacaagctagaatttgccccgaaagctgtgctgaacagaaaccgcccagagaagaattaatggaggacacagggccctatggtcctactgtgggtggtgacttgtcctgctaccatgttgacagagccccagaacccacatctaattggctttgttgcttattctggcccttcccacaccacacacactcaggcatctgagtttactggtgcactgctgggaggagagttatgagatgaacattggctgtcaatctctgtgggcaggcggtttggcctctagtgggaatggctgggatttgggcgttgcctttaggagggatacctgcatgtctagttccagtctgcactggaaagaattcaaatatgcacctggctcccttcactattttgccctatcctttgtgctcattcttactgaaatctgtcttgtcagctcaggaatgggattcccccaggaaggaaagcacttttctgttctgggaagcccagactgttcactttggggcagggacgaacatgtgcctcgtgaatttgcttgaaaacagtcaccatcttctacccccatcactgtatagtgaaaaacctgattaaagtggtatctgagaaccataatgatcgaatcttatcatccaggtggtatttgggggtcttcttaggagttaggcaagtacaggcattttagagcaggataacattggtattaaagggtgccaaggagccctggaaactgctttactagtgcggttgcactgaaccctggaggcacagattcccaggaacctttttaccattattacaattggctgcagcaccttcaagtctaaatggaggtagacctcacatacacacacatagacgcctttccctataaaagtatatacgcacattcaagaaaatttggtagggattttaaaaaggtcacccatgttcccagctcgttaataacaaccgttaacattttgttgtcttttactaattctctgcataggttttagagatagttatcattactgtacatttaattttatatacttttctcactattatcattttcccattttacatggtcatcataattggttttttggagacagggtctcactctgtcacacaggctggagtgcagtacaattacggctcagtgcaaccttgacctcctgggctcaagtgatcctctcacttcagctcctcaagtagatgggactacaggagtatgccaccatgcccagctaatttttttattttttt

SEQ ID NO: 5723 - protein, 63 aa, Homo sapiens; identical to SEQ ID NO: 5717

SEQ ID NO: 5724 - DNA, 2550 bp, Homo sapiens
ggcagggtcacagggcaaggtcccgcgggccgctgggtgcggcgacttccgtgctcccggcgagcgggcggagagcgggggccgcactggggagtgtgggctgggccgcaggtgagcgcgcggtcccggcgagcaggtcgggtcagcccaggccagtaacctctgagttacgggaggagtgatcgctagggtccaccccggtcccggccagatctgccagctcccctctctggcgggtgttctggtgccaagtctgggagcccaggtagccctccgcagacagggcttctcggcacctcaatgaggacggacgttgatgaggccatgaatgaggtgggctagggacaggggaccgggagactcacagaagggagaagggtagccatttggatggaccttcgccttacttgcgctcccattcctggactgcgctctagtgactgtcagggctaattcttccgccttctcaggcctcctgtgtccttgttagtagttcttgaatttgggactacggcttctggcctcgttgggcctccgggccctcgcactggggcaggtttcccagcagcccagttgacctttaccggatgcttttggcagacgtcctccatgccgggctggaaatatgcgtcacagtgtttttcagacacttttgcctctttcattgtgataccctgcctggggacgactatgatggagtctttaggtttttgtaatcagcaaaggcatctgttatgctcctgccaccttttgggggagagtgggtggaggatgttgtgattttacactagggagtttgggctgtcattcattcgttcagcagaccttttttgggcactctgccaggcagggtaggagaggtgcctggatggatagggcataattgggccagacagacacggttcttagccttttggagcttaaagtgtcttgagaaacgcagacagggtaagccagcatcgtgcctgacacagaatgtcatgtggcctgtgttttggaccgtggttcgtacctatgctccttatgtcacattccctgttgccttcgtggtcggggctgtgggttaccacctggaatggttcatcaggggaaaggacccccagcccgtggaggaggaaaagagcatctcagagcgccgggaggatcgcaagctggatgagcttctaggcaaggaccacacgcaggtggtgagccttaaggacaagctagaatttgccccgaaagctgtgctgaacagaaaccgcccagagaagaattaatggaggacacagggccctatggtcctactgtgggtggtgacttgtcctgctaccatgttgacagagccccagaacccacatctaattggctttgttgcttattctggcccttcccacaccacacagccacacaaatactggctgctccttgatggccaggcagacccagcagcagccgaggggccagtgaagaggaaggccgcatctgttgtgtggtggccacaagcactcaggcatctgagtttactggtgcactgctgggaggagagttatgagatgaacattggctgtcaatctctgtgggcaggcggtttggcctctagtgggaatggctgggatttgggcgttgcctttaggagggatacctgcatgtctagttccagtctgcactggaaagaattcaaatatgcacctggctcccttcactattttgccctatcctttgtgctcattcttactgaaatctgtcttgtcagctcaggaatgggattcccccaggaaggaaagcacttttctgttctgggaagcccagactgttcactttggggcagggacgaacatgtgcctcgtgaatttgcttgaaaacagtcaccatcttctacccccatcactgtatagtgaaaaacctgattaaagtggtatctgagaaccataatgatcgaatcttatcatccaggtggtatttgggggtcttcttaggagttaggcaagtacaggcattttagagcaggataacattggtattaaagggtgccaaggagccctggaaactgctttactagtgcggttgcactgaaccctggaggcacagattcccaggaacctttttaccattattacaattggctgcagcaccttcaagtctaaatggaggtagacctcacatacacacacatagacgcctttccctataaaagtatatacgcacattcaagaaaatttggtagggattttaaaaaggtcacccatgttcccagctcgttaataacaaccgttaacattttgttgtcttttactaattctctgcataggttttagagatagttatcattactgtacatttaattttatatacttttctcactattatcattttcccattttacatggtcatcataattggttttttggagacagggtctcactctgtcacacaggctggagtgcagtacaattacggctcagtgcaaccttgacctcctgggctcaagtgatcctctcacttcagctcctcaagtagatgggactacaggagtatgccaccatgcccagctaatttttttattttttt

SEQ ID NO: 5725 - protein, 63 aa, Homo sapiens; identical to SEQ ID NO: 5717

SEQ ID NO: 5726 - DNA, 1204 bp, Homo sapiens
gcgggggccgcactggggagtgtgggctgggccgcaggtgagcgcgcggtcccggcgagcaggtcgggtcagcccaggccagtaacctctgagttacgggaggagtgatcgctagggtccaccccggtcccggccagatctgccagctcccctctctggcgggtgttctggtgccaagtctgggagcccaggtagccctccgcagacagggcttctcggcacctcaatgaggacggacgttgatgaggccatgaatgagatgtcatgtggcctgtgttttggaccgtggttcgtacctatgctccttatgtcacattccctgttgccttcgtggtcggggctgtgggttaccacctggaatggttcatcaggggaaaggacccccagcccgtggaggaggaaaagagcatctcagagcgccgggaggatcgcaagctggatgagcttctaggcaaggaccacacgcaggtggtgagccttaaggacaagctagaatttgccccgaaagctgtgctgaacagaaaccgcccagagaagaattaatggaggacacagggccctatggtcctactgtgggtggtgacttgtcctgctaccatgttgacagagccccagaacccacatctaattggctttgttgcttattctggcccttcccacaccacacagccacacaaatactggctgctccttgatggccaggcagacccagcagcagccgaggggccagtgaagaggaaggccgcatctgttgtgtggtggccacaagcactcaggcatctgagtttactggtgcactgctgggaggagagttatgagatgaacattggctgtcaatctctgtgggcaggcggtttggcctctagtgggaatggctgggatttgggcgttgcctttaggagggatacctgcatgtctagttccagtctgcactggaaagaattcaaatatgcacctggctcccttcactattttgccctatcctttgtgctcattcttactgaaatctgtcttgtcagctcaggaatgggattcccccaggaaggaaagcacttttctgttctgggaagcccagactgttcactttggggcagggacgaacatgtgcctcgtgaatttgcttgaaaacagtcaccatcttctacccccatcactgtatagtgaaaaacctgattaaagtggtatctgagaaccataatgatcg

SEQ ID NO: 5727 - protein, 74 aa, Homo sapiens; identical to SEQ ID NO: 5719

SEQ ID NO: 5728 - DNA, 2032 bp, Homo sapiens
cttccgtgctcccggcgagcgggcggagagcgggggccgcactggggagtgtgggctgggccgcaggtgagcgcgcggtcccggcgagcaggtcgggtcagcccaggccagtaacctctgagttacgggaggagtgatcgctagggtccaccccggtcccggccagatctgccagctcccctctctggcgggtgttctggtgccaagtctgggagcccaggtagccctccgcagacagggcttctcggcacctcaatgaggacggacgttgatgaggccatgaatgaggtgggctagggacaggggaccgggagactcacagaagggagaagggtagccatttggatggaccttcgccttacttgcgctcccattcctggactgcgctctagtgactgtcagggctaattcttccgccttctcaggcctcctgtgtccttgttagtagttcttgaatttgggactacggcttctggcctcgttgggcctccgggccctcgcactggggcaggtttcccagcagcccagttgacctttaccggatgcttttggcagacgtcctccatgccgggctggaaatatgcgtcacagtgtttttcagacacttttgcctctttcattgtgataccctgcctggggacgactatgatggagtctttaggtttttgtaatcagcaaaggcatctgttatgctcctgccaccttttgggggagagtgggtggaggatgttgtgattttacactagggagtttgggctgtcattcattcgttcagcagaccttttttgggcactctgccaggcagggtaggagaggtgcctggatggatagggcataattgggccagacagacacggttcttagccttttggagcttaaagtgtcttgagaaacgcagacagggaaaaggaacgacttttcatattgtgaaaccaggagattcatcgtagattgtgtttcatggggaaaaggtggccggctgtgctcatggagaaatttcatagagcagagaaaggcatctttttcccttcttgaaatgttggcagactaggtcctggggtcaacaataggcttgaagctctattagatgtcatgtggcctgtgttttggaccgtggttcgtacctatgctccttatgtcacattccctgttgccttcgtggtcggggctgtgggttaccacctggaatggttcatcaggggaaaggacccccagcccgtggaggaggaaaagagcatctcagagcgccgggaggatcgcaagctggatgagcttctaggcaaggaccacacgcaggtggtgagccttaaggacaagctagaatttgccccgaaagctgtgctgaacagaaaccgcccagagaagaattaatggaggacacagggccctatggtcctactgtgggtggtgacttgtcctgctaccatgttgacagagccccagaacccacatctaattggctttgttgcttattctggcccttcccacaccacacagccacacaaatactggctgctccttgatggccaggcagacccagcagcagccgaggggccagtgaagaggaaggccgcatctgttgtgtggtggccacaagcactcaggcatctgagtttactggtgcactgctgggaggagagttatgagatgaacattggctgtcaatctctgtgggcaggcggtttggcctctagtgggaatggctgggatttgggcgttgcctttaggagggatacctgcatgtctagttccagtctgcactggaaagaattcaaatatgcacctggctcccttcactattttgccctatcctttgtgctcattcttactgaaatctgtcttgtcagctcaggaatgggattcccccaggaaggaaagcacttttctgttctgggaagcccagactgttcactttggggcagggacgaacatgtgcctcgtgaatttgcttgaaaacagtcaccatcttctacccccatcactgtatagtgaaaaacctgattaaagtggtatctgagaaccataatgatcg

SEQ ID NO: 5729 - protein, 63 aa, Homo sapiens; identical to SEQ ID NO: 5717

SEQ ID NO: 5730 - DNA, 3502 bp, Homo sapiens
cttccgtgctcccggcgagcgggcggagagcgggggccgcactggggagtgtgggctgggccgcaggtgagcgcgcggtcccggcgagcaggtcgggtcagcccaggccagtaacctctgagttacgggaggagtgatcgctagggtccaccccggtcccggccagatctgccagctcccctctctggcgggtgttctggtgccaagtctgggagcccaggtagccctccgcagacagggcttctcggcacctcaatgaggacggacgttgatgaggccatgaatgaggtgggctagggacaggggaccgggagactcacagaagggagaagggtagccatttggatggaccttcgccttacttgcgctcccattcctggactgcgctctagtgactgtcagggctaattcttccgccttctcaggcctcctgtgtccttgttagtagttcttgaatttgggactacggcttctggcctcgttgggcctccgggccctcgcactggggcaggtttcccagcagcccagttgacctttaccggatgcttttggcagacgtcctccatgccgggctggaaatatgcgtcacagtgtttttcagacacttttgcctctttcattgtgataccctgcctggggacgactatgatggagtctttaggtttttgtaatcagcaaaggcatctgttatgctcctgccaccttttgggggagagtgggtggaggatgttgtgattttacactagggagtttgggctgtcattcattcgttcagcagaccttttttgggcactctgccaggcagggtaggagaggtgcctggatggatagggcataattgggccagacagacacggttcttagccttttggagcttaaagtgtcttgagaaacgcagacagggtaagccagcatcgtgcctgacacagagtaagtggttataagtgtcgaataaaggaatgaattgacttatttgggaatgattagaatgtgagcaggacggtagcgagagactttatgctgcatgtgagagatagttgtgaactcatgcgcgatatgttttaagacaggtttggaaatctgaacggacagttgctatttagggaagcatttacttatacagaggacttgctttaaaggtggaagtaaaatggagaagtattaggtttgggattcttcagaggtgcctcttttaactattactatgtctctgaatttcataaatccctgagtacaatctcagagtttgggaaaaggaaagctcttctaggtaatgaaatgccaggctgatgggaaaaaactgtaggaagctctccctaagtccagggtttggacagaaaccgtatacctctgcagtgtgttcttcccactagaaagagtgtaggctttgaaattggagaggcctgggttcaaaatcagtggctctatcacttctagtgatcttggataagttaacataatgtctgtgagcctttgtggccttcacaagagtctgggctaataattcctacatcatagaggtgttatgaggatcaaatgatgattagtgtgtaaattgtcatcatagtgcctggtgctgagacaataagcgggggagtcttggagatgctgcaattttttttttttttttaaatttcatgatgctgccttattgcaggggtccttaaccccctgggccacagaccagtggtggtcttcagcccattagaaactgggctgcacagcaggaggtgagcggtgggcaagctggcaagcattaccgcctgagctccaccttctgatagatcagcagcggcattagattctcacaggagtgcaaactctattgtgaactgcgcatgtgagggatctacgttgtgtgccccttatgagaatctaatgcctgatgatctgagctggaacagtttcatcccgaaaccatccctctccaacccccatctgtggaaaaattgtcttccacgaaactggtccctggtgccaaatatagattggggaccgctgccttatagtgttacgtctagagaacattgggattccttcaaagagaattggaaccaaagagagagggggagaatcatcttatccttggtgaggtttcgattgttcactttagatcagagatagtagtgttggagaaatacctacaggggcataaacagaaagatcttttagtggatacttttgggcaagtctcttaaccctctgatagtgggttatgtatctacctcacgtggtggacatgaggattaagagagtgagtgtatatgaagcacctagcccaaggcctggcatgtaagtgctcaataaatggtagctgtgttattataactgtgaatgatctttgataattgataatggtaataatcatttgagatggaattggccattagagtgatccaatttgtgtgtttttacattactttggtattgccctacttcaattcaggaggccctgaggccattccactccgctccccgccccaccccaccccaccccaccccccgggcttgtacagtgatttttcacagaaaatcttcaggttctgcggtatccagaatgtcatgtggcctgtgttttggaccgtggttcgtacctatgctccttatgtcacattccctgttgccttcgtggtcggggctgtgggttaccacctggaatggttcatcaggggaaaggacccccagcccgtggaggaggaaaagagcatctcagagcgccgggaggatcgcaagctggatgagcttctaggcaaggaccacacgcaggtggtgagccttaaggacaagctagaatttgccccgaaagctgtgctgaacagaaaccgcccagagaagaattaatggaggacacagggccctatggtcctactgtgggtggtgacttgtcctgctaccatgttgacagagccccagaacccacatctaattggctttgttgcttattctggcccttcccacaccacacagccacacaaatactggctgctccttgatggccaggcagacccagcagcagccgaggggccagtgaagaggaaggccgcatctgttgtgtggtggccacaagcactcaggcatctgagtttactggtgcactgctgggaggagagttatgagatgaacattggctgtcaatctctgtgggcaggcggtttggcctctagtgggaatggctgggatttgggcgttgcctttaggagggatacctgcatgtctagttccagtctgcactggaaagaattcaaatatgcacctggctcccttcactattttgccctatcctttgtgctcattcttactgaaatctgtcttgtcagctcaggaatgggattcccccaggaaggaaagcacttttctgttctgggaagcccagactgttcactttggggcagggacgaacatgtgcctcgtgaatttgcttgaaaacagtcaccatcttctacccccatcactgtatagtgaaaaacctgattaaagtggtatctgagaaccataatgatcg

SEQ ID NO: 5731 - protein, 155 aa, Homo sapiens
MELAIRVIQFVCFYITLVLPYFNSGGPEAIPLRSPPHPTPPHPPGLYSDFSQKIFRFCGIQNVMWPVFWTVVRTYAPYVTFPVAFVVGAVGYHLEWFIRGKDPQPVEEEKSISERREDRKLDELLGKDHTQVVSLKDKLEFAPKAVLNRNRPEKN

SEQ ID NO: 5732 - DNA, 933 bp, Homo sapiens
ccgcgggccgctgggtgcggcgacttccgtgctcccggcgagcgggcggagagcgggggccgcactggggagtgtgggctgggccgcagatgtcatgtggcctgtgttttggaccgtggttcgtacctatgctccttatgtcacattccctgttgccttcgtggtcggggctgtgggttaccacctggaatggttcatcaggggaaaggacccccagcccgtggaggaggaaaagagcatctcagagcgccgggaggatcgcaagctggatgagcttctaggcaaggaccacacgcaggtggtgagccttaaggacaagctagaatttgccccgaaagctgtgctgaacagaaaccgcccagagaagaattaatggaggacacagggccctatggtcctactgtgggtggtgacttgtcctgctaccatgttgacagagccccagaacccacatctaattggctttgttgcttattctggcccttcccacaccacacacactcaggcatctgagtttactggtgcactgctgggaggagagttatgagatgaacattggctgtcaatctctgtgggcaggcggtttggcctctagtgggaatggctgggatttgggcgttgcctttaggagggatacctgcatgtctagttccagtctgcactggaaagaattcaaatatgcacctggctcccttcactattttgccctatcctttgtgctcattcttactgaaatctgtcttgtcagctcaggaatgggattcccccaggaaggaaagcacttttctgttctgggaagcccagactgttcactttggggcagggacgaacatgtgcctcgtgaatttgcttgaaaacagtcaccatcttctacccccatcactgtatagtgaaaaacctgattaaagtggtatctgagaaccataatgatcg

SEQ ID NO: 5733 - protein, 63 aa, Homo sapiens; identical to SEQ ID NO: 5717

SEQ ID NO: 5734 - DNA, 1920 bp, Homo sapiens
ggcagggtcacagggcaaggtcccgcgggccgctgggtgcggcgacttccgtgctcccggcgagcgggcggagagcgggggccgcactggggagtgtgggctgggccgcaggtgagcgcgcggtcccggcgagcaggtcgggtcagcccaggccagtaacctctgagttacgggaggagtgatcgctagggtccaccccggtcccggccagatctgccagctcccctctctggcgggtgttctggtgccaagtctgggagcccaggtagccctccgcagacagggcttctcggcacctcaatgaggacggacgttgatgaggccatgaatgaggtgggctagggacaggggaccgggagactcacagaagggagaagggtagccatttggatggaccttcgccttacttgcgctcccattcctggactgcgctctagtgactgtcagggctaattcttccgccttctcaggcctcctgtgtccttgttagtagttcttgaatttgggactacggcttctggcctcgttgggcctccgggccctcgcactggggcaggtttcccagcagcccagttgacctttaccggatgcttttggcagacgtcctccatgccgggctggaaatatgcgtcacagtgtttttcagacacttttgcctctttcattgtgataccctgcctggggacgactatgatggagtctttaggtttttgtaatcagcaaaggcatctgttatgctcctgccaccttttgggggagagtgggtggaggatgttgtgattttacactagggagtttgggctgtcattcattcgttcagcagaccttttttgggcactctgccaggcagggtaggagaggtgcctggatggatagggcataattgggccagacagacacggttcttagccttttggagcttaaagtgtcttgagaaacgcagacagggtaagccagcatcgtgcctgacacagaatgtcatgtggcctgtgttttggaccgtggttcgtacctatgctccttatgtcacattccctgttgccttcgtggtcggggctgtgggttaccacctggaatggttcatcaggggaaaggacccccagcccgtggaggaggaaaagagcatctcagagcgccgggaggatcgcaagctggatgagcttctaggcaaggaccacacgcaggtggtgagccttaaggacaagctagaatttgccccgaaagctgtgctgaacagaaaccgcccagagaagaattaatggaggacacagggccctatggtcctactgtgggtggtgacttgtcctgctaccatgttgacagagccccagaacccacatctaattggctttgttgcttattctggcccttcccacaccacacagccacacaaatactggctgctccttgatggccaggcagacccagcagcagccgaggggccagtgaagaggaaggccgcatctgttgtgtggtggccacaagcactcaggcatctgagtttactggtgcactgctgggaggagagttatgagatgaacattggctgtcaatctctgtgggcaggcggtttggcctctagtgggaatggctgggatttgggcgttgcctttaggagggatacctgcatgtctagttccagtctgcactggaaagaattcaaatatgcacctggctcccttcactattttgccctatcctttgtgctcattcttactgaaatctgtcttgtcagctcaggaatgggattcccccaggaaggaaagcacttttctgttctgggaagcccagactgttcactttggggcagggacgaacatgtgcctcgtgaatttgcttgaaaacagtcaccatcttctacccccatcactgtatagtgaaaaacctgattaaagtggtatctgagaaccataatgatcg

SEQ ID NO: 5735 - protein, 63 aa, Homo sapiens; identical to SEQ ID NO: 5717

SEQ ID NO: 5736 - DNA, 1085 bp, Homo sapiens
ctgcgctccgagagagccggcggccagtgggcagggtcacagggcaaggtcccgcgggccgctgggtgcggcgacttccgtgctcccggcgagcgggcggagagcgggggccgcactggggagtgtgggctgggccgcagatgtcatgtggcctgtgttttggaccgtggttcgtacctatgctccttatgtcacattccctgttgccttcgtggtcggggctgtgggttaccacctggaatggttcatcaggggaaaggacccccagcccgtggaggaggaaaagagcatctcagagcgccgggaggatcgcaagctggatgagcttctaggcaaggaccacacgcaggtggtgagccttaaggacaagctagaatttgccccgaaagctgtgctgaacagaaaccgcccagagaagaattaatggaggacacagggccctatggtcctactgtgggtggtgacttgtcctgctaccatgttgacagagccccagaacccacatctaattggctttgttgcttattctggcccttcccacaccacacagccacacaaatactggctgctccttgatggccaggcagacccagcagcagccgaggggccagtgaagaggaaggccgcatctgttgtgtggtggccacaagcactcaggcatctgagtttactggtgcactgctgggaggagagttatgagatgaacattggctgtcaatctctgtgggcaggcggtttggcctctagtgggaatggctgggatttgggcgttgcctttaggagggatacctgcatgtctagttccagtctgcactggaaagaattcaaatatgcacctggctcccttcactattttgccctatcctttgtgctcattcttactgaaatctgtcttgtcagctcaggaatgggattcccccaggaaggaaagcacttttctgttctgggaagcccagactgttcactttggggcagggacgaacatgtgcctcgtgaatttgcttgaaaacagtcaccatcttctacccccatcactgtatagtgaaaaacctgattaaagtggtatctgagaaccataatgatcg

SEQ ID NO: 5737 - protein, 63 aa, Homo sapiens; identical to SEQ ID NO: 5717

SEQ ID NO: 5738 - DNA, 1396 bp, Homo sapiens
ttcagcagttcttccggctgtgtcagcaaagcatggatcccactgcgttccctgtgcccaccttccaggacctggcgggtttctgggacctcctacagctctccatcgaggatgtgaccctcaagttcctggagctacagcaactcaaggccaacagctggaaactcctggagcctaaggaggagaagaaggtccctccgccgataccaaagaagccccggcccccgggcccgtcacactctcgtgggttttttaccttcctgatcccacgcgaaggcgcccgggctgggcagggggccgtgcctctccgccctgcgcccctcacctggatcccctgcccacctggtccgacgctttgtccccacctcctccccatgggcaccatctctgccattctttcccccacgggccaggccgggccgggtccctcatctgggctctgcgtccccccctcccccaccccgcggggctgggcttcgtggggatcaagcttcgtggctttttatgaagaatcccgaaccctgcctaggagcccgccccaccctcccaggggctccatcctcagccctctgcccactgggcccagggaccacagtggctggaccaacccaggaccagggcgcctgggcctctcccctttcccagcggctggggaggggagatgggggcttcccctcaccacacctgtggctgttcccacatccccttgaatatcccaggaaaaataaaacggcagaactgcactcgagccagctgctctctccagaagaggccacctccgtcccgtgtgtgggaggacgggggtgaagggagaagggaccgggagcccactctcttggtttggagatagcaggggttgcctgagctccttccagggatgggccagctggtggaaaggagattcggccccctgatgcccacagtaagggcctggaccctcctggaggggcccaggtggggtgaagagggggagggtgccaagctctccgttcttcctatttcggtgtatcccgttctgcctcccagtccgcagggttcccccagagagggaagtccggagctcgccgggcacgcagcatgtgctcaataaaccgggagtgtggttattgttaggtattgacaaataattggtttcccttcccctaggggcacaatgttccttctgctccagtcattcctgatcagcagcagaaaatcttcagtcctgccgcattttctgatgcctcctatgggtggccaccttggtggaggctggggtgggggaagaggaagtacaaagaacagagctctcctgggaagctaaatggcaaccagaacctagtatcgatggctttattgagtggtcagtgtgggtcaggcaaggggtgagtgctttacatgaatgtggctggtcctt

SEQ ID NO: 5739 - protein, 225 aa, Homo sapiens
MDPTAFPVPTFQDLAGFWDLLQLSIEDVTLKFLELQQLKANSWKLLEPKEEKKVPPPIPKKPRPPGPSHSRGFFTFLIPREGARAGQGAVPLRPAPLTWIPCPPGPTLCPHLLPMGTISAILSPTGQAGPGPSSGLCVPPSPTPRGWASWGSSFVAFYEESRTLPRSPPHPPRGSILSPLPTGPRDHSGWTNPGPGRLGLSPFPAAGEGRWGLPLTTPVAVPTSP

SEQ ID NO: 5740 - DNA, 3559 bp, Homo sapiens
atgggcccaaggctgagggaagagtcccggcacggcaagaggagcaagagcaaggaccgcaagggggatgggcggcaccaggccaagtccacaggctggtggagttccgatgacaacttggacagtgatagcggcttcctggcgggtgggaggccccctggggagcctggtggtcccttctgcctggagggtccagatgggtcctaccgggacttgagcttcaaggggcgctcgggcgggtcggaaggccgctgccttgcctgcactggcatgtccatgtcactggatggacagtcggtcaagcgaagtgcctggcataccatgatggtcagccagggccgggatggatacccgggggccgggccaggcaaggggctcctgggtccggagaccaaggccaaagccaggacttatcactatctgcaggtgccgcaagatgactgggggggttaccccaccggtggcaaggatggggagatcccctgccgcaggatgcggagcggcagctacatcaaagccatgggggatgaggagagcggagactcagacggcagccccaagacatctcccaaagcagtcgcccgacgcttcaccacccgtcgctcctccagcgtggaccaggccaggatcaactgctgtgtcccaccccggatccacccccggagctccatccctggctacagccgttccctcaccactggacagctcagcgatgagttgaaccagcagctggaggccgtgtgcgggtcggtgtttggggagctggagtcccaggccgtggacgccctggacctgcccggctgtttccgcatgcggagccacagctacctccgggccatccaggccggctgctctcaagacgacgactgcctgcccctcctcgctacccctgccgctgtctcagggaggcccggctcctccttcaacttcagaaaggccccgccccccatcccgccgggaagccaggccccgccccgcatctccatcaccgcccagagcagcaccgactccgcgcacgagagcttcacggcggccgagggccccgcccggcgctgcagctccgccgacgggctggacggccccgccatgggtgcgcgcacactggagttggcgccggtgccgccccgggccagccccaagccccccacactcatcatcaagaccatccctggcagggaggagctgcggagcctggcgcggcagcggaagtggcggccgtccattggggtgcaggtggagacgatctcagattcggacaccgagaacaggagccggagggagttccactctattggcgtgcaggtggaagaggacaagaggcgagcaaggttcaagcgctccaatagtgtgacggctggcgtgcaggcagacctggagctggagggcctggcaggcctggccacggtggccacagaagacaaggccctgcagtttggacgctccttccagaggcacgcctctgagccccagcctgggccccgggcccccacctactcagtcttccgcacggtccacacgcagggccagtgggcctaccgcgagggctacccactgccgtacgagccgccggccaccgatgggtcgcccggccctgcccccgcccccacccccggccctggggccggccgccgtgactcctggatagagcgcggttcacgtagcctccccgactcaggccgcgcatccccctgcccacgcgacggcgagtggttcatcaagatgctgcgggcagaggtggagaagctggagcactggtgccagcagatggagcgtgaggcggaggactatgagctacccgaggagatcctggagaagatccgcagtgctgtgggcagcacacaacttctcctgtcccagaaggttcagcagttcttccggctgtgtcagcaaagcatggatcccactgcgttccctgtgcccaccttccaggacctggcgggtttctgggacctcctacagctctccatcgaggatgtgaccctcaagttcctggagctacagcaactcaaggccaacagctggaaactcctggagcctaaggaggagaagaaggtccctccgccgataccaaagaagcccctgcggggccggggcgtgccggtgaaggagcgctccctggactccgtggaccggcagcggcaggaagcgcgcaagcggctcctggcggccaagcgcgccgcttccttccgccacagctcggccaccgagagcgccgacagcatcgagatctacatccccgaggcccagaccaggctgtgaccggtccggcccgcccagcccggcccgggcccgcggttctccacccgtactgtacacccagcgtcgaggtcactgtgaacgcgggccgccccgtgcgcccgccccaccggcaccggacgccccggcccccgggcccgtcacactctcgtgggttttttaccttcctgatcccacgcgaaggcgcccgggctgggcagggggccgtgcctctccgccctgcgcccctcacctggatcccctgcccacctggtccgacgctttgtccccacctcctccccatgggcaccatctctgccattctttcccccacgggccaggccgggccgggtccctcatctgggctctgcgtccccccctcccccaccccgcggggctgggcttcgtggggatcaagcttcgtggctttttatgaagaatcccgaaccctgcctaggagcccgccccaccctcccaggggctccatcctcagccctctgcccactgggcccagggaccacagtggctggaccaacccaggaccagggcgcctgggcctctcccctttcccagcggctggggaggggagatgggggcttcccctcaccacacctgtggctgttcccacatccccttgaatatcccaggaaaaataaaacggcagaactgcactcgagccagctgctctctccagaagaggccacctccgtcccgtgtgtgggaggacgggggtgaagggagaagggaccgggagcccactctcttggtttggagatagcaggggttgcctgagctccttccagggatgggccagctggtggaaaggagattcggccccctgatgcccacagtaagggcctggaccctcctggaggggcccaggtggggtgaagagggggagggtgccaagctctccgttcttcctatttcggtgtatcccgttctgcctcccagtccgcagggttcccccagagagggaagtccggagctcgccgggcacgcagcatgtgctcaataaaccgggagtgtggttattgttaggtattgacaaataattggtttcccttcccctaggggcacaatgttccttctgctccagtcattcctgatcagcagcagaaaatcttcagtcctgccgcattttctgatgcctcctatgggtggccaccttggtggaggctggggtgggggaagaggaagtacaaagaacagagctctcctgggaagctaaatggcaaccagaacctagtatcgatggctttattgagtggtcagtgtgggtcaggcaaggggtgagtgctttacatgaatgtggctggtcctt

SEQ ID NO: 5741 - protein, 752 aa, Homo sapiens
MGPRLREESRHGKRSKSKDRKGDGRHQAKSTGWWSSDDNLDSDSGFLAGGRPPGEPGGPFCLEGPDGSYRDLSFKGRSGGSEGRCLACTGMSMSLDGQSVKRSAWHTMMVSQGRDGYPGAGPGKGLLGPETKAKARTYHYLQVPQDDWGGYPTGGKDGEIPCRRMRSGSYIKAMGDEESGDSDGSPKTSPKAVARRFTTRRSSSVDQARINCCVPPRIHPRSSIPGYSRSLTTGQLSDELNQQLEAVCGSVFGELESQAVDALDLPGCFRMRSHSYLRAIQAGCSQDDDCLPLLATPAAVSGRPGSSFNFRKAPPPIPPGSQAPPRISITAQSSTDSAHESFTAAEGPARRCSSADGLDGPAMGARTLELAPVPPRASPKPPTLIIKTIPGREELRSLARQRKWRPSIGVQVETISDSDTENRSRREFHSIGVQVEEDKRRARFKRSNSVTAGVQADLELEGLAGLATVATEDKALQFGRSFQRHASEPQPGPRAPTYSVFRTVHTQGQWAYREGYPLPYEPPATDGSPGPAPAPTPGPGAGRRDSWIERGSRSLPDSGRASPCPRDGEWFIKMLRAEVEKLEHWCQQMEREAEDYELPEEILEKIRSAVGSTQLLLSQKVQQFFRLCQQSMDPTAFPVPTFQDLAGFWDLLQLSIEDVTLKFLELQQLKANSWKLLEPKEEKKVPPPIPKKPLRGRGVPVKERSLDSVDRQRQEARKRLLAAKRAASFRHSSATESADSIEIYIPEAQTRL

SEQ ID NO: 5742 - DNA, 1027 bp, Homo sapiens
atgaaccgttcttgtgagcagcagggtcggctgtgcgtggccgtgacacttcgggtgcctgttcctgggtccccggggagggggatctcattcctgcccctacgctgggcgcccccagcaccgtcgctcagcgagcctccgtggcttggccgcctcccgctcccgcgcccgctgccgctcggcgctcgcttggggctccgcagccggcgcggcccctcagctgggggctccgcagtgccgggccccggtccctgcccgcctgcccaacgccgcagcgcccccggcccgggccgccggcaccatgtaacccggccggagcccgagccgggccaggattcagtggtcctgagccttctgaagttaggcttctgcctggtggtggggatcctgacatcaaggatgggacaccctggatggaggttcctggggcctggcccccaagactatgaagagcctttgctgaggccatgaggggttaccatggcgaccgaggcagccatccccgcccagcccgctttgctgaccaacagcatatggacgtgggccctgctgccagggccccatacctgctgggctccagggaggccttctccaccgagccccgcttctgtgccccgagagctggcctgggacacatttctcctgaagggcccctgagcctgagtgaggggccgtcggtaggccctgagggagggccagcgggggccggggttggggggggtagcagcaccttccccaggatgtaccctggccagggccccttcgacacctgtgaagactgtgtgggccacccacagggcaagggtgccccccgcctgcctcctacactcctggatcagtttgaaaagcagttgccagttcaacaagatggcttccacacactaccataccagcgagggccagcaggggcagggcccgggccagcgccagggacgggcactgccccagagccccgcagtgagagccctagccgcatccggcacctggttcattctgtgcagaagctctttgccaagtcccactctct

SEQ ID NO: 5743 - protein, 156 aa, Homo sapiens [sequence omitted]

SEQ ID NO: 5744 - DNA, 632 bp, Homo sapiens
atggagttacagtgtgtctaagtttcttgtattttggagtctgattaacttcagactttgataagttaagtatatatgctaaaatttctagagcaatcattaaaagaatagaaagaatgtataaattccaaaatagttgtaggaaatttgaaataagagacattcaagagaagtggaaatccaagtaccatttcagaatgattaaactgtgtggggatagtggtaaaagatgaggttaatgatataggaattgacctcataggttgtgatgtataaaatatataatatatatataatctaagctttatgtatatgtgtgtgtgtgtgtgtgttccagcctgggcaacagagcaagactccatctcaaaaactatatatatatatatatatggattagacaacattggctaagagtttataataattgaatctgggtaacaaatacatggggagatatttttctattttatttaaaaaatatgtttgaaacttgtcatgataaaaagttaaaaaattgtaacttagttcttgattcttaactttttcatactaatttcagaatcaggttatcaaattgcatgtattttgattgaaattgcattgaatctagggattaatattggaagaactga

SEQ ID NO: 5745 - protein, 34 aa, Homo sapiens
MYMCVCVCVPAWATEQDSISKTIYIYIYGLDNIG

SEQ ID NO: 5746 - DNA, 3160 bp, Homo sapiens
gcgcggccatggcgctcctgctttcggtgctgcgtgtactgctgggcggcttcttcgcgctcgtggggttggccaagctctcggaggagatctcggctccagtttcggagcggatggtcagagatgaacagcagtgttggggacctgggtgttggcggctgcagcctctgggatgaccctgctcgcttcatcgtggtgcccgcggcctatgccttggcactgggcctggggctgccagccaacgtggcggccctggcaatgttcatccgcagcggcgggcgcctgggccaggccctgcttctctacctgttcaacctggctctggttgatgagttcttcacgctcacgctgcagctgtggctcacctactacctgggcctggcccggaggccgcctgccacgcggccggggccacctactacgtgtccacctatgcggcggtggtcttcgccgcgctcatcagcgtgtgccgctgcggcttcgtacgcggtcccgggcccagggcggctgcccgcctggcccggtgcctacggcgccccgcgcgcgctgcctgcgccttcgcctggctggcgggcctggcccctccctgcctggagcaccgctgggcaagctcggggctggcctccgccacggtggccttcgcggccgccttcctgctggtgctcgcggccaacgtgagcctggcgcgggcgctcaaggcgccctctggcccgggcccgggccctgcaaccgccggcgcgcaccggcgcgcggccaagaccatggtcctggggttcctgctggtcttcgccctcagtctggcgcccaaccacctgctgctggcgccctaggtggctgggggggaagacaacggagaccggtgtcgcgccgcctccacgctcgacatcctgcacaccctcagcctggcgctgctgagcctcaacagctgcctggacccactcatctgctgcttcttcgtgcgcctcttccaccaggactgctgctgggcactgagctgccgcctggtgaagggggcgcccagggcgcatggggcctccttggcctcctcttggagagtctcctggcctcccctcctgtctcacccccctgtcaccctcccagtggcatccagggtggagaaagctctttggaaagacctagattctaatcctgacgcaaccacatactacccctgtagctgtgaacctccgggctcatctgtaccaaggacatagaacattctttgtaacccgaatgttccctggatgttgccagcttttggatacaaataatataccactgtgttttttttaaacctcttgggataaaacccaaagtccttatcatggcctacaaggccctgtctgatttggctcccctttctctccctaacccaccacccctgcgtctccctgcaggcagtcaccttcttaggcccgggaaaatgccggtctcctactcttcatggcctttgtacctgacttggccaggaatgatctctgttcctctctttcactaagttagttcttcttcaccctcacttcctctaaagtaactccttatagggaagcctttcttggctggcaacacacacacacacacacacacacacatacacacacgactgaatcagatcggattgctctttgatagctcttttcataattgtaatcaagcaattaattgggtaatgcgttgttgttgttttctttctctcttgccagaatgtattcatgttgacccataagacattatcatttttataagtccccaaaagttgaatattggaaattttatttccacccaattcaacttaataaattctgtgtttaccttgctcactgctgtatctcctgtggttggtactgtgccttgcatataataagagctcagtgtatcagatgcgtgagtgaaaactgaatatcattaatttaaattgcttaagtactcactcagacattccagtctctgatagcttttcctcaagtgtttctgagattctccaagcttgtcttacccacccccgaccatgcattcctagcccagtcctgatgactgtctccttctgctgttgctggatacttgcagttctgccatcacctccactgtaccaagacttggtgggaagtaagctggagatccaggctgctggagatccaatgcctgctgcctccagactctttcatgagcgccaatctctgccaggggctccggctaccagtgcttccccttctgtgctttgacaactctgcagtctgcttctaatgggaaagggcaccactctcctcagccacattattggggccccacagcaagactgcttgggtctcaaggaaatcgagcttaatgaatgagagcaaaccctcttcatttggccatgtcagcttgtcaggaagggtccatcaatcagccaccatgtcttacctgcctttaggtcctattgctgagtttgacttctaaggatacatttggtaaattcctttttttcttgatgaattacctcttattggtccctaattccttctttaacttttttcttttccattttaaaagcaatataggttcataaaagtaaattcaaagcagtagagaaaaatgtaagataggaagtactagcctgggcaacgtggcgaaaccctgtctctacaaaaaatacaaaaattagccgggcgtggtcctagctactcgggagactgaagtggaaggcttgcttgagcccaggaggtcaaggctgcagtgagccgtgatggcgccactgcacttcagccttggagacaggggagaccctatgtcaaaaaagaaataaaaagaaagtaaaagtcccctagtgatagccactattcacagcttctcatttgtgtagctttccagatattttcgattccactgtaagtccacatgtcatcagttttctttaaaaacctacaaatgggatagtattgcaaggttcttctgcaatttacttttctcattgtttcttatatattgttctatattagcacatatagatagattcatctcgttttttcaatagaagcagagtattcgttttactcaattggtcccctactgatgggcatttgttgccattattttactgttataaacaatgcttcagtgaatgctcttgttaacaaatgtttgcatacttgtaaatctgtagaataaattcctggcaacg

SEQ ID NO: 5747 - protein, 55 aa, Homo sapiens
MALLLSVLRVLLGGFFALVGLAKLSEEISAPVSERMVRDEQQCWGPGCWRLQPLG

SEQ ID NO: 5748 - DNA, 1885 bp, Homo sapiens
atagcaagaggcaagaaaggaacagtctgaggtttgagtctgacccaggacctctttgtggtcaaaaagtgaggggggaggaaacaggatgaaaggcttgagagtggcaaaagcttttcagcccagccaagggtgctccaggcaagcgctggggcacctctctgggagaggaccttcaccaaggcaaagatgaacagcagtgttggggacctgggtgttggcggctgcagcctctgggatgaccctgctcgcttcatcgtggtgcccgcggcctatgccttggcactgggcctggggctgccagccaacgtggcggccctggcaatgttcatccgcagcggcgggcgcctgggccaggccctgcttctctacctgttcaacctggctctggttgatgagttcttcacgctcacgctgcagctgtggctcacctactacctgggcctggcccggaggccgcctgccacgcggccggggccacctactacgtgtccacctatgcggcggtggtcttcgccgcgctcatcagcgtgtgccgctgcggcttcgtacgcggtcccgggcccagggcggctgcccgcctggcccggtgcctacggcgccccgcgcgcgctgcctgcgccttcgcctggctggcgggcctggcccctccctgcctggagcaccgctgggcaagctcggggctggcctccgccacggtggccttcgcggccgccttcctgctggtgctcgcggccaacgtgagcctggcgcgggcgctcaaggcgccctctggcccgggcccgggccctgcaaccgccggcgcgcaccggcgcgcggccaagaccatggtcctggggttcctgctggtcttcgccctcagtctggcgcccaaccacctgctgctggcgccctaggtggctgggggggaagacaacggagaccggtgtcgcgccgcctccacgctcgacatcctgcacaccctcagcctggcgctgctgagcctcaacagctgcctggacccactcatctgctgcttcttcgtgcgcctcttccaccaggactgctgctgggcactgagctgccgcctggtgaagggggcgcccagggcgcatggggcctccttggcctcctcttggagagtctcctggcctcccctcctgtctcacccccctgtcaccctcccagtggcatccagggtggagaaagctctttggaaagacctagattctaatcctgacgcaaccacatactacccctgtagctgtgaacctccgggctcatctgtaccaaggacatagaacattctttgtaacccgaatgttccctggatgttgccagcttttggatacaaataatataccactgtgttttttttaaacctcttgggataaaacccaaagtccttatcatggcctacaaggccctgtctgatttggctcccctttctctccctaacccaccacccctgcgtctccctgcaggcagtcaccttcttaggcccgggaaaatgccggtctcctactcttcatggcctttgtacctgacttggccaggaatgatctctgttcctctctttcactaagttagttcttcttcaccctcacttcctctaaagtaactccttatagggaagcctttcttggctggcaacacacacacacacacacacacacacatacacacacgactgaatcagatcggattgctctttgatagctcttttcataattgtaatcaagcaattaattgggtaatgcgttgttgttgttttctttctctcttgccagaatgtattcatgttgacccataagacattatcatttttataagtccccaaaagttgaatattggaaattttatttccacccaattcaacttaataaattctgtgtttaccttgctc

SEQ ID NO: 5749 - protein, 34 aa, Homo sapiens
MKGLRVAKAFQPSQGCSRQALGHLSGRGPSPRQR

SEQ ID NO: 5750 - DNA, 819 bp, Homo sapiens
aacccacggtggggggagcgcggccatggcgctcctgctttcggtgctgcgtgtactgctgggcggcttcttcgcgctcgtggggttggccaagctctcggaggagatctcggctccagtttcggagcggatgaatgccctgttcgtgcagtttgctgaggtgttcccgctgaaggtatttggctaccagccagatcccctgaactaccaaatagctgtgggctttctggaactgctggctgggttgctgctggtcatgggcccaccgatgctgcaagagatcagtaacttgttcttgattctgctcatgatgggggctatcttcaccttggcagctctgaaagagtcactaagcacctgtatcccagccattgtctgcctggggttcctgctgctgctgaatgtcggccatctctttatgccatgcagctgtcacagcaggaacatggtagaacacagagtctatcatcttgttaccagtataatatccagggtcagccagtgttgaaagagacattttgtctacctggcactgctttctctttttagctttactactcttttgtgaggagtacatgttatgcatattaacattcctcatgtcatatgaaaatacaaaataagcagaaaagaaatttaaatcaaccaaaattctgatgccccaaataaccacttttaatgccttggtgtaagtatacctctgaacttttttctgtgcctttaaacagatatatattttttttaaatgaaaataaaaccatatatcctattttatttcctccttttaaaaccttataaactataacactgtttcatgtc

SEQ ID NO: 5751 - protein, 160 aa, Homo sapiens
MALLLSVLRVLLGGFFALVGLAKLSEEISAPVSERMNALFVQFAEVFPLKVFGYQPDPLNYQIAVGFLELLAGLLLVMGPPMLQEISNLFLILLMMGAIFTLAALKESLSTCIPAIVCLGFLLLLNVGHLFMPCSCHSRNMVEHRVYHLVTSIISRVSQC

SEQ ID NO: 5752 - DNA, 925 bp, Homo sapiens
gggttttcggcggggccaacccacggtggggggagcgcggccatggcgctcctgctttcggtgctgcgtgtactgctgggcggcttcttcgcgctcgtggggttggccaagctctcggaggagatctcggctccagtttcggagcggatgaatgccctgttcgtgcagtttgctgaggtgttcccgctgaaggtatttggctaccagccagatcccctgaactaccaaatagctgtgggctttctggaactgctggctgggttgctgctggtcatgggcccaccgatgctgcaagagatcagtaacttgttcttgattctgctcatgatgggggctatcttcaccttggcagctctgaaagagtcactaagcacctgtatcccagccattgtctgcctggggttcctgctgctgctgaatgtcggccagctcttagcccagactaagaaggtggtcagacccactaggaagaagactctaagtacattcaaggaatcctggaagtagagcatctctgtctctttatgccatgcagctgtcacagcaggaacatggtagaacacagagtctatcatcttgttaccagtataatatccagggtcagccagtgttgaaagagacattttgtctacctggcactgctttctctttttagctttactactcttttgtgaggagtacatgttatgcatattaacattcctcatgtcatatgaaaatacaaaataagcagaaaagaaatttaaatcaaccaaaattctgatgccccaaataaccacttttaatgccttggtgtaagtatacctctgaacttttttctgtgcctttaaacagatatatattttttttaaatgaaaataaaaccatatatcctattttatttcctccttttaaaaccttataaactataacactgtttcatgtc

SEQ ID NO: 5753 - protein, 154 aa, Homo sapiens
MALLLSVLRVLLGGFFALVGLAKLSEEISAPVSERMNALFVQFAEVFPLKVFGYQPDPLNYQIAVGFLELLAGLLLVMGPPMLQEISNLFLILLMMGAIFTLAALKESLSTCIPAIVCLGFLLLLNVGQLLAQTKKVVRPTRKKTLSTFKESWK

SEQ ID NO: 5754 - DNA, 3339 bp, Homo sapiens
tcagaaactatttcttgagtccgttcttctcagagtttattacttcctcccacgtcttggtctgctggtctaattcccttcaataaccttcaacataggaaaaaaccagagtgtgttgtgtgtctttaaagatattagagaagtgggagctgttgccccaaaactgttttcttatgtagctactgaaggaacagaaagcaggaagaaagaaaaaagttagttgtggccccagaagagttgtttttcaaatgccgagccgtgaagcctcatgcactcaacacaaagtttttctttcatatagataagcctgaagaaaaaagaataagcctgagtatgtattttaggtgtccaactatccattaccaagaagaaatctattcgtttgagcctgagacactctttgaggtaaaaaattagaatgaaagaacctttggatggtgaatgtggcaaagcagtggtaccacagcaggagcttctggacaaaattaaagaagaaccagacaatgctcaagagtatggatgtgtccaacagccaaaaactcaagaaagtaaattgaaaattggtggtgtgtcttcagttaatgagagacctattgcccagcagttgaacccaggctttcagctttcttttgcatcatctggcccaagtgtgttgcttccttcagttccagctgttgctattaaggttttttgttctggttgtaaaaaaatgctttataagggccaaactgcatatcataagacaggatctactcagctcttctgctccacacgatgcatcaccagacattcttcacctgcctgcctgccacctcctcccaagaaaacctgcacaaactgctcgaaagacattttaaatcctaaggatgtgatcacaactcgctttgagaattcctatcctagcaaagatttctgcagccaatcatgcttgtcatcttatgagctaaagaaaaaacctgttgttaccatatataccaaaagcatttcaactaagtgcagtatgtgtcagaagaatgctgatactcgatttgaagttaaatatcaaaatgtggtacatggtctttgtagtgatgcctgtttttcaaaatttcactctacaaacaacctcaccatgaactgttgtgagaactgtgggagctattgctatagtagctctggtccttgccaatcccagaaggtttttagttcaacaagtgtcacggcatacaagcagaattctgcccaaattcctccatatgccctggggaagtcattgaggccctcagctgaaatgattgagactacaaatgattcaggaaaaacagagcttttctgctctattaattgcttatctgcttacagagttaagactgttacttcttcaggtgtccaggtttcatgtcatagttgtaaaacctcagcaatccctcagtatcacctagccatgtcaaatggaactatatacagcttctgcagctccagttgtgtggttgctttccagaatgtatttagcaagccaaaaggaacaaactcttcggcggtgcccctgtctcagggccaagtggttgtaagcccgccctcctccaggtcagcagtgtcaataggaggaggtaacacctctgccgtttcccccagctccatccgtggctctgctgcagccagcctccaacctcttgctgaacaatcccagcaagttgctttaacccatacagttgttaaactcaagtgtcagcactgtaaccatctatttgccacaaaaccagaacttcttttttacaagggtaaaatgtttctgttttgtggcaagaattgctctgatgaatacaagaagaaaaataaagttgtggcaatgtgtgactactgtaaactgcagaaaattataaaggagactgtgcgattctcaggggttgataagccattctgtagtgaagtttgcaaattcctctctgcccgtgactttggagaacgatggggaaactactgtaagatgtgcagctactgttcacagacatccccaaatttggtagaaaatcgattggagggcaagttagaagagttttgttgtgaagattgtatgtccaaatttacagttctgttttatcagatggccaagtgtgatggttgtaaacgacagggtaaactaagcgagtccataaagtggcgaggcaacattaaacatttctgtaacctattttgtgtcttggagttttgtcatcagcaaattatgaatgactgtcttccacaaaataaagtaaatatttctaaagcaaaaactgctgtgacggagctcccttctgcaaggacagatacaacaccagttataaccagtgtgatgtcattggcaaaaatacctgctaccttatctacagggaacactaacagtgttttaaaaggtgcagttactaaagaggcagcaaagatcattcaagatgaaagtacacaggaagatgctatgaaatttccatcttcccaatcttcccagccttccaggcttttaaagaacaaaggcatatcatgcaaacccgtcacacagaccaaggccacttcttgcaaaccacatacacagcacaaagaatgtcagacagaatgccctgttcgtgcagtttgctgaggtgttcccgctgaaggtatttggctaccagccagatcccctgaactaccaaatagctgtgggctttctggaactgctggctgggttgctgctggtcatgggcccaccgatgctgcaagagatcagtaacttgttcttgattctgctcatgatgggggctatcttcaccttggcagctctgaaagagtcactaagcacctgtatcccagccattgtctgcctggggttcctgctgctgctgaatgtcggccagctcttagcccagactaagaaggtggtcagacccactaggaagaagactctaagtacattcaaggaatcctggaagtagagcatctctgtctctttatgccatgcagctgtcacagcaggaacatggtagaacacagagtctatcatcttgttaccagtataatatccagggtcagccagtgttgaaagagacattttgtctacctggcactgctttctctttttagctttactactcttttgtgaggagtacatgttatgcatattaacattcctcatgtcatatgaaaatacaaaataagcagaaaagaaatttaaatcaaccaaaattctgatgccccaaataaccacttttaatgccttggtgtaagtatacctctgaacttttttctgtgcctttaaacagatatatattttttttaaatgaaaataaaaccatatatcctattttatttcctccttttaaaaccttataaactataacactgtttcatgtc

SEQ ID NO: 5755 - protein, 723 aa, Homo sapiens; identical to SEQ ID NO: 114

SEQ ID NO: 5756 - DNA, 3250 bp, Homo sapiens
tcagaaactatttcttgagtccgttcttctcagagtttattacttcctcccacgtcttggtctgctggtctaattcccttcaataaccttcaacataggaaaaaaccagagtgtgttgtgtgtctttaaagatattagagaagtgggagctgttgccccaaaactgttttcttatgtagctactgaaggaacagaaagcaggaagaaagaaaaaagttagttgtggccccagaagagttgtttttcaaatgccgagccgtgaagcctcatgcactcaacacaaagtttttctttcatatagataagcctgaagaaaaaagaataagcctgagtatgtattttaggtgtccaactatccattaccaagaagaaatctattcgtttgagcctgagacactctttgaggtaaaaaattagaatgaaagaacctttggatggtgaatgtggcaaagcagtggtaccacagcaggagcttctggacaaaattaaagaagaaccagacaatgctcaagagtatggatgtgtccaacagccaaaaactcaagaaagtaaattgaaaattggtggtgtgtcttcagttaatgagagacctattgcccagcagttgaacccaggctttcagctttcttttgcatcatctggcccaagtgtgttgcttccttcagttccagctgttgctattaaggttttttgttctggttgtaaaaaaatgctttataagggccaaactgcatatcataagacaggatctactcagctcttctgctccacacgatgcatcaccagacattcttcacctgcctgcctgccacctcctcccaagaaaacctgcacaaactgctcgaaagacattttaaatcctaaggatgtgatcacaactcgctttgagaattcctatcctagcaaagatttctgcagccaatcatgcttgtcatcttatgagctaaagaaaaaacctgttgttaccatatataccaaaagcatttcaactaagtgcagtatgtgtcagaagaatgctgatactcgatttgaagttaaatatcaaaatgtggtacatggtctttgtagtgatgcctgtttttcaaaatttcactctacaaacaacctcaccatgaactgttgtgagaactgtgggagctattgctatagtagctctggtccttgccaatcccagaaggtttttagttcaacaagtgtcacggcatacaagcagaattctgcccaaattcctccatatgccctggggaagtcattgaggccctcagctgaaatgattgagactacaaatgattcaggaaaaacagagcttttctgctctattaattgcttatctgcttacagagttaagactgttacttcttcaggtgtccaggtttcatgtcatagttgtaaaacctcagcaatccctcagtatcacctagccatgtcaaatggaactatatacagcttctgcagctccagttgtgtggttgctttccagaatgtatttagcaagccaaaaggaacaaactcttcggcggtgcccctgtctcagggccaagtggttgtaagcccgccctcctccaggtcagcagtgtcaataggaggaggtaacacctctgccgtttcccccagctccatccgtggctctgctgcagccagcctccaacctcttgctgaacaatcccagcaagttgctttaacccatacagttgttaaactcaagtgtcagcactgtaaccatctatttgccacaaaaccagaacttcttttttacaagggtaaaatgtttctgttttgtggcaagaattgctctgatgaatacaagaagaaaaataaagttgtggcaatgtgtgactactgtaaactgcagaaaattataaaggagactgtgcgattctcaggggttgataagccattctgtagtgaagtttgcaaattcctctctgcccgtgactttggagaacgatggggaaactactgtaagatgtgcagctactgttcacagacatccccaaatttggtagaaaatcgattggagggcaagttagaagagttttgttgtgaagattgtatgtccaaatttacagttctgttttatcagatggccaagtgtgatggttgtaaacgacagggtaaactaagcgagtccataaagtggcgaggcaacattaaacatttctgtaacctattttgtgtcttggagttttgtcatcagcaaattatgaatgactgtcttccacaaaataaagtaaatatttctaaagcaaaaactgctgtgacggagctcccttctgcaaggacagatacaacaccagttataaccagtgtgatgtcattggcaaaaatacctgctaccttatctacagggaacactaacagtgttttaaaaggtgcagttactaaagaggcagcaaagatcattcaagatgaaagtacacaggaagatgctatgaaatttccatcttcccaatcttcccagccttccaggcttttaaagaacaaaggcatatcatgcaaacccgtcacacagaccaaggccacttcttgcaaaccacatacacagcacaaagaatgtcagacagaatgccctgttcgtgcagtttgctgaggtgttcccgctgaaggtatttggctaccagccagatcccctgaactaccaaatagctgtgggctttctggaactgctggctgggttgctgctggtcatgggcccaccgatgctgcaagagatcagtaacttgttcttgattctgctcatgatgggggctatcttcaccttggcagctctgaaagagtcactaagcacctgtatcccagccattgtctgcctggggttcctgctgctgctgaatgtcggccatctctttatgccatgcagctgtcacagcaggaacatggtagaacacagagtctatcatcttgttaccagtataatatccagggtcagccagtgttgaaagagacattttgtctacctggcactgctttctctttttagctttactactcttttgtgaggagtacatgttatgcatattaacattcctcatgtcatatgaaaatacaaaataagcagaaaagaaatttaaatcaaccaaaattctgatgccccaaataaccacttttaatgccttggtgtaagtatacctctgaacttttttctgtgcctttaaacagatatatattttttttaaatgaaaataaaaccatatatcctattttatttcctccttttaaaaccttataaactataacactgtttcatgtc

SEQ ID NO: 5757 - protein, 723 aa, Homo sapiens; identical to SEQ ID NO: 114

SEQ ID NO: 5758 - DNA, 6238 bp, Homo sapiens
ggcggctgcggatatcgccttagggacgcgttgacattcactggctagtccaccgctctcagtcggagaccacattgcctcataagcctgaagaaaaaagaataagcctgagtatgtattttaggtgtccaactatccattaccaagaagaaatctattcgtttgagcctgagacactctttgaggtaaaaaattagaatgaaagaacctttggatggtgaatgtggcaaagcagtggtaccacagcaggagcttctggacaaaattaaagaagaaccagacaatgctcaagagtatggatgtgtccaacagccaaaaactcaagaaagtaaattgaaaattggtggtgtgtcttcagttaatgagagacctattgagacattttaaatcctaaggatgtgatcacaactcgctttgagaattcctatcctagcaaagatttctgcagccaatcatgcttgtcatcttatgagctaaagaaaaaacctgttgttaccatatataccaaaagcatttcaactaagtgcagtatgtgtcagaagaatgctgatactcgatttgaagttaaatatcaaaatgtggtacatggtctttgtagtgatgcctgtttttcaaaatttcactctacaaacaacctcaccatgaactgttgtgagaactgtgggagctattgctatagtagctctggtccttgccaatcccagaaggtttttagttcaacaagtgtcacggcatacaagcagaattctgcccaaattcctccatatgccctggggaagtcattgaggccctcagctgaaatgattgagactacaaatgattcaggaaaaacagagcttttctgctctattaattgcttatctgcttacagagttaagactgttacttcttcaggtgtccaggtttcatgtcatagttgtaaaacctcagcaatccctcagtatcacctagccatgtcaaatggaactatatacagcttctgcagctccagttgtgtggttgctttccagaatgtatttagcaagccaaaaggaacaaactcttcggcggtgcccctgtctcagggccaagtggttgtaagcccgccctcctccaggtcagcagtgtcaataggaggaggtaacacctctgccgtttcccccagctccatccgtggctctgctgcagccagcctccaacctcttgctgaacaatcccagcaagttgctttaacccatacagttgttaaactcaagtgtcagcactgtaaccatctatttgccacaaaaccagaacttcttttttacaagggtaaaatgtttctgttttgtggcaagaattgctctgatgaatacaagaagaaaaataaagttgtggcaatgtgtgactactgtaaactgcagaaaattataaaggagactgtgcgattctcaggggttgataagccattctgtagtgaagtttgcaaattcctctctgcccgtgactttggagaacgatggggaaactactgtaagatgtgcagctactgttcacagacatccccaaatttggtagaaaatcgattggagggcaagttagaagagttttgttgtgaagattgtatgtccaaatttacagttctgttttatcagatggccaagtgtgatggttgtaaacgacagggtaaactaagcgagtccataaagtggcgaggcaacattaaacatttctgtaacctattttgtgtcttggagttttgtcatcagcaaattatgaatgactgtcttccacaaaataaagtaaatatttctaaagcaaaaactgctgtgacggagctcccttctgcaaggacagatacaacaccagttataaccagtgtgatgtcattggcaaaaatacctgctaccttatctacagggaacactaacagtgttttaaaaggtgcagttactaaagaggcagcaaagatcattcaagatgaaagtacacaggaagatgctatgaaatttccatcttcccaatcttcccagccttccaggcttttaaagaacaaaggcatatcatgcaaacccgtcacacagaccaaggccacttcttgcaaaccacatacacagcacaaagaatgtcagacagagacgggatttcacagtgttggcaacgctggtctcaaactcgtgacctcatgatgtgcccgcctcagcctcccaaagtgctgggattacaagcgtgagccaccgcgccggcctatcatctattcttaagtattttgatacctgttgcctaaattgccctcctgaaaagttacatcaatgtatgctccaaccagcagtgttcaggaggatccatttctctacaacctcactgacactgagtatcaaaattcagaaaggttgaatatacagtacagtcaatactagtatactcttcatccagattaatgaaatgttaactttttgcaatatttattttctttttttttctggattgtttgaaagtaaaacattatttttctgtctctttttcttccttttctttcttttttttgagatggagtttcactcttgtctcccaggccggagtgcaatgacatgatctcggcacattgcaacctccgcctcccgggttcaagcgattctcctgcctcagcctctcaagtagctgagattataggcatgtaccaccatgcctggctaattttgtgtttttagtagagacggggtttcaccacgttggcctggctggtctcgaactcctgacctcaggtgatctgcccgccttggcctcccaaagtgctgggattacaggtgtgagccccatgcctggccttttttttctttttctttaaaaaaattttttgacaccagtgtcactcaccaataaaaaatttattctttttgtttttttttgagacgtagtctcaagagtgcagtggtgtgatcatggctctctgcaggctcaacctcctgggctcaggcaatcctcttgctttagctacccaagtagctgggactataggtgtgtgccattgcatccagccaattttttttcttcttctttttttttttttaatgtagagatggagtttcgccatgttgcccgggctggtctctaactccagggctcaagtgacccacccaccttggtgtcccaaagcactgggattataggtgtgagccaccctgctcagccaaaaagtttattgttaatttgatgtgtatcatggtcttcagccctaatttcaataacctattgggtgcttgggattacttgtacatgtaccacatcctacagttttattatacctagtgatcaagctttgggcaaaggagaaattcagttttcagtagcatcattggaagtattatgacttgtgcttaaacttttaccagtgcattcttttgataaatagaaatagtaacaaaatatgaattttaaatatgtggggagatacataaagaacattgcttatttgttcttgaaaataacagtgattcaaatatttcattcagatttacctatgcctaatgaaaaaaatgatgcagaacttgattctccaccttcaaagaaaaaaagattaggttttttccagacttatgatacagaatatttaaaagttggttttattatctgtcctggatcaaaagaaagttcaccaaggccacagtgtgtcatttgtggagagatcttatccagtgaaaacatgaagccagcaaatctttctcatcatttgaagacaaaacattcagaattagaaaacaaaccagtagatttttttgaacaaaaatctttagaaatggaatgtcaaaatagttctttaaaaaagtgtttactagttgaaaagtcacttgtgaaagcttcttatttaattgctttccaaactgctgcaagcaagaagccattctccattgctgaagaattaattaaaccatatttagtagaaatgtgttcagaagttttgggttcaagtgctggagacaaaatgaaaactattccactttctaatgttacaattcaacacaggattgatgaactatctgcagacattgaagaccagctgattcaaaaggtcagagagtcaaagtggtttgcccttcagatagatgagtcatcagaaatctcaaatatcacacttcttttgtgctatattcgtttcattgattatgattgtcgtgatgtaaaagaagaattattattttgcattgaaatgcctactcaaataactggctttgaaatatttgaactaataaataaatatattgatagtaaatctctgaattggaaacattgtgttggtctctgtaccgatggggctgcaagcatgactggcaggtattctggtttaaaagcaaaaattcaagaagttgccatgaatacagcggcatttacacattgttttattcaccgtgaacgtttagtggcagaaaagttgtctccatgtttacataaaattcttttgcagtcagcacaaattttaagttttataaagagcaatgcattaaattcacgtatgttaacaattttgtgtgaagagatgggatctgagcatgtgagtttaccgcttcatgctgaagtacgttggatatcaagagggagaatgttaaaaagattatttgaattacgacatgagattgaaatatttttaagtcaaaagcattcagatttggccaagtattttcatgatgaggaatgggttggaaagctggcctacttatcagatatattttcacttataaatgaattaaatttaagtctccaaggaactttgactactttcttcaatttgtgtaataaaattgatgtatttaagagaaagttaaaaatgtggttgaagcgcacacaagagaatgattatgacatgttcccttcattttctgaattctcaaattcatcaggcttaaatatgacagacatcacaaggattatttttgagcacctggaaggactttctcaagtgttcagtgactgttttccaccagaacaagacttgcgttcaggaaatttgtggataattcacccttttatgaatcaccaaaataataatctcaccgacttcgaagaagaaaagctaacagagctatcttcagatttaggattacaagcactatttaaatcagtgtctgtaactcagttttggataaatgcaaagacaagttacccagaactccatgaaagggcaatgaaatttttattacccttttcaactgtttatttatgtgatgctgccttttcagctttgactgagtcaaaacaaaaaaatctgttgggttctggccctgccctaagacttgcagtcacatctttaattccaaggatagaaaaattagtgaaggagaaagagtagcaatatgcacattgcttaacagtgaagtcaataatcctgtgttaagttttgtataagtatcctaaaagataatttcctaatgtggatttgtgttttcagtgattaaatgttttaataatttttccctttttgttgaggaatttaataattatgattgttataaataattatgtataattataatctagggtagaaaatttagttatttcattaaatttggactagtgacaaagactgcaggtaatgagaagcccagtttataatgtaacagcacaacctggatgttgaaacagcttggcctttagaagcaagtggaacatttcagtcttctagccaaccagctacttacccctgcaaggttgtgagtaggtggaaaagatagatcttttttttgagatggagttttgctcttgttgcccaggctggagtgcaatggcgtgatcttggctcactggaacctctgcctcctaggttcaaacaattctcctgcctcagccttccaagtagctggggttacaggcatgtgccaccatgcccgtctattgtattttttttagtagagacggggtttcaccatattggtcaggctggtctctatctcctgacctcaagtgatccacctgcctcggcctcccaaagtgctgggattacaagtgtgagccaacgtgcccagctggaaaaagatagatctaagcagcttgggtaactataaatggaagcagcagggggatttgagacccctgcttggggcctttctggcccaatataccagggcttagcaaactttttaaataaagagccagatagtaaatattttcagctttgcaggccatactgtcacaactactcaattctgcagttgcagtgcaaaagcagccatagacaatatgcagataagtgtggctgtttttaaataaaacttattcatgaacactg

SEQ ID NO: 5759 - protein, 538 aa, Homo sapiens
MCQKNADTRFEVKYQNVVHGLCSDACFSKFHSTNNLTMNCCENCGSYCYSSSGPCQSQKVFSSTSVTAYKQNSAQIPPYALGKSLRPSAEMIETTNDSGKTELFCSINCLSAYRVKTVTSSGVQVSCHSCKTSAIPQYHLAMSNGTIYSFCSSSCVVAFQNVFSKPKGTNSSAVPLSQGQVVVSPPSSRSAVSIGGGNTSAVSPSSIRGSAAASLQPLAEQSQQVALTHTVVKLKCQHCNHLFATKPELLFYKGKMFLFCGKNCSDEYKKKNKVVAMCDYCKLQKIIKETVRFSGVDKPFCSEVCKFLSARDFGERWGNYCKMCSYCSQTSPNLVENRLEGKLEEFCCEDCMSKFTVLFYQMAKCDGCKRQGKLSESIKWRGNIKHFCNLFCVLEFCHQQIMNDCLPQNKVNISKAKTAVTELPSARTDTTPVITSVMSLAKIPATLSTGNTNSVLKGAVTKEAAKIIQDESTQEDAMKFPSSQSSQPSRLLKNKGISCKPVTQTKATSCKPHTQHKECQTETGFHSVGNAGLKLVTS

SEQ ID NO: 5760 - DNA, 971 bp, Homo sapiens
aagtcaaaagcattcagatttggccaagtattttcatgatgaggaatgggttggaaagctggcctacttatcagatatattttcacttataaatgaattaaatttaagttttctcaagtgttcagtgactgttttccaccagaacaagacttgcgttcaggaaatttgtggataattcacccttttatgaatcaccaaaataataatctcaccgacttcgaagaagaaaagctaacagagctatcttcagatttaggattacaagcactatttaaatcagtgtctgtaactcagttttggataaatgcaaagacaagttacccagaactccatgaaagggcaatgaaatttttattacccttttcaactgtttatttatgtgatgctgccttttcagctttgactgagtcaaaacaaaaaaatctgttgggttctggccctgccctaagacttgcagtcacatctttaattccaaggatagaaaaattagtgaaggagaaagagtagcaatatgcacattgcttaacagtgaagtcaataatcctgtgttaagttttgtataagtatcctaaaagataatttcctaatgtggatttgtgttttcagtgattaaatgttttaataatttttccctttttgttgaggaatttaataattatgattgttataaataattatgtataattataatctagggtagaaaatttagttatttcattaaatttggactagtgacaaagactgcaggtaatgagaagcccagtttataatgtaacagcacaacctggatgttgaaacagcttggcctttagaagcaagtggaacatttcagtcttctagccaaccagctacttacccctgcaaggttgtgagtaggtggaaaagatagatcttttttttgagatggagttttgctcttgttgcccaggctggagtgcaatggcgtgatcttggctcactggaacctctgc

SEQ ID NO: 5761 - protein, 106 aa, Homo sapiens
MNHQNNNLTDFEEEKLTELSSDLGLQALFKSVSVTQFWINAKTSYPELHERAMKFLLPFSTVYLCDAAFSALTESKQKNLLGSGPALRLAVTSLIPRIEKLVKEKE

SEQ ID NO: 5762 - DNA, 639 bp, Homo sapiens
atatttttaagtcaaaagcattcagatttggccaagtattttcatgatgaggaatgggttggaaagctggcctacttatcagatatattttcacttataaatgaattaaatttaagttttctcaagtgttcagtgactgttttccaccagaacaagacttgcgttcaggaaatttgtggataattcacccttttatgaatcaccaaaataataatctcaccgacttcgaagaagaaaagctaacagagctatcttcagatttaggattacaagcactatttaaatcagtgtctgtaactcagttttggataaatgcaaagacaagttacccagaactccatgaaagggcaatgaaatttttattacccttttcaactgtttatttatgtgatgctgccttttcagctttgactgagtcaaaacaaaaaaatctgttgggttctggccctgccctaagacttgcagtcacatctttaattccaaggatagaaaaattagtgaaggagaaagagtagcaatatgcacattgcttaacagtgaagtcaataatcctgtgttaagttttgtataagtatcctaaaagataatttcctaatgtggatttgtgttttcagtgattaaatgttttaataatttttc

SEQ ID NO: 5763 - protein, 106 aa, Homo sapiens; identical to SEQ ID NO: 5761

SEQ ID NO: 5764 - DNA, 3138 bp, Homo sapiens
gagggcggagaccaaggctgcgcaggcgtggttggccggtcgttgcgttgggatggatcaggcggaattccagaagagaaaataatccctgtctagatgcagaggacttggttcctattccagtgctcctccggtagcagggaggcgacagaaggtgtccaactatccattaccaagaagaaatctattcgtttgagcctgagacactctttgaggtaaaaaattagaatgaaagaacctttggatggtgaatgtggcaaagcagtggtaccacagcaggagcttctggacaaaattaaagaagaaccagacaatgctcaagagtatggatgtgtccaacagccaaaaactcaagaaagtaaattgaaaattggtggtgtgtcttcagttaatgagagacctattgcccagcagttgaacccaggctttcagctttcttttgcatcatctggcccaagtgtgttgcttccttcagttccagctgttgctattaaggttttttgttctggttgtaaaaaaatgctttataagggccaaactgcatatcataagacaggatctactcagctcttctgctccacacgatgcatcaccagacattcttcacctgcctgcctgccacctcctcccaagaaaacctgcacaaactgctcgaaagacattttaaatcctaaggatgtgatcacaactcgctttgagaattcctatcctagcaaagatttctgcagccaatcatgcttgtcatcttatgagctaaagaaaaaacctgttgttaccatatataccaaaagcatttcaactaagtgcagtatgtgtcagaagaatgctgatactcgatttgaagttaaatatcaaaatgtggtacatggtctttgtagtgatgcctgtttttcaaaatttcactctacaaacaacctcaccatgaactgttgtgagaactgtgggagctattgctatagtagctctggtccttgccaatcccagaaggtttttagttcaacaagtgtcacggcatacaagcagaattctgcccaaattcctccatatgccctggggaagtcattgaggccctcagctgaaatgattgagactacaaatgattcaggaaaaacagagcttttctgctctattaattgcttatctgcttacagagttaagactgttacttcttcaggtgtccaggtttcatgtcatagttgtaaaacctcagcaatccctcagtatcacctagccatgtcaaatggaactatatacagcttctgcagctccagttgtgtggttgctttccagaatgtatttagcaagccaaaaggaacaaactcttcggcggtgcccctgtctcagggccaagtggttgtaagcccgccctcctccaggtcagcagtgtcaataggaggaggtaacacctctgccgtttcccccagctccatccgtggctctgctgcagccagcctccaacctcttgctgaacaatcccagcaagttgctttaacccatacagttgttaaactcaagtgtcagcactgtaaccatctatttgccacaaaaccagaacttcttttttacaagggtaaaatgtttctgttttgtggcaagaattgctctgatgaatacaagaagaaaaataaagttgtggcaatgtgtgactactgtaaactgcagaaaattataaaggagactgtgcgattctcaggggttgataagccattctgtagtgaagtttgcaaattcctctctgcccgtgactttggagaacgatggggaaactactgtaagatgtgcagctactgttcacagacatccccaaatttggtagaaaatcgattggagggcaagttagaagagttttgttgtgaagattgtatgtccaaatttacagttctgttttatcagatggccaagtgtgatggttgtaaacgacagggtaaactaagcgagtccataaagtggcgaggcaacattaaacatttctgtaacctattttgtgtcttggagttttgtcatcagcaaattatgaatgactgtcttccacaaaataaagtaaatatttctaaagcaaaaactgctgtgacggagctcccttctgcaaggacagatacaacaccagttataaccagtgtgatgtcattggcaaaaatacctgctaccttatctacagggaacactaacagtgttttaaaaggtgcagttactaaagaggcagcaaagatcattcaagatgaaagtacacaggaagatgctatgaaatttccatcttcccaatcttcccagccttccaggcttttaaagaacaaaggcatatcatgcaaacccgtcacacagaccaaggccacttcttgcaaaccacatacacagcacaaagaatgtcagacagatttacctatgcctaatgaaaaaaatgatgcagaacttgattctccaccttcaaagaaaaaaagattaggttttttccagacttatgatacagaatatttaaaagttggttttattatctgtcctggatcaaaagaaagttcaccaaggccacagtgtgtcatttgtggagagatcttatccagtgaaaacatgaagccagcaaatctttctcatcatttgaagacaaaacattcagaattagaaaacaaaccagtagatttttttgaacaaaaatctttagaaatggaatgtcaaaatagttctttaaaaaagtgtttactagttgaaaagtcacttgtgaaagcttcttatttaattgctttccaaactgctgcaagcaagaagccattctccattgctgaagaattaattaaaccatatttagtagaaatgtgttcagaagttttgggttcaagtgctggagacaaaatgaaaactattccactttctaatgttacaattcaacacaggattgatgaactatctgcagacattgaagaccagctgattcaaaaggtcagagagtcaaagtggtttgcccttcagatagatgagtcatcagaaatctcaaatatcacacttcttttgtgctatattcgtttcattgattatgattgtcgtgatgtaaaagaagaattattattttgcattgaaatgcctactcaaataactggctttgaaatatttgaactaataaataaatatattgatagtaaatctctg

SEQ ID NO: 5765 - protein, 969 aa, Homo sapiens
MKEPLDGECGKAVVPQQELLDKIKEEPDNAQEYGCVQQPKTQESKLKIGGVSSVNERPIAQQLNPGFQLSFASSGPSVLLPSVPAVAIKVFCSGCKKMLYKGQTAYHKTGSTQLFCSTRCITRHSSPACLPPPPKKTCTNCSKDILNPKDVITTRFENSYPSKDFCSQSCLSSYELKKKPVVTIYTKSISTKCSMCQKNADTRFEVKYQNVVHGLCSDACFSKFHSTNNLTMNCCENCGSYCYSSSGPCQSQKVFSSTSVTAYKQNSAQIPPYALGKSLRPSAEMIETTNDSGKTELFCSINCLSAYRVKTVTSSGVQVSCHSCKTSAIPQYHLAMSNGTIYSFCSSSCVVAFQNVFSKPKGTNSSAVPLSQGQVVVSPPSSRSAVSIGGGNTSAVSPSSIRGSAAASLQPLAEQSQQVALTHTVVKLKCQHCNHLFATKPELLFYKGKMFLFCGKNCSDEYKKKNKVVAMCDYCKLQKIIKETVRFSGVDKPFCSEVCKFLSARDFGERWGNYCKMCSYCSQTSPNLVENRLEGKLEEFCCEDCMSKFTVLFYQMAKCDGCKRQGKLSESIKWRGNIKHFCNLFCVLEFCHQQIMNDCLPQNKVNISKAKTAVTELPSARTDTTPVITSVMSLAKIPATLSTGNTNSVLKGAVTKEAAKIIQDESTQEDAMKFPSSQSSQPSRLLKNKGISCKPVTQTKATSCKPHTQHKECQTDLPMPNEKNDAELDSPPSKKKRLGFFQTYDTEYLKVGFIICPGSKESSPRPQCVICGEILSSENMKPANLSHHLKTKHSELENKPVDFFEQKSLEMECQNSSLKKCLLVEKSLVKASYLIAFQTAASKKPFSIAEELIKPYLVEMCSEVLGSSAGDKMKTIPLSNVTIQHRIDELSADIEDQLIQKVRESKWFALQIDESSEISNITLLLCYIRFIDYDCRDVKEELLFCIEMPTQITGFEIFELINKYIDSKS

SEQ ID NO: 5766 - DNA, 499 bp, Homo sapiens
gattggagggcaagttagaagagttttgttgtgaagattgtatgtccaaatttacagttctgttttatcagatggccaagtgtgatggttgtaaacgacagggtaaactaagcgagtccataaagtggcgaggcaacattaaacatttctgtaacctattttgtgtcttggagttttgtcatcagcaaattatgaatgactgtcttccacaaaataaagtaaatatttctaaagcaaaaactgctgtgacggagctcccttctgcaaggacagatacaacaccagttataaccagtgtgatgtcattggcaaaaatacctgctaccttatctacagggaacactaacagtgttttaaaaggtgcagttactaaagaggcagcaaagatcattcaagatgtgagtttaattgttaatacttttcttgataatgccacttgggcttattttcactttggatatggcattctaatatatctgaatacttttctttttgctgg

SEQ ID NO: 5767 - protein, 151 aa, Homo sapiens
MSKFTVLFYQMAKCDGCKRQGKLSESIKWRGNIKHFCNLFCVLEFCHQQIMNDCLPQNKVNISKAKTAVTELPSARTDTTPVITSVMSLAKIPATLSTGNTNSVLKGAVTKEAAKIIQDVSLIVNTFLDNATWAYFHFGYGILIYLNTFLF

SEQ ID NO: 5768 - DNA, 611 bp, Homo sapiens
ccaaggtgtccaggtttcatgtcatagttgtaaaacctcagcaatccctcagtatcacctagccatgtcaaatggaactatatacagcttctgcagctccagttgtgtggttgctttccagaatgtatttagcaagccaaaaggaacaaactcttcggcggtgcccctgtctcagggccaagtggttgtaagcccgccctcctccaggtcagcagtgtcaataggaggaggtaacacctctgccgtttcccccagctccatccgtggctctgctgcagccagcctccaacctcttgctgaacaatcccagcaagttgctttaacccatacagttgttaaactcaagtgtcagcactgtaaccatctatttgccacaaaaccagaacttcttttttacaaggtaaagagagatcatgaaagggattgtatataaactcatccagtagaaacacttttgtgttttcaattttgatcactcaatttgctttgacatgaaaaggagttcttaaagataaagcaactgtttagttggctcttaatggactgttgtttctctgcagggtaaaatgtttctgttttgtggcaagaattgctctgatgaatacaagaag

SEQ ID NO: 5769 - protein, 122 aa, Homo sapiens
MSNGTIYSFCSSSCVVAFQNVFSKPKGTNSSAVPLSQGQVVVSPPSSRSAVSIGGGNTSAVSPSSIRGSAAASLQPLAEQSQQVALTHTVVKLKCQHCNHLFATKPELLFYKVKRDHERDCI

SEQ ID NO: 5770 - DNA, 3022 bp, Homo sapiens
agggacgcgttgacattcactggctagtccaccgctctcagtcggagaccacattgcctcgaaggcgattgtgaagcggggctctgaggggcttgatgccccccacccctcacacggagaccttgaaagaggtgtccaactatccattaccaagaagaaatctattcgtttgagcctgagacactctttgaggtaaaaaattagaatgaaagaacctttggatggtgaatgtggcaaagcagtggtaccacagcaggagcttctggacaaaattaaagaagaaccagacaatgctcaagagtatggatgtgtccaacagccaaaaactcaagaaagtaaattgaaaattggtggtgtgtcttcagttaatgagagacctattgcccagcagttgaacccaggctttcagctttcttttgcatcatctggcccaagtgtgttgcttccttcagttccagctgttgctattaaggttttttgttctggttgtaaaaaaatgctttataagggccaaactgcatatcataagacaggatctactcagctcttctgctccacacgatgcatcaccagacattcttcacctgcctgcctgccacctcctcccaagaaaacctgcacaaactgctcgaagtataaaattcttaacatccctttttactttaccttttttttagtgtgtatattgtttagttcaaacatactgttgatactttaaatctcttcagcatgtatctgtagaaataactttttagttaatggaagaattcaccaattttaaagttttgcaacattaaataagtgacttggtgttagaatattgcctaaaccagttttctatcactttaaattttactatggaaagaaataacaaatgacatgtgggaattgcaggactatcctgtaattgtagacacccaccatttaaatttatttaacagttatcttgaaagctattgggtatagcataaaataatatcactcttttaatagtatacaaaagctatttaattctttaaaaagtaaaaactctacatggtcgcaaaaatgtgtttatttctaatgtccttgtggggtcattgttgctttacaataatgcttagatgcagagagaggaaaaaacagcaacaaagtcacataaatctttccctgacttagtacatttgaaggatttggcatattttgcctatttctgtggtagtgtaatttgaggaatacagtgtgttgttaatagtcactacaggcaaaaaacagtaagagcttgcttttaaattgtggctctgtcatttatctctgtgacttcgggctagatgtttaactttctaagcctccatttctcatcagtaaataatagttgcttcctaggactttaatgagacagtgttagcaaatggcctagcacatagcaagtacttaaaaaatggaatcctgttattattaataataaaaattatatcgtgcgattatttataattaacataaataaatataataaatatatgtgtatataatacatattactatgtatacttaacatatcacttgtaggcccctattttgtctttggctgtgtttatctgctttgtgtcttgacttaaactatttaaaagtagatcctgctatatggaaatttccaagtaaagaggagagaggatttttttttttctttgttgcccatggtagagtgatcacagctcactgcagccttgaactccccgggctcagatgatcctcccacctcagcctttcaaatagctgggaccacaggcgcataccaccatgcccgactaatttttgtatttttttgtagagatggttttgctatgttgcccaggctggtctcaaactcctgggctcaagcaattagcctgcctcagcctcctaaagtgctgggactattggtgtgagccatcacatgtggccaggagagaggaattttaaaatatttatatactctaaattagtttgttgcaaaataccattctaattaatgcttttatgtcattctcatgaaactaatctgaaagagtaaacttagttttctatttttagatattgtttcaacataccaaataccaaaataaaattaaataattttaaagaacataacacaacttatacatccaaatgcctattgttttcttaaaagtagtcacccccgtcagtgactttttagcataaggttaggagacagattcttatcttttcagcatgcatttgatttttacaaattttcaaaggctgcttgataccttaatcaggccaatatattagctaattaaattaagtcatactgttaaaacatgatatttataaaattaaaagttaaaaaatagtctaagggtttatcttaagttttatcttaaaaaaattagaaaaatgttttgagctatgttattgttggaaggtgtggtttttctacggtaaatgttacgatataacactcatttgcatgtgtaaggttcagagtacacttataatttatgtgcacagattttcattataaagtcattctctttgatttacatatttttacttgctatttttgtacttattatgccactggcagattcaccttattaagtgaaactctttattgctctgttttcagtagaaaaatcacttttcaaaattaatacttcatctgtgtataagcatattcttttggtttctaagatttgctgtcatatttttaaagttgagttttaaagaattaaaataatttttgttgttgttattttctcatggtttaccattgaatatacctgtataataaaggtgcaggatgggaggcaggatagtggaataattaattccatagactagaatcagattgcctggattagtatttcagctttattgcctactagcaatatgactttgacaagctatttaacctctcattcagtttcctcatctgtaaagtggcagttacagtaatacttaaccttatagtggtttggggatttttttttttttttgagacacggtctcactctgtcacccaggctggagtgcagtg

SEQ ID NO: 5771 - protein, 170 aa, Homo sapiens
MKEPLDGECGKAVVPQQELLDKIKEEPDNAQEYGCVQQPKTQESKLKIGGVSSVNERPIAQQLNPGFQLSFASSGPSVLLPSVPAVAIKVFCSGCKKMLYKGQTAYHKTGSTQLFCSTRCITRHSSPACLPPPPKKTCTNCSKYKILNIPFYFTFFLVCILFSSNILLIL

SEQ ID NO: 5772 - DNA, 2757 bp, Homo sapiens
agtgctcctccggtagcagggaggcgacagaaggagtatggatgtgtccaacagccaaaaactcaagaaagtaaattgaaaattggtggtgtgtcttcagttaatgagagacctattgcccagcagttgaacccaggctttcagctttcttttgcatcatctggcccaagtgtgttgcttccttcagttccagctgttgctattaaggttttttgttctggttgtaaaaaaatgctttataagggccaaactgcatatcataagacaggatctactcagctcttctgctccacacgatgcatcaccagacattcttcacctgcctgcctgccacctcctcccaagaaaacctgcacaaactgctcgaagtataaaattcttaacatccctttttactttaccttttttttagtgtgtatattgtttagttcaaacatactgttgatactttaaatctcttcagcatgtatctgtagaaataactttttagttaatggaagaattcaccaattttaaagttttgcaacattaaataagtgacttggtgttagaatattgcctaaaccagttttctatcactttaaattttactatggaaagaaataacaaatgacatgtgggaattgcaggactatcctgtaattgtagacacccaccatttaaatttatttaacagttatcttgaaagctattgggtatagcataaaataatatcactcttttaatagtatacaaaagctatttaattctttaaaaagtaaaaactctacatggtcgcaaaaatgtgtttatttctaatgtccttgtggggtcattgttgctttacaataatgcttagatgcagagagaggaaaaaacagcaacaaagtcacataaatctttccctgacttagtacatttgaaggatttggcatattttgcctatttctgtggtagtgtaatttgaggaatacagtgtgttgttaatagtcactacaggcaaaaaacagtaagagcttgcttttaaattgtggctctgtcatttatctctgtgacttcgggctagatgtttaactttctaagcctccatttctcatcagtaaataatagttgcttcctaggactttaatgagacagtgttagcaaatggcctagcacatagcaagtacttaaaaaatggaatcctgttattattaataataaaaattatatcgtgcgattatttataattaacataaataaatataataaatatatgtgtatataatacatattactatgtatacttaacatatcacttgtaggcccctattttgtctttggctgtgtttatctgctttgtgtcttgacttaaactatttaaaagtagatcctgctatatggaaatttccaagtaaagaggagagaggatttttttttttctttgttgcccatggtagagtgatcacagctcactgcagccttgaactccccgggctcagatgatcctcccacctcagcctttcaaatagctgggaccacaggcgcataccaccatgcccgactaatttttgtatttttttgtagagatggttttgctatgttgcccaggctggtctcaaactcctgggctcaagcaattagcctgcctcagcctcctaaagtgctgggactattggtgtgagccatcacatgtggccaggagagaggaattttaaaatatttatatactctaaattagtttgttgcaaaataccattctaattaatgcttttatgtcattctcatgaaactaatctgaaagagtaaacttagttttctatttttagatattgtttcaacataccaaataccaaaataaaattaaataattttaaagaacataacacaacttatacatccaaatgcctattgttttcttaaaagtagtcacccccgtcagtgactttttagcataaggttaggagacagattcttatcttttcagcatgcatttgatttttacaaattttcaaaggctgcttgataccttaatcaggccaatatattagctaattaaattaagtcatactgttaaaacatgatatttataaaattaaaagttaaaaaatagtctaagggtttatcttaagttttatcttaaaaaaattagaaaaatgttttgagctatgttattgttggaaggtgtggtttttctacggtaaatgttacgatataacactcatttgcatgtgtaaggttcagagtacacttataatttatgtgcacagattttcattataaagtcattctctttgatttacatatttttacttgctatttttgtacttattatgccactggcagattcaccttattaagtgaaactctttattgctctgttttcagtagaaaaatcacttttcaaaattaatacttcatctgtgtataagcatattcttttggtttctaagatttgctgtcatatttttaaagttgagttttaaagaattaaaataatttttgttgttgttattttctcatggtttaccattgaatatacctgtataataaaggtgcaggatgggaggcaggatagtggaataattaattccatagactagaatcagattgcctggattagtatttcagctttattgcctactagcaatatgactttgacaagctatttaacctctcattcagtttcctcatctgtaaagtggcagttacagtaatacttaaccttatagtggtttggggatttttttttttttttgagacacggtctcactctgtcacccaggctggagtgcagtg

SEQ ID NO: 5773 - protein, 73 aa, Homo sapiens
MLYKGQTAYHKTGSTQLFCSTRCITRHSSPACLPPPPKKTCTNCSKYKILNIPFYFTFFLVCILFSSNILLIL

SEQ ID NO: 5774 - DNA, 2765 bp, Homo sapiens
gagggcggagaccaaggctgcgcaggcgtggttggccggtcgttgcgttgggatggatcaggcggaattccagaagagaaaataatccctgtctagatgcagaggacttggttcctattccagtgctcctccggtagcagggaggcgacagaaggtgtccaactatccattaccaagaagaaatctattcgtttgagcctgagacactctttgaggtaaaaaattagaatgaaagaacctttggatggtgaatgtggcaaagcagtggtaccacagcaggagcttctggacaaaattaaagaagaaccagacaatgctcaagagtatggatgtgtccaacagccaaaaactcaagaaagtaaattgaaaattggtggtgtgtcttcagttaatgagagacctattgcccagcagttgaacccaggctttcagctttcttttgcatcatctggcccaagtgtgttgcttccttcagttccagctgttgctattaaggttttttgttctggttgtaaaaaaatgctttataagggccaaactgcatatcataagacaggatctactcagctcttctgctccacacgatgcatcaccagacattcttcacctgcctgcctgccacctcctcccaagaaaacctgcacaaactgctcgaagtataaaattcttaacatccctttttactttaccttttttttagtgtgtatattgtttagttcaaacatactgttgatactttaaatctcttcagcatgtatctgtagaaataactttttagttaatggaagaattcaccaattttaaagttttgcaacattaaataagtgacttggtgttagaatattgcctaaaccagttttctatcactttaaattttactatggaaagaaataacaaatgacatgtgggaattgcaggactatcctgtaattgtagacacccaccatttaaatttatttaacagttatcttgaaagctattgggtatagcataaaataatatcactcttttaatagtatacaaaagctatttaattctttaaaaagtaaaaactctacatggtcgcaaaaatgtgtttatttctaatgtccttgtggggtcattgttgctttacaataatgcttagatgcagagagaggaaaaaacagcaacaaagtcacataaatctttccctgacttagtacatttgaaggatttggcatattttgcctatttctgtggtagtgtaatttgaggaatacagtgtgttgttaatagtcactacaggcaaaaaacagtaagagcttgcttttaaattgtggctctgtcatttatctctgtgacttcgggctagatgtttaactttctaagcctccatttctcatcagtaaataatagttgcttcctaggactttaatgagacagtgttagcaaatggcctagcacatagcaagtacttaaaaaatggaatcctgttattattaataataaaaattatatcgtgcgattatttataattaacataaataaatataataaatatatgtgtatataatacatattactatgtatacttaacatatcacttgtaggcccctattttgtctttggctgtgtttatctgctttgtgtcttgacttaaactatttaaaagtagatcctgctatatggaaatttccaagtaaagaggagagaggatttttttttttctttgttgcccatggtagagtgatcacagctcactgcagccttgaactccccgggctcagatgatcctcccacctcagcctttcaaatagctgggaccacaggcgcataccaccatgcccgactaatttttgtatttttttgtagagatggttttgctatgttgcccaggctggtctcaaactcctgggctcaagcaattagcctgcctcagcctcctaaagtgctgggactattggtgtgagccatcacatgtggccaggagagaggaattttaaaatatttatatactctaaattagtttgttgcaaaataccattctaattaatgcttttatgtcattctcatgaaactaatctgaaagagtaaacttagttttctatttttagatattgtttcaacataccaaataccaaaataaaattaaataattttaaagaacataacacaacttatacatccaaatgcctattgttttcttaaaagtagtcacccccgtcagtgactttttagcataaggttaggagacagattcttatcttttcagcatgcatttgatttttacaaattttcaaaggctgcttgataccttaatcaggccaatatattagctaattaaattaagtcatactgttaaaacatgatatttataaaattaaaagttaaaaaatagtctaagggtttatcttaagttttatcttaaaaaaattagaaaaatgttttgagctatgttattgttggaaggtgtggtttttctacggtaaatgttacgatataacactcatttgcatgtgtaaggttcagagtacacttataatttatgtgcacagattttcattataaagtcattctctttgatttacatatttttacttgctatttttgtacttattatgccactggcagattcaccttattaagtgaaactctttattgctctgttttcagtagaaaaatcacttttcaaaattaatacttcatctgtgtataagcatattcttttggtttctaagatttgctgtcatatttttaaagttgagttttaaagaattaaaataatttttgttgttgttattttc

SEQ ID NO: 5775 - protein, 170 aa, Homo sapiens; identical to SEQ ID NO: 5771

SEQ ID NO: 5776 - DNA, 2736 bp, Homo sapiens
agggacgcgttgacattcactggctagtccaccgctctcagtcggagaccacattgcctcgaaggcgattgtgaagcggggctctgaggggcttgatgccccccacccctcacacggagaccttgaaagaggtgtccaactatccattaccaagaagaaatctattcgtttgagcctgagacactctttgaggtaaaaaattagaatgaaagaacctttggatggtgaatgtggcaaagcagtggtaccacagcaggagcttctggacaaaattaaagaagaaccagacaatgctcaagagtatggatgtgtccaacagccaaaaactcaagaaagtaaattgaaaattggtggtgtgtcttcagttaatgagagacctattgcccagcagttgaacccaggctttcagctttcttttgcatcatctggcccaagtgtgttgcttccttcagttccagctgttgctattaaggttttttgttctggttgtaaaaaaatgctttataagggccaaactgcatatcataagacaggatctactcagctcttctgctccacacgatgcatcaccagacattcttcacctgcctgcctgccacctcctcccaagaaaacctgcacaaactgctcgaagtataaaattcttaacatccctttttactttaccttttttttagtgtgtatattgtttagttcaaacatactgttgatactttaaatctcttcagcatgtatctgtagaaataactttttagttaatggaagaattcaccaattttaaagttttgcaacattaaataagtgacttggtgttagaatattgcctaaaccagttttctatcactttaaattttactatggaaagaaataacaaatgacatgtgggaattgcaggactatcctgtaattgtagacacccaccatttaaatttatttaacagttatcttgaaagctattgggtatagcataaaataatatcactcttttaatagtatacaaaagctatttaattctttaaaaagtaaaaactctacatggtcgcaaaaatgtgtttatttctaatgtccttgtggggtcattgttgctttacaataatgcttagatgcagagagaggaaaaaacagcaacaaagtcacataaatctttccctgacttagtacatttgaaggatttggcatattttgcctatttctgtggtagtgtaatttgaggaatacagtgtgttgttaatagtcactacaggcaaaaaacagtaagagcttgcttttaaattgtggctctgtcatttatctctgtgacttcgggctagatgtttaactttctaagcctccatttctcatcagtaaataatagttgcttcctaggactttaatgagacagtgttagcaaatggcctagcacatagcaagtacttaaaaaatggaatcctgttattattaataataaaaattatatcgtgcgattatttataattaacataaataaatataataaatatatgtgtatataatacatattactatgtatacttaacatatcacttgtaggcccctattttgtctttggctgtgtttatctgctttgtgtcttgacttaaactatttaaaagtagatcctgctatatggaaatttccaagtaaagaggagagaggatttttttttttctttgttgcccatggtagagtgatcacagctcactgcagccttgaactccccgggctcagatgatcctcccacctcagcctttcaaatagctgggaccacaggcgcataccaccatgcccgactaatttttgtatttttttgtagagatggttttgctatgttgcccaggctggtctcaaactcctgggctcaagcaattagcctgcctcagcctcctaaagtgctgggactattggtgtgagccatcacatgtggccaggagagaggaattttaaaatatttatatactctaaattagtttgttgcaaaataccattctaattaatgcttttatgtcattctcatgaaactaatctgaaagagtaaacttagttttctatttttagatattgtttcaacataccaaataccaaaataaaattaaataattttaaagaacataacacaacttatacatccaaatgcctattgttttcttaaaagtagtcacccccgtcagtgactttttagcataaggttaggagacagattcttatcttttcagcatgcatttgatttttacaaattttcaaaggctgcttgataccttaatcaggccaatatattagctaattaaattaagtcatactgttaaaacatgatatttataaaattaaaagttaaaaaatagtctaagggtttatcttaagttttatcttaaaaaaattagaaaaatgttttgagctatgttattgttggaaggtgtggtttttctacggtaaatgttacgatataacactcatttgcatgtgtaaggttcagagtacacttataatttatgtgcacagattttcattataaagtcattctctttgatttacatatttttacttgctatttttgtacttattatgccactggcagattcaccttattaagtgaaactctttattgctctgttttcagtagaaaaatcacttttcaaaattaatacttcatctgtgtataagcatattcttttggtttctaagatttgctgtcatatttttaaagttgagttttaaagaattaaaataatttttgttgttgtt

SEQ ID NO: 5777 - protein, 170 aa, Homo sapiens; identical to SEQ ID NO: 5771

SEQ ID NO: 5778 - DNA, 2471 bp, Homo sapiens
agtgctcctccggtagcagggaggcgacagaaggagtatggatgtgtccaacagccaaaaactcaagaaagtaaattgaaaattggtggtgtgtcttcagttaatgagagacctattgcccagcagttgaacccaggctttcagctttcttttgcatcatctggcccaagtgtgttgcttccttcagttccagctgttgctattaaggttttttgttctggttgtaaaaaaatgctttataagggccaaactgcatatcataagacaggatctactcagctcttctgctccacacgatgcatcaccagacattcttcacctgcctgcctgccacctcctcccaagaaaacctgcacaaactgctcgaagtataaaattcttaacatccctttttactttaccttttttttagtgtgtatattgtttagttcaaacatactgttgatactttaaatctcttcagcatgtatctgtagaaataactttttagttaatggaagaattcaccaattttaaagttttgcaacattaaataagtgacttggtgttagaatattgcctaaaccagttttctatcactttaaattttactatggaaagaaataacaaatgacatgtgggaattgcaggactatcctgtaattgtagacacccaccatttaaatttatttaacagttatcttgaaagctattgggtatagcataaaataatatcactcttttaatagtatacaaaagctatttaattctttaaaaagtaaaaactctacatggtcgcaaaaatgtgtttatttctaatgtccttgtggggtcattgttgctttacaataatgcttagatgcagagagaggaaaaaacagcaacaaagtcacataaatctttccctgacttagtacatttgaaggatttggcatattttgcctatttctgtggtagtgtaatttgaggaatacagtgtgttgttaatagtcactacaggcaaaaaacagtaagagcttgcttttaaattgtggctctgtcatttatctctgtgacttcgggctagatgtttaactttctaagcctccatttctcatcagtaaataatagttgcttcctaggactttaatgagacagtgttagcaaatggcctagcacatagcaagtacttaaaaaatggaatcctgttattattaataataaaaattatatcgtgcgattatttataattaacataaataaatataataaatatatgtgtatataatacatattactatgtatacttaacatatcacttgtaggcccctattttgtctttggctgtgtttatctgctttgtgtcttgacttaaactatttaaaagtagatcctgctatatggaaatttccaagtaaagaggagagaggatttttttttttctttgttgcccatggtagagtgatcacagctcactgcagccttgaactccccgggctcagatgatcctcccacctcagcctttcaaatagctgggaccacaggcgcataccaccatgcccgactaatttttgtatttttttgtagagatggttttgctatgttgcccaggctggtctcaaactcctgggctcaagcaattagcctgcctcagcctcctaaagtgctgggactattggtgtgagccatcacatgtggccaggagagaggaattttaaaatatttatatactctaaattagtttgttgcaaaataccattctaattaatgcttttatgtcattctcatgaaactaatctgaaagagtaaacttagttttctatttttagatattgtttcaacataccaaataccaaaataaaattaaataattttaaagaacataacacaacttatacatccaaatgcctattgttttcttaaaagtagtcacccccgtcagtgactttttagcataaggttaggagacagattcttatcttttcagcatgcatttgatttttacaaattttcaaaggctgcttgataccttaatcaggccaatatattagctaattaaattaagtcatactgttaaaacatgatatttataaaattaaaagttaaaaaatagtctaagggtttatcttaagttttatcttaaaaaaattagaaaaatgttttgagctatgttattgttggaaggtgtggtttttctacggtaaatgttacgatataacactcatttgcatgtgtaaggttcagagtacacttataatttatgtgcacagattttcattataaagtcattctctttgatttacatatttttacttgctatttttgtacttattatgccactggcagattcaccttattaagtgaaactctttattgctctgttttcagtagaaaaatcacttttcaaaattaatacttcatctgtgtataagcatattcttttggtttctaagatttgctgtcatatttttaaagttgagttttaaagaattaaaataatttttgttgttgtt

SEQ ID NO: 5779 - protein, 73 aa, Homo sapiens; identical to SEQ ID NO: 5773

SEQ ID NO: 5780 - DNA, 654 bp, Homo sapiens
ggggcggtgccaggtgggctacgcggctggggcggctgcggatatcgccttagggacgcgttgacattcactggctagtccaccgctctcagtcggagaccacattgcctcgtgtccaactatccattaccaagaagaaatctattcgtttgagcctgagacactctttgaggtaaaaaattagaatgaaagaacctttggatggtgaatgtggcaaagcagtggtaccacagcaggagcttctggacaaaattaaagaagaaccagacaatgctcaagagtatggatgtgtccaacagccaaaaactcaagaaagtaaattgaaaattggtggtgtgtcttcagttaatgagagacctattgcccagcagttgaacccaggctttcagctttcttttgcatcatctggcccaagtgtgttgcttccttcagttccagctgttgctattaaggttttttgttctggttgtaaaaaaatgctttataagggccaaactgcatatcataagacaggatctactcagctcttctgctccacacgatgcatcaccagacattcttcacctgcctgcctgccacctcctcccaagaaaacctgcacaaactgctcgaagtataaaattcttaacatccctttttactttaccttttttt

SEQ ID NO: 5781 - protein, 155 aa, Homo sapiens
MKEPLDGECGKAVVPQQELLDKIKEEPDNAQEYGCVQQPKTQESKLKIGGVSSVNERPIAQQLNPGFQLSFASSGPSVLLPSVPAVAIKVFCSGCKKMLYKGQTAYHKTGSTQLFCSTRCITRHSSPACLPPPPKKTCTNCSKYKILNIPFYFTF

SEQ ID NO: 5782 - DNA, 613 bp, Homo sapiens
ggccggtcgttgcgttgggatggatcaggcggaattccagaagagaaaataatccctgtctagatgcagaggacttggttcctattccagtgctcctccggtagcagggaggcgacagaaggtgtccaactatccattaccaagaagaaatctattcgtttgagcctgagacactctttgaggtaaaaaattagaatgaaagaacctttggatggtgaatgtggcaaagcagtggtaccacagcaggagcttctggacaaaattaaagaagaaccagacaatgctcaagtaagcatttcatcttcatttaaaaatttaaaaaaattccttcttttccatctggtcaactgaaaaattttagttaaacggcttctggtttgtaagtttaaaataacccaaactgagacaggctctcgctgtcgctgagggtgtagtgcagtggtgcgatctccttagctcactgcagcctccacctcccaggctcaagtgatcttcccacctcagcctcctgtgtagctgggaccacagggcacacaccaacatgctcaactatttttttgtatttttggtagagacggggtttggccatgtttcccaggctggtctcaaactc

SEQ ID NO: 5783 - protein, 40 aa, Homo sapiens
MQRTWFLFQCSSGSREATEGVQLSITKKKSIRLSLRHSLR

SEQ ID NO: 5784 - DNA, 1825 bp, Homo sapiens
agcattcttataggagtctccagcctctctttgcagttttcaagacaggaagttgacttcttccttgcagctccttccacagtgaacaacttggctgtcagagaggttctgattacaaaacccagtccagccacaaaaagcttctgcagaagcctgcctaatgtttacaaacctacgatgcagccactacaattatccccatttcaaggtcgaagaaatggagatttatagaagttgtcaaatcgcttactagcacacagctaataagtagtaaagccatctctcaaatccaggaaatctaactgccctgcctgagctctgagtcaagggtcctactttggctgccagccagcgacgacttcaagggaatctggaaactgttcttcaggaagaaacccattagtttggaactggagaattcctttgcatcagatactaaaatgaaagaaccacttttaggtggtgagtgtgacaaggcagtggcatcacagctggggctgctagatgaaattaagacagaacccgacaatgctcaagagtattgtcataggcaacagtccagaactcaggagaatgaactgaaaataaatgctgtgttttcagagagtgcttcacagttgactgcaggcattcagctttctctggcatcatctggcgtgaataaaatgcttccttcagtttcaaccacagctattcaggtttcctgtgctggttgtaaaaaaattctccagaaggggcaaactgcttatcagaggaaaggatctgctcaacttttctgctccataccatgcatcactgaatacatttcatctgccagttcaccagttccttctaagagaacttgttcaaactgctcaaaagacattttaaatccaaaggatgtgattagtgtccagctggaagacactacctcttgcaaaactttttgcagcctatcttgtctttcatcatatgaagaaaaaagaaaaccatttgttaccatatgtactaatagcattttgaccaagtgcagcatgtgccagaagactgctattattcagtatgaagtaaaataccaaaatgtgaaacataatctttgcagtaatgcctgcctttcaaagtttcactctgctaacaacttcatcatgaactgctgtgagaactgtggcacttactgttacaccagctctagtctgtcccacatacttcagatggaaggacagtctcattactttaatagttcaaagagtattacagcatataagcagaaacctgccaaaccacttatatctgttccttgcaaaccattgaagccctcagatgaaatgattgagactacgagtgatttggggaagacagagcttttctgctctattaattgtttctctgcatacagtaaagctaagatggaatcttcttcagtaagtgttgtttctgtggtgcatgatacttcaacagagcttctttctccaaagaaagatacgactccagttataagcaatatagtgtcattggcagacaccgatgttgccttgcccatcatgaacactgatgtcttacaagatacagtttcttcagtaacagcaacagcagatgtcattgtggatctttctaagagttcacctagtgaacccagtaatgctgttgctagtagtagtacggaacagccaagcgtttcaccatcttcatcagtattcagtcagcatgcaattggttccagtacagaagtacaaaaagacaatatgaaatctatgaaaataagtgatgaactatgtcacccaaaatgtacatccaaagtacaaaaagttaaaggtaaatcacgaagtattaaaaaatcttgttgtgc

SEQ ID NO: 5785 - protein, 460 aa, Homo sapiens
MKEPLLGGECDKAVASQLGLLDEIKTEPDNAQEYCHRQQSRTQENELKINAVFSESASQLTAGIQLSLASSGVNKMLPSVSTTAIQVSCAGCKKILQKGQTAYQRKGSAQLFCSIPCITEYISSASSPVPSKRTCSNCSKDILNPKDVISVQLEDTTSCKTFCSLSCLSSYEEKRKPFVTICTNSILTKCSMCQKTAIIQYEVKYQNVKHNLCSNACLSKFHSANNFIMNCCENCGTYCYTSSSLSHILQMEGQSHYFNSSKSITAYKQKPAKPLISVPCKPLKPSDEMIETTSDLGKTELFCSINCFSAYSKAKMESSSVSVVSVVHDTSTELLSPKKDTTPVISNIVSLADTDVALPIMNTDVLQDTVSSVTATADVIVDLSKSSPSEPSNAVASSSTEQPSVSPSSSVFSQHAIGSSTEVQKDNMKSMKISDELCHPKCTSKVQKVKGKSRSIKKSC

SEQ ID NO: 5786 - DNA, 4177 bp, Homo sapiens
ggggcggggtcggcggggccgtttcgcttcgaagattgtttcagaagcgttgggcggggcgtccctgagagaaattagaatctggaaactgttcttcaggaagaaacccattagtttggaactggagaattcctttgcatcagatactaaaatgaaagaaccacttttaggtggtgagtgtgacaaggcagtggcatcacagctggggctgctagatgaaattaagacagaacccgacaatgctcaagagtattgtcataggcaacagtccagaactcaggagaatgaactgaaaataaatgctgtgttttcagagagtgcttcacagttgactgcaggcattcagctttctctggcatcatctggcgtgaataaaatgcttccttcagtttcaaccacagctattcaggtttcctgtgctggttgtaaaaaaattctccagaaggggcaaactgcttatcagaggaaaggatctgctcaacttttctgctccataccatgcatcactgaatacatttcatctgccagttcaccagttccttctaagagaacttgttcaaactgctcaaaagacattttaaatccaaaggatgtgattagtgtccagctggaagacactacctcttgcaaaactttttgcagcctatcttgtctttcatcatatgaagaaaaaagaaaaccatttgttaccatatgtactaatagcattttgaccaagtgcagcatgtgccagaagactgctattattcagtatgaagtaaaataccaaaatgtgaaacataatctttgcagtaatgcctgcctttcaaagtttcactctgctaacaacttcatcatgaactgctgtgagaactgtggcacttactgttacaccagctctagtctgtcccacatacttcagatggaaggacagtctcattactttaatagttcaaagagtattacagcatataagcagaaacctgccaaaccacttatatctgttccttgcaaaccattgaagccctcagatgaaatgattgagactacgagtgatttggggaagacagagcttttctgctctattaattgtttctctgcatacagtaaagctaagatggaatcttcttcagtaagtgttgtttctgtggtgcatgatacttcaacagagcttctttctccaaagaaagatacgactccagttataagcaatatagtgtcattggcagacaccgatgttgccttgcccatcatgaacactgatgtcttacaagatacagtttcttcagtaacagcaacagcagatgtcattgtggatctttctaagagttcacctagtgaacccagtaatgctgttgctagtagtagtacggaacagccaagcgtttcaccatcttcatcagtattcagtcagcatgcaattggttccagtacagaagtacaaaaagacaatatgaaatctatgaaaataagtgatgaactatgtcacccaaaatgtacatccaaagtacaaaaagttaaaggtaaatcacgaagtattaaaaaatcttgttgtgcagattttgagtgtttggaaaacagtaaaaaagatgtggcattctgttattcatgccagttgttctgccaaaaatattttagctgtggaagagagtcatttgcaacccacggaacttctaattggaaaaaaaccctggaaaaattcagaaagcatgaaaaaagtgaaatgcatttgaagtcattggaattttggagagaataccaattttgtgatggagctgtcagtgacgatttatctattcattcgaaacagattgagggaaataaaaagtacctaaagcttataattgaaaatattttatttcttggaaagcagtgtttacccttaagaggaaacgaccagtcagtttcatctgtgaataaaggcaattttttagaattgttagaaatgagagcaaaagataaaggagaagaaacatttcgacttatgaattcacaagttgacttctataacagtacacaaattcaaagtgatattatcgaaataataaagactgaaatgttgcaggatattgtgaatgagatcaatgactcctcagcattttcaatcatatgtgatgagacaatcaatagtgccatgaaagaacagctttcaatttgtgtaagatacccacaaaaatcatcaaaggctatcttaattaaggaaagattcttgggttttgttgatactgaggagatgactgggacccacttacataggactatcaaaacttatctgcagcaaattggagttgatatggataaaatacatggccaggcctatgatagcaccactaatttgaagataaaatttaataaaatagcagcagaattcaagaaagaagaaccaagagctttatacatacattgttatgcacactttttggatttatcaataattaggttttgtaaagaagtaaaagaactccgaagtgctctaaaaactctcagttctttgttcaacactatttgtatgtctggggaaatgttggcaaattttcgaaacatttataggctaagtcaaaacaaaacatgcaagaaacatatatcacaatcatgttggacagtccatgatcgtacattactatctgtgattgacagtcttccagagattattgaaacattggaagttatagcaagccattcttcaaatacaagtttcgccgatgaattgagtcatttgctgacattggtttccaaatttgaatttgtcttttgtttgaaattcctgtatcgagtgctgagtgttacaggaattctttccaaagagcttcaaaataaaaccatagacattttttctttgtcttcaaaaatagaagcaattttggaatgtttatcatctgaaagaaatgacgtatactttaaaacaatctgggatggaacagaggaaatatgtcaaaaaataacctgtaaaggttttaaagttgaaaaaccttctcttcagaaaagaagaaaaattcagaaatcagtagatcttggcaattcagataatatgttttttcctacttcaacagaagaacaatataaaattaatatctattaccaaggattagatactatattacaaaatttaaagttatgtttttcggagtttgattattgcaaaataaagcaaatttcagaactgttatttaaatggaatgaaccattaaatgaaacaacagcaaaacatgttcaggaattttataaacttgatgaggacattatcccagaacttagattttatcgacattatgcaaagcttaactttgtcatagatgatagttgcataaacttcgtcagtctcggctgtttgtttattcagcatggtcttcacagtaatattccttgtctctcaaagctattatatattgctttgtcttggccaattacttcagcaagtactgagaactcattttctaccctgcctcgtcttaagacatatttatgtaataccatgggacaagagaagcttactggcccagccctaatggctgttgagcaggagttggtaaataaactaatggagcctgaaagactcaatgaaattgtggaaaagtttatcagtcagatgaaagaaatataatacatgctcatttgaacttacctaaaagacttgtatttccattgggatgttttcatttcaaaattgttcaaaattcaaaagacacagaacgataaacagtgaagtctccttccctcctttagaactcattttctcttcccaaaaagtgttatcttttccttaaatatccctctagaggtatttttcctaagtggtattgtacggtgtatactgttcttcagcttgtcttctctgtgtaacatatttttgagattgtcccatgtcgttacatgaagagtttcttgattcttggtctataattgcagatgttattgtatgaatgtaccataatatatttgagcagtccctgctgacatttttttcctaaccttttgctattataaataatgattcattttataaccttttatataggtcacattgcacatgagtgagtttactgtaagctggaaatctaaagttagaattactaggttaagatatgtgcatttttacttttgatagatattggcaagttgccatctataaggattgtgccagtttacagtcccacccacaatgcatgagagtgcctattaaatctttgtaagtgttatc

SEQ ID NO: 5787 - protein, 1142 aa, Homo sapiens
MKEPLLGGECDKAVASQLGLLDEIKTEPDNAQEYCHRQQSRTQENELKINAVFSESASQLTAGIQLSLASSGVNKMLPSVSTTAIQVSCAGCKKILQKGQTAYQRKGSAQLFCSIPCITEYISSASSPVPSKRTCSNCSKDILNPKDVISVQLEDTTSCKTFCSLSCLSSYEEKRKPFVTICTNSILTKCSMCQKTAIIQYEVKYQNVKHNLCSNACLSKFHSANNFIMNCCENCGTYCYTSSSLSHILQMEGQSHYFNSSKSITAYKQKPAKPLISVPCKPLKPSDEMIETTSDLGKTELFCSINCFSAYSKAKMESSSVSVVSVVHDTSTELLSPKKDTTPVISNIVSLADTDVALPIMNTDVLQDTVSSVTATADVIVDLSKSSPSEPSNAVASSSTEQPSVSPSSSVFSQHAIGSSTEVQKDNMKSMKISDELCHPKCTSKVQKVKGKSRSIKKSCCADFECLENSKKDVAFCYSCQLFCQKYFSCGRESFATHGTSNWKKTLEKFRKHEKSEMHLKSLEFWREYQFCDGAVSDDLSIHSKQIEGNKKYLKLIIENILFLGKQCLPLRGNDQSVSSVNKGNFLELLEMRAKDKGEETFRLMNSQVDFYNSTQIQSDIIEIIKTEMLQDIVNEINDSSAFSIICDETINSAMKEQLSICVRYPQKSSKAILIKERFLGFVDTEEMTGTHLHRTIKTYLQQIGVDMDKIHGQAYDSTTNLKIKFNKIAAEFKKEEPRALYIHCYAHFLDLSIIRFCKEVKELRSALKTLSSLFNTICMSGEMLANFRNIYRLSQNKTCKKHISQSCWTVHDRTLLSVIDSLPEIIETLEVIASHSSNTSFADELSHLLTLVSKFEFVFCLKFLYRVLSVTGILSKELQNKTIDIFSLSSKIEAILECLSSERNDVYFKTIWDGTEEICQKITCKGFKVEKPSLQKRRKIQKSVDLGNSDNMFFPTSTEEQYKINIYYQGLDTILQNLKLCFSEFDYCKIKQISELLFKWNEPLNETTAKHVQEFYKLDEDIIPELRFYRHYAKLNFVIDDSCINFVSLGCLFIQHGLHSNIPCLSKLLYIALSWPITSASTENSFSTLPRLKTYLCNTMGQEKLTGPALMAVEQELVNKLMEPERLNEIVEKFISQMKEI

SEQ ID NO: 5788 - DNA, 4279 bp, Homo sapiens
gtttcgcttcgaagattgtttcagaagcgttgggcggggcgtccctgagagaaattaacacagtctcactctgtcacccaggctggagtgcagtggctcaatgtccattcactgcgacctccacctcccaggttcaagcgattctcgtgcctcagcctcccgagtagctgggattacaggaatctggaaactgttcttcaggaagaaacccattagtttggaactggagaattcctttgcatcagatactaaaatgaaagaaccacttttaggtggtgagtgtgacaaggcagtggcatcacagctggggctgctagatgaaattaagacagaacccgacaatgctcaagagtattgtcataggcaacagtccagaactcaggagaatgaactgaaaataaatgctgtgttttcagagagtgcttcacagttgactgcaggcattcagctttctctggcatcatctggcgtgaataaaatgcttccttcagtttcaaccacagctattcaggtttcctgtgctggttgtaaaaaaattctccagaaggggcaaactgcttatcagaggaaaggatctgctcaacttttctgctccataccatgcatcactgaatacatttcatctgccagttcaccagttccttctaagagaacttgttcaaactgctcaaaagacattttaaatccaaaggatgtgattagtgtccagctggaagacactacctcttgcaaaactttttgcagcctatcttgtctttcatcatatgaagaaaaaagaaaaccatttgttaccatatgtactaatagcattttgaccaagtgcagcatgtgccagaagactgctattattcagtatgaagtaaaataccaaaatgtgaaacataatctttgcagtaatgcctgcctttcaaagtttcactctgctaacaacttcatcatgaactgctgtgagaactgtggcacttactgttacaccagctctagtctgtcccacatacttcagatggaaggacagtctcattactttaatagttcaaagagtattacagcatataagcagaaacctgccaaaccacttatatctgttccttgcaaaccattgaagccctcagatgaaatgattgagactacgagtgatttggggaagacagagcttttctgctctattaattgtttctctgcatacagtaaagctaagatggaatcttcttcagtaagtgttgtttctgtggtgcatgatacttcaacagagcttctttctccaaagaaagatacgactccagttataagcaatatagtgtcattggcagacaccgatgttgccttgcccatcatgaacactgatgtcttacaagatacagtttcttcagtaacagcaacagcagatgtcattgtggatctttctaagagttcacctagtgaacccagtaatgctgttgctagtagtagtacggaacagccaagcgtttcaccatcttcatcagtattcagtcagcatgcaattggttccagtacagaagtacaaaaagacaatatgaaatctatgaaaataagtgatgaactatgtcacccaaaatgtacatccaaagtacaaaaagttaaaggtaaatcacgaagtattaaaaaatcttgttgtgcagattttgagtgtttggaaaacagtaaaaaagatgtggcattctgttattcatgccagttgttctgccaaaaatattttagctgtggaagagagtcatttgcaacccacggaacttctaattggaaaaaaaccctggaaaaattcagaaagcatgaaaaaagtgaaatgcatttgaagtcattggaattttggagagaataccaattttgtgatggagctgtcagtgacgatttatctattcattcgaaacagattgagggaaataaaaagtacctaaagcttataattgaaaatattttatttcttggaaagcagtgtttacccttaagaggaaacgaccagtcagtttcatctgtgaataaaggcaattttttagaattgttagaaatgagagcaaaagataaaggagaagaaacatttcgacttatgaattcacaagttgacttctataacagtacacaaattcaaagtgatattatcgaaataataaagactgaaatgttgcaggatattgtgaatgagatcaatgactcctcagcattttcaatcatatgtgatgagacaatcaatagtgccatgaaagaacagctttcaatttgtgtaagatacccacaaaaatcatcaaaggctatcttaattaaggaaagattcttgggttttgttgatactgaggagatgactgggacccacttacataggactatcaaaacttatctgcagcaaattggagttgatatggataaaatacatggccaggcctatgatagcaccactaatttgaagataaaatttaataaaatagcagcagaattcaagaaagaagaaccaagagctttatacatacattgttatgcacactttttggatttatcaataattaggttttgtaaagaagtaaaagaactccgaagtgctctaaaaactctcagttctttgttcaacactatttgtatgtctggggaaatgttggcaaattttcgaaacatttataggctaagtcaaaacaaaacatgcaagaaacatatatcacaatcatgttggacagtccatgatcgtacattactatctgtgattgacagtcttccagagattattgaaacattggaagttatagcaagccattcttcaaatacaagtttcgccgatgaattgagtcatttgctgacattggtttccaaatttgaatttgtcttttgtttgaaattcctgtatcgagtgctgagtgttacaggaattctttccaaagagcttcaaaataaaaccatagacattttttctttgtcttcaaaaatagaagcaattttggaatgtttatcatctgaaagaaatgacgtatactttaaaacaatctgggatggaacagaggaaatatgtcaaaaaataacctgtaaaggttttaaagttgaaaaaccttctcttcagaaaagaagaaaaattcagaaatcagtagatcttggcaattcagataatatgttttttcctacttcaacagaagaacaatataaaattaatatctattaccaaggattagatactatattacaaaatttaaagttatgtttttcggagtttgattattgcaaaataaagcaaatttcagaactgttatttaaatggaatgaaccattaaatgaaacaacagcaaaacatgttcaggaattttataaacttgatgaggacattatcccagaacttagattttatcgacattatgcaaagcttaactttgtcatagatgatagttgcataaacttcgtcagtctcggctgtttgtttattcagcatggtcttcacagtaatattccttgtctctcaaagctattatatattgctttgtcttggccaattacttcagcaagtactgagaactcattttctaccctgcctcgtcttaagacatatttatgtaataccatgggacaagagaagcttactggcccagccctaatggctgttgagcaggagttggtaaataaactaatggagcctgaaagactcaatgaaattgtggaaaagtttatcagtcagatgaaagaaatataatacatgctcatttgaacttacctaaaagacttgtatttccattgggatgttttcatttcaaaattgttcaaaattcaaaagacacagaacgataaacagtgaagtctccttccctcctttagaactcattttctcttcccaaaaagtgttatcttttccttaaatatccctctagaggtatttttcctaagtggtattgtacggtgtatactgttcttcagcttgtcttctctgtgtaacatatttttgagattgtcccatgtcgttacatgaagagtttcttgattcttggtctataattgcagatgttattgtatgaatgtaccataatatatttgagcagtccctgctgacatttttttcctaaccttttgctattataaataatgattcattttataaccttttatataggtcacattgcacatgagtgagtttactgtaagctggaaatctaaagttagaattactaggttaagatatgtgcatttttacttttgatagatattggcaagttgccatctataaggattgtgccagtttacagtcccacccacaatgcatgagagtgcctattaaatctttgtaagtgttatc

SEQ ID NO: 5789 - protein, 1193 aa, Homo sapiens
MSIHCDLHLPGSSDSRASASRVAGITGIWKLFFRKKPISLELENSFASDTKMKEPLLGGECDKAVASQLGLLDEIKTEPDNAQEYCHRQQSRTQENELKINAVFSESASQLTAGIQLSLASSGVNKMLPSVSTTAIQVSCAGCKKILQKGQTAYQRKGSAQLFCSIPCITEYISSASSPVPSKRTCSNCSKDILNPKDVISVQLEDTTSCKTFCSLSCLSSYEEKRKPFVTICTNSILTKCSMCQKTAIIQYEVKYQNVKHNLCSNACLSKFHSANNFIMNCCENCGTYCYTSSSLSHILQMEGQSHYFNSSKSITAYKQKPAKPLISVPCKPLKPSDEMIETTSDLGKTELFCSINCFSAYSKAKMESSSVSVVSVVHDTSTELLSPKKDTTPVISNIVSLADTDVALPIMNTDVLQDTVSSVTATADVIVDLSKSSPSEPSNAVASSSTEQPSVSPSSSVFSQHAIGSSTEVQKDNMKSMKISDELCHPKCTSKVQKVKGKSRSIKKSCCADFECLENSKKDVAFCYSCQLFCQKYFSCGRESFATHGTSNWKKTLEKFRKHEKSEMHLKSLEFWREYQFCDGAVSDDLSIHSKQIEGNKKYLKLIIENILFLGKQCLPLRGNDQSVSSVNKGNFLELLEMRAKDKGEETFRLMNSQVDFYNSTQIQSDIIEIIKTEMLQDIVNEINDSSAFSIICDETINSAMKEQLSICVRYPQKSSKAILIKERFLGFVDTEEMTGTHLHRTIKTYLQQIGVDMDKIHGQAYDSTTNLKIKFNKIAAEFKKEEPRALYIHCYAHFLDLSIIRFCKEVKELRSALKTLSSLFNTICMSGEMLANFRNIYRLSQNKTCKKHISQSCWTVHDRTLLSVIDSLPEIIETLEVIASHSSNTSFADELSHLLTLVSKFEFVFCLKFLYRVLSVTGILSKELQNKTIDIFSLSSKIEAILECLSSERNDVYFKTIWDGTEEICQKITCKGFKVEKPSLQKRRKIQKSVDLGNSDNMFFPTSTEEQYKINIYYQGLDTILQNLKLCFSEFDYCKIKQISELLFKWNEPLNETTAKHVQEFYKLDEDIIPELRFYRHYAKLNFVIDDSCINFVSLGCLFIQHGLHSNIPCLSKLLYIALSWPITSASTENSFSTLPRLKTYLCNTMGQEKLTGPALMAVEQELVNKLMEPERLNEIVEKFISQMKEI

SEQ ID NO: 5790 - DNA, 501 bp, Homo sapiens
tcgcttcgaagattgtttcagaagcgttgggcggggcgtccctgagagaaattagaatctggaaactgttcttcaggaagaaacccattagtttggaactggagaattcctttgcatcagatactaaaatgaaagaaccacttttaggtggagtattgtcataggcaacagtccagaactcaggagaatgaactgaaaataaatgctgtgttttcagagagtgcttcacagttgactgcaggcattcagctttctctggcatcatctggcgtgaataaaatgcttccttcagtttcaaccacagctattcaggtttcctgtgctggttgtaaaaaaattctccagaaggggcaaactgcttatcagaggaaaggatctgctcaacttttctgctccataccatgcatcactgaatacatttcatctgccagttcaccagttccttctaagagaacttgttcaaactgctcaaagtatataattctaaattatgcccccttt

SEQ ID NO: 5791 - protein, 73 aa, Homo sapiens
MLPSVSTTAIQVSCAGCKKILQKGQTAYQRKGSAQLFCSIPCITEYISSASSPVPSKRTCSNCSKYIILNYAP

SEQ ID NO: 5792 - DNA, 529 bp, Homo sapiens
gcttcgaagattgtttcagaagcgttgggcggggcgtccctgagagaaattagagtattgtcataggcaacagtccagaactcaggagaatgaactgaaaataaatgctgtgttttcagagagtgcttcacagttgactgcaggcattcagctttctctggcatcatctggcgtgaataaaatgcttccttcagtttcaaccacagctattcaggtttcctgtgctggttgtaaaaaaattctccagaaggggcaaactgcttatcagaggaaaggatctgctcaacttttctgctccataccatgcatcactgaatacatttcatctgccagttcaccagttccttctaagagaacttgttcaaactgctcaaaaaacctgccaaaccacttatatctgttccttgcaaaccattgaagccctcagatgaaatgattgagactacgagtgatttggggaagacagagcttttctgctctattaattgtttctctgcatacagtaaagctaagatggaatcttcttcag

SEQ ID NO: 5793 - protein, 78 aa, Homo sapiens
MLPSVSTTAIQVSCAGCKKILQKGQTAYQRKGSAQLFCSIPCITEYISSASSPVPSKRTCSNCSKNLPNHLYLFLANH

SEQ ID NO: 5794 - DNA, 4200 bp, Homo sapiens
gcttcgaagattgtttcagaagcgttgggcggggcgtccctgagagaaattagttcaagcgattctcgtgcctcagcctcccgagtagctgggattacaggaatctggaaactgttcttcaggaagaaacccattagtttggaactggagaattcctttgcatcagatactaaaatgaaagaaccacttttaggtggtgagtgtgacaaggcagtggcatcacagctggggctgctagatgaaattaagacagaacccgacaatgctcaagagtattgtcataggcaacagtccagaactcaggagaatgaactgaaaataaatgctgtgttttcagagagtgcttcacagttgactgcaggcattcagctttctctggcatcatctggcgtgaataaaatgcttccttcagtttcaaccacagctattcaggtttcctgtgctggttgtaaaaaaattctccagaaggggcaaactgcttatcagaggaaaggatctgctcaacttttctgctccataccatgcatcactgaatacatttcatctgccagttcaccagttccttctaagagaacttgttcaaactgctcaaaagacattttaaatccaaaggatgtgattagtgtccagctggaagacactacctcttgcaaaactttttgcagcctatcttgtctttcatcatatgaagaaaaaagaaaaccatttgttaccatatgtactaatagcattttgaccaagtgcagcatgtgccagaagactgctattattcagtatgaagtaaaataccaaaatgtgaaacataatctttgcagtaatgcctgcctttcaaagtttcactctgctaacaacttcatcatgaactgctgtgagaactgtggcacttactgttacaccagctctagtctgtcccacatacttcagatggaaggacagtctcattactttaatagttcaaagagtattacagcatataagcagaaacctgccaaaccacttatatctgttccttgcaaaccattgaagccctcagatgaaatgattgagactacgagtgatttggggaagacagagcttttctgctctattaattgtttctctgcatacagtaaagctaagatggaatcttcttcagtaagtgttgtttctgtggtgcatgatacttcaacagagcttctttctccaaagaaagatacgactccagttataagcaatatagtgtcattggcagacaccgatgttgccttgcccatcatgaacactgatgtcttacaagatacagtttcttcagtaacagcaacagcagatgtcattgtggatctttctaagagttcacctagtgaacccagtaatgctgttgctagtagtagtacggaacagccaagcgtttcaccatcttcatcagtattcagtcagcatgcaattggttccagtacagaagtacaaaaagacaatatgaaatctatgaaaataagtgatgaactatgtcacccaaaatgtacatccaaagtacaaaaagttaaaggtaaatcacgaagtattaaaaaatcttgttgtgcagattttgagtgtttggaaaacagtaaaaaagatgtggcattctgttattcatgccagttgttctgccaaaaatattttagctgtggaagagagtcatttgcaacccacggaacttctaattggaaaaaaaccctggaaaaattcagaaagcatgaaaaaagtgaaatgcatttgaagtcattggaattttggagagaataccaattttgtgatggagctgtcagtgacgatttatctattcattcgaaacagattgagggaaataaaaagtacctaaagcttataattgaaaatattttatttcttggaaagcagtgtttacccttaagaggaaacgaccagtcagtttcatctgtgaataaaggcaattttttagaattgttagaaatgagagcaaaagataaaggagaagaaacatttcgacttatgaattcacaagttgacttctataacagtacacaaattcaaagtgatattatcgaaataataaagactgaaatgttgcaggatattgtgaatgagatcaatgactcctcagcattttcaatcatatgtgatgagacaatcaatagtgccatgaaagaacagctttcaatttgtgtaagatacccacaaaaatcatcaaaggctatcttaattaaggaaagattcttgggttttgttgatactgaggagatgactgggacccacttacataggactatcaaaacttatctgcagcaaattggagttgatatggataaaatacatggccaggcctatgatagcaccactaatttgaagataaaatttaataaaatagcagcagaattcaagaaagaagaaccaagagctttatacatacattgttatgcacactttttggatttatcaataattaggttttgtaaagaagtaaaagaactccgaagtgctctaaaaactctcagttctttgttcaacactatttgtatgtctggggaaatgttggcaaattttcgaaacatttataggctaagtcaaaacaaaacatgcaagaaacatatatcacaatcatgttggacagtccatgatcgtacattactatctgtgattgacagtcttccagagattattgaaacattggaagttatagcaagccattcttcaaatacaagtttcgccgatgaattgagtcatttgctgacattggtttccaaatttgaatttgtcttttgtttgaaattcctgtatcgagtgctgagtgttacaggaattctttccaaagagcttcaaaataaaaccatagacattttttctttgtcttcaaaaatagaagcaattttggaatgtttatcatctgaaagaaatgacgtatactttaaaacaatctgggatggaacagaggaaatatgtcaaaaaataacctgtaaaggttttaaagttgaaaaaccttctcttcagaaaagaagaaaaattcagaaatcagtagatcttggcaattcagataatatgttttttcctacttcaacagaagaacaatataaaattaatatctattaccaaggattagatactatattacaaaatttaaagttatgtttttcggagtttgattattgcaaaataaagcaaatttcagaactgttatttaaatggaatgaaccattaaatgaaacaacagcaaaacatgttcaggaattttataaacttgatgaggacattatcccagaacttagattttatcgacattatgcaaagcttaactttgtcatagatgatagttgcataaacttcgtcagtctcggctgtttgtttattcagcatggtcttcacagtaatattccttgtctctcaaagctattatatattgctttgtcttggccaattacttcagcaagtactgagaactcattttctaccctgcctcgtcttaagacatatttatgtaataccatgggacaagagaagcttactggcccagccctaatggctgttgagcaggagttggtaaataaactaatggagcctgaaagactcaatgaaattgtggaaaagtttatcagtcagatgaaagaaatataatacatgctcatttgaacttacctaaaagacttgtatttccattgggatgttttcatttcaaaattgttcaaaattcaaaagacacagaacgataaacagtgaagtctccttccctcctttagaactcattttctcttcccaaaaagtgttatcttttccttaaatatccctctagaggtatttttcctaagtggtattgtacggtgtatactgttcttcagcttgtcttctctgtgtaacatatttttgagattgtcccatgtcgttacatgaagagtttcttgattcttggtctataattgcagatgttattgtatgaatgtaccataatatatttgagcagtccctgctgacatttttttcctaaccttttgctattataaataatgattcattttataaccttttatataggtcacattgcacatgagtgagtttactgtaagctggaaatctaaagttagaattactaggttaagatatgtgcatttttacttttgatagatattggcaagttgccatctataaggattgtgccagtttacagtcccacccacaatgcatgagagtgcctattaaatctttgtaagtgttatc

SEQ ID NO: 5795 - protein, 1142 aa, Homo sapiens; identical to SEQ ID NO: 5787

SEQ ID NO: 5796 - DNA, 3982 bp, Homo sapiens
gcttcgaagattgtttcagaagcgttgggcggggcgtccctgagagaaattagagtattgtcataggcaacagtccagaactcaggagaatgaactgaaaataaatgctgtgttttcagagagtgcttcacagttgactgcaggcattcagctttctctggcatcatctggcgtgaataaaatgcttccttcagtttcaaccacagctattcaggtttcctgtgctggttgtaaaaaaattctccagaaggggcaaactgcttatcagaggaaaggatctgctcaacttttctgctccataccatgcatcactgaatacatttcatctgccagttcaccagttccttctaagagaacttgttcaaactgctcaaaagacattttaaatccaaaggatgtgattagtgtccagctggaagacactacctcttgcaaaactttttgcagcctatcttgtctttcatcatatgaagaaaaaagaaaaccatttgttaccatatgtactaatagcattttgaccaagtgcagcatgtgccagaagactgctattattcagtatgaagtaaaataccaaaatgtgaaacataatctttgcagtaatgcctgcctttcaaagtttcactctgctaacaacttcatcatgaactgctgtgagaactgtggcacttactgttacaccagctctagtctgtcccacatacttcagatggaaggacagtctcattactttaatagttcaaagagtattacagcatataagcagaaacctgccaaaccacttatatctgttccttgcaaaccattgaagccctcagatgaaatgattgagactacgagtgatttggggaagacagagcttttctgctctattaattgtttctctgcatacagtaaagctaagatggaatcttcttcagtaagtgttgtttctgtggtgcatgatacttcaacagagcttctttctccaaagaaagatacgactccagttataagcaatatagtgtcattggcagacaccgatgttgccttgcccatcatgaacactgatgtcttacaagatacagtttcttcagtaacagcaacagcagatgtcattgtggatctttctaagagttcacctagtgaacccagtaatgctgttgctagtagtagtacggaacagccaagcgtttcaccatcttcatcagtattcagtcagcatgcaattggttccagtacagaagtacaaaaagacaatatgaaatctatgaaaataagtgatgaactatgtcacccaaaatgtacatccaaagtacaaaaagttaaaggtaaatcacgaagtattaaaaaatcttgttgtgcagattttgagtgtttggaaaacagtaaaaaagatgtggcattctgttattcatgccagttgttctgccaaaaatattttagctgtggaagagagtcatttgcaacccacggaacttctaattggaaaaaaaccctggaaaaattcagaaagcatgaaaaaagtgaaatgcatttgaagtcattggaattttggagagaataccaattttgtgatggagctgtcagtgacgatttatctattcattcgaaacagattgagggaaataaaaagtacctaaagcttataattgaaaatattttatttcttggaaagcagtgtttacccttaagaggaaacgaccagtcagtttcatctgtgaataaaggcaattttttagaattgttagaaatgagagcaaaagataaaggagaagaaacatttcgacttatgaattcacaagttgacttctataacagtacacaaattcaaagtgatattatcgaaataataaagactgaaatgttgcaggatattgtgaatgagatcaatgactcctcagcattttcaatcatatgtgatgagacaatcaatagtgccatgaaagaacagctttcaatttgtgtaagatacccacaaaaatcatcaaaggctatcttaattaaggaaagattcttgggttttgttgatactgaggagatgactgggacccacttacataggactatcaaaacttatctgcagcaaattggagttgatatggataaaatacatggccaggcctatgatagcaccactaatttgaagataaaatttaataaaatagcagcagaattcaagaaagaagaaccaagagctttatacatacattgttatgcacactttttggatttatcaataattaggttttgtaaagaagtaaaagaactccgaagtgctctaaaaactctcagttctttgttcaacactatttgtatgtctggggaaatgttggcaaattttcgaaacatttataggctaagtcaaaacaaaacatgcaagaaacatatatcacaatcatgttggacagtccatgatcgtacattactatctgtgattgacagtcttccagagattattgaaacattggaagttatagcaagccattcttcaaatacaagtttcgccgatgaattgagtcatttgctgacattggtttccaaatttgaatttgtcttttgtttgaaattcctgtatcgagtgctgagtgttacaggaattctttccaaagagcttcaaaataaaaccatagacattttttctttgtcttcaaaaatagaagcaattttggaatgtttatcatctgaaagaaatgacgtatactttaaaacaatctgggatggaacagaggaaatatgtcaaaaaataacctgtaaaggttttaaagttgaaaaaccttctcttcagaaaagaagaaaaattcagaaatcagtagatcttggcaattcagataatatgttttttcctacttcaacagaagaacaatataaaattaatatctattaccaaggattagatactatattacaaaatttaaagttatgtttttcggagtttgattattgcaaaataaagcaaatttcagaactgttatttaaatggaatgaaccattaaatgaaacaacagcaaaacatgttcaggaattttataaacttgatgaggacattatcccagaacttagattttatcgacattatgcaaagcttaactttgtcatagatgatagttgcataaacttcgtcagtctcggctgtttgtttattcagcatggtcttcacagtaatattccttgtctctcaaagctattatatattgctttgtcttggccaattacttcagcaagtactgagaactcattttctaccctgcctcgtcttaagacatatttatgtaataccatgggacaagagaagcttactggcccagccctaatggctgttgagcaggagttggtaaataaactaatggagcctgaaagactcaatgaaattgtggaaaagtttatcagtcagatgaaagaaatataatacatgctcatttgaacttacctaaaagacttgtatttccattgggatgttttcatttcaaaattgttcaaaattcaaaagacacagaacgataaacagtgaagtctccttccctcctttagaactcattttctcttcccaaaaagtgttatcttttccttaaatatccctctagaggtatttttcctaagtggtattgtacggtgtatactgttcttcagcttgtcttctctgtgtaacatatttttgagattgtcccatgtcgttacatgaagagtttcttgattcttggtctataattgcagatgttattgtatgaatgtaccataatatatttgagcagtccctgctgacatttttttcctaaccttttgctattataaataatgattcattttataaccttttatataggtcacattgcacatgagtgagtttactgtaagctggaaatctaaagttagaattactaggttaagatatgtgcatttttacttttgatagatattggcaagttgccatctataaggattgtgccagtttacagtcccacccacaatgcatgagagtgcctattaaatctttgtaagtgttatc

SEQ ID NO: 5797 - protein, 1067 aa, Homo sapiens
MLPSVSTTAIQVSCAGCKKILQKGQTAYQRKGSAQLFCSIPCITEYISSASSPVPSKRTCSNCSKDILNPKDVISVQLEDTTSCKTFCSLSCLSSYEEKRKPFVTICTNSILTKCSMCQKTAIIQYEVKYQNVKHNLCSNACLSKFHSANNFIMNCCENCGTYCYTSSSLSHILQMEGQSHYFNSSKSITAYKQKPAKPLISVPCKPLKPSDEMIETTSDLGKTELFCSINCFSAYSKAKMESSSVSVVSVVHDTSTELLSPKKDTTPVISNIVSLADTDVALPIMNTDVLQDTVSSVTATADVIVDLSKSSPSEPSNAVASSSTEQPSVSPSSSVFSQHAIGSSTEVQKDNMKSMKISDELCHPKCTSKVQKVKGKSRSIKKSCCADFECLENSKKDVAFCYSCQLFCQKYFSCGRESFATHGTSNWKKTLEKFRKHEKSEMHLKSLEFWREYQFCDGAVSDDLSIHSKQIEGNKKYLKLIIENILFLGKQCLPLRGNDQSVSSVNKGNFLELLEMRAKDKGEETFRLMNSQVDFYNSTQIQSDIIEIIKTEMLQDIVNEINDSSAFSIICDETINSAMKEQLSICVRYPQKSSKAILIKERFLGFVDTEEMTGTHLHRTIKTYLQQIGVDMDKIHGQAYDSTTNLKIKFNKIAAEFKKEEPRALYIHCYAHFLDLSIIRFCKEVKELRSALKTLSSLFNTICMSGEMLANFRNIYRLSQNKTCKKHISQSCWTVHDRTLLSVIDSLPEIIETLEVIASHSSNTSFADELSHLLTLVSKFEFVFCLKFLYRVLSVTGILSKELQNKTIDIFSLSSKIEAILECLSSERNDVYFKTIWDGTEEICQKITCKGFKVEKPSLQKRRKIQKSVDLGNSDNMFFPTSTEEQYKINIYYQGLDTILQNLKLCFSEFDYCKIKQISELLFKWNEPLNETTAKHVQEFYKLDEDIIPELRFYRHYAKLNFVIDDSCINFVSLGCLFIQHGLHSNIPCLSKLLYIALSWPITSASTENSFSTLPRLKTYLCNTMGQEKLTGPALMAVEQELVNKLMEPERLNEIVEKFISQMKEI

SEQ ID NO: 5798 - DNA, 608 bp, Homo sapiens
gaggggtagtgagtacagattgggttaacctcagatagaaagctttacatttcttttttgtttgtttgtttgtttgttgagacacagtctcactctgtcacccaggctggagtgcagtggctcaatgtccattcactgcgacctccacctcccaggttcaagcgattctcgtgcctcagcctcccgagtagctgggattacaggaatctggaaactgttcttcaggaagaaacccattagtttggaactggagaattcctttgcatcagatactaaaatgaaagaaccacttttaggtggtgagtgtgacaaggcagtggcatcacagctggggctgctagatgaaattaagacagaacccgacaatgctcaagagtattgtcataggcaacagtccagaactcaggagaatgaactgaaaataaatgctgtgttttcagagagtgcttcacagttgactgcaggcattcagctttctctggcatcatctggcgtgaataaaatgcttccttcagtttcaaccacagctattcaggtttcctgtgctggttgtaaaaaaattctccagaaggggcaaactgcttatcagaggaaaggatctgctcaac

SEQ ID NO: 5799 - protein, 160 aa, Homo sapiens
MSIHCDLHLPGSSDSRASASRVAGITGIWKLFFRKKPISLELENSFASDTKMKEPLLGGECDKAVASQLGLLDEIKTEPDNAQEYCHRQQSRTQENELKINAVFSESASQLTAGIQLSLASSGVNKMLPSVSTTAIQVSCAGCKKILQKGQTAYQRKGSA

SEQ ID NO: 5800 - DNA, 594 bp, Homo sapiens
agttataattgtgtttaaactgtttaatgatgtccttgttatttattcttagagacattttaaatccaaaggatgtgattagtgtccagctggaagacactacctcttgcaaaactttttgcagcctatcttgtctttcatcatatgaagaaaaaagaaaaccatttgttaccatatgtactaatagcattttgaccaagtgcagcatgtgccagaagactgctattattcagtatgaagtaaaataccaaaatgtgaaacataatctttgcagtaatgcctgcctttcaaagtttcactctgctaacaacttcatcatgaactgctgtgagaactgtggcacttactgttacaccagctctagtctgtcccacatacttcagatggaaggacagtctcattactttaatagttcaaagagtattacagcatataagcagaaacctgccaaaccacttatatctgttccttgcaaaccattgaagccctcagatgaaatgattgagactacgagtgatttggggaagacagagcttttctgctctattaattgtttctctgcatacagtaaagctaagatggaatcttcttcag

SEQ ID NO: 5801 - protein, 188 aa, Homo sapiens
MMSLLFILRDILNPKDVISVQLEDTTSCKTFCSLSCLSSYEEKRKPFVTICTNSILTKCSMCQKTAIIQYEVKYQNVKHNLCSNACLSKFHSANNFIMNCCENCGTYCYTSSSLSHILQMEGQSHYFNSSKSITAYKQKPAKPLISVPCKPLKPSDEMIETTSDLGKTELFCSINCFSAYSKAKMESS

SEQ ID NO: 5802 - DNA, 720 bp, Homo sapiens
gagtagctggaattacaggcacccaccaccacacctggctcattttttttgtatttttagtagagatggggtttcaccatgttggccaggctggtcttgaattcttgaccttgtgatccgcctgccttagcctcccaaagtgttgggattataggcgtgagctaccgtccccagcctattttctctcttttttgaaacggagtttctctcttgttgcccagactagagtgcaattgcacgatctcagctcactgcaaccacagcctttggggttcaagctattctcccgtctcagcctcccgagtagctggtattacaggcatgtgccaccacgcccggctaattttatagttttagtagagacggggtttctccatgttagtcaggcgtggtggtgggcacctgtaatcccatatacttgggaagctgaggcaggagaatcacttgaacccgcgaggtggaggttgcagtgagccaatatcacgccaccgtacactccagcctgggcaacagagcgagactccgtcttaaaaaatgaaagaaagaaagtaaaacaggtatatagaagatactgagaatattttctacaactctaggcaaatgcatttgaaagaaagcctcaatgaaatagatgttctcctagaaaaagtacaagttatcaaaattgatgagagggtaagggagaaacagctggagaaaagtgccagagaaatagtcttt

SEQ ID NO: 5803 - protein, 39 aa, Homo sapiens
MHLKESLNEIDVLLEKVQVIKIDERVREKQLEKSAREIV

SEQ ID NO: 5804 - DNA, 504 bp, Homo sapiens
acttttctccagctgtttctcccttaccctctcatcaattttgataacttgtactttttctaggagaacatctatttcattgaggctttctttcaaatgcatttgcctagagttgtagaaaatattctcagtatcttctatatacctgttttactttctttctttcatttttctgggcaacaagagagaaactccgtttcaaaaaagagagaaaataggctggggacggtagctcacgcctataatcccaacactttgggaggctaaggcaggcggatcacaaggtcaagaattcaagaccagcctggccaacatggtgaaaccccatctctactaaaaatacaaaaaaaatgagccaggtgtggtggtgggtgcctgtaattccagctactcaggaggctaaggcaggagaatcacttgaacccaggaggcagaggttgcagtgagccaagatcgtgccattgcactccagcctgggcgacaagagtgaaactccgtctcaaa

SEQ ID NO: 5805 - protein, 56 aa, Homo sapiens
MHLPRVVENILSIFYIPVLLSFFHFSGQQERNSVSKKRENRLGTVAHAYNPNTLGG

SEQ ID NO: 5806 - DNA, 2948 bp, Homo sapiens
aattagtctctattgtagcaaactgacctgcccatagatcggcaatatcagtaatttcattatgcaatcttggtaattctacaagttgagttgaactaaaagtacaggtttttttgtaatgcgatttaaaatttttaaaaacatgggcttcatgaaaacaccattgttactaacttgggcttagatgggaatctaatgtgaatagttcaagttatgggacttgtctaaatgtgtctatactctaaacctgggggaaggtggtgtggaacattgacttgactacagtcgaatacatgttgggaatcattcccaatcataagacatcgtcgtttctgtaggatgactgcatatgttcagagtagctttttgaatttggttcccttagctttagggatgtgatgttatagtccaaaatgtttacaagaaaacctaagtcttcaaaagcacaacttttgttgcttaggactttgcatcaactgttgttccagacctcacttcaacttcttggtctctgaactggttttagctagcatgcatgagagacagttttcatgtataatgtttctgctctgtaactggaaagtggtttactttgcataaatgctgatgaaaacttcatgactatgagacttttcttctgtgtatcaagaaaaagcttgctcgttggcaagcaattcacaaggtggggacagacttgtactttaacatgtagtccattcaagcaaacaactttggactctactgatagatgaaagagcaaatgatgactagtttagcctctgcatatcaacaatataatgcagatcaagtataatgctcaatattagtgacatgagtatcactaaattacatagaaccctgatggggtttcctgtgtcgtaatccattaaatcggtggccagtgcttgctgccgtggtttagtgattgggtgttagaaataaaaactcaggtctatttcttaccagtcagtaacaatttttagagaatgtacttggtatataatatatggacttcaggaactttattggggtggggggttaattttgccttaccctgttcactttcagatgattaggcttttgcactttagaatgagaaacttgtgacgttagtgtgttcttactagctttaatttgtatgtagcaatgaattgtgaatcttagtgcagtgggtttttttaaaaaactcaaaaagctgggaattaagtggtttcagtaataatgctataccgaggtgcttgcattgtatttcataattttgttacaaaccaaaattatttttaatgagaacagtcttgggttcagaggtgtgatgccagaatgtattttcgtactgttaggcccttggaacagataccggtgctttctgaaagatgaaagaaatgcaatgggtgctcttcatgcaaggttgcaaacctaccaagaatgcataatagtctcacttttccccaataaagagatgcgtgtgactagttttggacttttaaccttaatgggggttgcatgtctcctattgttaatcattgtcagctgcagtgacatgatccacagtcctgcatttactgcctttcacttaatgattttggacaggttttagagagccaggatgttggtctgggcctttatttggttttggctttagctgataatgttttagtgatgtcagctagtgcagttctcaaatggctgcctattagggaaagaattcagaggatttgactgctcctaatcatctgtcattgctgctagataatgattggcaatttttaagactcaactggaaatctcaacagttgctggtaaaccattaaccataaaaacgttgcttttgaacaccagtgctgaaaaaaatatttttttttttttttttgagagtgaaaagggcttggacttaagataggacaatgtggagaatggggggaagaatgcaaaacgatatagtatcccttatggatggtacatgtgcaacagggaactcttacttcatataccctttgcagtaatcattcagggaggaagaaaaacctggaacttgaatgaaggctgatctttgttttgtgcactgtggccctgccaggcatatagtgaaggtgaatgtcttctccctcagaaaaaaattggttccttgctgtcccagtaaggcatagcttttccagccctaactttaaaactcagtgaggacttagatgggaaagaatgaggtaaatacaaaggattgcaggacaacaactacagcgttgtgtactgtgggaaggggagttgggcactcttggaggactcctgctgaaggtggtcagcctgcctgacaatggaagacatacttgaatggggagcagggtatgtgctttcatatgaaaaaagagctgatgttaaaactcatttggtgaggtcaacgttgtcacataccttcacataagggatagtatattttgggttgcagtcaaacttgtgctcagactggtgaaactgagagtcaggcttttacattttaaagaaaatacagttttcattctaattcaggtgtctacttattttatgtaagaataattttagatttcccccccaccatgaagtttcttcctatttttttatgctgtaacttacccccaatctttatctctggatttttactctttaaattttgaagttgactagcattttcaaacctttattttatacccttgtcttttatattaactttttcttattattctttaggtaagaatgattgatgttggctgatattggagtgctcattcacatgaagtggatagatacttctcaagacatcacacagcgtgagtcaatcaaggagggaagccacaagcagactgacaacgtttctagcaggatcaggtgagctgtgtccagaaaaccaacgagaaggagtggaaggaggaatgaacgtttcattctcgttaataaaggcattatcctaattatccttt

SEQ ID NO: 5807 - protein, 42 aa, Homo sapiens [sequence omitted]

SEQ ID NO: 5808 - DNA, 440 bp, Homo sapiens
tttttacttaagaaaatgtaggagaaggtcaggcatggtggctttacacctatattcctagcactttgggaggcagaagtgggaggattgcttgagcccagcctgggcaaaatagtgagaccatgtctctacagaaaaaaatatagccaggtgtggtggtgtgtgcctgtggtcccagctcccttggaggctgaggtgggagggatcgcttgatcctgggaggttgaggctgcagtgagcaagttaacattttttgttacaggtggatagatacttctcaagacatcacacagcgtgagtcaatcaaggagggaagccacaagcagactgacaacgtttctagcaggatcaggtgagctgtgtccagaaaaccaacgagaaggagtggaaggaggaatgaacgtttcattctcgttaataaaggcattatcctaattatc

SEQ ID NO: 5809 - protein, 42 aa, Homo sapiens
GCSEQVNIFCYRWIDTSQDITQRESIKEGSHKQTDNVSSRIR

SEQ ID NO: 5810 - DNA, 1328 bp, Homo sapiens
atgtacttggtatataatatatggacttcaggaactttattggggtggggggttaattttgccttaccctgttcactttcagatgattaggcttttgcactttagaatgagaaacttgtgacgttagtgtgttcttactagctttaatttgtatgtagcaatgaattgtgaatcttagtgcagtgggtttttttaaaaaactcaaaaagctgggaattaagtggtttcagtaataatgctataccgaggtgcttgcattgtatttcataattttgttacaaaccaaaattatttttaatgagaacagtcttgggttcagaggtgtgatgccagaatgtattttcgtactgttaggcccttggaacagataccggtgctttctgaaagatgaaagaaatgcaatgggtgctcttcatgcaaggttgcaaacctaccaagaatgcataatagtctcacttttccccaataaagagatgcgtgtgactagttttggacttttaaccttaatgggggttgcatgtctcctattgttaatcattgtcagctgcagtgacatgatccacagtcctgcatttactgcctttcacttaatgattttggacaggttttagagagccaggatgttggtctgggcctttatttggttttggctttagctgataatgttttagtgatgtcagctagtgcagttctcaaatggctgcctattagggaaagaattcagaggatttgactgctcctaatcatctgtcattgctgctagataatgattggcaatttttaagactcaactggaaatctcaacagttgctggtaaaccattaaccataaaaacgttgcttttgaacaccagtgctgaaaaaaatatttttttttttttttttgagagtgaaaagggcttggacttaagataggacaatgtggagaatggggggaagaatgcaaaacgatatagtatcccttatggatggtacatgtgcaacagggaactcttacttcatataccctttgcagtaatcattcagggaggaagaaaaacctggaacttgaatgaaggctgatctttgttttgtgcactgtggccctgccaggcatatagtgaaggtaagaatgattgatgttggctgatattggagtgctcattcacatgaagtggatagatacttctcaagacatcacacagcgtgagtcaatcaaggagggaagccacaagcagactgacaacgtttctagcaggatcaggtgagctgtgtccagaaaaccaacgagaaggagtggaaggaggaatgaacgtttcattctcgttaataaaggcattatcctaatta

SEQ ID NO: 5811 - protein, 42 aa, Homo sapiens [sequence omitted]

SEQ ID NO: 5812 - DNA, 1179 bp, Homo sapiens
aagggatgctggcacagaccccctaaaataagcttttggtagtactgtacctttgaagagtggtgaaggatgctaatggataatctcctgaaagttgtggcttttgatacccttactgtggactgtagagttgctaaacgttgtttagcaaataatgttgcttagtttcaaatgacatttgactttcatcactaaaacagcaatgtactcagggttgtaagcttactcaaatagactttcaataagtcttcaatgtatatatgatagtttttagcctaatgtgaatttaaataatcttaatagtttcctaaaagtcgatctgaaacttggggtgggaaaggggaggtagcaatttttgaagtattttagccatttttttcatttaaagaaaccacttgtccccatttcctcttctccactttctcataattttgttttaagaggaacactggttgttttttatacttctcctaatctttaaaaactgcatattgttaagaccccagtgtatttaataggtattttataagcatagcccattggctcatgttagtgaaaccataatcctctttgcttagaacattaaactcataagaagtactacaaaccccaccactctttatagatgtattgtaccactaatataaacagctaaaaaatggggaaattgtaatgttacgcctgtgcaatttttaagtggcatattatggcagattaaaatttagatacttggcttttcttgggcaagccactaagttgtggcggaatgttttctggtgttcttggactgcaattatgcactattaaagtagtggcctgctacataactgcatttagccagcatttctgcagtgcgtaactgtgaggaacgtagtaccgcaaatggcaatggacattaggacccggatgtagtattcctgcttgctccaagattctcattgccgactgcatacaggtaagaatgattgatgttggctgatattggagtgctcattcacatgaagtggatagatacttctcaagacatcacacagcgtgagtcaatcaaggagggaagccacaagcagactgacaacgtttctagcaggatcaggtgagctgtgtccagaaaaccaacgagaaggagtggaaggaggaatgaacgtttcattctcgttaataaaggcattatcctaatta

SEQ ID NO: 5813 - protein, 42 aa, Homo sapiens [sequence omitted]

SEQ ID NO: 5814 - DNA, 1239 bp, Homo sapiens
gggcctggaactccagcaggatatggtagagggagagaagagtacgaaggcccaaacaaaaaaccccgattttagatgtgatatttaggctttcattccagtttgttttgtttttttgtttagataccaatcttttaaattcttgcattttagtaagaaagctatctttttatggatgttagcagtttattgacctaatatttgtaaatggtctgtttgggcaggtaaaattatgtaatgcagtgtttggaacaggagaatttttttttcctttttatttctttattttttcttttttactgtataatgtccctcaagtttatggcagtgtaccttgtgccactgaatttccaaagtgtaccaatttttttttttttactgtgcttcaaataaatagaaaaatagttataatattgatcttcaactttgccattcatgcttctatgcatattaggctacgtattccacattgaaagcatgagagtgtctaggcctttgaatggcatatgccatttctgggaaatgcatctggaggctaagtattgctttctacaaataattgccccctttgttttaaaaagaagaaatgcatattgaagtagtttgatgatttgtttggcatataggaagcacgctggtgctaagtattttttaaatggttatgtaagcaaagctgaactgtaaatcttcaggaatatgtattaagattgtggaatgggtgtaagacaattggtagggggtgaaagtgggtttgattaaatggatcttttatggccctatgatctatcctttacttgaaagcttttgaaaagtggaaaggtcattttgttgcatttccccatttcttgtttttaaaagaccaacaaatctcaagccctataaatggcttgtattgaacttttacatttgaattaaagatgttaaacatgaagtcttttcatgtattcaagtgatttataaagatggggtgtagtctaaaaaacaaaacttgaaagtaagaaggtttagtaagtgagccactgcgccaggccgattaataagatttctttggtattagttcacttgacagttatataatgttatgtttgagaatttggtaactctgattcttgtatcctttggagtaatcataccctttaattagcaggatcaggtgagctgtgtccagaaaaccaacgagaaggagtggaaggaggaatgaacgtttcattctcgttaataaaggcattatcctaatta

SEQ ID NO: 5815 - protein, 53 aa, Homo sapiens
MLLCILGYVFHIESMRVSRPLNGICHFWEMHLEAKYCFLQIIAPFVLKRRNAY

SEQ ID NO: 5816 - DNA, 1031 bp, Homo sapiens
tttttaaaagaccaacaaatctcaagccctataaatggcttgtattgaacttttacatttgaattaaagatgttaaacatgaagtcttttcatgtattcaagtgatttataaagatggggtgtagtctaaaaaacaaaacttgaaagtaagaaggtttagtaactgggccgggcgcggtggctcacgcctgtaatcccagcactttgggaggctgaggtgggcaaatcatgagatcaggagttcaagaccagcctggccaacatggtgaaaccccgtctctactaaaaatacaaaaaattagctgggcgtggtggcaggcgcctgtaatcccagctactcgggaggctgagccaggagaattgcttgaacctggagatggaggttgcagtgagctgagactgccactgcactccagcctggacaacagagcgagactctgtctcaaaaaaaaaaaaaggtttagtactgaagtaggtttagttatatatacatttgtactctgtaacttttacatctccttgtgctacttctgttgggcaaaatctataggactataaaaatctattggttctcttctaagagctagtggtgattgttaacaaatagggttgcagataatcattcttattgtaaatttaacttgttttcacatagtttcgttttcatgtagcactaaatctggagaaagttgctcatgctacacagtacaaatatcccttcctcccaccataaaggcttggaatgtttccatggtgttgtcagttaattgtcaacttcattgaacccccttccattagaacaagagactttgactattaaagtagattgtttattgttgcctgttagtataatgggagcctgatttcccagtgtaaatatgttagaggaacagcttcctaacagtaggtaaagtaattgaatggtttggctttgttctgagttacgttccattcaaatctgtacattgtagaattcttactatggaatgaatgaacgtttcattctcgttaataaaggcattatcctaatt

SEQ ID NO: 5817 - protein, 109 aa, Homo sapiens [sequence omitted]

SEQ ID NO: 5818 - DNA, 1292 bp, Homo sapiens
gctagtgcagttctcaaatggctgcctattagggaaagaattcagaggatttgactgctcctaatcatctgtcattgctgctagataatgattggcaatttttaagactcaactggaaatctcaacagttgctggtaaaccattaaccataaaaacgttgcttttgaacaccagtgctgaaaaaaatatttttttttttttttttgagagtgaaaagggcttggacttaagataggacaatgtggagaatggggggaagaatgcaaaacgatatagtatcccttatggatggtacatgtgcaacagggaactcttacttcatataccctttgcagtaatcattcagggaggaagaaaaacctggaacttgaatgaaggctgatctttgttttgtgcactgtggccctgccaggcatatagtgaaggtgaatgtcttctccctcagaaaaaaattggttccttgctgtcccagtaaggcatagcttttccagccctaactttaaaactcagtgaggacttagatgggaaagaatgaggtaaatacaaaggattgcaggacaacaactacagcgttgtgtactgtgggaaggggagttgggcactcttggaggactcctgctgaaggtggtcagcctgcctgacaatggaagacatacttgaatggggagcagggtatgtgctttcatatgaaaaaagagctgatgttaaaactcatttggtgaggtcaacgttgtcacataccttcacataagggatagtatattttgggttgcagtcaaacttgtgctcagactggtgaaactgagagtcaggcttttacattttaaagaaaatacagttttcattctaattcaggtgtctacttattttatgtaagaataattttagatttcccccccaccatgaagtttcttcctatttttttatgctgtaacttacccccaatctttatctctggatttttactctttaaattttgaagttgactagcattttcaaacctttattttatacccttgtcttttatattaactttttcttattattctttaggtaagaatgattgatgttggctgatattggagtgctcattcacatgaagtggatagatacttctcaagacatcacacagcgtgagtcaatcaaggagggaagccacaagcagactgacaacgtttctaggtaagttaaatgattcttagtctgttaaactgtcttcagaaaggcccttgggtggtacaaaaataacaatactaatgtgggaaccattaattttttattttttgagatgg

SEQ ID NO: 5819 - protein, 39 aa, Homo sapiens [sequence omitted]

SEQ ID NO: 5820 - DNA, 7153 bp, Homo sapiens
ggttttttttttggagagagttttgctcttgtcacccaggctggagtgcagtggcttgatcttggctcactgcagcatctgccttctgggttcaagtgattctcctgcctcagcctcttgagtaggtgggattacaagtgcctgccatcaggctcggctaatttttgtatttttagtagaaatggcgtttcgccttgttggccaggctggtcttgaactcctgacctcaggtgatctgcctgcctcggccttccaaagtgctgtgattacaggcgtgagccactgctcccggccttgaataggaagttttgtaggtctttggataattgagtctaacttagttttcagaatattgatttcaaaaataattcacatgatgaacttttgaactttaccatgttttttatttaactcttgaaaatttctcagttcttaagaatgcttgctgtgggtatagtgcaggtatattgaaaggaatttttttcttgcagcgggaaagagacatgcgaatgggtggcggaggagcaatgaacatgggaggtaagtcgtactgagcgctttgggcagggaggtgcggggcctgtgggtggacagggtcctagaggaatggggcctggaactccagcaggatatggtagagggagagaagagtacgaaggcccaaacaaaaaaccccgattttagatgtgatatttaggctttcattccagtttgttttgtttttttgtttagataccaatcttttaaattcttgcattttagtaagaaagctatctttttatggatgttagcagtttattgacctaatatttgtaaatggtctgtttgggcaggtaaaattatgtaatgcagtgtttggaacaggagaatttttttttcctttttatttctttattttttcttttttactgtataatgtccctcaagtttatggcagtgtaccttgtgccactgaatttccaaagtgtaccaatttttttttttttactgtgcttcaaataaatagaaaaatagttataatattgatcttcaactttgccattcatgcttctatgcatattaggctacgtattccacattgaaagcatgagagtgtctaggcctttgaatggcatatgccatttctgggaaatgcatctggaggctaagtattgctttctacaaataattgccccctttgttttaaaaagaagaaatgcatattgaagtagtttgatgatttgtttggcatataggaagcacgctggtgctaagtattttttaaatggttatgtaagcaaagctgaactgtaaatcttcaggaatatgtattaagattgtggaatgggtgtaagacaattggtagggggtgaaagtgggtttgattaaatggatcttttatggccctatgatctatcctttacttgaaagcttttgaaaagtggaaaggtcattttgttgcatttccccatttcttgtttttaaaagaccaacaaatctcaagccctataaatggcttgtattgaacttttacatttgaattaaagatgttaaacatgaagtcttttcatgtattcaagtgatttataaagatggggtgtagtctaaaaaacaaaacttgaaagtaagaaggtttagtaactgggccgggcgcggtggctcacgcctgtaatcccagcactttgggaggctgaggtgggcaaatcatgagatcaggagttcaagaccagcctggccaacatggtgaaaccccgtctctactaaaaatacaaaaaattagctgggcgtggtggcaggcgcctgtaatcccagctactcgggaggctgagccaggagaattgcttgaacctggagatggaggttgcagtgagctgagactgccactgcactccagcctggacaacagagcgagactctgtctcaaaaaaaaaaaaaggtttagtactgaagtaggtttagttatatatacatttgtactctgtaacttttacatctccttgtgctacttctgttgggcaaaatctataggactataaaaatctattggttctcttctaagagctagtggtgattgttaacaaatagggttgcagataatcattcttattgtaaatttaacttgttttcacatagtttcgttttcatgtagcactaaatctggagaaagttgctcatgctacacagtacaaatatcccttcctcccaccataaaggcttggaatgtttccatggtgttgtcagttaattgtcaacttcattgaacccccttccattagaacaagagactttgactattaaagtagattgtttattgttgcctgttagtataatgggagcctgatttcccagtgtaaatatgttagaggaacagcttcctaacagtaggtaaagtaattgaatggtttggctttgttctgagttacgttccattcaaatctgtacattgtagaattcttactatggaatgtgtcttcctccttttcacctcttttcttggtgctaattggcaaaagaaaaattctaagtcaaacctttattaacatgctgaagtttagtattgtgcctgtgtacaaaaggagacctattgttggaacaatctgagcactttctgcataggaaacaggataatgctgaaagtaaacactagtgtataaaagcatctcaccaaatactggttgtatgactgacaggtacatggtgtgctaagggagagaatctcattagaaagtaatgctcattatatcattcaccagcacactcggaaatatgagtagttttaccatgattatatcagtgaggaagttttgtccccaaacaggttattaattggtgatacataagagattttctgtacggaaacaagggtcttgattagaaaggaatccattacagtttggttgaattatatagtagggactctactaaagacaagaaaataaggggtgttccatgggacacccacagagggtgaactttgaatgtgtgtgggtgggggctggtcgggaaatgggaaaatctgcctataaaattaatgtttcagtttatttttcagattacatgcctttctttataagggatgctggcacagaccccctaaaataagcttttggtagtactgtacctttgaagagtggtgaaggatgctaatggataatctcctgaaagttgtggcttttgatacccttactgtggactgtagagttgctaaacgttgtttagcaaataatgttgcttagtttcaaatgacatttgactttcatcactaaaacagcaatgtactcagggttgtaagcttactcaaatagactttcaataagtcttcaatgtatatatgatagtttttagcctaatgtgaatttaaataatcttaatagtttcctaaaagtcgatctgaaacttggggtgggaaaggggaggtagcaatttttgaagtattttagccatttttttcatttaaagaaaccacttgtccccatttcctcttctccactttctcataattttgttttaagaggaacactggttgttttttatacttctcctaatctttaaaaactgcatattgttaagaccccagtgtatttaataggtattttataagcatagcccattggctcatgttagtgaaaccataatcctctttgcttagaacattaaactcataagaagtactacaaaccccaccactctttatagatgtattgtaccactaatataaacagctaaaaaatggggaaattgtaatgttacgcctgtgcaatttttaagtggcatattatggcagattaaaatttagatacttggcttttcttgggcaagccactaagttgtggcggaatgttttctggtgttcttggactgcaattatgcactattaaagtagtggcctgctacataactgcatttagccagcatttctgcagtgcgtaactgtgaggaacgtagtaccgcaaatggcaatggacattaggacccggatgtagtattcctgcttgctccaagattctcattgccgactgcatacaggtaggtaacaagcaatataatctaacttggtgacttgtatgtacttttattccgtgggcattctggcatcacatttctgacaatgaaattacagtgcagcacctaacacttgtatggtaaagctagcttacatcaaaactgtgtgggtgtggggttagagctgtaatttgtcaggcagaattcagtgctgttgcagttctcagataaaaagtgcaaacttgattctttggtatatctgactcagttgtgtggtttcctttagttgcattgtaactgaagataacatggaacacatcagtggtgtgggggagagggaactaaactatacttgggaactagggtgcttttagcaccttgacatggaccgtatagcatgtgataattagtctctattgtagcaaactgacctgcccatagatcggcaatatcagtaatttcattatgcaatcttggtaattctacaagttgagttgaactaaaagtacaggtttttttgtaatgcgatttaaaatttttaaaaacatgggcttcatgaaaacaccattgttactaacttgggcttagatgggaatctaatgtgaatagttcaagttatgggacttgtctaaatgtgtctatactctaaacctgggggaaggtggtgtggaacattgacttgactacagtcgaatacatgttgggaatcattcccaatcataagacatcgtcgtttctgtaggatgactgcatatgttcagagtagctttttgaatttggttcccttagctttagggatgtgatgttatagtccaaaatgtttacaagaaaacctaagtcttcaaaagcacaacttttgttgcttaggactttgcatcaactgttgttccagacctcacttcaacttcttggtctctgaactggttttagctagcatgcatgagagacagttttcatgtataatgtttctgctctgtaactggaaagtggtttactttgcataaatgctgatgaaaacttcatgactatgagacttttcttctgtgtatcaagaaaaagcttgctcgttggcaagcaattcacaaggtggggacagacttgtactttaacatgtagtccattcaagcaaacaactttggactctactgatagatgaaagagcaaatgatgactagtttagcctctgcatatcaacaatataatgcagatcaagtataatgctcaatattagtgacatgagtatcactaaattacatagaaccctgatggggtttcctgtgtcgtaatccattaaatcggtggccagtgcttgctgccgtggtttagtgattgggtgttagaaataaaaactcaggtctatttcttaccagtcagtaacaatttttagagaatgtacttggtatataatatatggacttcaggaactttattggggtggggggttaattttgccttaccctgttcactttcagatgattaggcttttgcactttagaatgagaaacttgtgacgttagtgtgttcttactagctttaatttgtatgtagcaatgaattgtgaatcttagtgcagtgggtttttttaaaaaactcaaaaagctgggaattaagtggtttcagtaataatgctataccgaggtgcttgcattgtatttcataattttgttacaaaccaaaattatttttaatgagaacagtcttgggttcagaggtgtgatgccagaatgtattttcgtactgttaggcccttggaacagataccggtgctttctgaaagatgaaagaaatgcaatgggtgctcttcatgcaaggttgcaaacctaccaagaatgcataatagtctcacttttccccaataaagagatgcgtgtgactagttttggacttttaaccttaatgggggttgcatgtctcctattgttaatcattgtcagctgcagtgacatgatccacagtcctgcatttactgcctttcacttaatgattttggacaggttttagagagccaggatgttggtctgggcctttatttggttttggctttagctgataatgttttagtgatgtcagctagtgcagttctcaaatggctgcctattagggaaagaattcagaggatttgactgctcctaatcatctgtcattgctgctagataatgattggcaatttttaagactcaactggaaatctcaacagttgctggtaaaccattaaccataaaaacgttgcttttgaacaccagtgctgaaaaaaatatttttttttttttttttgagagtgaaaagggcttggacttaagataggacaatgtggagaatggggggaagaatgcaaaacgatatagtatcccttatggatggtacatgtgcaacagggaactcttacttcatataccctttgcagtaatcattcagggaggaagaaaaacctggaacttgaatgaaggctgatctttgttttgtgcactgtggccctgccaggcatatagtgaaggtgaatgtcttctccctcagaaaaaaattggttccttgctgtcccagtaaggcatagcttttccagccctaactttaaaactcagtgaggacttagatgggaaagaatgaggtaaatacaaaggattgcaggacaacaactacagcgttgtgtactgtgggaaggggagttgggcactcttggaggactcctgctgaaggtggtcagcctgcctgacaatggaagacatacttgaatggggagcagggtatgtgctttcatatgaaaaaagagctgatgttaaaactcatttggtgaggtcaacgttgtcacataccttcacataagggatagtatattttgggttgcagtcaaacttgtgctcagactggtgaaactgagagtcaggcttttacattttaaagaaaatacagttttcattctaattcaggtgtctacttattttatgtaagaataattttagatttcccccccaccatgaagtttcttcctatttttttatgctgtaacttacccccaatctttatctctggatttttactctttaaattttgaagttgactagcattttcaaacctttattttatacccttgtcttttatattaactttttcttattattctttaggtaagaatgattgatgttggctgatattggagtgctcattcacatgaagt

SEQ ID NO: 5821 - protein, 109 aa, Homo sapiens [sequence omitted]

SEQ ID NO: 5822 - DNA, 1538 bp, Homo sapiens
ggttttttttttggagagagttttgctcttgtcacccaggctggagtgcagtggcttgatcttggctcactgcagcatctgccttctgggttcaagtgattctcctgcctcagcctcttgagtaggtgggattacaagtgcctgccatcaggctcggctaatttttgtatttttagtagaaatggcgtttcgccttgttggccaggctggtcttgaactcctgacctcaggtgatctgcctgcctcggccttccaaagtgctgtgattacaggcgtgagccactgctcccggccttgaataggaagttttgtaggtctttggataattgagtctaacttagttttcagaatattgatttcaaaaataattcacatgatgaacttttgaactttaccatgttttttatttaactcttgaaaatttctcagttcttaagaatgcttgctgtgggtatagtgcaggtatattgaaaggaatttttttcttgcagcgggaaagagacatgcgaatgggtggcggaggagcaatgaacatgggaggtaagtcgtactgagcgctttgggcagggaggtgcggggcctgtgggtggacagggtcctagaggaatggggcctggaactccagcaggatatggtagagggagagaagagtacgaaggcccaaacaaaaaaccccgattttagatgtgatatttaggctttcattccagtttgttttgtttttttgtttagataccaatcttttaaattcttgcattttagtaagaaagctatctttttatggatgttagcagtttattgacctaatatttgtaaatggtctgtttgggcaggtaaaattatgtaatgcagtgtttggaacaggagaatttttttttcctttttatttctttattttttcttttttactgtataatgtccctcaagtttatggcagtgtaccttgtgccactgaatttccaaagtgtaccaatttttttttttttactgtgcttcaaataaatagaaaaatagttataatattgatcttcaactttgccattcatgcttctatgcatattaggctacgtattccacattgaaagcatgagagtgtctaggcctttgaatggcatatgccatttctgggaaatgcatctggaggctaagtattgctttctacaaataattgccccctttgttttaaaaagaagaaatgcatattgaagtagtttgatgatttgtttggcatataggaagcacgctggtgctaagtattttttaaatggttatgtaagcaaagctgaactgtaaatcttcaggaatatgtattaagattgtggaatgggtgtaagacaattggtagggggtgaaagtgggtttgattaaatggatcttttatggccctatgatctatcctttacttgaaagcttttgaaaagtggaaaggtcattttgttgcatttccccatttcttgtttttaaaagaccaacaaatctcaagccctataaatggcttgtattgaacttttacatttgaattaaagatgttaaacatg

SEQ ID NO: 5823 - protein, 53 aa, Homo sapiens; identical to SEQ ID NO: 5815

SEQ ID NO: 5824 - DNA, 1276 bp, Homo sapiens
catgtttaacatctttaattcaaatgtaaaagttcaatacaagccatttatagggcttgagatttgttggtcttttaaaaacaagaaatggggaaatgcaacaaaatgacctttccacttttcaaaagctttcaagtaaaggatagatcatagggccataaaagatccatttaatcaaacccactttcaccccctaccaattgtcttacacccattccacaatcttaatacatattcctgaagatttacagttcagctttgcttacataaccatttaaaaaatacttagcaccagcgtgcttcctatatgccaaacaaatcatcaaactacttcaatatgcatttcttctttttaaaacaaagggggcaattatttgtagaaagcaatacttagcctccagatgcatttcccagaaatggcatatgccattcaaaggcctagacactctcatgctttcaatgtggaatacgtagcctaatatgcatagaagcatgaatggcaaagttgaagatcaatattataactatttttctatttatttgaagcacagtaaaaaaaaaaaaattggtacactttggaaattcagtggcacaaggtacactgccataaacttgagggacattatacagtaaaaaagaaaaaataaagaaataaaaaggaaaaaaaaattctcctgttccaaacactgcattacataattttacctgcccaaacagaccatttacaaatattaggtcaataaactgctaacatccataaaaagatagctttcttactaaaatgcaagaatttaaaagattggtatctaaacaaaaaaacaaaacaaactggaatgaaagcctaaatatcacatctaaaatcggggttttttgtttgggccttcgtactcttctctccctctaccatatcctgctggagttccaggccccattcctctaggacctggcccggaccctggcggggcccccgaggttggtggagtggcgggcggggccgagctggaggctggtggtgcgctgcctactccgggagcggggccgggtccctgagcaacgacgggcttggaagagtcctgcggcggtggcggcggctgctgctgctgatgcggctgtggatgcggcggcggctgatgcggtggcggctgctgcggcggtggctgctgcggtggtggctgttgctgctgttggtgtggaggcggtggcgggatcggaggcttagggccgctctggcccgggccaggacccatggggccgcgattctgattgaggcccatgc

SEQ ID NO: 5825 - protein, 56 aa, Homo sapiens
MRLWMRRRLMRWRLLRRWLLRWWLLLLLVWRRWRDRRLRAALARARTHGAAILIEA

SEQ ID NO: 5826 - DNA, 3077 bp, Homo sapiens
gccgcctgtgtcatccgccattttgtgagaagcaaggtggcctccacgtttcctgagcgtcttcttcgcttttgcctcgaccgccccttgaccacagacatgtctcgggatcggttccggagtcgtggcggtggcggtggtggcttccacaggcgtggaggaggcggcggccgcggcggcctccacgacttccgttctccgccgcccggcatgggcctcaatcagaatcgcggccccatgggtcctggcccgggccagagcggccctaagcctccgatcccgccaccgcctccacaccaacagcagcaacagccaccaccgcagcagccaccgccgcagcagccgccaccgcatcagccgccgccgcatccacagccgcatcagcagcagcagccgccgccaccgccgcaggactcttccaagcccgtcgttgctcagggacccggccccgctcccggagtaggcagcgcaccaccagcctccagctcggccccgcccgccactccaccaacctcgggggccccgccagggtccgggccaggcccgactccgaccccgccgcctgcagtcacctcggcccctcccggggcgccgccacccaccccgccaagcagcggggtccctaccacacctcctcaggccggaggcccgccgcctccgcccgcggcagtcccgggcccgggtccagggcctaagcagggcccaggtccgggtggtcccaaaggcggcaaaatgcctggcgggccgaagccaggtggcggcccgggcctaagtacgcctggcggccaccccaagccgccgcatcgaggcggcggggagccccgcgggggccgccagcaccacccgccctaccaccagcagcatcaccaggggcccccgcccggcgggcccggcggccgcagcgaggagaagatctcggactcggaggggtttaaagccaatttgtctctcttgaggaggcctggagagaaaacttacacacagcgatgtcggttgtttgttgggaatctacctgctgatatcacggaggatgaattcaaaagactatttgctaaatatggagaaccaggagaagtttttatcaacaaaggcaaaggattcggatttattaagcttgaatctagagctttggctgaaattgccaaagccgaactggatgatacacccatgagaggtagacagcttcgagttcgctttgccacacatgctgctgccctttctgttcgtaatctttcaccttatgtttccaatgaactgttggaagaagcctttagccaatttggtcctattgaaagggctgttgtaatagtggatgatcgtggaagatctacagggaaaggcattgttgaatttgcttctaagccagcagcaagaaaggcatttgaacgatgcagtgaaggtgttttcttactgacgacaactcctcgtccagtcattgtggaaccacttgaacaactagatgatgaagatggtcttcctgaaaaacttgcccagaagaatccaatgtatcaaaaggagagagaaacccctcctcgttttgcccagcatggcacgtttgagtacgaatattctcagcgatggaagtctttggatgaaatggaaaaacagcaaagggaacaagttgaaaaaaacatgaaagatgcaaaagacaaattggaaagtgaaatggaagatgcctatcatgaacatcaggcaaatcttttgcgccaagatctgatgagacgacaggaagaattaagacgcatggaagaacttcacaatcaagaaatgcagaaacgtaaagaaatgcaattgaggcaagaggaggaacgacgtagaagagaggaagagatgatgattcgtcaacgtgagatggaagaacaaatgaggcgccaaagagaggaaagttacagccgaatgggctacatggatccacgggaaagagacatgcgaatgggtggcggaggagcaatgaacatgggagatccctatggttcaggaggccagaaatttccacctctaggaggtggtggtggcataggttatgaagctaatcctggcgttccaccagcaaccatgagtggttccatgatgggaagtgacatgcgtactgagcgctttgggcagggaggtgcggggcctgtgggtggacagggtcctagaggaatggggcctggaactccagcaggatatggtagagggagagaagagtacgaaggcccaaacaaaaaaccccgattttagatgtgatatttaggctttcattccagtttgttttgtttttttgtttagataccaatcttttaaattcttgcattttagtaagaaagctatctttttatggatgttagcagtttattgacctaatatttgtaaatggtctgtttgggcaggtaaaattatgtaatgcagtgtttggaacaggagaatttttttttcctttttatttctttattttttcttttttactgtataatgtccctcaagtttatggcagtgtaccttgtgccactgaatttccaaagtgtaccaatttttttttttttactgtgcttcaaataaatagaaaaatagttataatattgatcttcaactttgccattcatgcttctatgcatattaggctacgtattccacattgaaagcatgagagtgtctaggcctttgaatggcatatgccatttctgggaaatgcatctggaggctaagtattgctttctacaaataattgccccctttgttttaaaaagaagaaatgcatattgaagtagtttgatgatttgtttggcatataggaagcacgctggtgctaagtattttttaaatggttatgtaagcaaagctgaactgtaaatcttcaggaatatgtattaagattgtggaatgggtgtaagacaattggtagggggtgaaagtgggtttgattaaatggatcttttatggccctatgatctatcctttacttgaaagcttttgaaaagtggaaaggtcattttgttgcatttccccatttcttgtttttaaaagaccaacaaatctcaagccctataaatggcttgtattgaacttttacatttgaattaaagatgttaaacatg

SEQ ID NO: 5827 - protein, 707 aa, Homo sapiens; identical to SEQ ID NO: 118

SEQ ID NO: 5828 - DNA, 1031 bp, Homo sapiens
ggttttttttttggagagagttttgctcttgtcacccaggctggagtgcagtggcttgatcttggctcactgcagcatctgccttctgggttcaagtgattctcctgcctcagcctcttgagtaggtgggattacaagtgcctgccatcaggctcggctaatttttgtatttttagtagaaatggcgtttcgccttgttggccaggctggtcttgaactcctgacctcaggtgatctgcctgcctcggccttccaaagtgctgtgattacaggcgtgagccactgctcccggccttgaataggaagttttgtaggtctttggataattgagtctaacttagttttcagaatattgatttcaaaaataattcacatgatgaacttttgaactttaccatgttttttatttaactcttgaaaatttctcagttcttaagaatgcttgctgtgggtatagtgcaggtatattgaaaggaatttttttcttgcagcgggaaagagacatgcgaatgggtggcggaggagcaatgaacatgggaggtaagtcgtactgagcgctttgggcagggaggtgcggggcctgtgggtggacagggtcctagaggaatggggcctggaactccagcaggatatggtagagggagagaagagtacgaaggcccaaacaaaaaaccccgattttagatgtgatatttaggctttcattccagtttgttttgtttttttgtttagataccaatcttttaaattcttgcattttagtaagaaagctatctttttatggatgttagcagtttattgacctaatatttgtaaatggtctgtttgggcaggtaaaattatgtaatgcagtgtttggaacaggagaatttttttttcctttttatttctttattttttcttttttactgtataatgtccctcaagtttatggcagtgtaccttgtgccactgaatttccaaagtgtaccaatttttttttttttactgtgcttcaaataaatagaaaaatagttataatattgatcttc

SEQ ID NO: 5829 - protein, 51 aa, Homo sapiens
MQCLEQENFFFLFISLFFLFYCIMSLKFMAVYLVPLNFQSVPIFFFLLCFK

SEQ ID NO: 5830 - DNA, 2570 bp, Homo sapiens
gccgcctgtgtcatccgccattttgtgagaagcaaggtggcctccacgtttcctgagcgtcttcttcgcttttgcctcgaccgccccttgaccacagacatgtctcgggatcggttccggagtcgtggcggtggcggtggtggcttccacaggcgtggaggaggcggcggccgcggcggcctccacgacttccgttctccgccgcccggcatgggcctcaatcagaatcgcggccccatgggtcctggcccgggccagagcggccctaagcctccgatcccgccaccgcctccacaccaacagcagcaacagccaccaccgcagcagccaccgccgcagcagccgccaccgcatcagccgccgccgcatccacagccgcatcagcagcagcagccgccgccaccgccgcaggactcttccaagcccgtcgttgctcagggacccggccccgctcccggagtaggcagcgcaccaccagcctccagctcggccccgcccgccactccaccaacctcgggggccccgccagggtccgggccaggcccgactccgaccccgccgcctgcagtcacctcggcccctcccggggcgccgccacccaccccgccaagcagcggggtccctaccacacctcctcaggccggaggcccgccgcctccgcccgcggcagtcccgggcccgggtccagggcctaagcagggcccaggtccgggtggtcccaaaggcggcaaaatgcctggcgggccgaagccaggtggcggcccgggcctaagtacgcctggcggccaccccaagccgccgcatcgaggcggcggggagccccgcgggggccgccagcaccacccgccctaccaccagcagcatcaccaggggcccccgcccggcgggcccggcggccgcagcgaggagaagatctcggactcggaggggtttaaagccaatttgtctctcttgaggaggcctggagagaaaacttacacacagcgatgtcggttgtttgttgggaatctacctgctgatatcacggaggatgaattcaaaagactatttgctaaatatggagaaccaggagaagtttttatcaacaaaggcaaaggattcggatttattaagcttgaatctagagctttggctgaaattgccaaagccgaactggatgatacacccatgagaggtagacagcttcgagttcgctttgccacacatgctgctgccctttctgttcgtaatctttcaccttatgtttccaatgaactgttggaagaagcctttagccaatttggtcctattgaaagggctgttgtaatagtggatgatcgtggaagatctacagggaaaggcattgttgaatttgcttctaagccagcagcaagaaaggcatttgaacgatgcagtgaaggtgttttcttactgacgacaactcctcgtccagtcattgtggaaccacttgaacaactagatgatgaagatggtcttcctgaaaaacttgcccagaagaatccaatgtatcaaaaggagagagaaacccctcctcgttttgcccagcatggcacgtttgagtacgaatattctcagcgatggaagtctttggatgaaatggaaaaacagcaaagggaacaagttgaaaaaaacatgaaagatgcaaaagacaaattggaaagtgaaatggaagatgcctatcatgaacatcaggcaaatcttttgcgccaagatctgatgagacgacaggaagaattaagacgcatggaagaacttcacaatcaagaaatgcagaaacgtaaagaaatgcaattgaggcaagaggaggaacgacgtagaagagaggaagagatgatgattcgtcaacgtgagatggaagaacaaatgaggcgccaaagagaggaaagttacagccgaatgggctacatggatccacgggaaagagacatgcgaatgggtggcggaggagcaatgaacatgggagatccctatggttcaggaggccagaaatttccacctctaggaggtggtggtggcataggttatgaagctaatcctggcgttccaccagcaaccatgagtggttccatgatgggaagtgacatgcgtactgagcgctttgggcagggaggtgcggggcctgtgggtggacagggtcctagaggaatggggcctggaactccagcaggatatggtagagggagagaagagtacgaaggcccaaacaaaaaaccccgattttagatgtgatatttaggctttcattccagtttgttttgtttttttgtttagataccaatcttttaaattcttgcattttagtaagaaagctatctttttatggatgttagcagtttattgacctaatatttgtaaatggtctgtttgggcaggtaaaattatgtaatgcagtgtttggaacaggagaatttttttttcctttttatttctttattttttcttttttactgtataatgtccctcaagtttatggcagtgtaccttgtgccactgaatttccaaagtgtaccaatttttttttttttactgtgcttcaaataaatagaaaaatagttataatattgatcttc

SEQ ID NO: 5831 - protein, 707 aa, Homo sapiens; identical to SEQ ID NO: 118

SEQ ID NO: 5832 - DNA, 453 bp, Homo sapiens
tacgaatattctcagcgatggaagtctttggatgaaatggaactccagcaggatatggtagagggagagaagagtacgaaggcccaaacaaaaaaccccgattttagatgtgatatttaggctttcattccagtttgttttgtttttttgtttagataccaatcttttaaattcttgcattttagtaagaaagctatctttttatggatgttagcagtttattgacctaatatttgtaaatggtctgtttgggcaggtaaaattatgtaatgcagtgtttggaacaggagaatttttttttcctttttatttctttattttttcttttttactgtataatgtccctcaagtttatggcagtgtaccttgtgccactgaatttccaaagtgtaccaatttttttttttttactgtgcttcaaataaatagaaaaatagttataatattgatctt

SEQ ID NO: 5833 - protein, 51 aa, Homo sapiens; identical to SEQ ID NO: 5829

SEQ ID NO: 5834 - DNA, 1655 bp, Homo sapiens
gccgcctgtgtcatccgccattttgtgagaagcaaggtggcctccacgtttcctgagcgtcttcttcgcttttgcctcgaccgccccttgaccacagacatgtctcgggatcggttccggagtcgtggcggtggcggtggtggcttccacaggcgtggaggaggcggcggccgcggcggcctccacgacttccgttctccgccgcccggcatgggcctcaatcagaatcgcggccccatgggtcctggcccgggccagagcggccctaagcctccgatcccgccaccgcctccacaccaacagcagcaacagccaccaccgcagcagccaccgccgcagcagccgccaccgcatcagccgccgccgcatccacagccgcatcagcagcagcagccgccgccaccgccgcaggactcttccaagcccgtcgttgctcagggacccggccccgctcccggagtaggcagcgcaccaccagcctccagctcggccccgcccgccactccaccaacctcgggggccccgccagggtccgggccaggcccgactccgaccccgccgcctgcagtcacctcggcccctcccggggcgccgccacccaccccgccaagcagcggggtccctaccacacctcctcaggccggaggcccgccgcctccgcccgcggcagtcccgggcccgggtccagggcctaagcagggcccaggtccgggtggtcccaaaggcggcaaaatgcctggcgggccgaagccaggtggcggcccgggcctaagtacgcctggcggccaccccaagccgccgcatcgaggcggcggggagccccgcgggggccgccagcaccacccgccctaccaccagcagcatcaccaggggcccccgcccggcgggcccggcggccgcagcgaggagaagatctcggactcggaggggtttaaagccaatttgtctctcttgaggaggcctggagagaaaacttacacacagcgatgtcggttgtttgttgggaatctacctgctgatatcacggaggatgaattcaaaagactatttgctaaatatggagaaccaggagaagtttttatcaacaaaggcaaaggattcggatttattaagcttgaatctagagctttggctgaaattgccaaagccgaactggatgatacacccatgagaggtagacagcttcgagttcgctttgccacacatgctgctgccctttctgttcgtaatctttcaccttatgtttccaatgaactgttggaagaagcctttagccaatttggtcctattgaaagggctgttgtaatagtggatgatcgtggaagatctacagggaaaggcattgttgaatttgcttctaagccagcagcaagaaaggcatttgaacgatgcagtgaaggtgttttcttactgacgacaactcctcgtccagtcattgtggaaccacttgaacaactagatgatgaagatggtcttcctgaaaaacttgcccagaagaatccaatgtatcaaaaggagagagaaacccctcctcgttttgcccagcatggcacgtttgagtacgaatattctcagcgatggaagtctttggatgaaatggaaaaacagcaaagggaacaagttgaaaaaaacatgaaagatgcaaaagacaaatt

SEQ ID NO: 5835 - protein, 517 aa, Homo sapiens
MSRDRFRSRGGGGGGFHRRGGGGGRGGLHDFRSPPPGMGLNQNRGPMGPGPGQSGPKPPIPPPPPHQQQQQPPPQQPPPQQPPPHQPPPHPQPHQQQQPPPPPQDSSKPVVAQGPGPAPGVGSAPPASSSAPPATPPTSGAPPGSGPGPTPTPPPAVTSAPPGAPPPTPPSSGVPTTPPQAGGPPPPPAAVPGPGPGPKQGPGPGGPKGGKMPGGPKPGGGPGLSTPGGHPKPPHRGGGEPRGGRQHHPPYHQQHHQGPPPGGPGGRSEEKISDSEGFKANLSLLRRPGEKTYTQRCRLFVGNLPADITEDEFKRLFAKYGEPGEVFINKGKGFGFIKLESRALAEIAKAELDDTPMRGRQLRVRFATHAAALSVRNLSPYVSNELLEEAFSQFGPIERAVVIVDDRGRSTGKGIVEFASKPAARKAFERCSEGVFLLTTTPRPVIVEPLEQLDDEDGLPEKLAQKNPMYQKERETPPRFAQHGTFEYEYSQRWKSLDEMEKQQREQVEKNMKDAKD

SEQ ID NO: 5836 - DNA, 1285 bp, Homo sapiens
agacaaggcaaatttaagtaggctcatggcttttccagttgggttggaaagttcctctccgatgactgttatattctcaaagaaatatgaggagaggggcagggcatggtggctcacatccgtaatcctagcaaaatcatagtggcctacagccaacgccttcttcgctcactggccaactggaaacttcagtccccccatgcctcccgcctctcacccaggggccaataggaatgatcagaggttcgcaacttagtgtcatcaagcatagtaattgcaattggctattggagctgtcgatcgtggagtaggcggggccgtgccagctggcctatataagacgaggacaaaggcggcgcgccgcctgtgtcatccgccattttgtgagaagcaaggtggcctccacgtttcctgagcgtcttcttcgcttttgcctcgaccgccccttgaccacagacatgtctcgggatcggttccggagtcgtggcggtggcggtggtggcttccacaggcgtggaggaggcggcggccgcggcggcctccacgacttccgttctccgccgcccggcatgggcctcaatcagaatcgcggccccatgggtcctggcccgggccagagcggccctaagcctccgatcccgccaccgcctccacaccaacagcagcaacagccaccaccgcagcagccaccgccgcagcagccgccaccgcatcagccgccgccgcatccacagccgcatcagcagcagcagccgccgccaccgccgcaggactcttccaagcccgtcgttgctcagggacccggccccgctcccggagtaggcagcgcaccaccagcctccagctcggccccgcccgccactccaccaacctcgggggccccgccagggtccgggccaggcccgactccgaccccgccgcctgcagtcacctcggcccctcccggggcgccgccacccaccccgccaagcagcggggtccctaccacacctcctcaggccggaggcccgccgcctccgcccgcggcagtcccgggcccgggtccagggcctaagcagggcccaggtccgggtggtcccaaaggcggcaaaatgcctggcgggccgaagccaggtggcggcccgggcctaagtacgcctggcggccaccccaagccgccgcatcgaggcggcggggagccccgcgggggccgccagcaccacccgccctaccaccagcagcatcaccaggggcccccgcccggcgggcccggcggccgcagcgaggagaagatctcggactcgga

SEQ ID NO: 5837 - protein, 41 aa, Homo sapiens [sequence omitted]

SEQ ID NO: 5838 - DNA, 6993 bp, Homo sapiens
agtgtgggcgggggccggggggccgagaggtaccgccgccaccgcgcggggagccgcagcggttccgagcggggcccaacatggcggagagagaggtggagtccggcccccgaaagaggtttgaacaaaaaagtggtgcagtttttgatgaaattgtagagaactgtggtggtatcatggatacagaaatgtctgaagatatagaccacaacttaactcctacccttgacagcatgtcttatggaatgccgaatcaaacaggatctgaaaattcattgctggatgaagatgattattttttgaactctggggatcttgcaggaattccagtcgttggtagtgacaatgaggatgaacaggattttagttcaaaggacaatcttgtttcttcaattcatactgatgatagcttggaagtagagagaagagtcacacagcatgaatcagacaatgaaaatgaaatacaaattcaaaataagttaaaaaaagactttcctaaacaatttgatcaggtttctgtctttaaatcaatacggaaagattttagtctagtaagagaaaacagcaaagagacattttctggaaaggagaaaaatagagacctaacttatgaacgtgaaaaacggttggataaaccccataaagatttggattcaaggttgaaaagcagtttttttgataaagcagctaatcaagttgaagaaacattacatacccatttaccacaaaccccagaaacaaactttagggattccagctacccatttgccaataaagaatccattggttcggaactggggaattcctttgcatcaaatattagaattaaagaagaacctttggatgatgagtatgacaaagcaatggcaccacagcagggactactagacaaaataaaagatgaacctgacaatgctcaagagtatagtcatggccaacagcaaaaaactcaagagggggaactgaaaattagtgctgtgttttcagtcagtggcagccctcttgctccacagttgactactggctttcagccctcactggcgtcatctggcatgaataaaatgcttccttcagttccagccacagctgttcgagtttcctgttctggttgtaaaaaaatcctccagaaggggcaaactgcttatcagaggaaagggtctactcagctattctgctccacactgtgcctcactggatatacagttccacctgcccgcccaccgcctcctctcaccaagaaaacttgttcaagttgctcaaaagacattttaaatccaaaggatgtgatcagtgcccagtttgaaaacaccaccactagtaaagatttttgcagtcagtcatgtttgtcaacatatgaactgaaaaaaaaacctattgttaccataaatacaaatagtatttcaaccaaatgcagcatgtgtcagaagaatgctgttattcgacatgaagttaattaccagaatgtggtccataaactttgcagtgatgcctgcttctctaagtttcgttctgctaacaacctcaccatgaactgttgtgagaactgtgggggttactgttacagtgggtcgggacaatgccacatgcttcagatagagggacagtctaagaagttttgtagttcatcgtgtatcacggcatacaagcagaaatcagccaaaattacaccgtgtgcgctttgcaaatcattgagatcctcagcagaaatgattgaaaataccaatagcttggggaagacagagcttttctgttctgttaattgcttatctgcttacagagttaaaatggttacttctgcaggtgtacaagttcagtgtaacagttgtaaaacctcagcaattcctcagtatcacctagccatgtcagatggaagtatacgcaacttctgcagctacagctgtgtggtagctttccagaatttattcaacaaaccaactggaatgaattcttcagtagtgcccttgtctcagggccaagtaattgtaagcatccccacaggttccacagtgtcagccggaggaggtagcacatctgctgtttctcccacctccatcagtagctctgctgcagctggtctccagcgtctcgctgcccagtcccagcatgttgggtttgcacgaagtgttgtgaaactcaaatgtcaacactgtaaccgtctttttgccacaaaaccagaacttcttgactataagggcaaaatgtttcagttctgtggcaagaattgttctgatgaatataagaaaataaataatgtaatggcaatgtgtgaatattgtaaaattgagaaaattgtaaaggagactgttcggttctcaggtgctgacaagtcattctgtagtgaaggttgcaaattgctttataaacatgacttggcaaaacgctggggaaatcactgtaaaatgtgcagttattgtttacagacatctcccaaattggtacagaataatttaggagggaaagtggaagagttctgttgtgaagaatgcatgtccaaatatacagttttgttctatcagatggccaaatgtgatgcttgtaagcgacagggtaaactcagtgagtccttgaaatggcgaggggaaatgaaacatttctgtaacctgctttgtatcttgatgttctgtaatcagcaaagtgtatgtgacccgccttcacaaaataatgcagcaaatatttccatggttcaagctgcttcagcaggacccccatctctgagaaaagattcgactccagttatagccaatgtagtatcattggcaagtgcccctgctgctcagcctacagtgaattctaacagtgtcttacaaggtgcagttccaacagtaacagcgaaaatcatcggtgatgcaagtactcaaacagatgccctgaaactgccaccttcccaacctccaaggcttttgaagaacaaagctttattatgcaaacccatcacacagactaaagccacctcttgcaaaccacatacccaaaacaaagaatgccagacagaagacactccaagtcagccccagattattgtggtgccagttcccgtaccagtgtttgttcccatacctcttcacctttatactcaatatgctccagtcccatttggaattccagttccaatgcctgtccctatgcttattccatcttcaatggatagtgaagataaagtcacagagagtattgaagacattaaagaaaagcttcccacacatccatttgaagctgatctccttgagatggcagaaatgattgcagaagatgaagagaagaagactctatctcagggagagtcccaaacttctgaacacgaactctttctagacaccaagatatttgaaaaagaccaaggaagtacatacagtggtgatcttgaatcagaggcagtatctactccacatagctgggaggaagagctgaatcactatgccttaaagtcaaatgctgtgcaagaggctgattcagaattgaagcagttctcaaaaggggaaactgaacaggacctggaagcagattttccatcagactcctttgacccacttaataaaggacagggaatccaggcacgttcccgaacaagacgacgacacagagatggcttcccccaacccagacgaagaggacggaagaagtctatagtggctgtggagcccaggagtcttattcaaggagcctttcaaggctgctcagtgtccgggatgacactgaaatacatgtatggggtaaatgcttggaagaactgggttcagtggaaaaatgccaaggaagagcagggggatctaaaatgtggaggggttgaacaggcctcatctagcccacgttctgaccccttaggaagtactcaagaccatgcactctctcaagaatcctcagagccaggctgtagagtccgctctatcaagctgaaggaagacattctgtcctgcacttttgctgagttgagtttgggcttatgccagtttatccaagaggtgcggagaccaaatggtgaaaaatatgatccagacagtatcttatacttgtgccttggaattcaacagtacctgtttgaaaatggtagaatagataacatttttactgagccctattccagatttatgattgaacttaccaaactcttgaaaatatgggaacctacaatacttcctaatggttacatgttctctcgcattgaggaagagcatttgtgggagtgcaaacagctgggcgcttactcaccaatcgtccttttaaacaccctccttttcttcaataccaaatacttccaactaaagaatgttactgagcacttgaagctttcctttgcccatgtgatgagacggaccaggactctgaagtacagtaccaagatgacatatctgaggttcttcccacctttacagaagcaggagtcagaaccagataaactgactgttggcaagaggaaacgaaatgaagatgatgaggttccagtgggggtggagatggcagagaatactgacaatccactaagatgcccagtccgactttatgagttttacctgtcaaaatgttctgaaagtgtgaagcaaaggaatgatgtgttttaccttcaacctgagcgctcctgtgtcccgaatagccccatgtggtactccacattcccgatagaccctggaaccctggacaccatgttaacacgtattctcatggtgagggaggtacatgaagaacttgccaaagccaaatctgaagactctgatgttgaattatcagattaaaacggaagtgaggttcttattttcatacatattggtatgcaccaaactgtgaatgcatccagctgttggaaaatgatgtataagtctaagtcctcttgacttgaccataagatcatggaaaacagatgacttgtgaaccccacagtgtggatgtgcaaatgaaaattgaaggaaagaatatgaactgagaaatgttctttggcagtgatatagttcttagacatcttcagaatgactaatttctccgagtggtgcataatcttattttgtttgggagtaacaaatcgtggaatatttttaaggaaaactgttgtataaaactttaccatagtaaccttagaccttagagaggtagctttggagtgaaactttggctgcaataggctactttggcaagccctccgtaaaagtcagaggagagatcagtacagagctaagagtgacatcaaatgaggactgtgggacccagatttgaagacccaataaaaatactcaactttttaaaaaagatagtgaagtggtcttgattgattttgattttcactgccaagccaatcatgtgaaggacagaagcttttgccatgggcccctcacatcagggaaaatgaccttcactgctgttaacagtaatgtgtccctttcattttctggatcaagccttctcagcggtgggtctggatgtgggtaaactaaggtaaaggggatgatattccacaaactaattatgcacacagaaaatctgtggagcctatcagaccccaagtgtcttgaaatgtttgtagaaacccactaaaatgccccttctctgggtgtgggcccttattgcagctgtctcacagcctgagctgtggtacagagaaatgggggttctccttttattttcattttttttccccaatggcagcttttctcccgttgttttaccttcctatttcccaaacagttcctcttattttgtcttttgcaccagtttctggaggcccttgtcatttcaaaaaggatagtctcttttcttactctggcaaacctgtgagtgattccacaaagatacagtattacttagctatctgaattatgatagaaaaggtcctagttaggttcctatataaagcatttggaagatgaccttgttgcccttgaaacttgaaaatagggattctggggtgaggatacaaagacattgtcttgcatatccataagcaggtcttagagcattattccaaactctagctgtttcagtagttctatgaggattgcaagtcataggtgtgtgtggcatatcagtccatctccctcatctccattctcagtttcttccccacaaaatttggaatcaaagcttttatgacgtttgccaattgcagaacttcttcagctaaggttaatttgacgctatgataaaactgagagatgtcaaaaagcctcttagaaattttaatcttgaaagacttttcagggtatctcattttttaggtgggggtggcaggtgtatttcttttttaacaaataaaaggcatttaagtaaaactaaaatgaaaaaagtaggccttctgacattgtgtacttggtggttctgtccctctgcctgtaacaaatctcatttttgttaccaagaactgtatgaaagaagtaaatccaccccgattctgtatgattaattccatctgtgtttgtcatttctgactggaaaacttcttactccataccttgttcgatatggaggacaaataattggattgtctgataagtctgccaataaactatccagaaatagcaagtgtaatagtccccactatacgaattttatggtttgtataaacactaacattttccccttctgtagttgtatgaaaaaacaaatattgttagcatagtagataaattgttatgaaataccagaaaaaaaaatctgtatcttttactgagaacacccaatacccagataaatgactgtatcaggatttcatttgcatgttagtccacagagttgcccagaaccctaaatttattcataagagaaaatattgattaattattggtcattcctcataagtgtagctgttgatgtgtgcgtctgattattgcttttttaattttatgaaaattgtgtaaaattacattttttttccaggggagaaaaaaacatcaaacaaaaacatctaaatcatcctttttgttctttttcagtttttaaccacttttaggttttccccttacagaaaccacagaaatattcccttagaataaaatagtatatttgtatttg

SEQ ID NO: 5839 - protein, 1548 aa, Homo sapiens; identical to SEQ ID NO: 120

SEQ ID NO: 5840 - DNA, 6113 bp, Homo sapiens
caaaaaagtggtgcagtttttgatgaaattgtagagaactgagtatagtcatggccaacagcaaaaaactcaagagggggaactgaaaattagtgctgtgttttcagtcagtggcagccctcttgctccacagttgactactggctttcagccctcactggcgtcatctggcatgaataaaatgcttccttcagttccagccacagctgttcgagtttcctgttctggttgtaaaaaaatcctccagaaggggcaaactgcttatcagaggaaagggtctactcagctattctgctccacactgtgcctcactggatatacagttccacctgcccgcccaccgcctcctctcaccaagaaaacttgttcaagttgctcaaaagacattttaaatccaaaggatgtgatcagtgcccagtttgaaaacaccaccactagtaaagatttttgcagtcagtcatgtttgtcaacatatgaactgaaaaaaaaacctattgttaccataaatacaaatagtatttcaaccaaatgcagcatgtgtcagaagaatgctgttattcgacatgaagttaattaccagaatgtggtccataaactttgcagtgatgcctgcttctctaagtttcgttctgctaacaacctcaccatgaactgttgtgagaactgtgggggttactgttacagtgggtcgggacaatgccacatgcttcagatagagggacagtctaagaagttttgtagttcatcgtgtatcacggcatacaagcagaaatcagccaaaattacaccgtgtgcgctttgcaaatcattgagatcctcagcagaaatgattgaaaataccaatagcttggggaagacagagcttttctgttctgttaattgcttatctgcttacagagttaaaatggttacttctgcaggtgtacaagttcagtgtaacagttgtaaaacctcagcaattcctcagtatcacctagccatgtcagatggaagtatacgcaacttctgcagctacagctgtgtggtagctttccagaatttattcaacaaaccaactggaatgaattcttcagtagtgcccttgtctcagggccaagtaattgtaagcatccccacaggttccacagtgtcagccggaggaggtagcacatctgctgtttctcccacctccatcagtagctctgctgcagctggtctccagcgtctcgctgcccagtcccagcatgttgggtttgcacgaagtgttgtgaaactcaaatgtcaacactgtaaccgtctttttgccacaaaaccagaacttcttgactataagggcaaaatgtttcagttctgtggcaagaattgttctgatgaatataagaaaataaataatgtaatggcaatgtgtgaatattgtaaaattgagaaaattgtaaaggagactgttcggttctcaggtgctgacaagtcattctgtagtgaaggttgcaaattgctttataaacatgacttggcaaaacgctggggaaatcactgtaaaatgtgcagttattgtttacagacatctcccaaattggtacagaataatttaggagggaaagtggaagagttctgttgtgaagaatgcatgtccaaatatacagttttgttctatcagatggccaaatgtgatgcttgtaagcgacagggtaaactcagtgagtccttgaaatggcgaggggaaatgaaacatttctgtaacctgctttgtatcttgatgttctgtaatcagcaaagtgtatgtgacccgccttcacaaaataatgcagcaaatatttccatggttcaagctgcttcagcaggacccccatctctgagaaaagattcgactccagttatagccaatgtagtatcattggcaagtgcccctgctgctcagcctacagtgaattctaacagtgtcttacaaggtgcagttccaacagtaacagcgaaaatcatcggtgatgcaagtactcaaacagatgccctgaaactgccaccttcccaacctccaaggcttttgaagaacaaagctttattatgcaaacccatcacacagactaaagccacctcttgcaaaccacatacccaaaacaaagaatgccagacagaagacactccaagtcagccccagattattgtggtgccagttcccgtaccagtgtttgttcccatacctcttcacctttatactcaatatgctccagtcccatttggaattccagttccaatgcctgtccctatgcttattccatcttcaatggatagtgaagataaagtcacagagagtattgaagacattaaagaaaagcttcccacacatccatttgaagctgatctccttgagatggcagaaatgattgcagaagatgaagagaagaagactctatctcagggagagtcccaaacttctgaacacgaactctttctagacaccaagatatttgaaaaagaccaaggaagtacatacagtggtgatcttgaatcagaggcagtatctactccacatagctgggaggaagagctgaatcactatgccttaaagtcaaatgctgtgcaagaggctgattcagaattgaagcagttctcaaaaggggaaactgaacaggacctggaagcagattttccatcagactcctttgacccacttaataaaggacagggaatccaggcacgttcccgaacaagacgacgacacagagatggcttcccccaacccagacgaagaggacggaagaagtctatagtggctgtggagcccaggagtcttattcaaggagcctttcaaggctgctcagtgtccgggatgacactgaaatacatgtatggggtaaatgcttggaagaactgggttcagtggaaaaatgccaaggaagagcagggggatctaaaatgtggaggggttgaacaggcctcatctagcccacgttctgaccccttaggaagtactcaagaccatgcactctctcaagaatcctcagagccaggctgtagagtccgctctatcaagctgaaggaagacattctgtcctgcacttttgctgagttgagtttgggcttatgccagtttatccaagaggtgcggagaccaaatggtgaaaaatatgatccagacagtatcttatacttgtgccttggaattcaacagtacctgtttgaaaatggtagaatagataacatttttactgagccctattccagatttatgattgaacttaccaaactcttgaaaatatgggaacctacaatacttcctaatggttacatgttctctcgcattgaggaagagcatttgtgggagtgcaaacagctgggcgcttactcaccaatcgtccttttaaacaccctccttttcttcaataccaaatacttccaactaaagaatgttactgagcacttgaagctttcctttgcccatgtgatgagacggaccaggactctgaagtacagtaccaagatgacatatctgaggttcttcccacctttacagaagcaggagtcagaaccagataaactgactgttggcaagaggaaacgaaatgaagatgatgaggttccagtgggggtggagatggcagagaatactgacaatccactaagatgcccagtccgactttatgagttttacctgtcaaaatgttctgaaagtgtgaagcaaaggaatgatgtgttttaccttcaacctgagcgctcctgtgtcccgaatagccccatgtggtactccacattcccgatagaccctggaaccctggacaccatgttaacacgtattctcatggtgagggaggtacatgaagaacttgccaaagccaaatctgaagactctgatgttgaattatcagattaaaacggaagtgaggttcttattttcatacatattggtatgcaccaaactgtgaatgcatccagctgttggaaaatgatgtataagtctaagtcctcttgacttgaccataagatcatggaaaacagatgacttgtgaaccccacagtgtggatgtgcaaatgaaaattgaaggaaagaatatgaactgagaaatgttctttggcagtgatatagttcttagacatcttcagaatgactaatttctccgagtggtgcataatcttattttgtttgggagtaacaaatcgtggaatatttttaaggaaaactgttgtataaaactttaccatagtaaccttagaccttagagaggtagctttggagtgaaactttggctgcaataggctactttggcaagccctccgtaaaagtcagaggagagatcagtacagagctaagagtgacatcaaatgaggactgtgggacccagatttgaagacccaataaaaatactcaactttttaaaaaagatagtgaagtggtcttgattgattttgattttcactgccaagccaatcatgtgaaggacagaagcttttgccatgggcccctcacatcagggaaaatgaccttcactgctgttaacagtaatgtgtccctttcattttctggatcaagccttctcagcggtgggtctggatgtgggtaaactaaggtaaaggggatgatattccacaaactaattatgcacacagaaaatctgtggagcctatcagaccccaagtgtcttgaaatgtttgtagaaacccactaaaatgccccttctctgggtgtgggcccttattgcagctgtctcacagcctgagctgtggtacagagaaatgggggttctccttttattttcattttttttccccaatggcagcttttctcccgttgttttaccttcctatttcccaaacagttcctcttattttgtcttttgcaccagtttctggaggcccttgtcatttcaaaaaggatagtctcttttcttactctggcaaacctgtgagtgattccacaaagatacagtattacttagctatctgaattatgatagaaaaggtcctagttaggttcctatataaagcatttggaagatgaccttgttgcccttgaaacttgaaaatagggattctggggtgaggatacaaagacattgtcttgcatatccataagcaggtcttagagcattattccaaactctagctgtttcagtagttctatgaggattgcaagtcataggtgtgtgtggcatatcagtccatctccctcatctccattctcagtttcttccccacaaaatttggaatcaaagcttttatgacgtttgccaattgcagaacttcttcagctaaggttaatttgacgctatgataaaactgagagatgtcaaaaagcctcttagaaattttaatcttgaaagacttttcagggtatctcattttttaggtgggggtggcaggtgtatttcttttttaacaaataaaaggcatttaagtaaaactaaaatgaaaaaagtaggccttctgacattgtgtacttggtggttctgtccctctgcctgtaacaaatctcatttttgttaccaagaactgtatgaaagaagtaaatccaccccgattctgtatgattaattccatctgtgtttgtcatttctgactggaaaacttcttactccataccttgttcgatatggaggacaaataattggattgtctgataagtctgccaataaactatccagaaatagcaagtgtaatagtccccactatacgaattttatggtttgtataaacactaacattttccccttctgtagttgtatgaaaaaacaaatattgttagcatagtagataaattgttatgaaataccagaaaaaaaaatctgtatcttttactgagaacacccaatacccagataaatgactgtatcaggatttcatttgcatgttagtccacagagttgcccagaaccctaaatttattcataagagaaaatattgattaattattggtcattcctcataagtgtagctgttgatgtgtgcgtctgattattgcttttttaattttatgaaaattgtgtaaaattacattttttttccaggggagaaaaaaacatcaaacaaaaacatctaaatcatcctttttgttctttttcagtttttaaccacttttaggttttccccttacagaaaccacagaaatattcccttagaataaaatagtatatttgtatttg

SEQ ID NO: 5841 - protein, 1224 aa, Homo sapiens
MNKMLPSVPATAVRVSCSGCKKILQKGQTAYQRKGSTQLFCSTLCLTGYTVPPARPPPPLTKKTCSSCSKDILNPKDVISAQFENTTTSKDFCSQSCLSTYELKKKPIVTINTNSISTKCSMCQKNAVIRHEVNYQNVVHKLCSDACFSKFRSANNLTMNCCENCGGYCYSGSGQCHMLQIEGQSKKFCSSSCITAYKQKSAKITPCALCKSLRSSAEMIENTNSLGKTELFCSVNCLSAYRVKMVTSAGVQVQCNSCKTSAIPQYHLAMSDGSIRNFCSYSCVVAFQNLFNKPTGMNSSVVPLSQGQVIVSIPTGSTVSAGGGSTSAVSPTSISSSAAAGLQRLAAQSQHVGFARSVVKLKCQHCNRLFATKPELLDYKGKMFQFCGKNCSDEYKKINNVMAMCEYCKIEKIVKETVRFSGADKSFCSEGCKLLYKHDLAKRWGNHCKMCSYCLQTSPKLVQNNLGGKVEEFCCEECMSKYTVLFYQMAKCDACKRQGKLSESLKWRGEMKHFCNLLCILMFCNQQSVCDPPSQNNAANISMVQAASAGPPSLRKDSTPVIANVVSLASAPAAQPTVNSNSVLQGAVPTVTAKIIGDASTQTDALKLPPSQPPRLLKNKALLCKPITQTKATSCKPHTQNKECQTEDTPSQPQIIVVPVPVPVFVPIPLHLYTQYAPVPFGIPVPMPVPMLIPSSMDSEDKVTESIEDIKEKLPTHPFEADLLEMAEMIAEDEEKKTLSQGESQTSEHELFLDTKIFEKDQGSTYSGDLESEAVSTPHSWEEELNHYALKSNAVQEADSELKQFSKGETEQDLEADFPSDSFDPLNKGQGIQARSRTRRRHRDGFPQPRRRGRKKSIVAVEPRSLIQGAFQGCSVSGMTLKYMYGVNAWKNWVQWKNAKEEQGDLKCGGVEQASSSPRSDPLGSTQDHALSQESSEPGCRVRSIKLKEDILSCTFAELSLGLCQFIQEVRRPNGEKYDPDSILYLCLGIQQYLFENGRIDNIFTEPYSRFMIELTKLLKIWEPTILPNGYMFSRIEEEHLWECKQLGAYSPIVLLNTLLFFNTKYFQLKNVTEHLKLSFAHVMRRTRTLKYSTKMTYLRFFPPLQKQESEPDKLTVGKRKRNEDDEVPVGVEMAENTDNPLRCPVRLYEFYLSKCSESVKQRNDVFYLQPERSCVPNSPMWYSTFPIDPGTLDTMLTRILMVREVHEELAKAKSEDSDVELSD

SEQ ID NO: 5842 - DNA, 6303 bp, Homo sapiens
caaaaaagtggtgcagtttttgatgaaattgtagagaactgagtatagtcatggccaacagcaaaaaactcaagagggggaactgaaaattagtgctgtgttttcagtcagtggcagccctcttgctccacagttgactactggctttcagccctcactggcgtcatctggcatgaataaaatgcttccttcagttccagccacagctgttcgagtttcctgttctggttgtaaaaaaatcctccagaaggggcaaactgcttatcagaggaaagggtctactcagctattctgctccacactgtgcctcactggatatacagttccacctgcccgcccaccgcctcctctcaccaagaaaacttgttcaagttgctcaaaagacattttaaatccaaaggatgtgatcagtgcccagtttgaaaacaccaccactagtaaagatttttgcagtcagtcatgtttgtcaacatatgaactgaaaaaaaaacctattgttaccataaatacaaatagtatttcaaccaaatgcagcatgtgtcagaagaatgctgttattcgacatgaagttaattaccagaatgtggtccataaactttgcagtgatgcctgcttctctaagtttcgttctgctaacaacctcaccatgaactgttgtgagaactgtgggggttactgttacagtgggtcgggacaatgccacatgcttcagatagagggacagtctaagaagttttgtagttcatcgtgtatcacggcatacaagcagaaatcagccaaaattacaccgtgtgcgctttgcaaatcattgagatcctcagcagaaatgattgaaaataccaatagcttggggaagacagagcttttctgttctgttaattgcttatctgcttacagagttaaaatggttacttctgcaggtgtacaagttcagtgtaacagttgtaaaacctcagcaattcctcagtatcacctagccatgtcagatggaagtatacgcaacttctgcagctacagctgtgtggtagctttccagaatttattcaacaaaccaactggaatgaattcttcagtagtgcccttgtctcagggccaagtaattgtaagcatccccacaggttccacagtgtcagccggaggaggtagcacatctgctgtttctcccacctccatcagtagctctgctgcagctggtctccagcgtctcgctgcccagtcccagcatgttgggtttgcacgaagtgttgtgaaactcaaatgtcaacactgtaaccgtctttttgccacaaaaccagaacttcttgactataagggcaaaatgtttcagttctgtggcaagaattgttctgatgaatataagaaaataaataatgtaatggcaatgtgtgaatattgtaaaattgagaaaattgtaaaggagactgttcggttctcaggtgctgacaagtcattctgtagtgaaggttgcaaattgctttataaacatgacttggcaaaacgctggggaaatcactgtaaaatgtgcagttattgtttacagacatctcccaaattggtacagaataatttaggagggaaagtggaagagttctgttgtgaagaatgcatgtccaaatatacagttttgttctatcagatggccaaatgtgatgcttgtaagcgacagggtaaactcagtgagtccttgaaatggcgaggggaaatgaaacatttctgtaacctgctttgtatcttgatgttctgtaatcagcaaagtgtatgtgacccgccttcacaaaataatgcagcaaatatttccatggttcaagctgcttcagcaggacccccatctctgagaaaagattcgactccagttatagccaatgtagtatcattggcaagtgcccctgctgctcagcctacagtgaattctaacagtgtcttacaaggtgcagttccaacagtaacagcgaaaatcatcggtgatgcaagtactcaaacagatgccctgaaactgccaccttcccaacctccaaggcttttgaagaacaaagctttattatgcaaacccatcacacagactaaagccacctcttgcaaaccacatacccaaaacaaagaatgccagacagaagacactccaagtcagccccagattattgtggtgccagttcccgtaccagtgtttgttcccatacctcttcacctttatactcaatatgctccagtcccatttggaattccagttccaatgcctgtccctatgcttattccatcttcaatggatagtgaagataaagtcacagagagtattgaagacattaaagaaaagcttcccacacatccatttgaagctgatctccttgagatggcagaaatgattgcagaagatgaagagaagaagactctatctcagggagagtcccaaacttctgaacacgaactctttctagacaccaagatatttgaaaaagaccaaggaagtacatacagtggtgatcttgaatcagaggcagtatctactccacatagctgggaggaagagctgaatcactatgccttaaagtcaaatgctgtgcaagaggctgattcagaattgaagcagttctcaaaaggggaaactgaacaggacctggaagcagattttccatcagactcctttgacccacttaataaaggacagggaatccaggcacgttcccgaacaagacgacgacacagagatggcttcccccaacccagacgaagaggacggaagaagtctatagtggctgtggagcccaggagtcttattcaaggagcctttcaaggctgctcagtgtccgggatgacactgaaatacatgtatggggtaaatgcttggaagaactgggttcagtggaaaaatgccaaggaagagcagggggatctaaaatgtggaggggttgaacaggcctcatctagcccacgttctgaccccttaggaagtactcaagaccatgcactctctcaagaatcctcagagccaggctgtagagtccgctctatcaagctgaaggaagacattctgtcctgcacttttgctgagttgagtttgggcttatgccagtttatccaagaggtgcggagaccaaatggtgaaaaatatgatccagacagtatcttatacttgtgccttggaattcaacagtacctgtttgaaaatggtagaatagataacatttttactgagccctattccagatttatgattgaacttaccaaactcttgaaaatatgggaacctacaatacttcctaatggttacatgttctctcgcattgaggaagagcatttgtgggagtgcaaacagctgggcgcttactcaccaatcgtccttttaaacaccctccttttcttcaataccaaatacttccaactaaagaatgttactgagcacttgaagctttcctttgcccatgtgatgagacggaccaggactctgaagtacagtaccaagatgacatatctgaggttcttcccacctttacagaagcaggagtcagaaccagataaactgactgttggcaagaggaaacgaaatgaagatgatgaggttccagtgggggtggagatggcagagaatactgacaatccactaagatgcccagtccgactttatgagttttacctgtcaaaatgttctgaaagtgtgaagcaaaggaatgatgtgttttaccttcaacctgagcgctcctgtgtcccgaatagccccatgtggtactccacattcccgatagaccctggaaccctggacaccatgttaacacgtattctcatggtgagggaggtacatgaagaacttgccaaagccaaatctgaagactctgatgttgaattatcagattaaaacggaagtgaggttcttattttcatacatattggtatgcaccaaactgtgaatgcatccagctgttggaaaatgatgtataagtctaagtcctcttgacttgaccataagatcatggaaaacagatgacttgtgaaccccacagtgtggatgtgcaaatgaaaattgaaggaaagaatatgaactgagaaatgttctttggcagtgatatagttcttagacatcttcagaatgactaatttctccgagtggtgcataatcttattttgtttgggagtaacaaatcgtggaatatttttaaggaaaactgttgtataaaactttaccatagtaaccttagaccttagagaggtagctttggagtgaaactttggctgcaataggctactttggcaagccctccgtaaaagtcagaggagagatcagtacagagctaagagtgacatcaaatgaggactgtgggacccagatttgaagacccaataaaaatactcaactttttaaaaaagatagtgaagtggtcttgattgattttgattttcactgccaagccaatcatgtgaaggacagaagcttttgccatgggcccctcacatcagggaaaatgaccttcactgctgttaacagtaatgtgtccctttcattttctggatcaagccttctcagcggtgggtctggatgtgggtaaactaaggtaaaggggatgatattccacaaactaattatgcacacagaaaatctgtggagcctatcagaccccaagtgtcttgaaatgtttgtagaaacccactaaaatgccccttctctgggtgtgggcccttattgcagctgtctcacagcctgagctgtggtacagagaaatgggggttctccttttattttcattttttttccccaatggcagcttttctcccgttgttttaccttcctatttcccaaacagttcctcttattttgtcttttgcaccagtttctggaggcccttgtcatttcaaaaaggatagtctcttttcttactctggcaaacctgtgagtgattccacaaagatacagtattacttagctatctgaattatgatagaaaaggtcctagttaggttcctatataaagcatttggaagatgaccttgttgcccttgaaacttgaaaatagggattctggggtgaggatacaaagacattgtcttgcatatccataagcaggtcttagagcattattccaaactctagctgtttcagtagttctatgaggattgcaagtcataggtgtgtgtggcatatcagtccatctccctcatctccattctcagtttcttccccacaaaatttggaatcaaagcttttatgacgtttgccaattgcagaacttcttcagctaaggttaatttgacgctatgataaaactgagagatgtcaaaaagcctcttagaaattttaatcttgaaagacttttcagggtatctcattttttaggtgggggtggcaggtgtatttcttttttaacaaataaaaggcatttaagtaaaactaaaatgaaaaaagtaggccttctgacattgtgtacttggtggttctgtccctctgcctgtaacaaatctcatttttgttaccaagaactgtatgaaagaagtaaatccaccccgattctgtatgattaattccatctgtgtttgtcatttctgactggaaaacttcttactccataccttgttcgatatggaggacaaataattggattgtctgataagtctgccaataaactatccagaaatagcaagtgtaatagtccccactatacgaattttatggtttgtataaacactaacattttccccttctgtagttgtatgaaaaaacaaatattgttagcatagtagataaattgttatgaaataccagaaaaaaaaatctgtatcttttactgagaacacccaatacccagataaatgactgtatcaggatttcatttgcatgttagtccacagagttgcccagaaccctaaatttattcataagagaaaatattgattaattattggtcattcctcataagtgtagctgttgatgtgtgcgtctgattattgcttttttaattttatgaaaattgtgtaaaattacattttttttccaggggagaaaaaaacatcaaacaaaaacatctaaatcatcctttttgttctttttcagtttttaaccacttttaggttttccccttacagaaaccacagaaatattcccttagaataaaatagtatatttgtatttgatgggtgagttcttcttctttacgtcttaaaagaatttgaaatctctttttctgattgaccttattggtatgacccagcaattagtaaaattacaaagaaagagagcagtttccgagaaagaaattttttttatgtagtccagtcaacatattttttcattgcaagttcttttatttccttttttccatc

SEQ ID NO: 5843 - protein, 1224 aa, Homo sapiens; identical to SEQ ID NO: 5841

SEQ ID NO: 5844 - DNA, 461 bp, Homo sapiens
cagaaaactccagaaacaaccaatactcattggcatacattaacggtctgcagtcagctctcttagtctctgtgatggctattgcaaacttctgctggattcctttagccttgactatcatcagtatgaattgaagaaacaagattgtcctttgaactaaaatcctgttcatcctcattgtcactaccaacgactggaattcctgcaagatccccagagttcaaaaaataatcatcttcatccagcaatgaattttcagatcctgtttgattcggcattccataagacatgctgtcaagggtaggagttaagttgtggtctatatcttcagacatttctgtatccatgataccaccaccttaaaaagtaaaatactgtttagacaaatgatagtgctaaagatgaccacaatgataaggtcagtctggtatttaaccaaataaatattttttcaaacaaaa

SEQ ID NO: 5845 - protein, 38 aa, Homo sapiens
RSAVSSLSLCDGYCKLLLDSFSLDYHQYELKKQDCPLN

SEQ ID NO: 5846 - DNA, 559 bp, Homo sapiens
taccctgtcggtcatttcaaaaaaatgaagcataaacgatgtgcatatcagtaacttccagaaaaacttctaaccatatttaaatttcttttaaacatctcttatctaactgaactaggaggaggagtatctttttctcctctccgggcagacaaagtgcagcatctgtgtgaggaactataaacattaccgcctaaagtaataaatgaatcatggtttgagtagcctgatagagtgtttcagaacaagagcattattcctctttttctgacttaaactgtttctaacaatcataaaattagtcaaagttattgtgtattcctcaaatatatcaggatgaccttattacagtcataagatcataccccttttttgttattaaacattccaatggacacaatgtggtagttcagagacattgagaaaataaaaatataggccaagcgcggtagctcacacctgtaatcccagcatcaggaggccgaggcaggagaatggcatgaacccgggaggcggagcttgcagtgagccgagatcacaccactgcactccagcctgg

SEQ ID NO: 5847 - protein, 42 aa, Homo sapiens
LPEKLLTIFKFLLNISYLTELGGGVSFSPLRADKVQHLCEEL

SEQ ID NO: 5848 - DNA, 315 bp, Homo sapiens
ggcagatcacctgaggtcaagagatcaagaccatcctggccaatacggtgaaaccccatctctactaaaaatacaaaaaaattagctgggccttaaataggagttttccagaaagttaaggagataagaattgggagcagcatggatcaaggaaatggaagtataaaattaggtattttttcactgctctcactatgcttagagtccaattagattacatcttattgtggtagtggattatatcttatgacagaatgagaagaaacaatctcattcaagttagtgaaaattcagaaatggtacagacaatctggg

SEQ ID NO: 5849 - DNA, 2989 bp, Homo sapiens
tgtgtcagagagggttgtttccttgaagggggaaacccttagcaaggtgcctcatgatatctgactccatattcactcacatgctgaactgggtgttagaacaccaaccttacagctctctgcgatgcaagaaggagactacacttaccagctcacagtgactgacacaataggacagcaggccactgctcaagtgactgttattgtgcaacctgaaaacaataagcctcctcaggcagatgcaggcccagataaagagctgacccttcctgtggatagcacaaccctggatggcagcaagagctcagatgatcagaaaattatctcatatctctgggaaaaaacacagggacctgatggggtgcagctcgagaatgctaacagcagtgttgctactgtgactgggctgcaagtggggacctatgtgttcaccttgactgtcaaagatgagaggaacctgcaaagccagagctctgtgaatgtcattgtcaaagaagaaataaacaaaccacctatagccaagataactgggaatgtggtgattaccctacccacgagcacagcagagctggatggctctaagtcctcagatgacaagggaatagtcagctacctctggactcgagatgaggggagcccagcagcaggggaggtgttaaatcactctgaccatcaccctatcctttttctttcaaacctggttgagggaacctacacttttcacctgaaagtgaccgatgcaaagggtgagagtgacacagaccggaccactgtggaggtgaaacctgatcccaggaaaaacaacctggtggagatcatcttggatatcaacgtcagtcagctaactgagaggctgaaggggatgttcatccgccagattggggtcctcctgggggtgctggattccgacatcattgtgcaaaagattcagccgtacacggagcagagcaccaaaatggtattttttgttcaaaacgagcctccccaccagatcttcaaaggccatgaggtggcagcgatgctcaagagtgagctgcggaagcaaaaggcagactttttgatattcagagccttggaagtcaacactgtcacatgtcagctgaactgttccgaccatggccactgtgactcgttcaccaaacgctgtatctgtgaccctttttggatggagaatttcatcaaggtgcagctgagggatggagacagcaactgtgagtggagcgtgttatatgttatcattgctacctttgtcattgttgttgccttgggaatcctgtcttggactgtgatctgttgttgtaagaggcaaaaaggaaaacccaagaggaaaagcaagtacaagatcctggatgccacggatcaggaaagcctggagctgaagccaacctcccgagcaggcatcaaacagaaaggccttttgctaagtagcagcctgatgcactccgagtcagagctggacagcgatgatgccatctttacatggccagaccgagagaagggcaaactcctgcatggtcagaatggctctgtacccaacgggcagacccctctgaaggccaggagcccgcgggaggagatcctgtagccacctggtctgtctcctcagggcagggcccagcacactgcccggccagtcctcctacctcccgagtctgcgggcagctgctgtcccagcatctgctggtcatttcgccctgacagtcccaaccagaacccctgggacttgaatccagagacgtcctccaggaacccctcaacgaagctgtgaatgaagaggtttcctctttaaacctgtctggtgggcccccagatatcctcacctcagggcctcctttttttgcaaactcctcccctcccccgagggcagacccagccagctgctaagctctgcagctccccagtggacagtgtcattgtgcccagagtgctgcaaggtgaggcctgctgtgctgcccgcacacctgagtgcaaaaccaagcactgtgggcatggtgtttccctctctggggtagagtacgccctctcgctgggcaaagaggaagtggcacccctcccctcaccacagatgctgagatggtagcatagaaatgatggccgggcgcggtggctcacgcctgtaatcccagcactttgggaggccgaggcgggcggatcatgaggtcaggagatcaagaccaccctggctaacacggtgaaaccccatctctactaaaaataaaaaaaaaaattagccgggtttggtggcgtatgcctgtaatcccagctactcgggaggctgaggcaggagaattgcttaaacctgggaggtggaggctgcagtgagccaagatcgtgccactgcactccagcctgagtgacagagcaagactccgtcaaaaaaaaaaaaaaaaaaaaagaaatgatatctggcccccccttaacactggagccccactcccttctcccatccggcccgagattagggaggattgactgtgtcagggatggcgggtggcctctctcgctgccagggcccttgtcagagcagccaggctggacagacggcctccctcctctccatctgaccggcacctgctgcttcggggcttaggccaccgctccctgtccccagaggagatagccccagatggactggaatgttgtggcatgagagcgcatgtgtgcgatggccccgctgtggtcccctctctgtccctccatctgtatgtgttctgtgtcccttgcatgtgtgcgtgttagagtgagcgcgtatgcatcaactcattgggctcttggctgctcacaaggcaaatttgacttggaaagactttcatctccttggaaccaagacttcctgagtccccctcaccctggccctgttccaccatggttatctgggtattggggaatggaaactttgggggagtgactttttaaagagacacttataatttctactactgcactactgtccattgtgggatgattaaacatggtatttaactgtgca

SEQ ID NO: 5850 - protein, 486 aa, Homo sapiens
MQEGDYTYQLTVTDTIGQQATAQVTVIVQPENNKPPQADAGPDKELTLPVDSTTLDGSKSSDDQKIISYLWEKTQGPDGVQLENANSSVATVTGLQVGTYVFTLTVKDERNLQSQSSVNVIVKEEINKPPIAKITGNVVITLPTSTAELDGSKSSDDKGIVSYLWTRDEGSPAAGEVLNHSDHHPILFLSNLVEGTYTFHLKVTDAKGESDTDRTTVEVKPDPRKNNLVEIILDINVSQLTERLKGMFIRQIGVLLGVLDSDIIVQKIQPYTEQSTKMVFFVQNEPPHQIFKGHEVAAMLKSELRKQKADFLIFRALEVNTVTCQLNCSDHGHCDSFTKRCICDPFWMENFIKVQLRDGDSNCEWSVLYVIIATFVIVVALGILSWTVICCCKRQKGKPKRKSKYKILDATDQESLELKPTSRAGIKQKGLLLSSSLMHSESELDSDDAIFTWPDREKGKLLHGQNGSVPNGQTPLKARSPREEIL

SEQ ID NO: 5851 - DNA, 4779 bp, Homo sapiens
gtttccggccgccgtcgctgtccagggaggctgaggcgagaggtagctgtccgggtggggagcccgcactaccttcttcctcttcctcctcctcctccgggtgaggggagcgaaggttgggggtccccgagcccatggaccaggaggaggcggaggccgccgagagccggggccccgctatgtggccctgagccccgtgtactggttctgcctgtctggagggccatggagaagaggctgggagtcaagccaaatcctgcttcctggattttatcaggatattattggcagacatctgcgaagtggttgagaagcctgtacctgttttatacttgcttttgcttcagcgttctgtggttgtcaacagatgccagtgagagcaggtgccagcaggggaagacacaatttggagttggcctgagatctgggggagaaaatcacctctggcttcttgaaggaaccccctctctccagtcatgttgggctgcctgctgccaggactctgcctgccatgtcttttggtggctagaagggatgtgcattcaggcagactgcagcaggccccagagctgccgggcttttaggacacactcctccaattccatgctggtgtttttaaaaaaattccaaactgcagatgatttgggctttctacctgaagatgatgtaccacatcttctggggctaggttggaactgggcatcttggaggcagagcccacccagagctgcactcagacctgctgtatcttccagtgaccagcagagcttaatcaggaagcttcagaagagaggtagtcccagtgacgtagttacacctatagtgacacagcattctaaagtgaatgactccaacgaattaggtggtctgactaccagtggctctgcagaggtccacaaggcgattacaatttccagtcccctaaccacagacctgactgcagagctgtctggtgggccaaagaatgtatcagtgcaacctgaaatatcagagggtcttgctactacgcccagcactcaacaagtaaaaagttctgagaaaacccagattgctgtcccccagccagtggctccctcctacagttatgctacccctaccccccaggcctctttccagagcacctcagcaccatacccagttataaaggaactggtggtatctgctggagagagtgtccagataaccctgcctaagaatgaagttcaattaaatgcatatgttctccaagaaccacctaaaggagaaacctacacctacgactggcagctgattactcatcctagagactacagtggagaaatggaagggaaacattcccagatcctcaaactatcgaagctcactccaggcctgtatgaattcaaagtgattgtagagggtcaaaatgcccatggggaaggctatgtgaacgtgacagtcaagccagagccccgtaagaatcggccccccattgctattgtgtcacctcagttccaggagatctctttgccaaccacttctacagtcattgatggcagtcaaagcactgatgatgataaaatcgttcagtaccattgggaagaacttaaggggcctctaagagaagagaagatttctgaagatacagccatattaaaactaagtaaactcgtccctgggaactacactttcagcttgactgtagtagactctgatggagctaccaactctactactgcaaacctgacagtgaacaaagctgtggattacccccctgtggccaacgcaggccccaaccaagtgatcaccctgccccaaaactccatcaccctctttgggaaccagagcactgatgatcatggcatcaccagctatgagtggtcactcagcccaagcagcaaagggaaagtggtggagatgcagggtgttagaacaccaaccttacagctctctgcgatgcaagaaggagactacacttaccagctcacagtgactgacacaataggacagcaggccactgctcaagtgactgttattgtgcaacctgaaaacaataagcctcctcaggcagatgcaggcccagataaagagctgacccttcctgtggatagcacaaccctggatggcagcaagagctcagatgatcagaaaattatctcatatctctgggaaaaaacacagggacctgatggggtgcagctcgagaatgctaacagcagtgttgctactgtgactgggctgcaagtggggacctatgtgttcaccttgactgtcaaagatgagaggaacctgcaaagccagagctctgtgaatgtcattgtcaaagaagaaataaacaaaccacctatagccaagataactgggaatgtggtgattaccctacccacgagcacagcagagctggatggctctaagtcctcagatgacaagggaatagtcagctacctctggactcgagatgaggggagcccagcagcaggggaggtgttaaatcactctgaccatcaccctatcctttttctttcaaacctggttgagggaacctacacttttcacctgaaagtgaccgatgcaaagggtgagagtgacacagaccggaccactgtggaggtgaaacctgatcccaggaaaaacaacctggtggagatcatcttggatatcaacgtcagtcagctaactgagaggctgaaggggatgttcatccgccagattggggtcctcctgggggtgctggattccgacatcattgtgcaaaagattcagccgtacacggagcagagcaccaaaatggtattttttgttcaaaacgagcctccccaccagatcttcaaaggccatgaggtggcagcgatgctcaagagtgagctgcggaagcaaaaggcagactttttgatattcagagccttggaagtcaacactgtcacatgtcagctgaactgttccgaccatggccactgtgactcgttcaccaaacgctgtatctgtgaccctttttggatggagaatttcatcaaggtgcagctgagggatggagacagcaactgtgagtggagcgtgttatatgttatcattgctacctttgtcattgttgttgccttgggaatcctgtcttggactgtgatctgttgttgtaagaggcaaaaaggaaaacccaagaggaaaagcaagtacaagatcctggatgccacggatcaggaaagcctggagctgaagccaacctcccgagcaggcatcaaacagaaaggccttttgctaagtagcagcctgatgcactccgagtcagagctggacagcgatgatgccatctttacatggccagaccgagagaagggcaaactcctgcatggtcagaatggctctgtacccaacgggcagacccctctgaaggccaggagcccgcgggaggagatcctgtagccacctggtctgtctcctcagggcagggcccagcacactgcccggccagtcctcctacctcccgagtctgcgggcagctgctgtcccagcatctgctggtcatttcgccctgacagtcccaaccagaacccctgggacttgaatccagagacgtcctccaggaacccctcaacgaagctgtgaatgaagaggtttcctctttaaacctgtctggtgggcccccagatatcctcacctcagggcctcctttttttgcaaactcctcccctcccccgagggcagacccagccagctgctaagctctgcagctccccagtggacagtgtcattgtgcccagagtgctgcaaggtgaggcctgctgtgctgcccgcacacctgagtgcaaaaccaagcactgtgggcatggtgtttccctctctggggtagagtacgccctctcgctgggcaaagaggaagtggcacccctcccctcaccacagatgctgagatggtagcatagaaatgatggccgggcgcggtggctcacgcctgtaatcccagcactttgggaggccgaggcgggcggatcatgaggtcaggagatcaagaccaccctggctaacacggtgaaaccccatctctactaaaaataaaaaaaaaaattagccgggtttggtggcgtatgcctgtaatcccagctactcgggaggctgaggcaggagaattgcttaaacctgggaggtggaggctgcagtgagccaagatcgtgccactgcactccagcctgagtgacagagcaagactccgtcaaaaaaaaaaaaaaaaaaaaagaaatgatatctggcccccccttaacactggagccccactcccttctcccatccggcccgagattagggaggattgactgtgtcagggatggcgggtggcctctctcgctgccagggcccttgtcagagcagccaggctggacagacggcctccctcctctccatctgaccggcacctgctgcttcggggcttaggccaccgctccctgtccccagaggagatagccccagatggactggaatgttgtggcatgagagcgcatgtgtgcgatggccccgctgtggtcccctctctgtccctccatctgtatgtgttctgtgtcccttgcatgtgtgcgtgttagagtgagcgcgtatgcatcaactcattgggctcttggctgctcacaaggcaaatttgacttggaaagactttcatctccttggaaccaagacttcctgagtccccctcaccctggccctgttccaccatggttatctgggtattggggaatggaaactttgggggagtgactttttaaagagacacttataatttctactactgcactactgtccattgtgggatgattaaacatggtatttaactgtgca

SEQ ID NO: 5852 - protein, 1049 aa, Homo sapiens; identical to SEQ ID NO: 122

SEQ ID NO: 5853 - DNA, 4164 bp, Homo sapiens
gtttccggccgccgtcgctgtccagggaggctgaggcgagaggtagctgtccgggtggggagcccgcactaccttcttcctcttcctcctcctcctccgggtgaggggagcgaaggttgggggtccccgagcccatggaccaggaggaggcggaggccgccgagagccggggccccgctatgtggccctgagccccgtgtactggttctgcctgtctggagggccatggagaagaggctgggagtcaagccaaatcctgcttcctggattttatcaggatattattggcagacatctgcgaagtggttgagaagcctgtacctgttttatacttgcttttgcttcagcgttctgtggttgtcaacagatgccagtgagagcaggtgccagcaggggaagacacaatttggagttggcctgagatctgggggagaaaatcacctctggcttcttgaaggaaccccctctctccagtcatgttgggctgcctgctgccaggactctgcctgccatgtcttttggtggctagaagggatgtgcattcaggcagactgcagcaggccccagagctgccgggcttttaggacacactcctccaattccatgctggtgtttttaaaaaaattccaaactgcagatgatttgggctttctacctgaagatgatgtaccacatcttctggggctaggttggaactgggcatcttggaggcagagcccacccagagctgcactcagacctgctgtatcttccagtgaccagcagagcttaatcaggaagcttcagaagagaggtagtcccagtgacgtagttacacctatagtgacacagcattctaaagtgaatgactccaacgaattaggtggtctgactaccagtggctctgcagaggtccacaaggcgattacaatttccagtcccctaaccacagacctgactgcagagctgtctggtgggccaaagaatgtatcagtgcaacctgaaatatcagagggtcttgctactacgcccagcactcaacaagtaaaaagttctgagaaaacccagattgctgtcccccagccagtggctccctcctacagttatgctacccctaccccccaggcctctttccagagcacctcagcaccatacccagttataaaggaactggtggtatctgctggagagagtgtccagataaccctgcctaagaatgaagttcaattaaatgcatatgttctccaagaaccacctaaaggagaaacctacacctacgactggcagctgattactcatcctagagactacagtggagaaatggaagggaaacattcccagatcctcaaactatcgaagctcactccaggcctgtatgaattcaaagtgattgtagagggtcaaaatgcccatggggaaggctatgtgaacgtgacagtcaagccagagccccgtaagaatcggccccccattgctattgtgtcacctcagttccaggagatctctttgccaaccacttctacagtcattgatggcagtcaaagcactgatgatgataaaatcgttcagtaccattgggaagaacttaaggggcctctaagagaagagaagatttctgaagatacagccatattaaaactaagtaaactcgtccctgggaactacactttcagcttgactgtagtagactctgatggagctaccaactctactactgcaaacctgacagtgaacaaagctgtggattacccccctgtggccaacgcaggccccaaccaagtgatcaccctgccccaaaactccatcaccctctttgggaaccagagcactgatgatcatggcatcaccagctatgagtggtcactcagcccaagcagcaaagggaaagtggtggagatgcagggtgttagaacaccaaccttacagctctctgcgatgcaagaaggagactacacttaccagctcacagtgactgacacaataggacagcaggccactgctcaagtgactgttattgtgcaacctgaaaacaataagcctcctcaggcagatgcaggcccagataaagagctgacccttcctgtggatagcacaaccctggatggcagcaagagctcagatgatcagaaaattatctcatatctctgggaaaaaacacagggacctgatggggtgcagctcgagaatgctaacagcagtgttgctactgtgactgggctgcaagtggggacctatgtgttcaccttgactgtcaaagatgagaggaacctgcaaagccagagctctgtgaatgtcattgtcaaagaagaaataaacaaaccacctatagccaagataactgggaatgtggtgattaccctacccacgagcacagcagagctggatggctctaagtcctcagatgacaagggaatagtcagctacctctggactcgagatgaggggagcccagcagcaggggaggtgttaaatcactctgaccatcaccctatcctttttctttcaaacctggttgagggaacctacacttttcacctgaaagtgaccgatgcaaagggtgagagtgacacagaccggaccactgtggaggtgaaacctgatcccaggaaaaacaacctggtggagatcatcttggatatcaacgtcagtcagctaactgagaggctgaaggggatgttcatccgccagattggggtcctcctgggggtgctggattccgacatcattgtgcaaaagattcagccgtacacggagcagagcaccaaaatggtattttttgttcaaaacgagcctccccaccagatcttcaaaggccatgaggtggcagcgatgctcaagagtgagctgcggaagcaaaaggcagactttttgatattcagagccttggaagtcaacactgtcacatgtcagctgaactgttccgaccatggccactgtgactcgttcaccaaacgctgtatctgtgaccctttttggatggagaatttcatcaaggtgcagctgagggatggagacagcaactgtgagtggagcgtgttatatgttatcattgctacctttgtcattgttgttgccttgggaatcctgtcttggactgtgatctgttgttgtaagaggcaaaaaggaaaacccaagaggaaaagcaagtacaagatcctggatgccacggatcaggaaagcctggagctgaagccaacctcccgagcaggcatcaaacagaaaggccttttgctaagtagcagcctgatgcactccgagtcagagctggacagcgatgatgccatctttacatggccagaccgagagaagggcaaactcctgcatggtcagaatggctctgtacccaacgggcagacccctctgaaggccaggagcccgcgggaggagatcctgtagccacctggtctgtctcctcagggcagggcccagcacactgcccggccagtcctcctacctcccgagtctgcgggcagctgctgtcccagcatctgctggtcatttcgccctgacagtcccaaccagaacccctgggacttgaatccagagacgtcctccaggaacccctcaacgaagctgtgaatgaagaggtttcctctttaaacctgtctggtgggcccccagatatcctcacctcagggcctcctttttttgcaaactcctcccctcccccgagggcagacccagccagctgctaagctctgcagctccccagtggacagtgtcattgtgcccagagtgctgcaaggtgaggcctgctgtgctgcccgcacacctgagtgcaaaaccaagcactgtgggcatggtgtttccctctctggggtagagtacgccctctcgctgggcaaagaggaagtggcacccctcccctcaccacagatgctgagatggtagcatagaaatgatggccgggcgcggtggctcacgcctgtaatcccagcactttgggaggccgaggcgggcggatcatgaggtcaggagatcaagaccaccctggctaacacggtgaaaccccatctctactaaaaataaaaaaaaaaattagccgggtttggtggcgtatgcctgtaatcccagctactcgggaggctgaggcaggagaattgcttaaacctgggaggtggaggctgcagtgagccaagatcgtgccactgcactccagcctgagtgacagagcaagactccgtc

SEQ ID NO: 5854 - protein, 1049 aa, Homo sapiens; identical to SEQ ID NO: 122

SEQ ID NO: 5855 - DNA, 5692 bp, Homo sapiens; identical to SEQ ID NO: 123

SEQ ID NO: 5856 - protein, 996 aa, Homo sapiens; identical to SEQ ID NO: 124

SEQ ID NO: 5857 - DNA, 465 bp, Homo sapiens
aaaaaaacaaaaaaccaaaaacctttcactataagaaatgtgggaaagccttcgggtacagccaaggccttgctgaaaatcagaaaatccatatcttatgaatgtaatgaatgtgggaagcttttccccaaagttcagcccttaaacaacataagaaaatttataacaaagtcatcaagccaggcatggtggctcatgcctataatcccagcactttgggaagatgaggtgggaggaccacttgagcccatgagttcaagaccagactgggcaacatagtgagaccccatctctacaaaagataaaaattactaaaaaataacatttttaaaaagaatgggtcatcaaatgtagtgtggtaaacatgcaaaagtagtttatttcttctgaccatcaaagatggaaaaagcaagttgcagaaaatctatatattatgttcttatttatatttttaacaatgaagct

SEQ ID NO: 5858 - protein, 38 aa, Homo sapiens
MWEAFPQSSALKQHKKIYNKVIKPGMVAHAYNPSTLGR

SEQ ID NO: 5859 - DNA, 3684 bp, Homo sapiens
cctcccccgggaagggcaatgccggccgcgagaccaagggggaggaggggcagtgctgggcgggtaaaactacgcacaagcgaaggaatctgggcccccagcctctcgccgcccgctctccagaggcagtctgcaccttgcctccttcgctcgagccccagcccccagactcgggcaatacccacaagcaagatggcggcaacggcggcaccccctactgcttagcaccctgacttgccattggccagagcccggagtgaagcagccgcggattcgtcaagagcggtgcgggggtgggggtggagctgcagcagcctggagccaggagtgggcaacgcggcgtgagcagcggcccgaggctcccggagcatcgcgctgggagaagacttcgccgctcggggccgcagcctgttgggcaaggcgagcatcatggcctcggattgcgagccagctctgaaccaggcagagggccgaaaccccaccctggagcgctacctgggagccctccgtgaggccaagaatgacagcgagcagtttgcagccctgctgctagtgaccaaggcagtcaaagcaggtgacatagatgccaaaactcggcggcggatcttcgatgctgtcggcttcaccttccccaatcgtctcctgaccaccaaggaggcgccggatggctgccctgaccatgttctgcgggctttgggtgtggccctgctggcctgcttctgcagtgaccctgaactggccgcccatccccaagtcctgaacaagattcccattcttagcaccttcctcacagcccggggggacccggacgatgctgcccgccgctccatgattgatgacacctaccagtgcctgacggctgtagcaggcacacccagagggcctcggcacctcattgctggtggcaccgtgtctgccctatgccaggcatacctggggcacggctatggctttgaccaggccctggcactcctggtggggctgctggctgctgccgagacacagtgctggaaggaggcggagcccgacctgctggccgtgttgcggggcctcagtgaggatttccagaaagctgaggatgccagcaagtttgagctctgccagctgctgcccctctttttgcccccgacaaccgtgccccctgaatgctaccgggatctgcaggccgggctggcacgcatcctgggaagcaagctgagctcctggcagcgcaaccctgcactgaagctggcagcccgcctggcacacgcctgcggctccgactggatcccggcgggcagctccgggagcaagttcctggccctgctggtgaatctggcgtgcgtggaagtgcggctggcactggaggagacgggcacggaggtgaaagaggatgtggtgaccgcctgctatgccctcatggagttggggatccaggaatgcactcgctgtgagcagtcactgcttaaggagccacagaaggtgcagctcgtgagcgtcatgaaggaggccataggggctgttatccactacctgctgcaggtggggtcagagaagcagaaggagccctttgtgtttgcctcggtgcggatcctgggtgcctggctggccgaggagacctcatccttgcgtaaggaggtgtgccagctgctgcccttcctcgtccgctatgccaagaccctctacgaggaggccgaggaggccaatgacctttcccagcaggtggccaacctggccatctcccccaccaccccagggcccacctggccaggagacgctctccggctcctcctgcctggctggtgccacctgaccgttgaagatgggccccgggagatcctgatcaaggaaggggccccctcgcttctgtgcaagtatttcctgcagcagtgggaactcacatcccctggccacgacacctcggtgctgcctgacagcgtggagattggcctgcagacctgctgccacatcttcctcaacctcgtggtcaccgcaccggggctgatcaagcgtgacgcctgcttcacatctctaatgaacaccctcatgacgtcgctaccagcactagtgcagcaacagggaaggctgcttctggctgctaatgtggccaccctggggctcctcatggcccggctccttagcacctctccagctcttcagggaacaccagcatcccgagggttcttcgcagctgccatcctcttcctatcacagtcccacgtggcgcgggccaccccgggctcagaccaggcagtgctagccctgtcccctgagtatgagggcatctgggccgacctgcaggagctctggttcctgggcatgcaggccttcaccggctgtgtgcctctgctgccctggctggcccccgctgccctgcgctcccgctggccgcaggagctgctccagctgctaggcagtgtcagccccaactctgtcaagcccgagatggtggccgcctatcagggtgtcctggtggagctggcgcgggccaaccggctgtgccgggaggccatgaggctgcaggcgggcgaggagacggccagccactaccgcatggctgccttggagcagtgcctgtcagagccctgaggggtgtccaccggggacagacccaggggcgggcagagagggaaggagggaggaggcatcttccctgaagcccccaatctggcccccccctccccagacttcctccccaaaacaccccagctttctggcttttctgagggcaagggcatggtgcccacccctcaagtgtaaggaactgcgttccgcccctcaggcccccatgggggcagggatcggcttggaaatcaacgtggttgtccccgccaggccggggaaggttggagcagcccccagggaggggggcactaggtgtcattgtgcccgatgtctggctcccctgcaggagggaggctccagggtaagacagggctggcaggagcagactgcctcagcccatgtgccctgccggccagggcgtgggctcccctcggctgtggtgcctcctctggccccccaggtccacgtcctttaaattggccctttggctcttgcccttggctcccttgggcagacagcaggcttaggccattgatatcgcagttcttcctatcagcttcagtgacccagggtctgaactgcctccatcctagggcaacctggggcagacaggcctggtggggggtggggaaacctccttccacctgagcttgcttgaagggacccagagtctttgggcccagatctttaaacctttgtgtcgtgttgcagcagagtgacgatgggggttggggggttatttattttgcctgtccttatccctgcttggacacctgagcatctgattcctgtccccctggtgccatctggcctggctggagccaggaacaggagggacacttccccagaatccgcatgtttccccagtgattacactccactgccaccgtggtgcctggctttaactcccacccctgctatgactcctctctgcagagacgcgactggcggctccagcagggactacctttcttataaacccagggggaccacacacacacacacacacacacacacacacacacacacacacacacacactcttgatcccttgcttccctcccccagtgcgttctgtgatcgccaagttcaaagctgtgcacatgtggacactcaataaatgttcattggtgacgagaa

SEQ ID NO: 5860 - protein, 712 aa, Homo sapiens; identical to SEQ ID NO: 128

SEQ ID NO: 5861 - DNA, 3431 bp, Homo sapiens
ccaggagtgggcaacgcggcgtgagcagcggcccgaggctcccggagcatcgcgctgggagaagacttcgccgctcggggccgcagcctgtgtgatctcatcgccgccctgtcgtgacttcatcaatgtcgtgttgtgacctggctgcggcgggacagttgggcaaggcgagcatcatggcctcggattgcgagccagctctgaaccaggcagagggccgaaaccccaccctggagcgctacctgggagccctccgtgaggccaagaatgacagcgagcagtttgcagccctgctgctagtgaccaaggcagtcaaagcaggtgacatagatgccaaaactcggcggcggatcttcgatgctgtcggcttcaccttccccaatcgtctcctgaccaccaaggaggcgccggatggctgccctgaccatgttctgcgggctttgggtgtggccctgctggcctgcttctgcagtgaccctgaactggccgcccatccccaagtcctgaacaagattcccattcttagcaccttcctcacagcccggggggacccggacgatgctgcccgccgctccatgattgatgacacctaccagtgcctgacggctgtagcaggcacacccagagggcctcggcacctcattgctggtggcaccgtgtctgccctatgccaggcatacctggggcacggctatggctttgaccaggccctggcactcctggtggggctgctggctgctgccgagacacagtgctggaaggaggcggagcccgacctgctggccgtgttgcggggcctcagtgaggatttccagaaagctgaggatgccagcaagtttgagctctgccagctgctgcccctctttttgcccccgacaaccgtgccccctgaatgctaccgggatctgcaggccgggctggcacgcatcctgggaagcaagctgagctcctggcagcgcaaccctgcactgaagctggcagcccgcctggcacacgcctgcggctccgactggatcccggcgggcagctccgggagcaagttcctggccctgctggtgaatctggcgtgcgtggaagtgcggctggcactggaggagacgggcacggaggtgaaagaggatgtggtgaccgcctgctatgccctcatggagttggggatccaggaatgcactcgctgtgagcagtcactgcttaaggagccacagaaggtgcagctcgtgagcgtcatgaaggaggccataggggctgttatccactacctgctgcaggtggggtcagagaagcagaaggagccctttgtgtttgcctcggtgcggatcctgggtgcctggctggccgaggagacctcatccttgcgtaaggaggtgtgccagctgctgcccttcctcgtccgctatgccaagaccctctacgaggaggccgaggaggccaatgacctttcccagcaggtggccaacctggccatctcccccaccaccccagggcccacctggccaggagacgctctccggctcctcctgcctggctggtgccacctgaccgttgaagatgggccccgggagatcctgatcaaggaaggggccccctcgcttctgtgcaagtatttcctgcagcagtgggaactcacatcccctggccacgacacctcggtgctgcctgacagcgtggagattggcctgcagacctgctgccacatcttcctcaacctcgtggtcaccgcaccggggctgatcaagcgtgacgcctgcttcacatctctaatgaacaccctcatgacgtcgctaccagcactagtgcagcaacagggaaggctgcttctggctgctaatgtggccaccctggggctcctcatggcccggctccttagcacctctccagctcttcagggaacaccagcatcccgagggttcttcgcagctgccatcctcttcctatcacagtcccacgtggcgcgggccaccccgggctcagaccaggcagtgctagccctgtcccctgagtatgagggcatctgggccgacctgcaggagctctggttcctgggcatgcaggccttcaccggctgtgtgcctctgctgccctggctggcccccgctgccctgcgctcccgctggccgcaggagctgctccagctgctaggcagtgtcagccccaactctgtcaagcccgagatggtggccgcctatcagggtgtcctggtggagctggcgcgggccaaccggctgtgccgggaggccatgaggctgcaggcgggcgaggagacggccagccactaccgcatggctgccttggagcagtgcctgtcagagccctgaggggtgtccaccggggacagacccaggggcgggcagagagggaaggagggaggaggcatcttccctgaagcccccaatctggcccccccctccccagacttcctccccaaaacaccccagctttctggcttttctgagggcaagggcatggtgcccacccctcaagtgtaaggaactgcgttccgcccctcaggcccccatgggggcagggatcggcttggaaatcaacgtggttgtccccgccaggccggggaaggttggagcagcccccagggaggggggcactaggtgtcattgtgcccgatgtctggctcccctgcaggagggaggctccagggtaagacagggctggcaggagcagactgcctcagcccatgtgccctgccggccagggcgtgggctcccctcggctgtggtgcctcctctggccccccaggtccacgtcctttaaattggccctttggctcttgcccttggctcccttgggcagacagcaggcttaggccattgatatcgcagttcttcctatcagcttcagtgacccagggtctgaactgcctccatcctagggcaacctggggcagacaggcctggtggggggtggggaaacctccttccacctgagcttgcttgaagggacccagagtctttgggcccagatctttaaacctttgtgtcgtgttgcagcagagtgacgatgggggttggggggttatttattttgcctgtccttatccctgcttggacacctgagcatctgattcctgtccccctggtgccatctggcctggctggagccaggaacaggagggacacttccccagaatccgcatgtttccccagtgattacactccactgccaccgtggtgcctggctttaactcccacccctgctatgactcctctctgcagagacgcgactggcggctccagcagggactacctttcttataaacccagggggaccacacacacacacacacacacacacacacacacacacacacacacacacactcttgatcccttgcttccctcccccagtgcgttctgtgatcgccaagttcaaagctgtgcacatgtggacactcaataaatgttcattggtgacgagaa

SEQ ID NO: 5862 - protein, 729 aa, Homo sapiens; identical to SEQ ID NO: 126

SEQ ID NO: 5863 - DNA, 3685 bp, Homo sapiens
gcgtgagcagcggcccgaggctcccggagcatcgcgctgggagaagacttcgccgctcggggccgcagcctggtgagctcagcccccttcgggccctcccctgcatcccagccggggcctctccgagccggcgctgatcgatgccgacacaccccggggaccctatcgcgactccatcgcgccatatcgcgacaccatcgtgccctgtcgagactccattttgtcacagcccttttcaatatatatcttttttttttttaatttgccctgtcatctttgggggctgtctcccatgtcgtgattttgacgtgatctctccgtgacatcaccgcgccatcgtgaagtgtgatctcatcgccgccctgtcgtgacttcatcaatgtcgtgttgtgacctggctgcggcgggacagttgggcaaggcgagcatcatggcctcggattgcgagccagctctgaaccaggcagagggccgaaaccccaccctggagcgctacctgggagccctccgtgaggccaagaatgacagcgagcagtttgcagccctgctgctagtgaccaaggcagtcaaagcaggtgacatagatgccaaaactcggcggcggatcttcgatgctgtcggcttcaccttccccaatcgtctcctgaccaccaaggaggcgccggatggctgccctgaccatgttctgcgggctttgggtgtggccctgctggcctgcttctgcagtgaccctgaactggccgcccatccccaagtcctgaacaagattcccattcttagcaccttcctcacagcccggggggacccggacgatgctgcccgccgctccatgattgatgacacctaccagtgcctgacggctgtagcaggcacacccagagggcctcggcacctcattgctggtggcaccgtgtctgccctatgccaggcatacctggggcacggctatggctttgaccaggccctggcactcctggtggggctgctggctgctgccgagacacagtgctggaaggaggcggagcccgacctgctggccgtgttgcggggcctcagtgaggatttccagaaagctgaggatgccagcaagtttgagctctgccagctgctgcccctctttttgcccccgacaaccgtgccccctgaatgctaccgggatctgcaggccgggctggcacgcatcctgggaagcaagctgagctcctggcagcgcaaccctgcactgaagctggcagcccgcctggcacacgcctgcggctccgactggatcccggcgggcagctccgggagcaagttcctggccctgctggtgaatctggcgtgcgtggaagtgcggctggcactggaggagacgggcacggaggtgaaagaggatgtggtgaccgcctgctatgccctcatggagttggggatccaggaatgcactcgctgtgagcagtcactgcttaaggagccacagaaggtgcagctcgtgagcgtcatgaaggaggccataggggctgttatccactacctgctgcaggtggggtcagagaagcagaaggagccctttgtgtttgcctcggtgcggatcctgggtgcctggctggccgaggagacctcatccttgcgtaaggaggtgtgccagctgctgcccttcctcgtccgctatgccaagaccctctacgaggaggccgaggaggccaatgacctttcccagcaggtggccaacctggccatctcccccaccaccccagggcccacctggccaggagacgctctccggctcctcctgcctggctggtgccacctgaccgttgaagatgggccccgggagatcctgatcaaggaaggggccccctcgcttctgtgcaagtatttcctgcagcagtgggaactcacatcccctggccacgacacctcggtgctgcctgacagcgtggagattggcctgcagacctgctgccacatcttcctcaacctcgtggtcaccgcaccggggctgatcaagcgtgacgcctgcttcacatctctaatgaacaccctcatgacgtcgctaccagcactagtgcagcaacagggaaggctgcttctggctgctaatgtggccaccctggggctcctcatggcccggctccttagcacctctccagctcttcagggaacaccagcatcccgagggttcttcgcagctgccatcctcttcctatcacagtcccacgtggcgcgggccaccccgggctcagaccaggcagtgctagccctgtcccctgagtatgagggcatctgggccgacctgcaggagctctggttcctgggcatgcaggccttcaccggctgtgtgcctctgctgccctggctggcccccgctgccctgcgctcccgctggccgcaggagctgctccagctgctaggcagtgtcagccccaactctgtcaagcccgagatggtggccgcctatcagggtgtcctggtggagctggcgcgggccaaccggctgtgccgggaggccatgaggctgcaggcgggcgaggagacggccagccactaccgcatggctgccttggagcagtgcctgtcagagccctgaggggtgtccaccggggacagacccaggggcgggcagagagggaaggagggaggaggcatcttccctgaagcccccaatctggcccccccctccccagacttcctccccaaaacaccccagctttctggcttttctgagggcaagggcatggtgcccacccctcaagtgtaaggaactgcgttccgcccctcaggcccccatgggggcagggatcggcttggaaatcaacgtggttgtccccgccaggccggggaaggttggagcagcccccagggaggggggcactaggtgtcattgtgcccgatgtctggctcccctgcaggagggaggctccagggtaagacagggctggcaggagcagactgcctcagcccatgtgccctgccggccagggcgtgggctcccctcggctgtggtgcctcctctggccccccaggtccacgtcctttaaattggccctttggctcttgcccttggctcccttgggcagacagcaggcttaggccattgatatcgcagttcttcctatcagcttcagtgacccagggtctgaactgcctccatcctagggcaacctggggcagacaggcctggtggggggtggggaaacctccttccacctgagcttgcttgaagggacccagagtctttgggcccagatctttaaacctttgtgtcgtgttgcagcagagtgacgatgggggttggggggttatttattttgcctgtccttatccctgcttggacacctgagcatctgattcctgtccccctggtgccatctggcctggctggagccaggaacaggagggacacttccccagaatccgcatgtttccccagtgattacactccactgccaccgtggtgcctggctttaactcccacccctgctatgactcctctctgcagagacgcgactggcggctccagcagggactacctttcttataaacccagggggaccacacacacacacacacacacacacacacacacacacacacacacacacactcttgatcccttgcttccctcccccagtgcgttctgtgatcgccaagttcaaagctgtgcacatgtggacactcaataaatgttcattggtgacgagaa

SEQ ID NO: 5864 - protein, 729 aa, Homo sapiens; identical to SEQ ID NO: 126

SEQ ID NO: 5865 - DNA, 528 bp, Homo sapiens
gagcatcgcgctgggagaagacttcgccgctcggggccgcagcctgtgtgatctcatcgccgccctgtcgtgaatctttaaacctttgtgtcgtgttgcagcagagtgacgatgggggttggggggttatttattttgcctgtccttatccctgcttggacacctgagcatctgattcctgtccccctggtgccatctggcctggctggagccaggaacaggagggacacttccccagaatccgcatgtttccccagtgattacactccactgccaccgtggtgcctggctttaactcccacccctgctatgactcctctctgcagagacgcgactggcggctccagcagggactacctttcttataaacccagggggaccacacacacacacacacacacacacacacacacacacacacacacacacactcttgatcccttgcttccctcccccagtgcgttctgtgatcgccaagttcaaagctgtgcacatgtggacactcaataaatgttcattggtgacgag

SEQ ID NO: 5866 - protein, 132 aa, Homo sapiens
MGVGGLFILPVLIPAWTPEHLIPVPLVPSGLAGARNRRDTSPESACFPSDYTPLPPWCLALTPTPAMTPLCRDATGGSSRDYLSYKPRGTTHTHTHTHTHTHTHTHTLDPLLPSPSAFCDRQVQSCAHVDTQ

SEQ ID NO: 5867 - DNA, 446 bp, Homo sapiens
ggagaagacttcgccgctcggggccgcagcctggtgagctcagcccccttcgggccctcccctgcatcccagccggggcctctccgagccggcgctgatcgatgccgacacaccccggggaccctatcgcgactccatcgcgccatatcgcgacaccatcgtgccctgtcgagactccattttgtcacagcccttttcaatatatatcttttttttttttaatttgccctgtcatctttgggggctgtctcccatgtcgtgattttgacgtgatctctccgtgacatcaccgcgccatcgtgaagtgtgatctcatcgccgccctgtcgtgacttcatcaatgtcgtgttgtgacctggctgcggcgggacagttgggcaaggcgagcatcatggcctcggattgcgagccagctctgaaccaggcagagggccgaaaccccaccc

SEQ ID NO: 5868 - protein, 34 aa, Homo sapiens
MSCCDLAAAGQLGKASIMASDCEPALNQAEGRNP

SEQ ID NO: 5869 - DNA, 946 bp, Homo sapiens
cttcgggccctcccctgcatcccagccggggcctctccgagccggcgctgatcgatgccgacacaccccggggaccctatcgcgactccatcgcgccatatcgcgacaccatcgtgccctgtcgagactccattttgtcacagcccttttcaatatatatcttttttttttttaatttgccctgtcatctttgggggctgtctcccatgtcgtgattttgacgtgatctctccgtgacatcaccgcgccatcgtgaagtgtgatctcatcgccgccctgtcgtgacttcatcaatgtcgtgttgtgacctggctgcggcgggacaggtggtgaccgccaggaaccctcctccccttctcatctccccatctcagcagccctgcttcgattatccggcttttggattctccgttgtcctgggaactatccgggaccccctcttgcttctccagcccctgccggcatccacaggctggtagcgggacggggagggcgagaagagggagcgcaaggggttaattctgctgctgccgccgccgctgctgctgctgctgcagcctctacccgagggagggaaaggagaggagttgggcaaggcgagcatcatggcctcggattgcgagccagctctgaaccaggcagagggccgaaaccccaccctggagcgctacctgggagccggctccgactggatcccggcgggcagctccgggagcaagttcctggccctgctggtgaatctggcgtgcgtggaagtgcggctggcactggaggagacgggcacggaggtgaaagaggatgtggtgaccgcctgctatgccctcatggagttggggatccaggaatgcactcgctgtgagcagtcactgcttaaggagccacagaaggtgcagctcgtgagcgtcatgaaggaggccataggggctgttatccactacctgctgca

SEQ ID NO: 5870 - protein, 112 aa, Homo sapiens
MASDCEPALNQAEGRNPTLERYLGAGSDWIPAGSSGSKFLALLVNLACVEVRLALEETGTEVKEDVVTACYALMELGIQECTRCEQSLLKEPQKVQLVSVMKEAIGAVIHYL

SEQ ID NO: 5871 - DNA, 1062 bp, Homo sapiens
gaccaaggcagtcaaagcaggtgacatagatgccaaaactcggcggcggatcttcgatgctgtcggcttcaccttccccaatcgtctcctgaccaccaaggaggcgccggatggctgccctgaccatgttctgcgggctttgggtgtggccctgctggcctgcttctgcagtgaccctgaactggccgcccatccccaagtcctgaacaagacccccagggaggggggcactaggtgtcattgtgcccgatgtctggctcccctgcaggagggaggctccagggtaagacagggctggcaggagcagactgcctcagcccatgtgccctgccggccagggcgtgggctcccctcggctgtggtgcctcctctggccccccaggtccacgtcctttaaattggccctttggctcttgcccttggctcccttgggcagacagcaggcttaggccattgatatcgcagttcttcctatcagcttcagtgacccagggtctgaactgcctccatcctagggcaacctggggcagacaggcctggtggggggtggggaaacctccttccacctgagcttgcttgaagggacccagagtctttgggcccagatctttaaacctttgtgtcgtgttgcagcagagtgacgatgggggttggggggttatttattttgcctgtccttatccctgcttggacacctgagcatctgattcctgtccccctggtgccatctggcctggctggagccaggaacaggagggacacttccccagaatccgcatgtttccccagtgattacactccactgccaccgtggtgcctggctttaactcccacccctgctatgactcctctctgcagagacgcgactggcggctccagcagggactacctttcttataaacccagggggaccacacacacacacacacacacacacacacacacacacacacacacacacactcttgatcccttgcttccctcccccagtgcgttctgtgatcgccaagttcaaagctgtgcacatgtggacactcaataaatgttcattggtgacgagaa

SEQ ID NO: 5872 - protein, 132 aa, Homo sapiens; identical to SEQ ID NO: 5866

SEQ ID NO: 5873 - DNA, 1073 bp, Homo sapiens
cgggaggccatgaggctgcaggcgggcgaggagacggccagccactaccgcatggctgccttggagcagtgcctgtcagagccctgaggggtgtccaccggggacagacccaggggcgggcagagagggaaggagggaggaggcatcttccctgaagcccccaatctggcccccccctccccagacttcctccccaaaacaccccagctttctggcttttctgagggcaagggcatggtgcccacccctcaagtgtaaggaactgcgttccgcccctcaggcccccatgggggcagggatcggcttggaaatcaacgtggttgtccccgccaggccggggaaggttggagcagcccccagggaggggggcactaggtgtcattgtgcccgatgtctggctcccctgcaggagggaggctccagggtaagacagggctggcaggagcagactgcctcagcccatgtgccctgccggccagggcgtgggctcccctcggctgtggtgcctcctctggccccccaggtccacgtcctttaaattggccctttggctcttgcccttggctcccttgggcagacagcaggcttaggccattgatatcgcagttcttcctatcagcttcagtgacccagggtctgaactgcctccatcctagggcaacctggggcagacaggcctggtggggggtggggaaacctccttccacctgagcttgcttgaagggacccagagtctttgggcccagatctttaaacctttgtgtcgtgttgcagcagagtgacgatgggggttggggggttatttattttgcctgtccttatccctgcttggacacctgagcatctgattcccctgctatgactcctctctgcagagacgcgactggcggctccagcagggactacctttcttataaacccagggggaccacacacacacacacacacacacacacacacacacacacacacacacacactcttgatcccttgcttccctcccccagtgcgttctgtgatcgccaagttcaaagctgtgcacatgtggacactcaataaatgttcattggtga

SEQ ID NO: 5874 - protein, 106 aa, Homo sapiens
MSGSPAGGRLQGKTGLAGADCLSPCALPARAWAPLGCGASSGPPGPRPLNWPFGSCPWLPWADSRLRPLISQFFLSASVTQGLNCLHPRATWGRQAWWGVGKPPST

SEQ ID NO: 5875 - DNA, 283 bp, Homo sapiens
gcgcatcgcgttctcagctggcgaagtccctgcggccccctccctccgagatttcgttagcgcgggacaggagggttggaaagtccagcactcaggcgccccgatcccccggccgaatatgtcccgggcccgagactactcaccatggcggagtaggtgtgcaccagcatggggcggaactgcttcacaagattaaaggagaaacagaaaatgtatctagcgctgtgcttggggcatggcaggaactcaatgaatgcttattaaatactgtaaatgataaaca

SEQ ID NO: 5876 - protein, 31 aa, Homo sapiens
MGRNCFTRLKEKQKMYLALCLGHGRNSMNAY

SEQ ID NO: 5877 - DNA, 851 bp, Homo sapiens
gggccctgcgagctccaggtgcctctgccccgcggcgctggcgaagtcgaagcccgagaacgcccaccgcagcgatgcgaaggccgcttctggggtggggctgaggctgcagctgcctccctttcgcaccaaggaccccaaccttcagcgacgcagccgccgctcccgcccaggctgggaggcactgtagggatccgacgcttcaggtggccaaagagcgactttctctgattccagggccctggcggggcaggctccagtaccgcactcggcggaggccgaaggtctgtggggcaggacaggagttcctcgtgccgtcggaagggccgaggacgaaggagggcgctaattcactccccactgggctggcggcaacgccgaatcccgcagtgaccgcggagggccaaggtgcaggctgccccatggatgccacacgtggcagcggggagaaaagaagtgattcggtccctgccgagggttgctgccacccacgcactgctggcggactcagtgccaggcagccttgatggccaggcaacgtctaacccaggaggtgggacacatcctcggagtcaccagtgagatgtggcgagctgggagaaaagtcggcttcctgcatttgtcaccttctgcctccagccatggtagtaaaccaccgcggccagtcccgacccatcccggatccctcgggtctcacctgcaggtcctccagaccgggggccgccgccagccccggaaggccgagaggaactgcttcacaagattaaaggagaaacagaaaatgtatctagcgctgtgcttggggcatggcaggaactcaatgaatgcttattaaatactgtaaatgataa

SEQ ID NO: 5878 - protein, 102 aa, Homo sapiens [sequence omitted]

SEQ ID NO: 5879 - DNA, 2185 bp, Homo sapiens
gtgcccgtccgtcctgcctccatggacccgcccgggaacggccaccgctgaggaccccacgcccactaggatcccggctgggtcgcacccagctaccgcaccgtgacctccgcgggctgtgccggctcccggcgcctctgcccgcagcgctcgccgtcgggctagggctccgccgccgccacgcctcgcgcccggcactcaccgccccatgctggtgcacacctactccgccatggagcgccccgacgggctgggagcagctgccggcggggcccgcctgtcgtctctgccccaggcggcctacgggccggcgcccccgctctgccacacgccggccgccacagctgccgccgaattccagccgccctacttcccgccgccctacccgcagccaccgctgccctacggtcaggcgcccgacgccgccgcagcctttccccacctggcaggggacccatatggcggcctggcgcccctggcgcagccgcagcctcctcaggccgcctgggccgcgccccgcgcagccgcccgcgcccacgaggagcctcccggcctgctggcaccgcccgcccgcgccctgggccttgacccgcgccgtgactatgccactgccgtgccccggctcctgcacggcctggccgacggcgcgcacggcctggcagacgcacctctcggccttccggggctggcggcggcccccggtctggaggacctgcaggcaatggacgagccgggaatgagcctcctagaccagtccgtgatcaagaaagtgcccatcccctccaaagccagcagcctctcagccctctccttggccaaagacagcctggtgggcggcatcacaaatcctggtgaggtcttctgctccgtgcccggccggctttcactgctcagctcaacgtccaagtacaaggtgacggtgggggaggtgcagcggcgactctcgcctcccgagtgcctcaacgcctccctcctggggggtgtcctccgcagggccaagtccaaaaatgggggccggtgtttgcgggaacggttagagaagattgggctcaacctgccagctggccgtcgcaaggccgccaatgtgacgctgctgacttcgctagtggaaggagaggccgtgcacctggcccgagacttcggttacgtctgtgagacggagttcccagccaaggcagctgccgagtacctgtgccgacagcacgctgacccgggggagctgcacagccgcaagagcatgctgctggctgccaagcagatctgcaaggagtttgcagacttgatggctcaggaccgctcaccgctgggcaacagccgcccagcactcatcctggagcccggagtacagagctgcttgacacactttagcctcatcacccatggcttcggtgggcctgccatctgtgctgccctcactgccttccagaactatttgctggagtcactcaaggggctggacaagatgtttctaagcagtgtgggcagtgggcatggtgaaaccaaggcttcggagaaggatgccaagcatcggaaataactgcttctcccaccccatccctaaggggctcccaggccctgaaatagggacttagctcttgggggtgggcctggaaggactgaaaggtgggattagagtcaggccagaaagagaacattcatccagagatcccagagttggggatctggcttggagtaagggagggtggcctctctgtggtggtgtgttggtaagttaagggcccaggtatttgtctcatgtgtgcaattttctgacctttgatggttgagaagggtttggacagaaaattgacatgaaaagatctggctcatggggcagagccctttccattagcgtggctgggtggccgtgggtgcttctagaggccaaagcctttgtgtttttcactggtggcaggaggaaaattgataaatcagaggtgctactgaggagttggtgcccctcattccagaatctcctacccccagaaaaggggtgctggaaggaggccccagtggactctttgtacccttcctactctcagagagaagtgggcaggaggggtcctcaaggaacaaagaagataaagcacaaatcgcagaacttgaatccaggctgctgctcatcatagtcctgttgctgtctgtcctatttatttatgtatgttgtaattaaatttgaaatttt

SEQ ID NO: 5880 - protein, 442 aa, Homo sapiens
MLVHTYSAMERPDGLGAAAGGARLSSLPQAAYGPAPPLCHTPAATAAAEFQPPYFPPPYPQPPLPYGQAPDAAAAFPHLAGDPYGGLAPLAQPQPPQAAWAAPRAAARAHEEPPGLLAPPARALGLDPRRDYATAVPRLLHGLADGAHGLADAPLGLPGLAAAPGLEDLQAMDEPGMSLLDQSVIKKVPIPSKASSLSALSLAKDSLVGGITNPGEVFCSVPGRLSLLSSTSKYKVTVGEVQRRLSPPECLNASLLGGVLRRAKSKNGGRCLRERLEKIGLNLPAGRRKAANVTLLTSLVEGEAVHLARDFGYVCETEFPAKAAAEYLCRQHADPGELHSRKSMLLAAKQICKEFADLMAQDRSPLGNSRPALILEPGVQSCLTHFSLITHGFGGPAICAALTAFQNYLLESLKGLDKMFLSSVGSGHGETKASEKDAKHRK

SEQ ID NO: 5881 - DNA, 437 bp, Homo sapiens
gaacgaggtgagccccgtcctggctaggtttctccagccacagtatgagcagcctcagaggtctctccatttggcagtcccaggagtctgtgcttcctcttctgccttgggcacttgaggaaagcctcaaaggcaggagggtggagttgtcagtttgaaggactgtgttaggtgggaggactggatgttctaagccggaaacaaacccaaggatgtgaggacagggttggcagaagtgggtggagtttgtgtgggccagactgtggggccctcaaaagagtttgaactttagcctaccaactggtagttctcagatttatctctctcttttcttttttttccgagacaaggtcttgcactgcactccggcctgggcaacagaacaagattctgtctcaataaataaataaataaaaatttctgttgtttataagcta

SEQ ID NO: 5882 - protein, 37 aa, Homo sapiens
MSSLRGLSIWQSQESVLPLLPWALEESLKGRRVELSV

SEQ ID NO: 5883 - DNA, 2641 bp, Homo sapiens
ggggagattttaccgagcaacgtagggaaacggctgcctggctacctacccctttttgacacccacacgtgctcggcaccttacatacactgcgtgattttatcctaaagccacttttaaaatcttagtgtgtaaacagagaaactgggcgtcacataaggcaagtgacctgcacagcctgctccggaggagacccgtacgatcccagagacaagcactgaacataaggcacccggcgccgcgcccgctttgcaacctctcgcgacagttgtacgtcatccgagagcgccgtggaagtcgtgctgcaggcgtcgcgccaatcttcgctctgaggtgctgtctcaccggtgagacctggaagcgggcgagtctcgtgctgtgtcggacctgcagcccctggccttccgccaccatggagtacctcatcggtatccaaggccccgactatgttcttgtcgcctccgaccgggtggccgccagcaatattgtccagatgaaggacgatcatgacaagatgtttaagatgagtgaaaagatattactcctgtgtgttggagaggctggagacactgtacagtttgcagaatatattcagaaaaacgtgcaactttataagatgcgaaatggatatgaattgtctcccacggcagcagctaacttcacacgccgaaacctggctgactgtcttcggagtcggaccccatatcatgtgaacctccgcctcccgggcccaagtgatcctcccatctcagcctcctgagtagctaggattacaggcgcacaccaccaatgcccagctagtttttgtgtttttcatagagacagggtctcaccatgtcattcaggttggtcttgaactcctgggctcaagcagtctgcctgccttggcttcccagtgctgggattacaggcgtgagccaccgtgcccggctaaaaagtatttttaagttctgcatattgcttatttcacttaacactatattagagattgttttatatcaatacatatagatatgcttattcttgttgacagttgcataattttccattaaattgatgtatcatgggcagttaaccagttactcgttttactcttagcataactttagggaacaatgtggatgttttgtggttaaagctattaaaacagtggttcttgaccagatgtgtgtttcagaatgttcatctcacatttccagttgctactgatgctgctggtctaggaaccacatatcaaaaccatttggtctccgactaagataaaccctactttatccaattctgtgctcctcttaatatcatatacagataggtttttgttttgtctgtgattaaatgtatcatctaagatactacctactgatcataacgttcatattaaagtattgggttaacattagatttgggtgtcttatacactatttaatacgccaatgataaatgccttacaccataagaagaaagctaatcattgagtaaatgggagaaaagagatgattcacgtcactacagttgattcaacctccaacaccaccatgaatatgcataggtttgagcttttagctagattcctgagtgtaaggcatctattttaaaagtgccacaggttggccgggtgcggtggctcatgcctgtaatcccagcactttggccgcccgccgaggcgggcggatcacctgaggtcaggagttcaagaccagcctggccaacatggtgaaaccccatctctactaaaaaaatatataacaattagccaggcgtggtggcacacgcctgtaaacccaactacttgggaggctgaggcaggagaattgcttgagcccgggagagggaggttgcagtgagccgagatcatgccactgcactccagcctggctgacagagcaagactctgtctcaaaaaaaaaaaaaaaaaaaaaaaaaaagcgccacagatgattctgacgccctacccagtggagtgctgctactaaagcacagactatcctgctacatgattttcccatctgtacaatgactgaaatagcacctattctatgtggtagatatgagaattccatgaagtaatataggtaaacatttagttcagggcttggcatgtggtaagtgctcagtaagtgtataatgattggtaaacttgttattctgcattcaggcctcaccagggatgacatacggttctctgcctttgaatgtaagtgtccccagggcaatctcaggcaagcctgcaaacccatcctgactctcagtgtttttttgccaatctggatctctttcctgagctccaaatcaactcattcctagatagctcaccctccagatttagggacatcgaactcagtatgtctaaagctgagccttaccatctgcccctctccaaaccgcctctatgacattctgtcttagagaattagagctacctggtttcccaagtgcccaagtcagaaacccaggcatcatttatttttaataaatgttttattttggaataaatttggttttacagaaaagttgcaaagataatatggtgtccttataccccttattcagtttctgtaatgttaacatcttctatataccacagtatgtttgtcaaaactgagaaaccaacattggttggtgtattagtattactaagctc

SEQ ID NO: 5884 - protein, 115 aa, Homo sapiens
MEYLIGIQGPDYVLVASDRVAASNIVQMKDDHDKMFKMSEKILLLCVGEAGDTVQFAEYIQKNVQLYKMRNGYELSPTAAANFTRRNLADCLRSRTPYHVNLRLPGPSDPPISAS

SEQ ID NO: 5885 - DNA, 1398 bp, Homo sapiens
ggggagattttaccgagcaacgtagggaaacggctgcctggctacctacccctttttgacacccacacgtgctcggcaccttacatacactgcgtgattttatcctaaagccacttttaaaatcttagtgtgtaaacagagaaactgggcgtcacataaggcaagtgacctgcacagcctgctccggaggagacccgtacgatcccagagacaagcactgaacataaggcacccggcgccgcgcccgctttgcaacctctcgcgacagttgtacgtcatccgagagcgccgtggaagtcgtgctgcaggcgtcgcgccaatcttcgctctgaggtgctgtctcaccggtgagacctggaagcgggcgagtctcgtgctgtgtcggacctgcagcccctggccttccgccaccatggagtacctcatcggtatccaaggccccgactatgttcttgtcgcctccgaccgggtggccgccagcaatattgtccagatgaaggacgatcatgacaagatgtttaagatgagtgaaaagatattactcctgtgtgttggagaggctggagacactgtacagtttgcagaatatattcagaaaaacgtgcaactttataagatgcgaaatggatatgaattgtctcccacggcagcagctaacttcacacgccgaaacctggctgactgtcttcggagtcggaccccatatcatgtgaacctccgcctcccgggcccaagtgatcctcccatctcagcctcctgagtagctaggattacaggcgcacaccaccaatgcccagctagtttttgtgtttttcatagagacagggtctcaccatgtcattcaggttggtcttgaactcctgggctcaagcagtctgcctgccttggcttcccagtgctgggattacaggcgtgagccaccgtgcccggctaaaaagtatttttaagttctgcatattgcttatttcacttaacactatattagagattgttttatatcaatacatatagatatgcttattcttgttgacagttgcataattttccattaaattgatgtatcatgggcagttaaccagttactcgttttactcttagcataactttagggaacaatgtggatgttttgtggttaaagctattaaaacagtggttcttgaccagatgtgtgtttcagaatgttcatctcacatttccagttgctactgatgctgctggtctaggaaccacatatcaaaaccatttggtctccgactaagataaaccctactttatccaattctgtgctcctcttaatatcatatacagataggtttttgttttgtctgtgattaaatgtatcatctaagatactacctactgatcataacgttcatattaaagtattgggttaacatt

SEQ ID NO: 5886 - protein, 115 aa, Homo sapiens; identical to SEQ ID NO: 5884

SEQ ID NO: 5887 - DNA, 722 bp, Homo sapiens
gctgcaggcgtcgcgccaatcttcgctctgaggtgctgtctcaccggtgagacctggaagcgggcgagtctcgtgctgtgtcggacctgcagcccctggccttccgccaccatggagtacctcatcggtatccaaggccccgactatgttcttgtcgcctccgaccgggtggccgccagcaatattgtccagatgaaggacggatatgaattgtctcccacggcagcagctaacttcacacgccgaaacctggctgactgtcttcggagtcggaccccatatcatgtgaacctcctcctggctggctatgatgagcatgaagggccagcgctgtattacatggactacctggcagccttggccaaggccccttttgcagcccacggctatggtgccttcctgactctcagtatcctcgaccgatactacacaccgactatctcacgtgagagggcagtggaactccttaggaaatgtctggaggagctccagaaacgcttcatcctgaatctgccaaccttcagtgttcgaatcattgacaaaaatggcatccatgacctggataacatttccttccccaaacagggctcctaacatcatgtcctccctcccacttgccagggaacttttttttgatgggctcctttatttttttctactcttttcaggcgcactcttgataaatggttaattcagaataaaggtgactatggatataattg

SEQ ID NO: 5888 - protein, 160 aa, Homo sapiens
MEYLIGIQGPDYVLVASDRVAASNIVQMKDGYELSPTAAANFTRRNLADCLRSRTPYHVNLLLAGYDEHEGPALYYMDYLAALAKAPFAAHGYGAFLTLSILDRYYTPTISRERAVELLRKCLEELQKRFILNLPTFSVRIIDKNGIHDLDNISFPKQGS

SEQ ID NO: 5889 - DNA, 778 bp, Homo sapiens
gaagtcgtgctgcaggcgtcgcgccaatcttcgctctgaggtgctgtctcaccggtgagacctggaagcgggcgagtctcgtgctgtgtcggacctgcagcccctggccttccgccaccatggagtacctcatcgatcatgacaagatgtttaagatgagtgaaaagatattactcctgtgtgttggagaggctggagacactgtacagtttgcagaatatattcagaaaaacgtgcaactttataagatgcgaaatggatatgaattgtctcccacggcagcagctaacttcacacgccgaaacctggctgactgtcttcggagtcggaccccatatcatgtgaacctcctcctggctggctatgatgagcatgaagggccagcgctgtattacatggactacctggcagccttggccaaggccccttttgcagcccacggctatggtgccttcctgactctcagtatcctcgaccgatactacacaccgactatctcacgtgagagggcagtggaactccttaggaaatgtctggaggagctccagaaacgcttcatcctgaatctgccaaccttcagtgttcgaatcattgacaaaaatggcatccatgacctggataacatttccttccccaaacagggctcctaacatcatgtcctccctcccacttgccagggaacttttttttgatgggctcctttatttttttctactcttttcaggcgcactcttgataaatggttaattcagaataaaggtgactatggatataattg

SEQ ID NO: 5890 - protein, 176 aa, Homo sapiens
MEYLIDHDKMFKMSEKILLLCVGEAGDTVQFAEYIQKNVQLYKMRNGYELSPTAAANFTRRNLADCLRSRTPYHVNLLLAGYDEHEGPALYYMDYLAALAKAPFAAHGYGAFLTLSILDRYYTPTISRERAVELLRKCLEELQKRFILNLPTFSVRIIDKNGIHDLDNISFPKQGS

SEQ ID NO: 5891 - DNA, 709 bp, Homo sapiens
gagagcgccgtggaagtcgtgctgcaggcgtcgcgccaatcttcgctctgaggtgctgtctcaccgatcatgacaagatgtttaagatgagtgaaaagatattactcctgtgtgttggagaggctggagacactgtacagtttgcagaatatattcagaaaaacgtgcaactttataagatgcgaaatggatatgaattgtctcccacggcagcagctaacttcacacgccgaaacctggctgactgtcttcggagtcggaccccatatcatgtgaacctcctcctggctggctatgatgagcatgaagggccagcgctgtattacatggactacctggcagccttggccaaggccccttttgcagcccacggctatggtgccttcctgactctcagtatcctcgaccgatactacacaccgactatctcacgtgagagggcagtggaactccttaggaaatgtctggaggagctccagaaacgcttcatcctgaatctgccaaccttcagtgttcgaatcattgacaaaaatggcatccatgacctggataacatttccttccccaaacagggctcctaacatcatgtcctccctcccacttgccagggaacttttttttgatgggctcctttatttttttctactcttttcaggcgcactcttgataaatggttaattcagaataaaggtgactatggatataattg

SEQ ID NO: 5892 - protein, 167 aa, Homo sapiens
MFKMSEKILLLCVGEAGDTVQFAEYIQKNVQLYKMRNGYELSPTAAANFTRRNLADCLRSRTPYHVNLLLAGYDEHEGPALYYMDYLAALAKAPFAAHGYGAFLTLSILDRYYTPTISRERAVELLRKCLEELQKRFILNLPTFSVRIIDKNGIHDLDNISFPKQGS

SEQ ID NO: 5893 - DNA, 1146 bp, Homo sapiens
ggggagattttaccgagcaacgtagggaaacggctgcctggctacctacccctttttgacacccacacgtgctcggcaccttacatacactgcgtgattttatcctaaagccacttttaaaatcttagtgtgtaaacagagaaactgggcgtcacataaggcaagtgacctgcacagcctgctccggaggagacccgtacgatcccagagacaagcactgaacataaggcacccggcgccgcgcccgctttgcaacctctcgcgacagttgtacgtcatccgagagcgccgtggaagtcgtgctgcaggcgtcgcgccaatcttcgctctgaggtgctgtctcaccggtgagacctggaagcgggcgagtctcgtgctgtgtcggacctgcagcccctggccttccgccaccatggagtacctcatcggtatccaaggccccgactatgttcttgtcgcctccgaccgggtggccgccagcaatattgtccagatgaaggacgatcatgacaagatgtttaagatgagtgaaaagatattactcctgtgtgttggagaggctggagacactgtacagtttgcagaatatattcagaaaaacgtgcaactttataagatgcgaaatggatatgaattgtctcccacggcagcagctaacttcacacgccgaaacctggctgactgtcttcggagtcggaccccatatcatgtgaacctcctcctggctggctatgatgagcatgaagggccagcgctgtattacatggactacctggcagccttggccaaggccccttttgcagcccacggctatggtgccttcctgactctcagtatcctcgaccgatactacacaccgactatctcacgtgagagggcagtggaactccttaggaaatgtctggaggagctccagaaacgcttcatcctgaatctgccaaccttcagtgttcgaatcattgacaaaaatggcatccatgacctggataacatttccttccccaaacagggctcctaacatcatgtcctccctcccacttgccagggaacttttttttgatgggctcctttatttttttctactcttttcaggcgcactcttgataaatggttaattcagaataaaggtgactatggatataattg

SEQ ID NO: 5894 - protein, 201 aa, Homo sapiens; identical to SEQ ID NO: 134

SEQ ID NO: 5895 - DNA, 3218 bp, Homo sapiens
actttagtcaagtaagcacaaaaaggaatatataattccaaattgtgataaatgctatgaagaaaaggaatgtgctctgacataaaggggggaacgaacgtgatctagggagtcagagatctctccgagaagagatctgaaataggagtaagtcgagagggggaagagaatgctagaccgagggaacagtgcgtgccaaagccgcgtggcggaaaggggcgtgtgggagggtaactgcggagagggagggtagaggacgaagccggagaggcagacgaagggcaggacgcacagagccccgcggctaccgccttaggggttgtcccggcggtggggaagccattgaggagtttaacgccggaaggtggtgactaatcagatttcacttgaaaatggcacggtgtctgcagcgaggctaactgatgggaagggcccagcgaatgccaataggagagagcaccggacctggaaggcctgggtcaacgcggccccgcgcgggggcgaagcggttccggcgcaggggcctggcgcggggctccgcggaaaaccgaaccggcccacgtgggaccggtcgctccgccctgctgcgcagacgccgcctgactccgcagtccgggactggggctgggcgcgctgcccgggagccccgcacccacgcctggaccgcggagacgcccaggccgaggaacccccagcccagggactagacaccaccagggccgggcggagccagagccagacgcgccggagcgggcgcctctacgccgctagatgttcgccatccagccagggctagctgaggggggccaattcctgggggacccacctcctggattatgtcagcccgagctccaaccagacagcaactccaacttcatggcaagtgccaaggatgctaacgagaattggcatgggatgccaggcagagtggaacctatcctgaggaggagctcctctgagtcaccctctgacaaccaagccttccaggcccctggatcccctgaggaaggggtgcgcagccccccagagggggcagagattcccggggctgagcctgagaagatgggtggtgctggcacagtctgctcccctctggaggacaacggctatgccagcagttccctgagcattgacagccgtagcagcagtcctgagcctgcctgtgggaccccgcgaggccctggccctcccgatccccttctgccctcagtggcccaggctgtgcagcacttacaagtccaggagcgctacaaagagcaggagaaggaaaagcaccacgtgcacttggtgatgtaccgtcgcctggcactgctccagtggatccggggcctgcagcatcagttgattgaccagcaggcccgactgcaggagagcttcgacaccatcctagacaaccggaaggagcttattcgctgtctccagcagagggcagcaccatccaggccccaggaccaggcctaagggtgtgcctccacaagtgtgcaagggtatatgtatatatttgcaggcatgtgtgaggcgcactagtaagtacataatttgctggcatgattgcaggtaggcatgagtgtgtatgtgctaacatgtaggctggtgtgtgtaggcatgtgtgaataagcatgtataaatgagcttaagtgtgctgtgtgcacatgtgtacacacagctaatttatctgcagacctatatgtgagcatgtaagagtgaacatatgtgtgtgtgtgtagtatgtaagaatgaggaactcggtatgtgcatgtgtagacaggtacccagcagtgtgtgtatatgcgcatgagtgaggatgtataggcagaagatgtgtgtgtctatgagtgagtttgagtgtgcaggcttgtattaggtgtatgtgaggaagcccttgtgtgtgcaggggtgcacatgtttggccacaggcatgggaggtgtatgttaggagcatgtgtgtttgtaggcagactcatgagcaggtgtgtgcaaatacatatccagctgcactgtgggtgtccacccacaccttgtgttcctcatggcctaccccagcctttcttctccactgggtcccactgttccctggagacagagggctagcatgctgtcatttatctgaaggttgtggctgacccattctcctgggatttcccaggccacctctcctttccctttccctcacttaacccagacttgctcagctgaggctattgtccctgatgttggctttacttgtaggaggtttagtggctgctctggcctgccatggaattttggctgcaattttggcagtgtgtggagaactggtatcaggaaagggaaccaggagtagtgatgaagatgatggtggggatggggacagaggacataggggactgtccctcttgaactctgcctttgggcacatgggagatggggacaggaaagatgataacagtggaaccctgtgaagaataggagaatgggaattctaaaataccagttcccaaacaaaccatctctccattggaaaaggagctgttgcaaaccgtgttcatttaagcttctgatgaaaagcaatgtatgtttataagcttgcaagtaacagacaagatgttccaaggccgatgaggaaaatatcgcttccctgtctctgcctctaccttgctgtgcctctctggctttagcagcattggatgttgaattggtttggttcatttctctgaagtcggactgtcaggaggagccagaggttggctttctgggatgtgaaggggacagtgtcagcctaagcctctggagatgcttaggatgctgaattttaaccccttctttcactgcatggcccttcaaacagggattggcaggctccgcgagttacagagtgggtgagtcttggagagaaccaacgactaaggtagcttagctctctgctttgttcttgggagccaagagaatgcaagatcctggtgggtgagcagtggtatgaagaggggacactggtgggtgaacagtggcatggaagtcactgatgcagcctctggccctcagtctccctatcggcaaagtggggggctcttcctatctctaaagagtttcatccctgacaggtggatgggtgaaagatccagagagtgggggtgaggggtgggccctgaagactttttgtctgtagctcttgcatattgagtgtataaacccggcttctggaccaacccaagatgaataaactggggcagaaaattaca

SEQ ID NO: 5896 - protein, 229 aa, Homo sapiens; identical to SEQ ID NO: 136

SEQ ID NO: 5897 - DNA, 3393 bp, Homo sapiens
actttagtcaagtaagcacaaaaaggaatatataattccaaattgtgataaatgctatgaagaaaaggaatgtgctctgacataaaggggggaacgaacgtgatctagggagtcagagatctctccgagaagagatctgaaataggagtaagtcgagagggggaagagaatgctagaccgagggaacagtgcgtgccaaagccgcgtggcggaaaggggcgtgtgggagggtaactgcggagagggagggtagaggacgaagccggagaggcagacgaagggcaggacgcacagagccccgcggctaccgccttaggggttgtcccggcggtggggaagccattgaggagtttaacgccggaaggtggtgactaatcagatttcacttgaaaatggcacggtgtctgcagcgaggctaactgatgggaagggcccagcgaatgccaataggagagagcaccggacctggaaggcctgggtcaacgcggccccgcgcgggggcgaagcggttccggcgcaggggcctggcgcggggctccgcggaaaaccgaaccggcccacgtgggaccggtcgctccgccctgctgcgcagacgccgcctgactccgcagtccgggactggggctgggcgcgctgcccgggagccccgcacccacgcctggaccgcggagacgcccaggccgaggaacccccagcccagggactagacaccaccagggccgggcggagccagagccagacgcgccggagcgggcgcctctacgccggttggatagcagttggatctgggctgaagacagatctgagagtcaccagcatatgatggtctttgaagctacagcagagaatgaggtcctctggagagaaatgcacaaaatcagaagacagcctggctctgaggacggaggaaaaaccctttgcaggagactgagaatgaacaggctagatgttcgccatccagccagggctagctgaggggggccaattcctgggggacccacctcctggattatgtcagcccgagctccaaccagacagcaactccaacttcatggcaagtgccaaggatgctaacgagaattggcatgggatgccaggcagagtggaacctatcctgaggaggagctcctctgagtcaccctctgacaaccaagccttccaggcccctggatcccctgaggaaggggtgcgcagccccccagagggggcagagattcccggggctgagcctgagaagatgggtggtgctggcacagtctgctcccctctggaggacaacggctatgccagcagttccctgagcattgacagccgtagcagcagtcctgagcctgcctgtgggaccccgcgaggccctggccctcccgatccccttctgccctcagtggcccaggctgtgcagcacttacaagtccaggagcgctacaaagagcaggagaaggaaaagcaccacgtgcacttggtgatgtaccgtcgcctggcactgctccagtggatccggggcctgcagcatcagttgattgaccagcaggcccgactgcaggagagcttcgacaccatcctagacaaccggaaggagcttattcgctgtctccagcagagggcagcaccatccaggccccaggaccaggcctaagggtgtgcctccacaagtgtgcaagggtatatgtatatatttgcaggcatgtgtgaggcgcactagtaagtacataatttgctggcatgattgcaggtaggcatgagtgtgtatgtgctaacatgtaggctggtgtgtgtaggcatgtgtgaataagcatgtataaatgagcttaagtgtgctgtgtgcacatgtgtacacacagctaatttatctgcagacctatatgtgagcatgtaagagtgaacatatgtgtgtgtgtgtagtatgtaagaatgaggaactcggtatgtgcatgtgtagacaggtacccagcagtgtgtgtatatgcgcatgagtgaggatgtataggcagaagatgtgtgtgtctatgagtgagtttgagtgtgcaggcttgtattaggtgtatgtgaggaagcccttgtgtgtgcaggggtgcacatgtttggccacaggcatgggaggtgtatgttaggagcatgtgtgtttgtaggcagactcatgagcaggtgtgtgcaaatacatatccagctgcactgtgggtgtccacccacaccttgtgttcctcatggcctaccccagcctttcttctccactgggtcccactgttccctggagacagagggctagcatgctgtcatttatctgaaggttgtggctgacccattctcctgggatttcccaggccacctctcctttccctttccctcacttaacccagacttgctcagctgaggctattgtccctgatgttggctttacttgtaggaggtttagtggctgctctggcctgccatggaattttggctgcaattttggcagtgtgtggagaactggtatcaggaaagggaaccaggagtagtgatgaagatgatggtggggatggggacagaggacataggggactgtccctcttgaactctgcctttgggcacatgggagatggggacaggaaagatgataacagtggaaccctgtgaagaataggagaatgggaattctaaaataccagttcccaaacaaaccatctctccattggaaaaggagctgttgcaaaccgtgttcatttaagcttctgatgaaaagcaatgtatgtttataagcttgcaagtaacagacaagatgttccaaggccgatgaggaaaatatcgcttccctgtctctgcctctaccttgctgtgcctctctggctttagcagcattggatgttgaattggtttggttcatttctctgaagtcggactgtcaggaggagccagaggttggctttctgggatgtgaaggggacagtgtcagcctaagcctctggagatgcttaggatgctgaattttaaccccttctttcactgcatggcccttcaaacagggattggcaggctccgcgagttacagagtgggtgagtcttggagagaaccaacgactaaggtagcttagctctctgctttgttcttgggagccaagagaatgcaagatcctggtgggtgagcagtggtatgaagaggggacactggtgggtgaacagtggcatggaagtcactgatgcagcctctggccctcagtctccctatcggcaaagtggggggctcttcctatctctaaagagtttcatccctgacaggtggatgggtgaaagatccagagagtgggggtgaggggtgggccctgaagactttttgtctgtagctcttgcatattgagtgtataaacccggcttctggaccaacccaagatgaataaactggggcagaaaattaca

SEQ ID NO: 5898 - protein, 51 aa, Homo sapiens
MMVFEATAENEVLWREMHKIRRQPGSEDGGKTLCRRLRMNRLDVRHPARAS

SEQ ID NO: 5899 - DNA, 3051 bp, Homo sapiens
actttagtcaagtaagcacaaaaaggaatatataattccaaattgtgataaatgctatgaagaaaaggaatgtgctctgacataaaggggggaacgaacgtgatctagggagtcagagatctctccgagaagagatctgaaataggagtaagtcgagagggggaagagaatgctagaccgagggaacagtgcgtgccaaagccgcgtggcggaaaggggcgtgtgggagggtaactgcggagagggagggtagaggacgaagccggagaggcagacgaagggcaggacgcacagagccccgcggctaccgccttaggggttgtcccggcggtggggaagccattgaggagtttaacgccggaaggtggtgactaatcagatttcacttgaaaatggcacggtgtctgcagcgaggctaactgatgggaagggcccagcgaatgccaataggagagagcaccggacctggaaggcctgggtcaacgcggccccgcgcgggggcgaagcggttccggcgcaggggcctggcgcggggctccgcggaaaaccgaaccggcccacgtgggaccggtcgctccgccctgctgcgcagacgccgcctgactccgcagtccgggactggggctgggcgcgctgcccgggagccccgcacccacgcctggaccgcggagacgcccaggccgaggaacccccagcccagggactagacaccaccagggccgggcggagccagagccagacgcgccggagcgggcgcctctacgccgctagatgttcgccatccagccagggctagctgaggggggccaattcctgggggacccacctcctggattatgtcagcccgagctccaaccagacagcaactccaacttcatggcaagtgccaaggatgctaacgagaattggcatgggatgccaggcagagtggaacaacggctatgccagcagttccctgagcattgacagccgtagcagcagtcctgagcctgcctgtgggaccccgcgaggccctggccctcccgatccccttctgccctcagtggcccaggctgtgcagcacttacaagtccaggagcgctacaaagagcaggagaaggaaaagcaccacgtgcacttggtgatgtaccgtcgcctggcactgctccagtggatccggggcctgcagcatcagttgattgaccagcaggcccgactgcaggagagcttcgacaccatcctagacaaccggaaggagcttattcgctgtctccagcagagggcagcaccatccaggccccaggaccaggcctaagggtgtgcctccacaagtgtgcaagggtatatgtatatatttgcaggcatgtgtgaggcgcactagtaagtacataatttgctggcatgattgcaggtaggcatgagtgtgtatgtgctaacatgtaggctggtgtgtgtaggcatgtgtgaataagcatgtataaatgagcttaagtgtgctgtgtgcacatgtgtacacacagctaatttatctgcagacctatatgtgagcatgtaagagtgaacatatgtgtgtgtgtgtagtatgtaagaatgaggaactcggtatgtgcatgtgtagacaggtacccagcagtgtgtgtatatgcgcatgagtgaggatgtataggcagaagatgtgtgtgtctatgagtgagtttgagtgtgcaggcttgtattaggtgtatgtgaggaagcccttgtgtgtgcaggggtgcacatgtttggccacaggcatgggaggtgtatgttaggagcatgtgtgtttgtaggcagactcatgagcaggtgtgtgcaaatacatatccagctgcactgtgggtgtccacccacaccttgtgttcctcatggcctaccccagcctttcttctccactgggtcccactgttccctggagacagagggctagcatgctgtcatttatctgaaggttgtggctgacccattctcctgggatttcccaggccacctctcctttccctttccctcacttaacccagacttgctcagctgaggctattgtccctgatgttggctttacttgtaggaggtttagtggctgctctggcctgccatggaattttggctgcaattttggcagtgtgtggagaactggtatcaggaaagggaaccaggagtagtgatgaagatgatggtggggatggggacagaggacataggggactgtccctcttgaactctgcctttgggcacatgggagatggggacaggaaagatgataacagtggaaccctgtgaagaataggagaatgggaattctaaaataccagttcccaaacaaaccatctctccattggaaaaggagctgttgcaaaccgtgttcatttaagcttctgatgaaaagcaatgtatgtttataagcttgcaagtaacagacaagatgttccaaggccgatgaggaaaatatcgcttccctgtctctgcctctaccttgctgtgcctctctggctttagcagcattggatgttgaattggtttggttcatttctctgaagtcggactgtcaggaggagccagaggttggctttctgggatgtgaaggggacagtgtcagcctaagcctctggagatgcttaggatgctgaattttaaccccttctttcactgcatggcccttcaaacagggattggcaggctccgcgagttacagagtgggtgagtcttggagagaaccaacgactaaggtagcttagctctctgctttgttcttgggagccaagagaatgcaagatcctggtgggtgagcagtggtatgaagaggggacactggtgggtgaacagtggcatggaagtcactgatgcagcctctggccctcagtctccctatcggcaaagtggggggctcttcctatctctaaagagtttcatccctgacaggtggatgggtgaaagatccagagagtgggggtgaggggtgggccctgaagactttttgtctgtagctcttgcatattgagtgtataaacccggcttctggaccaacccaagatgaataaactggggcagaaaattaca

SEQ ID NO: 5900 - protein, 133 aa, Homo sapiens
MLTRIGMGCQAEWNNGYASSSLSIDSRSSSPEPACGTPRGPGPPDPLLPSVAQAVQHLQVQERYKEQEKEKHHVHLVMYRRLALLQWIRGLQHQLIDQQARLQESFDTILDNRKELIRCLQQRAAPSRPQDQA

SEQ ID NO: 5901 - DNA, 4780 bp, Homo sapiens
gaaagcaagaacagcactgctgggctggagacggcgggagccgctgctctccggctgagggaatcagagacagctccgtccctagtggagcgcaggggaggcagaagtcatgacaggcgaggtgggttctgaggttcacctagaaatcaatgacccaaacgtcatttcacaagaggaagcagatagtccttcagatagtggacagggcagctatgaaacaattggacccttgagtgaaggagattcagatgaagagatatttgtaagtaagaagttgaaaaacaggaaggttctacaagacagtgattccgaaacagaggacacaaatgcctctccagagaaaactacctatgacagtgccgaggaggaaaataaagagaatttatatgctgggaaaaatacaaaaatcaaaaggatttacaaaactgtggcagacagtgatgaaagttacatggaaaagtctttgtatcaggaaaatcttgaagcgcaagtgaaaccttgcttagagctgagtcttcagtctggaaactctacagactttaccactgacagaaagagttccaaaaagcacatacatgataaagaaggaactgcaggaaaagcaaaagtaaaatcaaaaagaagacttgagaaagaggagagaaaaatggaaaaaattagacagctaaaaaagaaggaaacaaaaaaccaggaagatgatgtagaacagccatttaatgacagtggctgtcttcttgtggataaagacctttttgaaactgggttggaggatgaaaataactctccattggaagatgaagagtcattagaatcaataagagcagctgtaaaaaacaaagtaaaaaagcacaagaaaaaagaaccatctttggagagtggggtccattcatttgaggaaggaagtgagttatcaaaaggaaccacgaggaaggaaagaaaggcagccagattaagtaaagaagcattaaaacaactgcatagtgagactcagcgccttattcgagagtctgcactgaaccttccatatcatatgcctgagaataaaaccattcatgatttcttcaaacgtaaaccccggcccacttgccacggaaatgccatggcactattgaagtcatctaaatatcagtcaagccatcacaaagaaatcatagacactgcaaatactactgaaatgaacagtgatcaccatagtaaaggttctgagcagacaacaggtgcagaaaatgaagtggaaactaatgcactccctgtagtttcaaaggaaacccagatcattactggatcagatgagtcttgcaggaaggatttggtaaaaaatgaagagctagaaattcaggagaaacagaagcagagtgacattagaccttcacctggggacagctcagtgttgcaacaggaatccaacttcctcgggaacaatcacagtgaggaatgtcaggttggagggcttgtagcatttgaacctcatgccctggagggtgaaggcccccaaaatccagaagaaacagatgagaaagtggaagagcctgagcagcaaaataaatcatcagcagttgggccacctgaaaaagtgagacggtttactctggatagacttaagcaactgggagtagatgtttccattaaaccacggctaggtgctgatgaagattcctttgtgatacttgaacctgaaaccaacagagaactggaagccttgaagcagcgtttctggaagcatgctaatccagcagccaaacccagggctggtcagacagtgaatgtgaacgtcatagtgaaagacatgggcactgatggaaaggaagagctaaaagcagatgtggtacctgtgactttagcacctaagaagttggatggagcaagccacacaaaaccaggtgaaaagcttcaggtgttaaaagctaaactgcaagaagcaatgaaactccgaaggtttgaggagcgccagaagcgccaagcactgtttaaattagataatgaagatgggtttgaggaagaggaggaggaagaggaagaaatgacagatgagtctgaggaagatggagaagagaaggtagagaaagaagagaaagaggaagaactagaggaagaggaggagaaagaagaggaggaggaagaagaaggaaatcaggagactgcagaattccttcttagtagtgaagaaatagaaacaaaagatgaaaaagaaatggataaagaaaataatgatggcagtagtgaaattggcaaggcagttggcttcctctctgttcccaagtctctctcatcagattctactttacttctgtttaaggacagctcttccaagatgggttactttcctactgaagaaaaatcagaaacagatgaaaactcaggcaagcagcctagcaaactggatgaggatgattcatgttcattgctaacaaaggagagcagccacaatagcagctttgagctgattggctccacgattccatcctatcagccttgcaacagacaaacaggccgtgggaccagttttttccctacagcaggaggattcagatctccttcccctgggctatttcgagccagtttggtcagctcagcttctaagagttcagggaaactgtctgagccttcacttcccatagaggattcccaggatctgtataacgcctccccagagcctaagacacttttcctaggagcaggagacttccagttctgtttagaagatgacactcagagccaactgttggatgcagatgggttcttaaatgttagaaaccacaggaatcagtaccaagctttgaagcctcgattgccattggccagtatggatgagaatgccatggatgccaacatggatgagctgttggatttgtgtactggaaagttcacatctcaggctgaaaaacatctacccaggaagagtgacaagaaagagaacatggaggaacttctgaacctttgttcaggaaaattcacttctcaggatgcctccactccagcctcatcagagttaaataaacaggagaaggagagcagcatgggtgatccaatggaagaagcacttgctctttgctcaggctcttttcccacagacaaggaagaggaagacgaggaggaggaatttggagactttcggcttgtttcaaatgataatgagtttgatagtgatgaggatgaacacagtgactctggtaatgatctggcactggaagaccatgaagatgatgatgaagaagaactcctgaagcgatctgagaagttgaaaaggcaaatgaggttgaggaaatacctggaggatgaggcagaggtgtcaggaagtgatgtgggaagcgaagatgagtatgatggggaagaaattgatgaatatgaagaggacgtaattgatgaagtacttccttctgatgaggaactgcagagtcaaatcaagaaaatacacatgaaaactatgttggatgatgataagcgacagctacgtttataccaagagaggtaccttgctgatggggatctgcacagcgatggtcctgggcgaatgaggaagtttcgatggaaaaacatagatgatgcttcccagatggacttgttccacagagactctgatgatgatcagactgaagaacagcttgatgagtcagaagccaggtggaggaaggagcgaattgaacgagagcagtggcttcgggacatggcacagcaggggaaaattacagctgaagaagaagaagaaattggggaggacagtcagtttatgatactggccaagaaagttacagccaaagcactgcagaagaatgccagtcgccctatggttattcaggaatcaaagtctttgctcagaaatccttttgaagccatcagaccaggaagtgctcaacaggtgaagacaggctcactgctaaaccagcccaaagctgtgcttcagaaactggctgctctctctgaccataaccccagtgctcctcgaaattcaagaaactttgtctttcatacactttctcctgtcaaggctgaggcggcaaaggaatcgtctaagtctcagaagatcccagagaaggactctgactggctcacctggagtggagctcctatccctggattcttcaggctttcatttgacccacatggttaagctgggagagacagagtccaaagagaggcggagaagggctattctgggcagaacaaacaattgatgactttatggctctgtggtctgggcagaactgcataaccctagatcaccaaagctgagagcctttaggagtgaggatttgggccaggcatggtggctcacgcctgtaatcccagcactttgggaggccgaggtgggtggatcacaaggtcaggagatcaagaccaacctgaccaacatggtgaaaccccatctctactaaaaatacaaaaattagctgacgtgatgcatgcacctgtaatcccagctactcaggaggctgaggcaggagaatcgcttgaacccgggaggtggaggttgcggtgagccgagattgcgccactgcactccagcctaggcgacagagcgagactccatctcaaaaaaaaaaaaaaaaaaaaaaaaagtgaggatttgggtcaccccaggctgaaggccaggggaacctgaagtggataagggaagggagaagacttaggccacaggatctgatgtagaaatggggctgacgtctccacctgtattttcttagctggaggagtgtgcaaagtttgaattacttctgccttctccttcttatttccttttcccttttaaaatagtcatcataatcataaaaatttcttttcc

SEQ ID NO: 5902 - protein, 1332 aa, Homo sapiens
MTGEVGSEVHLEINDPNVISQEEADSPSDSGQGSYETIGPLSEGDSDEEIFVSKKLKNRKVLQDSDSETEDTNASPEKTTYDSAEEENKENLYAGKNTKIKRIYKTVADSDESYMEKSLYQENLEAQVKPCLELSLQSGNSTDFTTDRKSSKKHIHDKEGTAGKAKVKSKRRLEKEERKMEKIRQLKKKETKNQEDDVEQPFNDSGCLLVDKDLFETGLEDENNSPLEDEESLESIRAAVKNKVKKHKKKEPSLESGVHSFEEGSELSKGTTRKERKAARLSKEALKQLHSETQRLIRESALNLPYHMPENKTIHDFFKRKPRPTCHGNAMALLKSSKYQSSHHKEIIDTANTTEMNSDHHSKGSEQTTGAENEVETNALPVVSKETQIITGSDESCRKDLVKNEELEIQEKQKQSDIRPSPGDSSVLQQESNFLGNNHSEECQVGGLVAFEPHALEGEGPQNPEETDEKVEEPEQQNKSSAVGPPEKVRRFTLDRLKQLGVDVSIKPRLGADEDSFVILEPETNRELEALKQRFWKHANPAAKPRAGQTVNVNVIVKDMGTDGKEELKADVVPVTLAPKKLDGASHTKPGEKLQVLKAKLQEAMKLRRFEERQKRQALFKLDNEDGFEEEEEEEEEMTDESEEDGEEKVEKEEKEEELEEEEEKEEEEEEEGNQETAEFLLSSEEIETKDEKEMDKENNDGSSEIGKAVGFLSVPKSLSSDSTLLLFKDSSSKMGYFPTEEKSETDENSGKQPSKLDEDDSCSLLTKESSHNSSFELIGSTIPSYQPCNRQTGRGTSFFPTAGGFRSPSPGLFRASLVSSASKSSGKLSEPSLPIEDSQDLYNASPEPKTLFLGAGDFQFCLEDDTQSQLLDADGFLNVRNHRNQYQALKPRLPLASMDENAMDANMDELLDLCTGKFTSQAEKHLPRKSDKKENMEELLNLCSGKFTSQDASTPASSELNKQEKESSMGDPMEEALALCSGSFPTDKEEEDEEEEFGDFRLVSNDNEFDSDEDEHSDSGNDLALEDHEDDDEEELLKRSEKLKRQMRLRKYLEDEAEVSGSDVGSEDEYDGEEIDEYEEDVIDEVLPSDEELQSQIKKIHMKTMLDDDKRQLRLYQERYLADGDLHSDGPGRMRKFRWKNIDDASQMDLFHRDSDDDQTEEQLDESEARWRKERIEREQWLRDMAQQGKITAEEEEEIGEDSQFMILAKKVTAKALQKNASRPMVIQESKSLLRNPFEAIRPGSAQQVKTGSLLNQPKAVLQKLAALSDHNPSAPRNSRNFVFHTLSPVKAEAAKESSKSQKIPEKDSDWLTWSGAPIPGFFRLSFDPHG

SEQ ID NO: 5903 - DNA, 2745 bp, Homo sapiens
gacagtgtacttagatcttagactattgggcagtagagactgtattcatgagtatatgtggctggttttactttatgttctaaggctcagagtagttaattctggctttctctagttgcccaggattgtatacctaagtgttagagccagtcgccctatggttattcaggaatcaaagtctttgctcagaaatccttttgaagccatcagaccaggaagtgctcaacaggtgaagacaggctcactgctaaaccagcccaaagctgtgcttcagaaactggctgctctctctgaccataaccccagtgctcctcgaaattcaagaaactttgtctttcatacactttctcctgtcaaggctgaggcggcaaaggaatcgtctaagtctcaggtaaagaaaaggggtccatctttcatgacttctccttcacctaagcacctcaaaacagatgatagcacttcaggattgacgcgaagcatcttcaaatatttggagagctaacaccatcaaaggtgccaaaatctacattgagactgctttgagaagtttctagcactgaaagttggaattgacactccagccaatgatccttccttctttcataatcaatgcaataagattgcagacagaaattccagtgatttctactgcacagctctggacatctcttttcctagtattattccctgaattggccactgatttcaattctgcagtatttacaacatcaacaactcatggaatacttgggtgaggtttcctttttttttttttttttaagatgggagtctcactctgttgcccagcttggagtgcagtggcgtgatctcggctcaccacaatctctgcctcccaggttcaagcgattctcctccttcagcctcccgagtagctgggattacaggcatgtgccaatacgcccagctaatttttgtatttttagtagagacggggtttcaccatgttggccaggctggtcttgaactcctgacctcaaatgatccatccacctcggccccacaaagtgctggtcacatgcatgagtcactgcacctggccttgggttaggtttcacttcctccattagacatttgacattttattgtagcagctttctgggttaatatctctttgtgattgatagaagtggttggaagaggaagagtagggaaaagtgtgacattacagattaaacagtgaaaatcagtaccataatgactcctttacacccatgagatacgtaccatgatgaccagggctcggtgaaagaaagatttctttttttttttttgagatagtctcactttgttgcccagtctggagtgcagtggcgcaatctcggctcacggcaacctctgcctcccgggttcaagtgattctcctgtctcagcctcccaagtagctgggactacaggtgcatgccaccacacctggctaatttttgtatttttagtggagacagggagtcaccatgttggccaggctggtctcgatctcctgacctcaagtgatccagctgcctcagcctcccaaagtgctgagattacaggcgtgagccactgtgcccagccaaaagaacgatttcttagatggaggacctaggaaccaacagatgggctgctgtattactcttacccctttcattttcctgtatgcttcttcccaaggcagcatcaaattttgaattaatttttgctgcttaataaggacttaaactggtacccaagtcagaaagactctgcctctaattttctggggcttggggatgaagataaagtgttacacccagtgtttgtccaccacagtctgtggggcagagagacccttcctgggactgaattctcaatttgaagcactgttgttcaaagatctcccttctgggtctgacaagaagaaacataacccttatttattgcattcttctggcttacatacattgccctcactaatcaatggacatttcagcatttcattactaattttgagagaaggccaccatggaatttaataaaaatattattgaagagaattgccatcattctccattttccctgaactaccacaagcttctcagaattttagacaaatgtttttcccctcagaactgagcatcagtgctgctttggaaaaacattccatgtgaatactgtggtttcagtgtcaggacctgtacttgggcagttggaagagagtgtgccagttttttactgggagatgggaacaccaatttaattgatgcaattaggttgtaggttttttacagtttttcttttcttttctttttctttttcttttcttttcttttctttttttttttttgagacataggctggctctgtcacctaggctggaatacaatggcatgatctcggcttactgcaacctccgcctcctaggttcaagcaattctgcctcggcctcccaaatagcagggattacaggcacctgccaccactcccagctaattttttgtatttttattagagatgaggtttcgccatgttggccaggctggtcttgaactcctgacctgaggtgatccacccgtctcggcctcccaaagtgctgggattataggcatgagccaccgcacccggccggttttctacagttttctaatactcaagatgttgactttgacaatacttatgtttgtatacttgtaatcttataatggggaaaatgtgtataaagatgttttaatatgtatgtagtttttcaataaatcttaatgccttgaaggg

SEQ ID NO: 5904 - protein, 114 aa, Homo sapiens
MVIQESKSLLRNPFEAIRPGSAQQVKTGSLLNQPKAVLQKLAALSDHNPSAPRNSRNFVFHTLSPVKAEAAKESSKSQVKKRGPSFMTSPSPKHLKTDDSTSGLTRSIFKYLES

SEQ ID NO: 5905 - DNA, 6372 bp, Homo sapiens
gaaagcaagaacagcactgctgggctggagacggcgggagccgctgctctccggctgagggaatcagagacagctccgtccctagtggagcgcaggggaggcagaagtcatgacaggcgaggtgggttctgaggttcacctagaaatcaatgacccaaacgtcatttcacaagaggaagcagatagtccttcagatagtggacagggcagctatgaaacaattggacccttgagtgaaggagattcagatgaagagatatttgtaagtaagaagttgaaaaacaggaaggttctacaagacagtgattccgaaacagaggacacaaatgcctctccagagaaaactacctatgacagtgccgaggaggaaaataaagagaatttatatgctgggaaaaatacaaaaatcaaaaggatttacaaaactgtggcagacagtgatgaaagttacatggaaaagtctttgtatcaggaaaatcttgaagcgcaagtgaaaccttgcttagagctgagtcttcagtctggaaactctacagactttaccactgacagaaagagttccaaaaagcacatacatgataaagaaggaactgcaggaaaagcaaaagtaaaatcaaaaagaagacttgagaaagaggagagaaaaatggaaaaaattagacagctaaaaaagaaggaaacaaaaaaccaggaagatgatgtagaacagccatttaatgacagtggctgtcttcttgtggataaagacctttttgaaactgggttggaggatgaaaataactctccattggaagatgaagagtcattagaatcaataagagcagctgtaaaaaacaaagtaaaaaagcacaagaaaaaagaaccatctttggagagtggggtccattcatttgaggaaggaagtgagttatcaaaaggaaccacgaggaaggaaagaaaggcagccagattaagtaaagaagcattaaaacaactgcatagtgagactcagcgccttattcgagagtctgcactgaaccttccatatcatatgcctgagaataaaaccattcatgatttcttcaaacgtaaaccccggcccacttgccacggaaatgccatggcactattgaagtcatctaaatatcagtcaagccatcacaaagaaatcatagacactgcaaatactactgaaatgaacagtgatcaccatagtaaaggttctgagcagacaacaggtgcagaaaatgaagtggaaactaatgcactccctgtagtttcaaaggaaacccagatcattactggatcagatgagtcttgcaggaaggatttggtaaaaaatgaagagctagaaattcaggagaaacagaagcagagtgacattagaccttcacctggggacagctcagtgttgcaacaggaatccaacttcctcgggaacaatcacagtgaggaatgtcaggttggagggcttgtagcatttgaacctcatgccctggagggtgaaggcccccaaaatccagaagaaacagatgagaaagtggaagagcctgagcagcaaaataaatcatcagcagttgggccacctgaaaaagtgagacggtttactctggatagacttaagcaactgggagtagatgtttccattaaaccacggctaggtgctgatgaagattcctttgtgatacttgaacctgaaaccaacagagaactggaagccttgaagcagcgtttctggaagcatgctaatccagcagccaaacccagggctggtcagacagtgaatgtgaacgtcatagtgaaagacatgggcactgatggaaaggaagagctaaaagcagatgtggtacctgtgactttagcacctaagaagttggatggagcaagccacacaaaaccaggtgaaaagcttcaggtgttaaaagctaaactgcaagaagcaatgaaactccgaaggtttgaggagcgccagaagcgccaagcactgtttaaattagataatgaagatgggtttgaggaagaggaggaggaagaggaagaaatgacagatgagtctgaggaagatggagaagagaaggtagagaaagaagagaaagaggaagaactagaggaagaggaggagaaagaagaggaggaggaagaagaaggaaatcaggagactgcagaattccttcttagtagtgaagaaatagaaacaaaagatgaaaaagaaatggataaagaaaataatgatggcagtagtgaaattggcaaggcagttggcttcctctctgttcccaagtctctctcatcagattctactttacttctgtttaaggacagctcttccaagatgggttactttcctactgaagaaaaatcagaaacagatgaaaactcaggcaagcagcctagcaaactggatgaggatgattcatgttcattgctaacaaaggagagcagccacaatagcagctttgagctgattggctccacgattccatcctatcagccttgcaacagacaaacaggccgtgggaccagttttttccctacagcaggaggattcagatctccttcccctgggctatttcgagccagtttggtcagctcagcttctaagagttcagggaaactgtctgagccttcacttcccatagaggattcccaggatctgtataacgcctccccagagcctaagacacttttcctaggagcaggagacttccagttctgtttagaagatgacactcagagccaactgttggatgcagatgggttcttaaatgttagaaaccacaggaatcagtaccaagctttgaagcctcgattgccattggccagtatggatgagaatgccatggatgccaacatggatgagctgttggatttgtgtactggaaagttcacatctcaggctgaaaaacatctacccaggaagagtgacaagaaagagaacatggaggaacttctgaacctttgttcaggaaaattcacttctcaggatgcctccactccagcctcatcagagttaaataaacaggagaaggagagcagcatgggtgatccaatggaagaagcacttgctctttgctcaggctcttttcccacagacaaggaagaggaagacgaggaggaggaatttggagactttcggcttgtttcaaatgataatgagtttgatagtgatgaggatgaacacagtgactctggtaatgatctggcactggaagaccatgaagatgatgatgaagaagaactcctgaagcgatctgagaagttgaaaaggcaaatgaggttgaggaaatacctggaggatgaggcagaggtgtcaggaagtgatgtgggaagcgaagatgagtatgatggggaagaaattgatgaatatgaagaggacgtaattgatgaagtacttccttctgatgaggaactgcagagtcaaatcaagaaaatacacatgaaaactatgttggatgatgataagcgacagctacgtttataccaagagaggtaccttgctgatggggatctgcacagcgatggtcctgggcgaatgaggaagtttcgatggaaaaacatagatgatgcttcccagatggacttgttccacagagactctgatgatgatcagactgaagaacagcttgatgagtcagaagccaggtggaggaaggagcgaattgaacgagagcagtggcttcgggacatggcacagcaggggaaaattacagctgaagaagaagaagaaattggggaggacagtcagtttatgatactggccaagaaagttacagccaaagcactgcagaagaatgccagtcgccctatggttattcaggaatcaaagtctttgctcagaaatccttttgaagccatcagaccaggaagtgctcaacaggtgaagacaggctcactgctaaaccagcccaaagctgtgcttcagaaactggctgctctctctgaccataaccccagtgctcctcgaaattcaagaaactttgtctttcatacactttctcctgtcaaggctgaggcggcaaaggaatcgtctaagtctcaggtaaagaaaaggggtccatctttcatgacttctccttcacctaagcacctcaaaacagatgatagcacttcaggattgacgcgaagcatcttcaaatatttggagagctaacaccatcaaaggtgccaaaatctacattgagactgctttgagaagtttctagcactgaaagttggaattgacactccagccaatgatccttccttctttcataatcaatgcaataagattgcagacagaaattccagtgatttctactgcacagctctggacatctcttttcctagtattattccctgaattggccactgatttcaattctgcagtatttacaacatcaacaactcatggaatacttgggtgaggtttcctttttttttttttttttaagatgggagtctcactctgttgcccagcttggagtgcagtggcgtgatctcggctcaccacaatctctgcctcccaggttcaagcgattctcctccttcagcctcccgagtagctgggattacaggcatgtgccaatacgcccagctaatttttgtatttttagtagagacggggtttcaccatgttggccaggctggtcttgaactcctgacctcaaatgatccatccacctcggccccacaaagtgctggtcacatgcatgagtcactgcacctggccttgggttaggtttcacttcctccattagacatttgacattttattgtagcagctttctgggttaatatctctttgtgattgatagaagtggttggaagaggaagagtagggaaaagtgtgacattacagattaaacagtgaaaatcagtaccataatgactcctttacacccatgagatacgtaccatgatgaccagggctcggtgaaagaaagatttctttttttttttttgagatagtctcactttgttgcccagtctggagtgcagtggcgcaatctcggctcacggcaacctctgcctcccgggttcaagtgattctcctgtctcagcctcccaagtagctgggactacaggtgcatgccaccacacctggctaatttttgtatttttagtggagacagggagtcaccatgttggccaggctggtctcgatctcctgacctcaagtgatccagctgcctcagcctcccaaagtgctgagattacaggcgtgagccactgtgcccagccaaaagaacgatttcttagatggaggacctaggaaccaacagatgggctgctgtattactcttacccctttcattttcctgtatgcttcttcccaaggcagcatcaaattttgaattaatttttgctgcttaataaggacttaaactggtacccaagtcagaaagactctgcctctaattttctggggcttggggatgaagataaagtgttacacccagtgtttgtccaccacagtctgtggggcagagagacccttcctgggactgaattctcaatttgaagcactgttgttcaaagatctcccttctgggtctgacaagaagaaacataacccttatttattgcattcttctggcttacatacattgccctcactaatcaatggacatttcagcatttcattactaattttgagagaaggccaccatggaatttaataaaaatattattgaagagaattgccatcattctccattttccctgaactaccacaagcttctcagaattttagacaaatgtttttcccctcagaactgagcatcagtgctgctttggaaaaacattccatgtgaatactgtggtttcagtgtcaggacctgtacttgggcagttggaagagagtgtgccagttttttactgggagatgggaacaccaatttaattgatgcaattaggttgtaggttttttacagtttttcttttcttttctttttctttttcttttcttttcttttctttttttttttttgagacataggctggctctgtcacctaggctggaatacaatggcatgatctcggcttactgcaacctccgcctcctaggttcaagcaattctgcctcggcctcccaaatagcagggattacaggcacctgccaccactcccagctaattttttgtatttttattagagatgaggtttcgccatgttggccaggctggtcttgaactcctgacctgaggtgatccacccgtctcggcctcccaaagtgctgggattataggcatgagccaccgcacccggccggttttctacagttttctaatactcaagatgttgactttgacaatacttatgtttgtatacttgtaatcttataatggggaaaatgtgtataaagatgttttaatatgtatgtagtttttcaataaatcttaatgccttgaaggg

SEQ ID NO: 5906 - protein, 1339 aa, Homo sapiens; identical to SEQ ID NO: 138

SEQ ID NO: 5907 - DNA, 571 bp, Homo sapiens
gctttcaacaacttatttattgattcattgatttacattttagggaagaggaagacgaggaggaggaatttggagactttcggcttgtttcaaatgataatgagtttgatagtgatgaggtgagtatgaagggaacaaagtaatcataactgagctccatgtattgctgccctcaagtgtttttttcccctcagttcttgagaattctaagtttggcatcttatcagaaacaatttcctagaatgaggtatttgggcagatgtttataaatccttttttcattgaggacgcattttattctgcttaatttggatatgatgctgattttgtaggatgaacacagtgactctggtaatgatctggcactggaagaccatgaagatgatgatgaagaagaactcctgaagcgatctgagaagttgaaaaggcaaatgaggttgaggaaatacctggaggatgaggcagaggtgtcaggaagtgatgtgggaagcgaagatgagtatgatggggaagaaattgatgaatatgaagaggacgtaattgatgaagtacttccttctgatgaggaact

SEQ ID NO: 5908 - protein, 45 aa, Homo sapiens
MRLRKYLEDEAEVSGSDVGSEDEYDGEEIDEYEEDVIDEVLPSDE

SEQ ID NO: 5909 - DNA, 461 bp, Homo sapiens
ttgcaggctgactactgatctcaaaccaagcacagactgagacaggctgtatagctcagccattgctttctttctcctttacccaaaattaaataataactcaagttgctgggcatggtggctcatgcctgtaatcccagcactgtttttgtttaaattacatatacatatgtgcaaagaagagagtttaaaaggatacacgatatggttatagaacctgtctctgatagaagattaagtttttcatttattctatatatttgtctataatggggttttttataataagacaaatgatatctaaaaaaaaaataaagccagcttgtccaccccacacctctaggtgtgctacacgtgaatcatgccagagatactgctctgcaaagcctccaaggaaaaagattctataacttttcattataaggttttcaatagccttgaagatctgttagaatacaaag

SEQ ID NO: 5910 - protein, 46 aa, Homo sapiens
MGFFIIRQMISKKKIKPACPPHTSRCATRESCQRYCSAKPPRKKIL

SEQ ID NO: 5911 - DNA, 384 bp, Homo sapiens
acagcactgctgggctggagacggcgggagccgctgctctccggctgagggaatcagagacagctccgtccctagtggagcgcaggggaggcagaagtcatgacaggcgaggtgggttctgaggttcacctagaaatcaatgacccaaacgtcatttcacaagaggaagcagatagtccttcagatagtggacagggcagctatgaaacaattggacccttgagtgaaggagattcagatgaagagatatttgtaagtaagaagttgaaaaacaggaaggttctacaagacagtgattccgaaacagaggacacaaatgcctctccagagaaaactacctatgacagtgccgaggaggaaaataaagagaatttatatgctggg

SEQ ID NO: 5912 - protein, 94 aa, Homo sapiens
MTGEVGSEVHLEINDPNVISQEEADSPSDSGQGSYETIGPLSEGDSDEEIFVSKKLKNRKVLQDSDSETEDTNASPEKTTYDSAEEENKENLYA

SEQ ID NO: 5913 - DNA, 7111 bp, Homo sapiens
ggcggcggcggcggcggcggggattgtttttgttgtcgctgaggccggaagagccggagccgggtccctgtccccgggccgggcgccgccgccgccccctgcccagcgcccgcgtctccgcggcgccaccccagcgccaatattccggagatcaagcgttacgcggcggcggcggcggcggcggcggggcccggagcgggaggcgccggggaccggggcgaggcggcccccgccgccgccatggaggcgctgggacccggacctccggctagcctgtttcagccacctcgtcgtcctggccttggaactgttggaaaaccaattcgactgttagccaatcattttcaggttcagattcctaaaatagatgtgtatcactatgatgtggatattaagcctgaaaaacggcctcgtagagtcaacagggaggtagtagatacaatggtgcggcacttcaagatgcaaatatttggtgatcggcagcctgggtatgatggcaaaagaaacatgtacacagcacatccactaccaattggacgggatagggttgatatggaggtgactcttccaggcgagggtaaagaccaaacatttaaagtgtctgttcagtgggtgtcagttgtgagccttcagttgcttttagaagctttggctgggcacttgaatgaagtcccagatgactcagtacaagcacttgatgttatcacaagacaccttccctccatgaggtacaccccagtgggccgttcctttttctcacccccggaaggttactaccaccctctgggagggggcagggaggtctggtttggttttcatcagtctgtgagacctgccatgtggaatatgatgctcaacattgatgtatctgcaactgctttctaccgggctcagcctatcattgagttcatgtgtgaggttttagacattcagaacatcaatgaacagaccaaacctctaacagactcccagcgtgtcaaatttaccaaagaaatcagaggtctcaaagttgaggtgacccactgtggacagatgaaacgaaaataccgagtttgtaatgtgactagacggccagccagtcatcaaacttttcctttgcagctagaaaacggtcaagctatggaatgtacagtagctcaatattttaagcaaaagtatagtctgcaactgaaatacccccatcttccctgtctccaagtgggacaagaacaaaagcatacatacttgccactcgaggtctgtaatatagtggcaggacagcgatgtatcaagaagctcacagacaatcagacttccacaatgatcaaagctacagcaagatctgctcctgacagacaggaagagatcagtagactggtgaagagcaacagtatggtgggtggacctgatccataccttaaagaatttggtattgttgtccacaatgaaatgacagagctcacaggcagggtacttccagcaccaatgctgcaatatggaggccggaataaaacagtagccacacccaaccagggtgtctgggacatgcgaggaaagcagttttatgctggcattgaaattaaagtttgggcagttgcttgttttgcacctcagaaacaatgtagggaagatttactaaagagtttcactgaccagctgcgtaaaatctctaaggatgcaggaatgcccatccagggtcagccatgtttctgcaagtatgcacaaggtgcagacagtgtggagcctatgtttaaacatctgaaaatgacttatgtgggcctacagctaatagtggttatcctgcctggaaagacaccagtatatgcggaggtgaaacgtgttggagatacccttctaggtatggccacacagtgtgtccaggtaaaaaatgtagtgaagacctcacctcaaaccctttccaatctttgcctgaagataaatgcaaaacttggaggaattaacaatgtgcttgtgcctcatcaaaggccctcggtgttccagcagcctgtcatcttcctgggagcggatgtcacacaccccccagcaggggatgggaagaaaccttccattgctgctgtggttggcagtatggatggccaccccagccggtactgtgccaccgttcgggtgcagacttcccggcaggagatctcccaagagctcctctacagtcaagaggtcatccaggacctgactaacatggttcgagagctgctgattcagttctacaaatccacacgcttcaaacccactcggatcatctattaccgtggaggggtatctgagggacaaatgaaacaggtagcttggccagaactaatagcaattcgaaaggcatgtattagcttggaagaagattaccggccaggaataacttatattgtggtgcaaaaaagacatcacacacgactcttctgtgcagataaaacagaaagggtagggaaaagtggcaatgtaccagcaggcactacagtggatagtaccatcacacatccatctgagtttgacttttacctctgtagtcatgcaggaattcagggaaccagccgtccctcacattaccaggtcttgtgggatgacaactgcttcactgcagatgaactccagctactgacttaccagctgtgtcacacctatgtgaggtgcactcgctcagtctctattccagcccctgcatattatgcccggcttgtagcatttagggcaaggtatcatctggtggataaagatcatgacagtgcggaaggcagtcatgtgtcaggacagagcaacggccgggatcctcaggccttggctaaggctgtgcaaatccaccatgatacccagcacacgatgtattttgcctgagagtctcagaaaaagaactcaaccaatttggcaccccatgcagcctcaaaatgtttcaaatgcctaccgcctctagatcgagccacgttgacttcaggtggtcttctaccagcagctcggaatagttgcactgaatctatactttgcagcactgtctgatgcgtcaacaaaattgagccatttttttaaagtaatagatactaatagattatcttttctgatgcactggactgaatttttacctcaatgtgcaaaggctgatcagcctgaactttctaaaggactttacaagaagggtttctatggaatattttgctagctgtggtgttcaccgcatccctctagtcttagaagagaagattattccttttttctgtagtcattgagtggggtatatgcataagtgggagagaaaaaccaaacaatctacttcagttcagtgtaactatttaattgtgtgggtccatagactttttaatgaagatttctgactttgccactgtaaatgcctttaatgagcattaatttttgaaagttttacagagttttattagttttactactttatcttattgatctctgcagacttgtgctggtgcaagtacatgctgacaggcaatttgcactatatttggctgcagattcaaataggcagttctcttatttggtcgacttttgtgaatgtgtgacataaacagatgtaatgcatgtcacagtgacggagataacactgccatgataaaagtactcatgtttcccctatttggaaaaaaaaattgcttttagtatttttccaagttttcaaaagtgcccattttatgctgctgtgtggtttgttaaatctaaatgatttttaaacttttctcatagaaacttaactttggcaataaacattttttaaggtctctcctcttccttccccaacaatgtagttttctagatgagatttcagtatgattttatcagctatttcttatatatcataatctggcaatttctgaaaccagtcagaaaagacatatatttccatgcctttttaaagaattatttttacctgttttatattcacagttggtgtcctgtcactttgttttaaaataagctagaaccaggatgcttccttattggaaaggctttgccagtccttaaggtacaatgagtgatgctgcaacttgcaaatgtaccagcatttaaaatttcttttcctgggaatcaaggtaactcacacgactacttgcagtacaaattttttgcttctctttcgacatgaaatgtacttggtgggttttccttccttttattaaactaaaactgtgtggaaaaggttgatttttcttaatagattctggattccactcacagggagatgggattcctttcttgtccaaacaaagggagttgctctaaagcgagcatcagttaaaatgtaggggaaaatgtattctgtatgtagtgtagataatactttgtgaatggacaacagttacatagtgtcttggtagcaccagccagtgtttcccagcccagagtttactgacttgtaattctctatccaggacatcaggagtgagggatggaaaaggggataaaaggcctggagccacactctatatggctgaggaaggagctagggaaagagatagacacaatggggtgaaaacaattttgccgcccctgcctggaaactgctggtggggaaatgatggtgaagggtgtttgcttgaactcatgagacggtccaaatctcataaactagccttctcaaaatcccagcaatataaagcactgtttttcttcagtcgtttaaataaacttgtaaatacattgaagtttacatttccatgtgctgttgatcaacggcgccacctgtgtttgctgagactggtctctgagagagttttatgtcgatcgaggcctgttgctcattaagctgagtgcagacgtccttaatccctgcagatagtgggatgaaagcaagttctgtaaaatgaagcacaacatagccaggagtgaagagatggcagatgttaatttcttaaaattttccttttttttttttttttttgcaaatacctcacttggataatacaaatcaggacatgttggtgaggggctggctgcttggctgctgcttttattcacacttgttcagggagagcacagagaatacccttcagcatggccactctggacccaagaggaggaaaaaacggaagcttttttaggagaaggaggacttgctggaatccaagatgtgaagaactcttggtgactggctggctggccagcgggcaccacacctgcacttgagtgcctcgggcttgcttattaataacgcacagaagaagcatcacttctcaccatctcctggcatgtatggagcagggagcaaggctatgttcccgaaagccctgattagcttgtcttgctctacgctcgacctcgaacaatacagcttgtaagacctcagtcagtcctggtacactggggtaaatcagtgtggtggtggaagaaaagccgggaggcctatttttataggaaaatagtaccattaaaggtgcaatgctgtcattttggacaaaaggaaagaaatttggaagagctgggattattggcaaaaacttgctgaggggtgaatctttagagctaatcactgcagaatcagagttgcagcaatatgattgcaagcaagtctgaatgcatagttttactttaattcggcttgacaatttgaataggtaaccccctcgggactgactgaatcgttatgcatgtgtcaatcaatgggaggtgtgcattctctagaagtagttttaggctgtttggtttggttttggttttgttttttaaatgcagcctgttgaggcactgtcatgtggtgtgaaagatttaaatgtagcaacgctaaagagtaataatttggggataagaagtggggacattggccgggcgcggtggctcacgcctgtaattccagcactttgggaggcctaggtgggcggatcagctgaggtcgagagttcgaggccagtctgaccaacatggtgaaaccccatctctactaaaaatacagaaaattagctgggtctggtggtggatgcctgtaatcccagctactcgggaggctgaggcaggagaattgcttgaacccaggaggtggacggtgcagtgagctattactccagcctgggcaacaagagcgaaactctgtctcaaaaaaaaaaaggggggggggggacattaagagagtggtgatgacccaaatgttgaaccaattatgttttggtggtggtgttcttagctgttgaatcctgaatggtttataaagtgaactagctggcttaatgcagccagcgttctgggcagcagaacatattcattcttactgtaaattctatttgctgcttccaaaggtgatgattttcaagcagacatgttctatatggtctgtgttttaggatctggtgcccagcctctatcagagcttgcctacctggcaaagctgcctacccttcaagtgggaaaatataatccactgtttaacaaggctcaccctctccaccctgtcctaacgaccttttgtgaatgtgctgtgatattttcttgctcaatagcaaggtggtagctctgctttcattttaagaaagtggaggctgagggcattgtatcaatactgttgcaactccaagaagttttccttgtaaaattaaaggaaagatcttgttattgattaaccattttcttatgccttgctattgacatattcatgctctttctacgtctagtggctgaaaatgtttgcatttgttcatttgactaatggtgtgatttttgtttctatattattagacctgtaatgttttaaaatgtattttattaaatttggactggatgtatgtctctagcaatacgaggtactttctaaactattaagggaggggttgtatcctcatgttgagataagatgatggtcgtttaaattttgcaattttttttggcctgcagggatattttgtgtttatgtgtccaaaaaaggaataaattggcattcttgtgccaaaagttgtttttcctgtcaattgtctaataagtatgcagtacactgtaatggcaacatacatggttgctttataaaaacagtttcctcagtatgagaaattttacaaagaacagtggaaaaactttgtgtttttaactcttgggtctccctatttttaaaaattgctatttggtatacaattattatgtgtcaattaaaactaaaataaaacttttaaaaaagaaa

SEQ ID NO: 5914 - protein, 861 aa, Homo sapiens; identical to SEQ ID NO: 140

SEQ ID NO: 5915 - DNA, 839 bp, Homo sapiens
caacatggtgaaaccctgtctctactaaaaatacaaaaattagctgggcatggtggcaggcatgtaatcccaacactttgggaggctgaggaaagagaattgcttgagcccaagtggtggaggtttcagtaagccaaaatcatgccactgcactccagcctaggtgacagaacgagactctgtctcaaaaaaaaaaaaaaaaaaagcaagattaaagttattattgtactaagtatttgagataatttgcccactggaaaagccaaatagagtatcttaattatgccaaatattctggcacagtctcagattcatgtatttggtcttgttgtctccagatccacatgtatttgttctagttttaggatctaaaaatttgggaatctaaaaatgtggccccaataactatgctacactcattttacataaagttatcttaagggaacaaaacacctacatggattactccaaatctttatgttaatttgaagccagcaagaggttgtatttgtacctgtaggtgttacctgacctcaagtgagtctatgtatgttctggttctgcagtatcttcttgttttaagttatttttttaaaattcttcttaaattttaatttaaaaaaatttctcatccaagctttaaccaacatggaaaatttcaatggaatcattgttctggttaaatactaaacttacttaagtgaaaatgctcaaataaagattaacttttgttttttggctgggcatgtggctcacacctgtgatcccagcactttgggaggatgaggcaggtggatcacctgaagtcgggagttctagatcagcctggccaatgcggt

SEQ ID NO: 5916 - protein, 32 aa, Homo sapiens
MPLHSSLGDRTRLCLKKKKKKSKIKVIIVLSI

SEQ ID NO: 5917 - DNA, 799 bp, Homo sapiens
catggtgactcacgcctgtaatcccagcactttggaaggctgaggcaggcagatcacttgaggtcaggagtttgagaccagactggccaacatggtgaaaccctgtctctactaaaaaatacaaaaattagccaggtgtggtggtgtgtgcctgtaatcccagctactcagaaggtggaagaggcaggagaatcacttgaaccaggaaggtggaggttgcagtgagccaagatcacaccaagctaggagaggaaaagctgcaatccaaaccaaagaagtttaacgccaaagtatgcactctaagccactacactatattgtctcaaatgtttgggttaaaattaaatgaagacagactttaggttaacttcccctatggcccatatatctcatcactaatgtttaaggagggatttatttacctagaagtttcatccaaggacaaaaatgagaactgtgttgggaggctgagcgggtggattgcttgagctcaggagtttgagaccagtgtgggcaacatggagaaacctcgtctgtatgaaaaatacaaaaaataagccaggcgtggtggtgcacacctgtggtcccagctagttgggaggctgaggtgggaagattgcttgagcctgggaggcggagtttgcagtgagccgagattgtgccaccgcactccagcctgggtgacaaagtgagacactgtctcaaaaaaataaataaataagaaataagaaatcaactaatcaagttgacaaaatatgctaagattaaattaaaaaaaaaagagaactgtgatatgatt

SEQ ID NO: 5918 - protein, 41 aa, Homo sapiens [sequence omitted]

SEQ ID NO: 5919 - DNA, 966 bp, Homo sapiens
acagtgcggaaggcagtcatgtgtcaggacagagcaacggccgggatcctcaggccttggctaaggctgtgcaaatccaccatgatacccagcacacgatgtattttgcctgagagtctcagaaaaagaactcaaccaatttggcaccccatgcagcctcaaaatgtttcaaatgcctaccgcctctagatcgagccacgttgacttcagttggtgtcctgtcactttgttttaaaataagctagaaccaggatgcttccttattggaaaggctttgccagtccttaaggtacaatgagtgatgctgcaacttgcaaatgtaccagcatttaaaatttcttttcctgggaatcaaggtaactcacacgactacttgcagtacaaattttttgcttctctttcgacatgaaatgtacttggtgggttttccttccttttattaaactaaaactgtgtggaaaaggttgatttttcttaatagattctggattccactcacagggagatgggattcctttcttgtccaaacaaagggagttgctctaaagcgagcatcagttaaaatgtaggggaaaatgtattctgtatgtagtgtagataatactttgtgaatggacaacagttacatagtgtcttggtagcaccagccagtgtttcccagcccagagtttactgacttgtaattctctatccaggacatcaggagtgagggatggaaaaggggataaaaggcctggagccacactctatatggctgaggaaggagctagggaaagagatagacacaatggggtgaaaacaattttgccgcccctgcctggaaactgctggtggggaaatgatggtgaagggtgtttgcttgaactcatgagacggtccaaatctcataaactagccttctcaaaatcccagcaatataaagcactgtttttcttcagtcgtttaaataaacttgtaaatacattg

SEQ ID NO: 5920 - protein, 71 aa, Homo sapiens
MAEEGARERDRHNGVKTILPPLPGNCWWGNDGEGCLLELMRRSKSHKLAFSKSQQYKALFFFSRLNKLVNT

SEQ ID NO: 5921 - DNA, 3424 bp, Homo sapiens
acagtgcggaaggcagtcatgtgtcaggacagagcaacggccgggatcctcaggccttggctaaggctgtgcaaatccaccatgatacccagcacacgatgtattttgcctgagagtctcagaaaaagaactcaaccaatttggcaccccatgcagcctcaaaatgtttcaaatgcctaccgcctctagatcgagccacgttgacttcagttggtgtcctgtcactttgttttaaaataagctagaaccaggatgcttccttattggaaaggctttgccagtccttaaggtacaatgagtgatgctgcaacttgcaaatgtaccagcatttaaaatttcttttcctgggaatcaaggtaactcacacgactacttgcagtacaaattttttgcttctctttcgacatgaaatgtacttggtgggttttccttccttttattaaactaaaactgtgtggaaaaggttgatttttcttaatagattctggattccactcacagggagatgggattcctttcttgtccaaacaaagggagttgctctaaagcgagcatcagttaaaatgtaggggaaaatgtattctgtatgtagtgtagataatactttgtgaatggacaacagttacatagtgtcttggtagcaccagccagtgtttcccagcccagagtttactgacttgtaattctctatccaggacatcaggagtgagggatggaaaaggggataaaaggcctggagccacactctatatggctgaggaaggagctagggaaagagatagacacaatggggtgaaaacaattttgccgcccctgcctggaaactgctggtggggaaatgatggtgaagggtgtttgcttgaactcatgagacggtccaaatctcataaactagccttctcaaaatcccagcaatataaagcactgtttttcttcagtcgtttaaataaacttgtaaatacattgaagtttacatttccatgtgctgttgatcaacggcgccacctgtgtttgctgagactggtctctgagagagttttatgtcgatcgaggcctgttgctcattaagctgagtgcagacgtccttaatccctgcagatagtgggatgaaagcaagttctgtaaaatgaagcacaacatagccaggagtgaagagatggcagatgttaatttcttaaaattttccttttttttttttttttttgcaaatacctcacttggataatacaaatcaggacatgttggtgaggggctggctgcttggctgctgcttttattcacacttgttcagggagagcacagagaatacccttcagcatggccactctggacccaagaggaggaaaaaacggaagcttttttaggagaaggaggacttgctggaatccaagatgtgaagaactcttggtgactggctggctggccagcgggcaccacacctgcacttgagtgcctcgggcttgcttattaataacgcacagaagaagcatcacttctcaccatctcctggcatgtatggagcagggagcaaggctatgttcccgaaagccctgattagcttgtcttgctctacgctcgacctcgaacaatacagcttgtaagacctcagtcagtcctggtacactggggtaaatcagtgtggtggtggaagaaaagccgggaggcctatttttataggaaaatagtaccattaaaggtgcaatgctgtcattttggacaaaaggaaagaaatttggaagagctgggattattggcaaaaacttgctgaggggtgaatctttagagctaatcactgcagaatcagagttgcagcaatatgattgcaagcaagtctgaatgcatagttttactttaattcggcttgacaatttgaataggtaaccccctcgggactgactgaatcgttatgcatgtgtcaatcaatgggaggtgtgcattctctagaagtagttttaggctgtttggtttggttttggttttgttttttaaatgcagcctgttgaggcactgtcatgtggtgtgaaagatttaaatgtagcaacgctaaagagtaataatttggggataagaagtggggacattggccgggcgcggtggctcacgcctgtaattccagcactttgggaggcctaggtgggcggatcagctgaggtcgagagttcgaggccagtctgaccaacatggtgaaaccccatctctactaaaaatacagaaaattagctgggtctggtggtggatgcctgtaatcccagctactcgggaggctgaggcaggagaattgcttgaacccaggaggtggacggtgcagtgagctattactccagcctgggcaacaagagcgaaactctgtctcaaaaaaaaaaaggggggggggggacattaagagagtggtgatgacccaaatgttgaaccaattatgttttggtggtggtgttcttagctgttgaatcctgaatggtttataaagtgaactagctggcttaatgcagccagcgttctgggcagcagaacatattcattcttactgtaaattctatttgctgcttccaaaggtgatgattttcaagcagacatgttctatatggtctgtgttttaggatctggtgcccagcctctatcagagcttgcctacctggcaaagctgcctacccttcaagtgggaaaatataatccactgtttaacaaggctcaccctctccaccctgtcctaacgaccttttgtgaatgtgctgtgatattttcttgctcaatagcaaggtggtagctctgctttcattttaagaaagtggaggctgagggcattgtatcaatactgttgcaactccaagaagttttccttgtaaaattaaaggaaagatcttgttattgattaaccattttcttatgccttgctattgacatattcatgctctttctacgtctagtggctgaaaatgtttgcatttgttcatttgactaatggtgtgatttttgtttctatattattagacctgtaatgttttaaaatgtattttattaaatttggactggatgtatgtctctagcaatacgaggtactttctaaactattaagggaggggttgtatcctcatgttgagataagatgatggtcgtttaaattttgcaattttttttggcctgcagggatattttgtgtttatgtgtccaaaaaaggaataaattggcattcttgtgccaaaagttgtttttcctgtcaattgtctaataagtatgcagtacactgtaatggcaacatacatggttgctttataaaaacagtttcctcagtatgagaaattttacaaagaacagtggaaaaactttgtgtttttaactcttgggtctccctatttttaaaaattgctatttggtatacaattattatgtgtcaattaaaactaaaataaaacttttaaaaaagaaa

SEQ ID NO: 5922 - protein, 105 aa, Homo sapiens [sequence omitted]

SEQ ID NO: 5923 - DNA, 562 bp, Homo sapiens
gataggctgggtcaaatgctttcccttactccttctttgggagataggatccctctttattatagaaaatttgttgttgttattattattattattgagatggaatctcactctgtcacccaggctagagtgcaatggcgaaattgagccaagattgtgctgctgcactccagcctgggcaacagagggagactctgtctcacaaaactaacaaacaaacaaacaaaccccatggacaaatggataaaaaagaacaagttgtcttagaaatcaagggaaaagagcatttcatcaagtatgtacaggatcggctatgtaggagttagctgtgtgacactgggcaagttaacctctcttagcctcagttttcttattcgtaaaatggagatagtactagtacttacatccagggttggaaggattaaatgcaatcatacatgtaaaggcttggaaacacatacacataagctacaaagaaggaagtggctaactatccaatagtgatctaaaaagacaaaatctgaaaagtttccattggaatttgcagcaaggaagttatagg

SEQ ID NO: 5924 - protein, 63 aa, Homo sapiens [sequence omitted]

SEQ ID NO: 5925 - DNA, 3996 bp, Homo sapiens
tgaggcaagcgcctcaggagtgcgtgaggcccacgcagaactcggggagccttttatcctgaggacacaggggaagaattggaggactatattcagctgcgggcgcttacctgccccccctgcagcaggtgttccaggcacctcgccggcctggcattggcactgtggggaaaccaatcaagctcctggccaattactttgaggtggacatccctaagatcgacgtgtaccactacgaggtggacatcaagccggataagtgtccccgtagagtcaaccgggaagtggtggaatacatggtccagcatttcaagcctcagatctttggtgatcgcaagcctgtgtatgatggaaagaagaacatttacactgtcacagcactgcccattggcaacgaacgggtcgactttgaggtgacaatccctggggaagggaaggatcgaatctttaaggtctccatcaagtggctagccattgtgagctggcgaatgctgcatgaggccctggtcagcggccagatccctgttcccttggagtctgtgcaagccctggatgtggccatgaggcacctggcatccatgaggtacacccctgtgggccgctccttcttctcaccgcctgagggctactaccacccgctggggggtgggcgcgaggtctggttcggctttcaccagtctgtgcgccctgccatgtggaagatgatgctcaacattgatgtctcagccactgccttttataaggcacagccagtgattgagttcatgtgtgaggtgctggacatcaggaacatagatgagcagcccaagcccctcacggactctcagcgcgttcgcttcaccaaggagatcaagggcctgaaggtggaagtcacccactgtggacagatgaagaggaagtaccgcgtgtgtaatgttacccgtcgccctgctagccatcagacattccccttacagctggagagtggacagactgtggagtgcacagtggcacagtatttcaagcagaaatataaccttcagctcaagtatccccatctgccctgcctacaagttggccaggaacaaaagcatacctaccttcccctagaggtctgtaacattgtggctgggcagcgctgtattaaaaagctgaccgacaaccagacctcgaccatgataaaggccacagctagatccgctccagacagacaggaggagatcagtcgcctgatgaagaatgccagctacaacttagatccctacatccaggaatttgggatcaaagtgaaggatgacatgacggaggtgacagggcgagtgctgccggcgcccatcttgcagtacggcggccggaaccgggccattgccacacccaatcagggtgtctgggacatgcgggggaaacagttctacaatgggattgagatcaaagtctgggccatcgcctgcttcgcaccccaaaaacagtgtcgagaagaggtgctcaagaacttcacagaccagctgcggaagatttccaaggatgcggggatgcctatccagggtcaaccttgtttctgcaaatatgcacagggggcagacagcgtggagcctatgttccggcatctcaagaacacctactcagggctgcagctcattattgtcatcctgccagggaagacgccggtgtatgctgaggtgaaacgtgtcggagatacactcttgggaatggctacgcagtgtgtgcaggtgaagaacgtggtcaagacctcacctcagactctgtccaacctctgcctcaagatcaatgtcaaacttggtggcattaacaacatcctagtcccacaccagcgctctgccgtttttcaacagccagtgatattcctgggagcagatgttacacaccccccagcaggggatgggaaaaaaccttctatcacagcagtggtaggcagtatggatgcccaccccagccgatactgtgctactgtgcgggtacagcgaccacggcaagagatcattgaagacttgtcctacatggtgcgtgagctcctcatccaattctacaagtccacccgtttcaagcctacccgcatcatcttctaccgagatggggtgcctgaaggccagctaccccagatactccactatgagctactggccattcgtgatgcctgcatcaaactggaaaaggactaccagcctgggatcacttatattgtggtgcagaaacgccatcacacccgccttttctgtgctgacaagaatgagcgaattgggaagagtggtaacatcccagctgggaccacagtggacaccaacatcacccacccatttgagtttgacttctatctgtgcagccacgcaggcatccagggcaccagccgaccatcccattactatgttctttgggatgacaaccgtttcacagcagatgagctccagatcctgacgtaccagctgtgccacacttacgtacgatgcacacgctctgtctctatcccagcacctgcctactatgcccgcctggtggctttccgggcacgataccacctggtggacaaggagcatgacagtggagaggggagccacatatcggggcagagcaatgggcgggacccccaggccctggccaaagccgtgcaggttcaccaggatactctgcgcaccatgtacttcgcttgaaggcagaacgctgttacctcactggatagaagaaagctttccaagccccaggagctgtgccacccaaatccagaggaagcaaggaggagggaggtggggtagggaggagtgtaggatgccttgtttccttctatagaggtggtgtaagagtggggaacagggccagcaagacagaccaccagccagaaatctctgatatcaacctcatgtcccccacccctcaccccatcttgtcacatctggccctgaccccactggaccaaaaggggcagcactggtgcccaccatacacacaggtgtctcatgtgactcacagtgctaaagactcatgcttgacagcttggtaaggtcaactctgtagccctgcagacaaaagctggttaggtttgggtttgatactttagatgggaaagtgaggggcttgagaaagtgggtgggaggagggaaggattttttaggagccttaatcagaaaaggactagatttgtttaagaagaaaaatgaaaccagacccagatcaatattttaggatactagatgttttaatgggttcagaatccagtttgtaggaagattttttaatggttttggttgctcctcccccagctgccaccccccaccttacccttattcctctctgtccacattttctgccccaccttacttctcctccctgacagacatccagcccctagtaatacttaaggcactatggcacttagctttgaagtgacacgaccctgtcttccttccgcccgctggtgggtaaccagtgccttccctgtaacggtaatgctgcagaactgcaaccttttgtacctttctttggggaatggggtgggggtgggagaggaggtagatggggaagaaataccccagacccaacaaacctccagccagaaagccagctattttgcatttgaaggaattgacttcctcattcattgagctttttaaaagatcacaacctcaagatggttaaaatccattgacatttgcactttcaaacatgacaagtctcggagctgctgagatgacaggcccctggcctttccacttatgcctccttttctccttattcctcctacctcccgccccgcccaggtctggagttactttcatagcatttttcactcttggcttcttttctcccttgatggtcaagtctcttatgtttcaatatttcttaactggggtgtcttataacaaaaaactcttaggtctaaaatgagaaaaaagagagaaaacaaaatgttatttttataccataacttgagtgtattgccaaaatttggaaatccttcccatgcctgatgagtttatatcccagaaacattgagccatcagaatg

SEQ ID NO: 5926 - protein, 782 aa, Homo sapiens
MVQHFKPQIFGDRKPVYDGKKNIYTVTALPIGNERVDFEVTIPGEGKDRIFKVSIKWLAIVSWRMLHEALVSGQIPVPLESVQALDVAMRHLASMRYTPVGRSFFSPPEGYYHPLGGGREVWFGFHQSVRPAMWKMMLNIDVSATAFYKAQPVIEFMCEVLDIRNIDEQPKPLTDSQRVRFTKEIKGLKVEVTHCGQMKRKYRVCNVTRRPASHQTFPLQLESGQTVECTVAQYFKQKYNLQLKYPHLPCLQVGQEQKHTYLPLEVCNIVAGQRCIKKLTDNQTSTMIKATARSAPDRQEEISRLMKNASYNLDPYIQEFGIKVKDDMTEVTGRVLPAPILQYGGRNRAIATPNQGVWDMRGKQFYNGIEIKVWAIACFAPQKQCREEVLKNFTDQLRKISKDAGMPIQGQPCFCKYAQGADSVEPMFRHLKNTYSGLQLIIVILPGKTPVYAEVKRVGDTLLGMATQCVQVKNVVKTSPQTLSNLCLKINVKLGGINNILVPHQRSAVFQQPVIFLGADVTHPPAGDGKKPSITAVVGSMDAHPSRYCATVRVQRPRQEIIEDLSYMVRELLIQFYKSTRFKPTRIIFYRDGVPEGQLPQILHYELLAIRDACIKLEKDYQPGITYIVVQKRHHTRLFCADKNERIGKSGNIPAGTTVDTNITHPFEFDFYLCSHAGIQGTSRPSHYYVLWDDNRFTADELQILTYQLCHTYVRCTRSVSIPAPAYYARLVAFRARYHLVDKEHDSGEGSHISGQSNGRDPQALAKAVQVHQDTLRTMYFA

SEQ ID NO: 5927 - DNA, 6090 bp, Homo sapiens
tgaggcaagcgcctcaggagtgcgtgaggcccacgcagaactcggggagccttttatcctgaggacacaggggaagaattggaggactatattcagctgcgggcgcttacctgccccccctgcagcaggtgttccaggcacctcgccggcctggcattggcactgtggggaaaccaatcaagctcctggccaattactttgaggtggacatccctaagatcgacgtgtaccactacgaggtggacatcaagccggataagtgtccccgtagagtcaaccgggaagtggtggaatacatggtccagcatttcaagcctcagatctttggtgatcgcaagcctgtgtatgatggaaagaagaacatttacactgtcacagcactgcccattggcaacgaacgggtcgactttgaggtgacaatccctggggaagggaaggatcgaatctttaaggtctccatcaagtggctagccattgtgagctggcgaatgctgcatgaggccctggtcagcggccagatccctgttcccttggagtctgtgcaagccctggatgtggccatgaggcacctggcatccatgaggtacacccctgtgggccgctccttcttctcaccgcctgagggctactaccacccgctggggggtgggcgcgaggtctggttcggctttcaccagtctgtgcgccctgccatgtggaagatgatgctcaacattgatgtctcagccactgccttttataaggcacagccagtgattgagttcatgtgtgaggtgctggacatcaggaacatagatgagcagcccaagcccctcacggactctcagcgcgttcgcttcaccaaggagatcaagggcctgaaggtggaagtcacccactgtggacagatgaagaggaagtaccgcgtgtgtaatgttacccgtcgccctgctagccatcagacattccccttacagctggagagtggacagactgtggagtgcacagtggcacagtatttcaagcagaaatataaccttcagctcaagtatccccatctgccctgcctacaagttggccaggaacaaaagcatacctaccttcccctagaggtctgtaacattgtggctgggcagcgctgtattaaaaagctgaccgacaaccagacctcgaccatgataaaggccacagctagatccgctccagacagacaggaggagatcagtcgcctgatgaagaatgccagctacaacttagatccctacatccaggaatttgggatcaaagtgaaggatgacatgacggaggtgacagggcgagtgctgccggcgcccatcttgcagtacggcggccggaaccgggccattgccacacccaatcagggtgtctgggacatgcgggggaaacagttctacaatgggattgagatcaaagtctgggccatcgcctgcttcgcaccccaaaaacagtgtcgagaagaggtgctcaagaacttcacagaccagctgcggaagatttccaaggatgcggggatgcctatccagggtcaaccttgtttctgcaaatatgcacagggggcagacagcgtggagcctatgttccggcatctcaagaacacctactcagggctgcagctcattattgtcatcctgccagggaagacgccggtgtatgctgaggtgaaacgtgtcggagatacactcttgggaatggctacgcagtgtgtgcaggtgaagaacgtggtcaagacctcacctcagactctgtccaacctctgcctcaagatcaatgtcaaacttggtggcattaacaacatcctagtcccacaccagcgctctgccgtttttcaacagccagtgatattcctgggagcagatgttacacaccccccagcaggggatgggaaaaaaccttctatcacagcagtggtaggcagtatggatgcccaccccagccgatactgtgctactgtgcgggtacagcgaccacggcaagagatcattgaagacttgtcctacatggtgcgtgagctcctcatccaattctacaagtccacccgtttcaagcctacccgcatcatcttctaccgagatggggtgcctgaaggccagctaccccagatactccactatgagctactggccattcgtgatgcctgcatcaaactggaaaaggactaccagcctgggatcacttatattgtggtgcagaaacgccatcacacccgccttttctgtgctgacaagaatgagcgaattgggaagagtggtaacatcccagctgggaccacagtggacaccaacatcacccacccatttgagtttgacttctatctgtgcagccacgcaggcatccagggcaccagccgaccatcccattactatgttctttgggatgacaaccgtttcacagcagatgagctccagatcctgacgtaccagctgtgccacacttacgtacgatgcacacgctctgtctctatcccagcacctgcctactatgcccgcctggtggctttccgggcacgataccacctggtggacaaggagcatgacagtggagaggggagccacatatcggggcagagcaatgggcgggacccccaggccctggccaaagccgtgcaggttcaccaggatactctgcgcaccatgtacttcgcttgaaggcagaacgctgttacctcactggatagaagaaagctttccaagccccaggagctgtgccacccaaatccagaggaagcaaggaggagggaggtggggtagggaggagtgtaggatgccttgtttccttctatagaggtggtgtaagagtggggaacagggccagcaagacagaccaccagccagaaatctctgatatcaacctcatgtcccccacccctcaccccatcttgtcacatctggccctgaccccactggaccaaaaggggcagcactggtgcccaccatacacacaggtgtctcatgtgactcacagtgctaaagactcatgcttgacagcttggtaaggtcaactctgtagccctgcagacaaaagctggttaggtttgggtttgatactttagatgggaaagtgaggggcttgagaaagtgggtgggaggagggaaggattttttaggagccttaatcagaaaaggactagatttgtttaagaagaaaaatgaaaccagacccagatcaatattttaggatactagatgttttaatgggttcagaatccagtttgtaggaagattttttaatggttttggttgctcctcccccagctgccaccccccaccttacccttattcctctctgtccacattttctgccccaccttacttctcctccctgacagacatccagcccctagtaatacttaaggcactatggcacttagctttgaagtgacacgaccctgtcttccttccgcccgctggtgggtaaccagtgccttccctgtaacggtaatgctgcagaactgcaaccttttgtacctttctttggggaatggggtgggggtgggagaggaggtagatggggaagaaataccccagacccaacaaacctccagccagaaagccagctattttgcatttgaaggaattgacttcctcattcattgagctttttaaaagatcacaacctcaagatggttaaaatccattgacatttgcactttcaaacatgacaagtctcggagctgctgagatgacaggcccctggcctttccacttatgcctccttttctccttattcctcctacctcccgccccgcccaggtctggagttactttcatagcatttttcactcttggcttcttttctcccttgatggtcaagtctcttatgtttcaatatttcttaactggggtgtcttataacaaaaaactcttaggtctaaaatgagaaaaaagagagaaaacaaaatgttatttttataccataacttgagtgtattgccaaaatttggaaatccttcccatgcctgatgagtttatatcccagaaacattgagccatcagaatgaactgtgtacctgatttgttctctgacctggctaggtagggagggggtggttatcgccccaagatggggtccaggctccatccttcctctgtgcagataatacctttttcttgctatagcctccctcctctgcactgtcctgcactctttcttgcaagtgcatctttttccttcccctggactgtcctctgaccctttggctcatcctagattgcagtgtgtcctgtggacaggctggggaattttgctgctccctattgcttctgtttacaaaaatgaatttttcctggtttcccactagggcatgtgggtgggtggcatggacttttttttttttttttttttgtcttgagacatggggtttggctgtcttgcaggactggagaaggtggtggttctagcttggtctctgttggccttgaagcaagcatcccccctgccctttttccttgactgttcatttttttcctgccccactgcttgggatggggagttgcaacttcagtgtggaatttcctctttgaggagcctgggcttggatctatcctgatctggtgatgaagccatgattactttagacctagcccaggcttggaggccagctggaggaagaagggtctaaatcctggcctgtagagttagaactaccatttcctccccttagctgcccttgtatgacccggatttgctatgcaaaacaatctatcccaggttctgttctggttggctacattgttcagcaactcacaaaacgtagcacaaacattcattatggagaaagcatcaggactgttgagtaactcctcctttacttttttcctgctggctacagcatggggtgccctataggcacaagcccagctgaagaacagaatggagggctctgggaggaggcagctcactggagagcctacattccttacacaagtgcctaaagagagtgatgctaacactccatctgccctgtccattgccttcatatacagtctacttcgtgttctgtcaccctttggggaggggagttctcctgggacagtgggctctgcatgttctccacttggatacattttggggctaggatcagggcactattcctggagggtccagtcattcaccagcatttgcaaatgtccatagggagcaggtggcagcctctactcccagcaacaagtttgtgttctctccttttctctctttgcctcactctctccagttggttttcagctggggcttgaaatgcatttttagccctttgacgtggcttatgccattcaagaaataaaaagcaagagaatcagctttgggcaatgacaagaaatgagttcttactctgatttttttgtaaaaagataatttttgagacttgaaaaataccccgaccttgagattattcctgtttgaaaggtggtgcatgcagatggagaagtggtgttggcagcaagctttggctcatgtggatttggtttaagtggtgcttcttacccaagcttcaaggaagtgcttgggggacccccagcctcatcctcttagttgggtctcttgttccctttgtaccactgttttgccttccttttcctcttctctctttgcctggcttcctttcccttttcttctattcactctgcttgcttgctggccggcctgcctgcctgcctgcctgcctgcctgcctgtctgcctatgtgatgatgaaatctctgcatggctgcaatgatcccactgttagctggcagggtcaggcttagctccttgactgcagaagaccaagaacctgttccccaagcccagagatgtccacctgggctggactgccctcaagcttatactagagaagagcaactgacctgcccaacttgtgtgaagtcaggagggtttctggcattttccacacctgtccactccttggagctggtttctctcattgctttttctaaatctggttctttttctctttacctggggcctggcttttctgagattgtcttagggttgagctatttgggtatcctgggtttgagtgttaggggatggacataaaggaaaaagagtgatgagaagagaatggagagaatttgaataaaaggtgggaaaggag

SEQ ID NO: 5928 - protein, 782 aa, Homo sapiens; identical to SEQ ID NO: 5926

SEQ ID NO: 5929 - DNA, 7334 bp, Homo sapiens
tgaggcaagcgcctcaggagtgcgtgaggcccacgcagaactcggggagccttttatcctgaggacacaggggaagaattggaggactatattcagctgcgggcgcttacctgccccccctgcagcaggtgttccaggcacctcgccggcctggcattggcactgtggggaaaccaatcaagctcctggccaattactttgaggtggacatccctaagatcgacgtgtaccactacgaggtggacatcaagccggataagtgtccccgtagagtcaaccgggaagtggtggaatacatggtccagcatttcaagcctcagatctttggtgatcgcaagcctgtgtatgatggaaagaagaacatttacactgtcacagcactgcccattggcaacgaacgggtcgactttgaggtgacaatccctggggaagggaaggatcgaatctttaaggtctccatcaagtggctagccattgtgagctggcgaatgctgcatgaggccctggtcagcggccagatccctgttcccttggagtctgtgcaagccctggatgtggccatgaggcacctggcatccatgaggtacacccctgtgggccgctccttcttctcaccgcctgagggctactaccacccgctggggggtgggcgcgaggtctggttcggctttcaccagtctgtgcgccctgccatgtggaagatgatgctcaacattgatgtctcagccactgccttttataaggcacagccagtgattgagttcatgtgtgaggtgctggacatcaggaacatagatgagcagcccaagcccctcacggactctcagcgcgttcgcttcaccaaggagatcaagggcctgaaggtggaagtcacccactgtggacagatgaagaggaagtaccgcgtgtgtaatgttacccgtcgccctgctagccatcagacattccccttacagctggagagtggacagactgtggagtgcacagtggcacagtatttcaagcagaaatataaccttcagctcaagtatccccatctgccctgcctacaagttggccaggaacaaaagcatacctaccttcccctagaggtctgtaacattgtggctgggcagcgctgtattaaaaagctgaccgacaaccagacctcgaccatgataaaggccacagctagatccgctccagacagacaggaggagatcagtcgcctgatgaagaatgccagctacaacttagatccctacatccaggaatttgggatcaaagtgaaggatgacatgacggaggtgacagggcgagtgctgccggcgcccatcttgcagtacggcggccggaaccgggccattgccacacccaatcagggtgtctgggacatgcgggggaaacagttctacaatgggattgagatcaaagtctgggccatcgcctgcttcgcaccccaaaaacagtgtcgagaagaggtgctcaagaacttcacagaccagctgcggaagatttccaaggatgcggggatgcctatccagggtcaaccttgtttctgcaaatatgcacagggggcagacagcgtggagcctatgttccggcatctcaagaacacctactcagggctgcagctcattattgtcatcctgccagggaagacgccggtgtatgctgaggtgaaacgtgtcggagatacactcttgggaatggctacgcagtgtgtgcaggtgaagaacgtggtcaagacctcacctcagactctgtccaacctctgcctcaagatcaatgtcaaacttggtggcattaacaacatcctagtcccacaccagcgctctgccgtttttcaacagccagtgatattcctgggagcagatgttacacaccccccagcaggggatgggaaaaaaccttctatcacagcagtggtaggcagtatggatgcccaccccagccgatactgtgctactgtgcgggtacagcgaccacggcaagagatcattgaagacttgtcctacatggtgcgtgagctcctcatccaattctacaagtccacccgtttcaagcctacccgcatcatcttctaccgagatggggtgcctgaaggccagctaccccagatactccactatgagctactggccattcgtgatgcctgcatcaaactggaaaaggactaccagcctgggatcacttatattgtggtgcagaaacgccatcacacccgccttttctgtgctgacaagaatgagcgaattgggaagagtggtaacatcccagctgggaccacagtggacaccaacatcacccacccatttgagtttgacttctatctgtgcagccacgcaggcatccagggcaccagccgaccatcccattactatgttctttgggatgacaaccgtttcacagcagatgagctccagatcctgacgtaccagctgtgccacacttacgtacgatgcacacgctctgtctctatcccagcacctgcctactatgcccgcctggtggctttccgggcacgataccacctggtggacaaggagcatgacagtggagaggggagccacatatcggggcagagcaatgggcgggacccccaggccctggccaaagccgtgcaggttcaccaggatactctgcgcaccatgtacttcgcttgaaggcagaacgctgttacctcactggatagaagaaagctttccaagccccaggagctgtgccacccaaatccagaggaagcaaggaggagggaggtggggtagggaggagtgtaggatgccttgtttccttctatagaggtggtgtaagagtggggaacagggccagcaagacagaccaccagccagaaatctctgatatcaacctcatgtcccccacccctcaccccatcttgtcacatctggccctgaccccactggaccaaaaggggcagcactggtgcccaccatacacacaggtgtctcatgtgactcacagtgctaaagactcatgcttgacagcttggtaaggtcaactctgtagccctgcagacaaaagctggttaggtttgggtttgatactttagatgggaaagtgaggggcttgagaaagtgggtgggaggagggaaggattttttaggagccttaatcagaaaaggactagatttgtttaagaagaaaaatgaaaccagacccagatcaatattttaggatactagatgttttaatgggttcagaatccagtttgtaggaagattttttaatggttttggttgctcctcccccagctgccaccccccaccttacccttattcctctctgtccacattttctgccccaccttacttctcctccctgacagacatccagcccctagtaatacttaaggcactatggcacttagctttgaagtgacacgaccctgtcttccttccgcccgctggtgggtaaccagtgccttccctgtaacggtaatgctgcagaactgcaaccttttgtacctttctttggggaatggggtgggggtgggagaggaggtagatggggaagaaataccccagacccaacaaacctccagccagaaagccagctattttgcatttgaaggaattgacttcctcattcattgagctttttaaaagatcacaacctcaagatggttaaaatccattgacatttgcactttcaaacatgacaagtctcggagctgctgagatgacaggcccctggcctttccacttatgcctccttttctccttattcctcctacctcccgccccgcccaggtctggagttactttcatagcatttttcactcttggcttcttttctcccttgatggtcaagtctcttatgtttcaatatttcttaactggggtgtcttataacaaaaaactcttaggtctaaaatgagaaaaaagagagaaaacaaaatgttatttttataccataacttgagtgtattgccaaaatttggaaatccttcccatgcctgatgagtttatatcccagaaacattgagccatcagaatgaactgtgtacctgatttgttctctgacctggctaggtagggagggggtggttatcgccccaagatggggtccaggctccatccttcctctgtgcagataatacctttttcttgctatagcctccctcctctgcactgtcctgcactctttcttgcaagtgcatctttttccttcccctggactgtcctctgaccctttggctcatcctagattgcagtgtgtcctgtggacaggctggggaattttgctgctccctattgcttctgtttacaaaaatgaatttttcctggtttcccactagggcatgtgggtgggtggcatggacttttttttttttttttttttgtcttgagacatggggtttggctgtcttgcaggactggagaaggtggtggttctagcttggtctctgttggccttgaagcaagcatcccccctgccctttttccttgactgttcatttttttcctgccccactgcttgggatggggagttgcaacttcagtgtggaatttcctctttgaggagcctgggcttggatctatcctgatctggtgatgaagccatgattactttagacctagcccaggcttggaggccagctggaggaagaagggtctaaatcctggcctgtagagttagaactaccatttcctccccttagctgcccttgtatgacccggatttgctatgcaaaacaatctatcccaggttctgttctggttggctacattgttcagcaactcacaaaacgtagcacaaacattcattatggagaaagcatcaggactgttgagtaactcctcctttacttttttcctgctggctacagcatggggtgccctataggcacaagcccagctgaagaacagaatggagggctctgggaggaggcagctcactggagagcctacattccttacacaagtgcctaaagagagtgatgctaacactccatctgccctgtccattgccttcatatacagtctacttcgtgttctgtcaccctttggggaggggagttctcctgggacagtgggctctgcatgttctccacttggatacattttggggctaggatcagggcactattcctggagggtccagtcattcaccagcatttgcaaatgtccatagggagcaggtggcagcctctactcccagcaacaagtttgtgttctctccttttctctctttgcctcactctctccagttggttttcagctggggcttgaaatgcatttttagccctttgacgtggcttatgccattcaagaaataaaaagcaagagaatcagctttgggcaatgacaagaaatgagttcttactctgatttttttgtaaaaagataatttttgagacttgaaaaataccccgaccttgagattattcctgtttgaaaggtggtgcatgcagatggagaagtggtgttggcagcaagctttggctcatgtggatttggtttaagtggtgcttcttacccaagcttcaaggaagtgcttgggggacccccagcctcatcctcttagttgggtctcttgttccctttgtaccactgttttgccttccttttcctcttctctctttgcctggcttcctttcccttttcttctattcactctgcttgcttgctggccggcctgcctgcctgcctgcctgcctgcctgcctgtctgcctatgtgatgatgaaatctctgcatggctgcaatgatcccactgttagctggcagggtcaggcttagctccttgactgcagaagaccaagaacctgttccccaagcccagagatgtccacctgggctggactgccctcaagcttatactagagaagagcaactgacctgcccaacttgtgtgaagtcaggagggtttctggcattttccacacctgtccactccttggagctggtttctctcattgctttttctaaatctggttctttttctctttacctggggcctggcttttctgagattgtcttagggttgagctatttgggtatcctgggtttgagtgttaggggatggacataaaggaaaaagagtgatgagaagagaatggagagaatttgaataaaaggtgggaaaggagagcactgttctttgattgtttatccagtccaacctgatccattagggatcgaggtgctacactggcctccagggataagcctggggctactgttgctgggaacttaggcttaacataaagccgaagaaggtacctagaaatttgaaacttccctaaaaagctcctaatgcccacctgctagatagcttctctgtggcctcctatttagctaagcagcagtgtttttggatactttttttttctgtttgtgaataaggccagcactcaagatgggcagccaagggtgcactgactattagctggcccataggatatctgtaaggctggtgggacagttttggacctggaatcatgtgtaactaacaaggttggacgtttcttccccatcagggtagaaaaatcatctcaaactagccaaaaggcagttttggaaactacattgggggacgttatttttatttatatatggggcctaggccaatccaggatggtagctggaataccttccttcttaaaatctgatcatggcagggatatgcagggcactttttactatttggccttctaagcagattgggaaggaggtattttctggttttcgctttcctccgacttaataggacttgccttctccctgggcagggagagaggctgggttggtgctctcccttactctactcatactgacttagagcctctggctgctgtttgggcatccaagaaagggaggggaaggaatgagctaaaaacaaaacagaatgaggtgggaaagggagattttcttctttacagaggaaaataggaaaccctccaagaattgtgcaagtaaagacatttgttgaatgcactgagtcccttggtgtagtagcaataaggaaaaatgaaattactttcctgtgcacacagtccagcctaattggtatgtgatgttgcacttagcagccatgtggtgggcatgtgtgactactctggttttcactttagtttctaaactttttatccctctcaagtccagcatggatggggaaatgtctctggatccccacagctgtgtacttgtttgcatttgtttccctttgagatttgtgtttgtgtcctgctttgagctgtaccttgtccagtccattgtgaaattatcccagcagctgtaatgtacagttccttctgaagcaagcaacatcagcagcagcagcagcagcagcacaattctgtgttttataaagacaacagtggcttctatttct

SEQ ID NO: 5930 - protein, 782 aa, Homo sapiens; identical to SEQ ID NO: 5926

SEQ ID NO: 5931 - DNA, 7840 bp, Homo sapiens
tgaggcaagcgcctcaggagtgcgtgaggcccacgcagaactcggggagccttttatcctgaggacacaggggaagaattggaggactatattcagctgcgggcgcttacctgccccccctgcagcaggtgttccaggcacctcgccggcctggcattggcactgtggggaaaccaatcaagctcctggccaattactttgaggtggacatccctaagatcgacgtgtaccactacgaggtggacatcaagccggataagtgtccccgtagagtcaaccgggaagtggtggaatacatggtccagcatttcaagcctcagatctttggtgatcgcaagcctgtgtatgatggaaagaagaacatttacactgtcacagcactgcccattggcaacgaacgggtcgactttgaggtgacaatccctggggaagggaaggatcgaatctttaaggtctccatcaagtggctagccattgtgagctggcgaatgctgcatgaggccctggtcagcggccagatccctgttcccttggagtctgtgcaagccctggatgtggccatgaggcacctggcatccatgaggtacacccctgtgggccgctccttcttctcaccgcctgagggctactaccacccgctggggggtgggcgcgaggtctggttcggctttcaccagtctgtgcgccctgccatgtggaagatgatgctcaacattgatgtctcagccactgccttttataaggcacagccagtgattgagttcatgtgtgaggtgctggacatcaggaacatagatgagcagcccaagcccctcacggactctcagcgcgttcgcttcaccaaggagatcaagggcctgaaggtggaagtcacccactgtggacagatgaagaggaagtaccgcgtgtgtaatgttacccgtcgccctgctagccatcagacattccccttacagctggagagtggacagactgtggagtgcacagtggcacagtatttcaagcagaaatataaccttcagctcaagtatccccatctgccctgcctacaagttggccaggaacaaaagcatacctaccttcccctagaggtctgtaacattgtggctgggcagcgctgtattaaaaagctgaccgacaaccagacctcgaccatgataaaggccacagctagatccgctccagacagacaggaggagatcagtcgcctgatgaagaatgccagctacaacttagatccctacatccaggaatttgggatcaaagtgaaggatgacatgacggaggtgacagggcgagtgctgccggcgcccatcttgcagtacggcggccggaaccgggccattgccacacccaatcagggtgtctgggacatgcgggggaaacagttctacaatgggattgagatcaaagtctgggccatcgcctgcttcgcaccccaaaaacagtgtcgagaagaggtgctcaagaacttcacagaccagctgcggaagatttccaaggatgcggggatgcctatccagggtcaaccttgtttctgcaaatatgcacagggggcagacagcgtggagcctatgttccggcatctcaagaacacctactcagggctgcagctcattattgtcatcctgccagggaagacgccggtgtatgctgaggtgaaacgtgtcggagatacactcttgggaatggctacgcagtgtgtgcaggtgaagaacgtggtcaagacctcacctcagactctgtccaacctctgcctcaagatcaatgtcaaacttggtggcattaacaacatcctagtcccacaccagcgctctgccgtttttcaacagccagtgatattcctgggagcagatgttacacaccccccagcaggggatgggaaaaaaccttctatcacagcagtggtaggcagtatggatgcccaccccagccgatactgtgctactgtgcgggtacagcgaccacggcaagagatcattgaagacttgtcctacatggtgcgtgagctcctcatccaattctacaagtccacccgtttcaagcctacccgcatcatcttctaccgagatggggtgcctgaaggccagctaccccagatactccactatgagctactggccattcgtgatgcctgcatcaaactggaaaaggactaccagcctgggatcacttatattgtggtgcagaaacgccatcacacccgccttttctgtgctgacaagaatgagcgaattgggaagagtggtaacatcccagctgggaccacagtggacaccaacatcacccacccatttgagtttgacttctatctgtgcagccacgcaggcatccagggcaccagccgaccatcccattactatgttctttgggatgacaaccgtttcacagcagatgagctccagatcctgacgtaccagctgtgccacacttacgtacgatgcacacgctctgtctctatcccagcacctgcctactatgcccgcctggtggctttccgggcacgataccacctggtggacaaggagcatgacagtggagaggggagccacatatcggggcagagcaatgggcgggacccccaggccctggccaaagccgtgcaggttcaccaggatactctgcgcaccatgtacttcgcttgaaggcagaacgctgttacctcactggatagaagaaagctttccaagccccaggagctgtgccacccaaatccagaggaagcaaggaggagggaggtggggtagggaggagtgtaggatgccttgtttccttctatagaggtggtgtaagagtggggaacagggccagcaagacagaccaccagccagaaatctctgatatcaacctcatgtcccccacccctcaccccatcttgtcacatctggccctgaccccactggaccaaaaggggcagcactggtgcccaccatacacacaggtgtctcatgtgactcacagtgctaaagactcatgcttgacagcttggtaaggtcaactctgtagccctgcagacaaaagctggttaggtttgggtttgatactttagatgggaaagtgaggggcttgagaaagtgggtgggaggagggaaggattttttaggagccttaatcagaaaaggactagatttgtttaagaagaaaaatgaaaccagacccagatcaatattttaggatactagatgttttaatgggttcagaatccagtttgtaggaagattttttaatggttttggttgctcctcccccagctgccaccccccaccttacccttattcctctctgtccacattttctgccccaccttacttctcctccctgacagacatccagcccctagtaatacttaaggcactatggcacttagctttgaagtgacacgaccctgtcttccttccgcccgctggtgggtaaccagtgccttccctgtaacggtaatgctgcagaactgcaaccttttgtacctttctttggggaatggggtgggggtgggagaggaggtagatggggaagaaataccccagacccaacaaacctccagccagaaagccagctattttgcatttgaaggaattgacttcctcattcattgagctttttaaaagatcacaacctcaagatggttaaaatccattgacatttgcactttcaaacatgacaagtctcggagctgctgagatgacaggcccctggcctttccacttatgcctccttttctccttattcctcctacctcccgccccgcccaggtctggagttactttcatagcatttttcactcttggcttcttttctcccttgatggtcaagtctcttatgtttcaatatttcttaactggggtgtcttataacaaaaaactcttaggtctaaaatgagaaaaaagagagaaaacaaaatgttatttttataccataacttgagtgtattgccaaaatttggaaatccttcccatgcctgatgagtttatatcccagaaacattgagccatcagaatgaactgtgtacctgatttgttctctgacctggctaggtagggagggggtggttatcgccccaagatggggtccaggctccatccttcctctgtgcagataatacctttttcttgctatagcctccctcctctgcactgtcctgcactctttcttgcaagtgcatctttttccttcccctggactgtcctctgaccctttggctcatcctagattgcagtgtgtcctgtggacaggctggggaattttgctgctccctattgcttctgtttacaaaaatgaatttttcctggtttcccactagggcatgtgggtgggtggcatggacttttttttttttttttttttgtcttgagacatggggtttggctgtcttgcaggactggagaaggtggtggttctagcttggtctctgttggccttgaagcaagcatcccccctgccctttttccttgactgttcatttttttcctgccccactgcttgggatggggagttgcaacttcagtgtggaatttcctctttgaggagcctgggcttggatctatcctgatctggtgatgaagccatgattactttagacctagcccaggcttggaggccagctggaggaagaagggtctaaatcctggcctgtagagttagaactaccatttcctccccttagctgcccttgtatgacccggatttgctatgcaaaacaatctatcccaggttctgttctggttggctacattgttcagcaactcacaaaacgtagcacaaacattcattatggagaaagcatcaggactgttgagtaactcctcctttacttttttcctgctggctacagcatggggtgccctataggcacaagcccagctgaagaacagaatggagggctctgggaggaggcagctcactggagagcctacattccttacacaagtgcctaaagagagtgatgctaacactccatctgccctgtccattgccttcatatacagtctacttcgtgttctgtcaccctttggggaggggagttctcctgggacagtgggctctgcatgttctccacttggatacattttggggctaggatcagggcactattcctggagggtccagtcattcaccagcatttgcaaatgtccatagggagcaggtggcagcctctactcccagcaacaagtttgtgttctctccttttctctctttgcctcactctctccagttggttttcagctggggcttgaaatgcatttttagccctttgacgtggcttatgccattcaagaaataaaaagcaagagaatcagctttgggcaatgacaagaaatgagttcttactctgatttttttgtaaaaagataatttttgagacttgaaaaataccccgaccttgagattattcctgtttgaaaggtggtgcatgcagatggagaagtggtgttggcagcaagctttggctcatgtggatttggtttaagtggtgcttcttacccaagcttcaaggaagtgcttgggggacccccagcctcatcctcttagttgggtctcttgttccctttgtaccactgttttgccttccttttcctcttctctctttgcctggcttcctttcccttttcttctattcactctgcttgcttgctggccggcctgcctgcctgcctgcctgcctgcctgcctgtctgcctatgtgatgatgaaatctctgcatggctgcaatgatcccactgttagctggcagggtcaggcttagctccttgactgcagaagaccaagaacctgttccccaagcccagagatgtccacctgggctggactgccctcaagcttatactagagaagagcaactgacctgcccaacttgtgtgaagtcaggagggtttctggcattttccacacctgtccactccttggagctggtttctctcattgctttttctaaatctggttctttttctctttacctggggcctggcttttctgagattgtcttagggttgagctatttgggtatcctgggtttgagtgttaggggatggacataaaggaaaaagagtgatgagaagagaatggagagaatttgaataaaaggtgggaaaggagagcactgttctttgattgtttatccagtccaacctgatccattagggatcgaggtgctacactggcctccagggataagcctggggctactgttgctgggaacttaggcttaacataaagccgaagaaggtacctagaaatttgaaacttccctaaaaagctcctaatgcccacctgctagatagcttctctgtggcctcctatttagctaagcagcagtgtttttggatactttttttttctgtttgtgaataaggccagcactcaagatgggcagccaagggtgcactgactattagctggcccataggatatctgtaaggctggtgggacagttttggacctggaatcatgtgtaactaacaaggttggacgtttcttccccatcagggtagaaaaatcatctcaaactagccaaaaggcagttttggaaactacattgggggacgttatttttatttatatatggggcctaggccaatccaggatggtagctggaataccttccttcttaaaatctgatcatggcagggatatgcagggcactttttactatttggccttctaagcagattgggaaggaggtattttctggttttcgctttcctccgacttaataggacttgccttctccctgggcagggagagaggctgggttggtgctctcccttactctactcatactgacttagagcctctggctgctgtttgggcatccaagaaagggaggggaaggaatgagctaaaaacaaaacagaatgaggtgggaaagggagattttcttctttacagaggaaaataggaaaccctccaagaattgtgcaagtaaagacatttgttgaatgcactgagtcccttggtgtagtagcaataaggaaaaatgaaattactttcctgtgcacacagtccagcctaattggtatgtgatgttgcacttagcagccatgtggtgggcatgtgtgactactctggttttcactttagtttctaaactttttatccctctcaagtccagcatggatggggaaatgtctctggatccccacagctgtgtacttgtttgcatttgtttccctttgagatttgtgtttgtgtcctgctttgagctgtaccttgtccagtccattgtgaaattatcccagcagctgtaatgtacagttccttctgaagcaagcaacatcagcagcagcagcagcagcagcacaattctgtgttttataaagacaacagtggcttctatttctaaagtgcggtctttctctttttttttcctaccagcaaaacaaacttttgggactgattacatctctaatagattttaggtgagaataatactgtagattgttatgcaggaatacttcacagagccttcatttattcttcattcaacaaacatgcaaagcactgtgccagcagtattgtggggaggggaggcacaattcaaaatgaggaaaatagtgtccgtctcattaagggaattaagtttggtgggggatatgattagccaaatagtcccctggcataggaggaagataatgagggagtggaataaggctacaacaacgaatatagggaggaagggacagatttgagagacgaggtagaattaataggactcgatggctggtgggaggagaagacaggagtagaggttagctcccaggtttctccttgaccataggagtgtgttgggacattctgccagtcaagatgggggtgacggggagactgtagaaggaaggtggggagt

SEQ ID NO: 5932 - protein, 782 aa, Homo sapiens; identical to SEQ ID NO: 5926

SEQ ID NO: 5933 - DNA, 7982 bp, Homo sapiens
actggcagctggccgggcgctcgcagtgggagctgctgcaggctccgcggcggcggcaacggaggctgcgggggcggcggcgcgagcggccgggcttggtaggggagccgagcccggcccgggatcccgagcagcgagagtgtggggtacctaggcccctcacgctggacttcacagtctccgggccgcctgacctccgcacgggtatatgggatggaagcgggaccctcgggagcagctgcgggcgcttacctgccccccctgcagcaggtgttccaggcacctcgccggcctggcattggcactgtggggaaaccaatcaagctcctggccaattactttgaggtggacatccctaagatcgacgtgtaccactacgaggtggacatcaagccggataagtgtccccgtagagtcaaccgggaagtggtggaatacatggtccagcatttcaagcctcagatctttggtgatcgcaagcctgtgtatgatggaaagaagaacatttacactgtcacagcactgcccattggcaacgaacgggtcgactttgaggtgacaatccctggggaagggaaggatcgaatctttaaggtctccatcaagtggctagccattgtgagctggcgaatgctgcatgaggccctggtcagcggccagatccctgttcccttggagtctgtgcaagccctggatgtggccatgaggcacctggcatccatgaggtacacccctgtgggccgctccttcttctcaccgcctgagggctactaccacccgctggggggtgggcgcgaggtctggttcggctttcaccagtctgtgcgccctgccatgtggaagatgatgctcaacattgatgtctcagccactgccttttataaggcacagccagtgattgagttcatgtgtgaggtgctggacatcaggaacatagatgagcagcccaagcccctcacggactctcagcgcgttcgcttcaccaaggagatcaagggcctgaaggtggaagtcacccactgtggacagatgaagaggaagtaccgcgtgtgtaatgttacccgtcgccctgctagccatcagacattccccttacagctggagagtggacagactgtggagtgcacagtggcacagtatttcaagcagaaatataaccttcagctcaagtatccccatctgccctgcctacaagttggccaggaacaaaagcatacctaccttcccctagaggtctgtaacattgtggctgggcagcgctgtattaaaaagctgaccgacaaccagacctcgaccatgataaaggccacagctagatccgctccagacagacaggaggagatcagtcgcctgatgaagaatgccagctacaacttagatccctacatccaggaatttgggatcaaagtgaaggatgacatgacggaggtgacagggcgagtgctgccggcgcccatcttgcagtacggcggccggaaccgggccattgccacacccaatcagggtgtctgggacatgcgggggaaacagttctacaatgggattgagatcaaagtctgggccatcgcctgcttcgcaccccaaaaacagtgtcgagaagaggtgctcaagaacttcacagaccagctgcggaagatttccaaggatgcggggatgcctatccagggtcaaccttgtttctgcaaatatgcacagggggcagacagcgtggagcctatgttccggcatctcaagaacacctactcagggctgcagctcattattgtcatcctgccagggaagacgccggtgtatgctgaggtgaaacgtgtcggagatacactcttgggaatggctacgcagtgtgtgcaggtgaagaacgtggtcaagacctcacctcagactctgtccaacctctgcctcaagatcaatgtcaaacttggtggcattaacaacatcctagtcccacaccagcgctctgccgtttttcaacagccagtgatattcctgggagcagatgttacacaccccccagcaggggatgggaaaaaaccttctatcacagcagtggtaggcagtatggatgcccaccccagccgatactgtgctactgtgcgggtacagcgaccacggcaagagatcattgaagacttgtcctacatggtgcgtgagctcctcatccaattctacaagtccacccgtttcaagcctacccgcatcatcttctaccgagatggggtgcctgaaggccagctaccccagatactccactatgagctactggccattcgtgatgcctgcatcaaactggaaaaggactaccagcctgggatcacttatattgtggtgcagaaacgccatcacacccgccttttctgtgctgacaagaatgagcgaattgggaagagtggtaacatcccagctgggaccacagtggacaccaacatcacccacccatttgagtttgacttctatctgtgcagccacgcaggcatccagggcaccagccgaccatcccattactatgttctttgggatgacaaccgtttcacagcagatgagctccagatcctgacgtaccagctgtgccacacttacgtacgatgcacacgctctgtctctatcccagcacctgcctactatgcccgcctggtggctttccgggcacgataccacctggtggacaaggagcatgacagtggagaggggagccacatatcggggcagagcaatgggcgggacccccaggccctggccaaagccgtgcaggttcaccaggatactctgcgcaccatgtacttcgcttgaaggcagaacgctgttacctcactggatagaagaaagctttccaagccccaggagctgtgccacccaaatccagaggaagcaaggaggagggaggtggggtagggaggagtgtaggatgccttgtttccttctatagaggtggtgtaagagtggggaacagggccagcaagacagaccaccagccagaaatctctgatatcaacctcatgtcccccacccctcaccccatcttgtcacatctggccctgaccccactggaccaaaaggggcagcactggtgcccaccatacacacaggtgtctcatgtgactcacagtgctaaagactcatgcttgacagcttggtaaggtcaactctgtagccctgcagacaaaagctggttaggtttgggtttgatactttagatgggaaagtgaggggcttgagaaagtgggtgggaggagggaaggattttttaggagccttaatcagaaaaggactagatttgtttaagaagaaaaatgaaaccagacccagatcaatattttaggatactagatgttttaatgggttcagaatccagtttgtaggaagattttttaatggttttggttgctcctcccccagctgccaccccccaccttacccttattcctctctgtccacattttctgccccaccttacttctcctccctgacagacatccagcccctagtaatacttaaggcactatggcacttagctttgaagtgacacgaccctgtcttccttccgcccgctggtgggtaaccagtgccttccctgtaacggtaatgctgcagaactgcaaccttttgtacctttctttggggaatggggtgggggtgggagaggaggtagatggggaagaaataccccagacccaacaaacctccagccagaaagccagctattttgcatttgaaggaattgacttcctcattcattgagctttttaaaagatcacaacctcaagatggttaaaatccattgacatttgcactttcaaacatgacaagtctcggagctgctgagatgacaggcccctggcctttccacttatgcctccttttctccttattcctcctacctcccgccccgcccaggtctggagttactttcatagcatttttcactcttggcttcttttctcccttgatggtcaagtctcttatgtttcaatatttcttaactggggtgtcttataacaaaaaactcttaggtctaaaatgagaaaaaagagagaaaacaaaatgttatttttataccataacttgagtgtattgccaaaatttggaaatccttcccatgcctgatgagtttatatcccagaaacattgagccatcagaatgaactgtgtacctgatttgttctctgacctggctaggtagggagggggtggttatcgccccaagatggggtccaggctccatccttcctctgtgcagataatacctttttcttgctatagcctccctcctctgcactgtcctgcactctttcttgcaagtgcatctttttccttcccctggactgtcctctgaccctttggctcatcctagattgcagtgtgtcctgtggacaggctggggaattttgctgctccctattgcttctgtttacaaaaatgaatttttcctggtttcccactagggcatgtgggtgggtggcatggacttttttttttttttttttttgtcttgagacatggggtttggctgtcttgcaggactggagaaggtggtggttctagcttggtctctgttggccttgaagcaagcatcccccctgccctttttccttgactgttcatttttttcctgccccactgcttgggatggggagttgcaacttcagtgtggaatttcctctttgaggagcctgggcttggatctatcctgatctggtgatgaagccatgattactttagacctagcccaggcttggaggccagctggaggaagaagggtctaaatcctggcctgtagagttagaactaccatttcctccccttagctgcccttgtatgacccggatttgctatgcaaaacaatctatcccaggttctgttctggttggctacattgttcagcaactcacaaaacgtagcacaaacattcattatggagaaagcatcaggactgttgagtaactcctcctttacttttttcctgctggctacagcatggggtgccctataggcacaagcccagctgaagaacagaatggagggctctgggaggaggcagctcactggagagcctacattccttacacaagtgcctaaagagagtgatgctaacactccatctgccctgtccattgccttcatatacagtctacttcgtgttctgtcaccctttggggaggggagttctcctgggacagtgggctctgcatgttctccacttggatacattttggggctaggatcagggcactattcctggagggtccagtcattcaccagcatttgcaaatgtccatagggagcaggtggcagcctctactcccagcaacaagtttgtgttctctccttttctctctttgcctcactctctccagttggttttcagctggggcttgaaatgcatttttagccctttgacgtggcttatgccattcaagaaataaaaagcaagagaatcagctttgggcaatgacaagaaatgagttcttactctgatttttttgtaaaaagataatttttgagacttgaaaaataccccgaccttgagattattcctgtttgaaaggtggtgcatgcagatggagaagtggtgttggcagcaagctttggctcatgtggatttggtttaagtggtgcttcttacccaagcttcaaggaagtgcttgggggacccccagcctcatcctcttagttgggtctcttgttccctttgtaccactgttttgccttccttttcctcttctctctttgcctggcttcctttcccttttcttctattcactctgcttgcttgctggccggcctgcctgcctgcctgcctgcctgcctgcctgtctgcctatgtgatgatgaaatctctgcatggctgcaatgatcccactgttagctggcagggtcaggcttagctccttgactgcagaagaccaagaacctgttccccaagcccagagatgtccacctgggctggactgccctcaagcttatactagagaagagcaactgacctgcccaacttgtgtgaagtcaggagggtttctggcattttccacacctgtccactccttggagctggtttctctcattgctttttctaaatctggttctttttctctttacctggggcctggcttttctgagattgtcttagggttgagctatttgggtatcctgggtttgagtgttaggggatggacataaaggaaaaagagtgatgagaagagaatggagagaatttgaataaaaggtgggaaaggagagcactgttctttgattgtttatccagtccaacctgatccattagggatcgaggtgctacactggcctccagggataagcctggggctactgttgctgggaacttaggcttaacataaagccgaagaaggtacctagaaatttgaaacttccctaaaaagctcctaatgcccacctgctagatagcttctctgtggcctcctatttagctaagcagcagtgtttttggatactttttttttctgtttgtgaataaggccagcactcaagatgggcagccaagggtgcactgactattagctggcccataggatatctgtaaggctggtgggacagttttggacctggaatcatgtgtaactaacaaggttggacgtttcttccccatcagggtagaaaaatcatctcaaactagccaaaaggcagttttggaaactacattgggggacgttatttttatttatatatggggcctaggccaatccaggatggtagctggaataccttccttcttaaaatctgatcatggcagggatatgcagggcactttttactatttggccttctaagcagattgggaaggaggtattttctggttttcgctttcctccgacttaataggacttgccttctccctgggcagggagagaggctgggttggtgctctcccttactctactcatactgacttagagcctctggctgctgtttgggcatccaagaaagggaggggaaggaatgagctaaaaacaaaacagaatgaggtgggaaagggagattttcttctttacagaggaaaataggaaaccctccaagaattgtgcaagtaaagacatttgttgaatgcactgagtcccttggtgtagtagcaataaggaaaaatgaaattactttcctgtgcacacagtccagcctaattggtatgtgatgttgcacttagcagccatgtggtgggcatgtgtgactactctggttttcactttagtttctaaactttttatccctctcaagtccagcatggatggggaaatgtctctggatccccacagctgtgtacttgtttgcatttgtttccctttgagatttgtgtttgtgtcctgctttgagctgtaccttgtccagtccattgtgaaattatcccagcagctgtaatgtacagttccttctgaagcaagcaacatcagcagcagcagcagcagcagcacaattctgtgttttataaagacaacagtggcttctatttctaaagtgcggtctttctctttttttttcctaccagcaaaacaaacttttgggactgattacatctctaatagattttaggtgagaataatactgtagattgttatgcaggaatacttcacagagccttcatttattcttcattcaacaaacatgcaaagcactgtgccagcagtattgtggggaggggaggcacaattcaaaatgaggaaaatagtgtccgtctcattaagggaattaagtttggtgggggatatgattagccaaatagtcccctggcataggaggaagataatgagggagtggaataaggctacaacaacgaatatagggaggaagggacagatttgagagacgaggtagaattaataggactcgatggctggtgggaggagaagacaggagtagaggttagctcccaggtttctccttgaccataggagtgtgttgggacattctgccagtcaagatgggggtgacggggagactgtagaaggaaggtggggagt

SEQ ID NO: 5934 - protein, 857 aa, Homo sapiens; identical to SEQ ID NO: 142

SEQ ID NO: 5935 - DNA, 4132 bp, Homo sapiens
agctggccgggcgctcgcagtgggagctgctgcaggctccgcggcggcggcaacggaggctgcgggggcggcggcgcgagcggccgggcttggtaggggagccgagcccggcccgggatcccgagcagcgagagtgtggggtacctaggcccctcacgctggacttcacagtctccgggccgcctgacctccgcacgggtatatgggatggaagcgggaccctcgggagcagctgcgggcgcttacctgccccccctgcagcaggtgttccaggcacctcgccggcctggcattggcactgtggggaaaccaatcaagctcctggccaattactttgaggtggacatccctaagatcgacgtgtaccactacgaggtggacatcaagccggataagtgtccccgtagagtcaaccgggaagtggtggaatacatggtccagcatttcaagcctcagatctttggtgatcgcaagcctgtgtatgatggaaagaagaacatttacactgtcacagcactgcccattggcaacgaacgggtcgactttgaggtgacaatccctggggaagggaaggatcgaatctttaaggtctccatcaagtggctagccattgtgagctggcgaatgctgcatgaggccctggtcagcggccagatccctgttcccttggagtctgtgcaagccctggatgtggccatgaggcacctggcatccatgaggtacacccctgtgggccgctccttcttctcaccgcctgagggctactaccacccgctggggggtgggcgcgaggtctggttcggctttcaccagtctgtgcgccctgccatgtggaagatgatgctcaacattgatgtctcagccactgccttttataaggcacagccagtgattgagttcatgtgtgaggtgctggacatcaggaacatagatgagcagcccaagcccctcacggactctcagcgcgttcgcttcaccaaggagatcaagggcctgaaggtggaagtcacccactgtggacagatgaagaggaagtaccgcgtgtgtaatgttacccgtcgccctgctagccatcagacattccccttacagctggagagtggacagactgtggagtgcacagtggcacagtatttcaagcagaaatataaccttcagctcaagtatccccatctgccctgcctacaagttggccaggaacaaaagcatacctaccttcccctagaggtctgtaacattgtggctgggcagcgctgtattaaaaagctgaccgacaaccagacctcgaccatgataaaggccacagctagatccgctccagacagacaggaggagatcagtcgcctgatgaagaatgccagctacaacttagatccctacatccaggaatttgggatcaaagtgaaggatgacatgacggaggtgacagggcgagtgctgccggcgcccatcttgcagtacggcggccggaaccgggccattgccacacccaatcagggtgtctgggacatgcgggggaaacagttctacaatgggattgagatcaaagtctgggccatcgcctgcttcgcaccccaaaaacagtgtcgagaagaggtgctcaagaacttcacagaccagctgcggaagatttccaaggatgcggggatgcctatccagggtcaaccttgtttctgcaaatatgcacagggggcagacagcgtggagcctatgttccggcatctcaagaacacctactcagggctgcagctcattattgtcatcctgccagggaagacgccggtgtatgctgaggtgaaacgtgtcggagatacactcttgggaatggctacgcagtgtgtgcaggtgaagaacgtggtcaagacctcacctcagactctgtccaacctctgcctcaagatcaatgtcaaacttggtggcattaacaacatcctagtcccacaccagcgctctgccgtttttcaacagccagtgatattcctgggagcagatgttacacaccccccagcaggggatgggaaaaaaccttctatcacagcagtggtaggcagtatggatgcccaccccagccgatactgtgctactgtgcgggtacagcgaccacggcaagagatcattgaagacttgtcctacatggtgcgtgagctcctcatccaattctacaagtccacccgtttcaagcctacccgcatcatcttctaccgagatggggtgcctgaaggccagctaccccagatactccactatgagctactggccattcgtgatgcctgcatcaaactggaaaaggactaccagcctgggatcacttatattgtggtgcagaaacgccatcacacccgccttttctgtgctgacaagaatgagcgaattgggaagagtggtaacatcccagctgggaccacagtggacaccaacatcacccacccatttgagtttgacttctatctgtgcagccacgcaggcatccagggcaccagccgaccatcccattactatgttctttgggatgacaaccgtttcacagcagatgagctccagatcctgacgtaccagctgtgccacacttacgtacgatgcacacgctctgtctctatcccagcacctgcctactatgcccgcctggtggctttccgggcacgataccacctggtggacaaggagcatgacagtggagaggggagccacatatcggggcagagcaatgggcgggacccccaggccctggccaaagccgtgcaggttcaccaggatactctgcgcaccatgtacttcgcttgaaggcagaacgctgttacctcactggatagaagaaagctttccaagccccaggagctgtgccacccaaatccagaggaagcaaggaggagggaggtggggtagggaggagtgtaggatgccttgtttccttctatagaggtggtgtaagagtggggaacagggccagcaagacagaccaccagccagaaatctctgatatcaacctcatgtcccccacccctcaccccatcttgtcacatctggccctgaccccactggaccaaaaggggcagcactggtgcccaccatacacacaggtgtctcatgtgactcacagtgctaaagactcatgcttgacagcttggtaaggtcaactctgtagccctgcagacaaaagctggttaggtttgggtttgatactttagatgggaaagtgaggggcttgagaaagtgggtgggaggagggaaggattttttaggagccttaatcagaaaaggactagatttgtttaagaagaaaaatgaaaccagacccagatcaatattttaggatactagatgttttaatgggttcagaatccagtttgtaggaagattttttaatggttttggttgctcctcccccagctgccaccccccaccttacccttattcctctctgtccacattttctgccccaccttacttctcctccctgacagacatccagcccctagtaatacttaaggcactatggcacttagctttgaagtgacacgaccctgtcttccttccgcccgctggtgggtaaccagtgccttccctgtaacggtaatgctgcagaactgcaaccttttgtacctttctttggggaatggggtgggggtgggagaggaggtagatggggaagaaataccccagacccaacaaacctccagccagaaagccagctattttgcatttgaaggaattgacttcctcattcattgagctttttaaaagatcacaacctcaagatggttaaaatccattgacatttgcactttcaaacatgacaagtctcggagctgctgagatgacaggcccctggcctttccacttatgcctccttttctccttattcctcctacctcccgccccgcccaggtctggagttactttcatagcatttttcactcttggcttcttttctcccttgatggtcaagtctcttatgtttcaatatttcttaactggggtgtcttataacaaaaaactcttaggtctaaaatgagaaaaaagagagaaaacaaaatgttatttttataccataacttgagtgtattgccaaaatttggaaatccttcccatgcctgatgagtttatatcccagaaacattgagccatcagaatg

SEQ ID NO: 5936 - protein, 857 aa, Homo sapiens; identical to SEQ ID NO: 142

SEQ ID NO: 5937 - DNA, 462 bp, Homo sapiens
atccaatgttttggcttgggaatggtacagcatgcttcggaaaggcagtacttactcagaattttccctttcctgggctcaattatgttacacttctctctagcctcaaatattttattgggacttcgagtttctttcatttacatgcggttccttgattataccaccagtcagattcttctaaagacccttcaccatccctcctgggaggctgggtaaaatggcatcctcctagtgatggtcaaagcaaggtcccattggcttttggttgccctgagagcgtagaaggacagtgtcacatttgccctgttctgatcaggtactatacctatcttgtctttagtatatttaattgcttcctctccactaaactgatattattgtttttttaatgtaaactttttattaaattgtatatatagaaatcttacatgtttagctcagtgatatttcataaagtgt

SEQ ID NO: 5938 - protein, 65 aa, Homo sapiens
MVQHASERQYLLRIFPFLGSIMLHFSLASNILLGLRVSFIYMRFLDYTTSQILLKTLHHPSWEAG

SEQ ID NO: 5939 - DNA, 2473 bp, Homo sapiens
aacaatctatcccaggttctgttctggttggctacattgttcagcaactcacaaaacgtagcacaaacattcattatggagaaagcatcaggactgttgagtaactcctcctttacttttttcctgctggctacagcatggggtgccctataggcacaagcccagctgaagaacagaatggagggctctgggaggaggcagctcactggagagcctacattccttacacaagtgcctaaagagagtgatgctaacactccatctgccctgtccattgccttcatatacagtctacttcgtgttctgtcaccctttggggaggggagttctcctgggacagtgggctctgcatgttctccacttggatacattttggggctaggatcagggcactattcctggagggtccagtcattcaccagcatttgcaaatgtccatagggagcaggtggcagcctctactcccagcaacaagtttgtgttctctccttttctctctttgcctcactctctccagttggttttcagctggggcttgaaatgcatttttagccctttgacgtggcttatgccattcaagaaataaaaagcaagagaatcagctttgggcaatgacaagaaatgagttcttactctgatttttttgtaaaaagataatttttgagacttgaaaaataccccgaccttgagattattcctgtttgaaaggtggtgcatgcagatggagaagtggtgttggcagcaagctttggctcatgtggatttggtttaagtggtgcttcttacccaagcttcaaggaagtgcttgggggacccccagcctcatcctcttagttgggtctcttgttccctttgtaccactgttttgccttccttttcctcttctctctttgcctggcttcctttcccttttcttctattcactctgcttgctgggctggactgccctcaagcttatactagagaagagcaactgacctgcccaacttgtgtgaagtcaggagggtttctggcattttccacacctgtccactccttggagctggtttctctcattgctttttctaaatctggttctttttctctttacctggggcctggcttttctgagattgtcttagggttgagctatttgggtatcctgggtttgagtgttaggggatggacataaaggaaaaagagtgatgagaagagaatggagagaatttgaataaaaggtgggaaaggagagcactgttctttgattgtttatccagtccaacctgatccattagggatcgaggtgctacactggcctccagggataagcctggggctactgttgctgggaacttaggcttaacataaagccgaagaaggtacctagaaatttgaaacttccctaaaaagctcctaatgcccacctgctagatagcttctctgtggcctcctatttagctaagcagcagtgtttttggatactttttttttctgtttgtgaataaggccagcactcaagatgggcagccaagggtgcactgactattagctggcccataggatatctgtaaggctggtgggacagttttggacctggaatcatgtgtaactaacaaggttggacgtttcttccccatcagggtagaaaaatcatctcaaactagccaaaaggcagttttggaaactacattgggggacgttatttttatttatatatggggcctaggccaatccaggatggtagctggaataccttccttcttaaaatctgatcatggcagggatatgcagggcactttttactatttggccttctaagcagattgggaaggaggtattttctggttttcgctttcctccgacttaataggacttgccttctccctgggcagggagagaggctgggttggtgctctcccttactctactcatactgacttagagcctctggctgctgtttgggcatccaagaaagggaggggaaggaatgagctaaaaacaaaacagaatgaggtgggaaagggagattttcttctttacagaggaaaataggaaaccctccaagaattgtgcaagtaaagacatttgttgaatgcactgagtcccttggtgtagtagcaataaggaaaaatgaaattactttcctgtgcacacagtccagcctaattggtatgtgatgttgcacttagcagccatgtggtgggcatgtgtgactactctggttttcactttagtttctaaactttttatccctctcaagtccagcatggatggggaaatgtctctggatccccacagctgtgtacttgtttgcatttgtttccctttgagatttgtgtttgtgtcctgctttgagctgtaccttgtccagtccattgtgaaattatcccagcagctgtaatgtacagttccttctgaagcaagcaacatcagcagcagcagcagcagcagcacaattctgtgttttataaagacaacagtggcttctatttct

SEQ ID NO: 5940 - protein, 73 aa, Homo sapiens
MWIWFKWCFLPKLQGSAWGTPSLILLVGSLVPFVPLFCLPFPLLSLPGFLSLFFYSLCLLGWTALKLILEKSN

SEQ ID NO: 5941 - DNA, 2979 bp, Homo sapiens
aacaatctatcccaggttctgttctggttggctacattgttcagcaactcacaaaacgtagcacaaacattcattatggagaaagcatcaggactgttgagtaactcctcctttacttttttcctgctggctacagcatggggtgccctataggcacaagcccagctgaagaacagaatggagggctctgggaggaggcagctcactggagagcctacattccttacacaagtgcctaaagagagtgatgctaacactccatctgccctgtccattgccttcatatacagtctacttcgtgttctgtcaccctttggggaggggagttctcctgggacagtgggctctgcatgttctccacttggatacattttggggctaggatcagggcactattcctggagggtccagtcattcaccagcatttgcaaatgtccatagggagcaggtggcagcctctactcccagcaacaagtttgtgttctctccttttctctctttgcctcactctctccagttggttttcagctggggcttgaaatgcatttttagccctttgacgtggcttatgccattcaagaaataaaaagcaagagaatcagctttgggcaatgacaagaaatgagttcttactctgatttttttgtaaaaagataatttttgagacttgaaaaataccccgaccttgagattattcctgtttgaaaggtggtgcatgcagatggagaagtggtgttggcagcaagctttggctcatgtggatttggtttaagtggtgcttcttacccaagcttcaaggaagtgcttgggggacccccagcctcatcctcttagttgggtctcttgttccctttgtaccactgttttgccttccttttcctcttctctctttgcctggcttcctttcccttttcttctattcactctgcttgctgggctggactgccctcaagcttatactagagaagagcaactgacctgcccaacttgtgtgaagtcaggagggtttctggcattttccacacctgtccactccttggagctggtttctctcattgctttttctaaatctggttctttttctctttacctggggcctggcttttctgagattgtcttagggttgagctatttgggtatcctgggtttgagtgttaggggatggacataaaggaaaaagagtgatgagaagagaatggagagaatttgaataaaaggtgggaaaggagagcactgttctttgattgtttatccagtccaacctgatccattagggatcgaggtgctacactggcctccagggataagcctggggctactgttgctgggaacttaggcttaacataaagccgaagaaggtacctagaaatttgaaacttccctaaaaagctcctaatgcccacctgctagatagcttctctgtggcctcctatttagctaagcagcagtgtttttggatactttttttttctgtttgtgaataaggccagcactcaagatgggcagccaagggtgcactgactattagctggcccataggatatctgtaaggctggtgggacagttttggacctggaatcatgtgtaactaacaaggttggacgtttcttccccatcagggtagaaaaatcatctcaaactagccaaaaggcagttttggaaactacattgggggacgttatttttatttatatatggggcctaggccaatccaggatggtagctggaataccttccttcttaaaatctgatcatggcagggatatgcagggcactttttactatttggccttctaagcagattgggaaggaggtattttctggttttcgctttcctccgacttaataggacttgccttctccctgggcagggagagaggctgggttggtgctctcccttactctactcatactgacttagagcctctggctgctgtttgggcatccaagaaagggaggggaaggaatgagctaaaaacaaaacagaatgaggtgggaaagggagattttcttctttacagaggaaaataggaaaccctccaagaattgtgcaagtaaagacatttgttgaatgcactgagtcccttggtgtagtagcaataaggaaaaatgaaattactttcctgtgcacacagtccagcctaattggtatgtgatgttgcacttagcagccatgtggtgggcatgtgtgactactctggttttcactttagtttctaaactttttatccctctcaagtccagcatggatggggaaatgtctctggatccccacagctgtgtacttgtttgcatttgtttccctttgagatttgtgtttgtgtcctgctttgagctgtaccttgtccagtccattgtgaaattatcccagcagctgtaatgtacagttccttctgaagcaagcaacatcagcagcagcagcagcagcagcacaattctgtgttttataaagacaacagtggcttctatttctaaagtgcggtctttctctttttttttcctaccagcaaaacaaacttttgggactgattacatctctaatagattttaggtgagaataatactgtagattgttatgcaggaatacttcacagagccttcatttattcttcattcaacaaacatgcaaagcactgtgccagcagtattgtggggaggggaggcacaattcaaaatgaggaaaatagtgtccgtctcattaagggaattaagtttggtgggggatatgattagccaaatagtcccctggcataggaggaagataatgagggagtggaataaggctacaacaacgaatatagggaggaagggacagatttgagagacgaggtagaattaataggactcgatggctggtgggaggagaagacaggagtagaggttagctcccaggtttctccttgaccataggagtgtgttgggacattctgccagtcaagatgggggtgacggggagactgtagaaggaaggtggggagt

SEQ ID NO: 5942 - protein, 73 aa, Homo sapiens; identical to SEQ ID NO: 5940

SEQ ID NO: 5943 - DNA, 1726 bp, Homo sapiens
aggaaggagggtggccctaccccagcgggctcggctcggggcctccgcggcagttcggggtccttcacccgccggctccagtcctgtgccgttttccgtccgcgactcttccggcccagagctttcggagtgcggttgctcaggggaagccgtcgccgcccccgcctcggggccgagtgagagtgcccgtcgcgtcgcgccgcgtcgccccccgggccgcctccttgccgccagtggcgggctccgttctccctcgaagcactccccccagctccatgaatggaaatcggctccgcaggacccgctggggcccagcccctactcatggtgcccagaagacctggctatggcaccatgggcaaacccattaaactgctggctaactgttttcaagttgaaatcccaaagattgatgtctacctctatgaggtagatattaaaccagacaagtgtcctaggagagtgaacagggaggtggttgactcaatggttcagcattttaaagtaactatatttggagaccgtagaccagtttatgatggaaaaagaagtctttacaccgccaatccacttcctgtggcaactacaggggtagatttagacgttactttacctggggaaggtggaaaagatcgacctttcaaggtgtcaatcaaatttgtctctcgggtgagttggcacctactgcatgaagtactgacaggacggaccttgcctgagccactggaattagacaagccaatcagcactaaccctgtccatgccgttgatgtggtgctacgacatctgccctccatgaaatacacacctgtggggcgttcatttttctccgctccagaaggatatgaccaccctctgggagggggcagggaagtgtggtttggattccatcagtctgttcggcctgccatgtggaaaatgatgcttaatatcgatgaaagagacctctggcagcagtgtggagaatagatagaggagaaaaaactaatctgagaagccagttaggaggcttttcaatcactagttcaggtaagagatggtgatggtctaatgtgggatggagaggaaggattaagctgaaaaaataggtttaagaaccatgtccagaaaaaaaaaactttgggtgtagtactggtacatggaacggattggaaaaaaatagaccagagctttactagatttttgaaagaattgtttttgcaaataaactacaagcctggcatatcagtcaaggttcagaacctagagaagcagaaccagtacgaagtatagagagagagtttatgcaattgtaggggctagctaggcaagtctgaaattttgggggcaggctgtcaggaagggcagggaaattcaggcatgggctgaagcagttatctataagtggaatttcttgctctcagggaagcttcagccctacttttaagacctttcacctaattgaatcaggcccatccacattattcaggataatctccattacttaaagtcaacagattatggattttaattacatctacaaaataccttcatagcaacacctagattagtgtttgattaaacaaatggcagctggtagcctagcaagttaacacattaaaaacaacacctgccatgatggcttacacttgtaatcccagcactttgggaggccaaagtgggaggatcacttgagattaggagtttgcgatcaggctgaacaacatagtgagacctgatctctacc

SEQ ID NO: 5944 - protein, 229 aa, Homo sapiens
MEIGSAGPAGAQPLLMVPRRPGYGTMGKPIKLLANCFQVEIPKIDVYLYEVDIKPDKCPRRVNREVVDSMVQHFKVTIFGDRRPVYDGKRSLYTANPLPVATTGVDLDVTLPGEGGKDRPFKVSIKFVSRVSWHLLHEVLTGRTLPEPLELDKPISTNPVHAVDVVLRHLPSMKYTPVGRSFFSAPEGYDHPLGGGREVWFGFHQSVRPAMWKMMLNIDERDLWQQCGE

SEQ ID NO: 5945 - DNA, 1412 bp, Homo sapiens
acgccggcgagcttccggggcggccccgggcaggtcggcggcggcggcccgcagtcgtggaggagcggtgggagcgtcggcggccgcgggcgatgcaacttccggacgggactcccctctgtccgcgcctcacatctccccttcctctcgcctagtcctgtgccgttttccgtccgcgactcttccggcccagagctttcggagtgcggttgctcaggggaagccgtcgccgcccccgcctcggggccgagtgagagtgcccgtcgcgtcgcgccgcgtcgccccccgggccgcctccttgccgccagtggcgggctccgttctccctcgaagcactccccccagctccatgaatggaaatcggctccgcaggacccgctggggcccagcccctactcatggtgcccagaagacctggctatggcaccatgggcaaacccattaaactgctggctaactgttttcaagttgaaatcccaaagattgatgtctacctctatgaggtagatattaaaccagacaagtgtcctaggagagtgaacagggaggtggttgactcaatggttcagcattttaaagtaactatatttggagaccgtagaccagtttatgatggaaaaagaagtctttacaccgccaatccacttcctgtggcaactacaggggtagatttagacgttactttacctggggaaggtggaaaagatcgacctttcaaggtgtcaatcaaatttgtctctcgggtgagttggcacctactgcatgaagtactgacaggacggaccttgcctgagccactggaattagacaagccaatcagcactaaccctgtccatgccgttgatgtggtgctacgacatctgccctccatgaaatacacacctgtggggcgttcatttttctccgctccagaaggatatgaccaccctctgggagggggcagggaagtgtggtttggattccatcagtctgttcggcctgccatgtggaaaatgatgcttaatatcgatgaaagagacctctggcagcagtgtggagaatagatagaggagaaaaaactaatctgagaagccagttaggaggcttttcaatcactagttcaggtttcagtctacatgttacttccttgagaagcagtgtttgacacccttctcccccaatccagccatcccccaagtctgagttaggtatttctcttctgtattcccatagcacagtgtaattcccctataatagcatgtatcaccttgaattatgggtgtttattgttctgtctctcctgttagaacgaaagctccatgaagggattgtcattttattcaccagtgtaccctctatgcccagcacaacttttggtcatattaaacaaagaatgaataaataaatccaagagcataggaggaggagcatcc

SEQ ID NO: 5946 - protein, 229 aa, Homo sapiens; identical to SEQ ID NO: 5944

SEQ ID NO: 5947 - DNA, 3319 bp, Homo sapiens
acgccggcgagcttccggggcggccccgggcaggtcggcggcggcggcccgcagtcgtggaggagcggtgggagcgtcggcggccgcgggcgatgcaacttccggacgggactcccctctgtccgcgcctcacatctccccttcctctcgcctagtcctgtgccgttttccgtccgcgactcttccggcccagagctttcggagtgcggttgctcaggggaagccgtcgccgcccccgcctcggggccgagtgagagtgcccgtcgcgtcgcgccgcgtcgccccccgggccgcctccttgccgccagtggcgggctccgttctccctcgaagcactccccccagctccatgaatggaaatcggctccgcaggacccgctggggcccagcccctactcatggtgcccagaagacctggctatggcaccatgggcaaacccattaaactgctggctaactgttttcaagttgaaatcccaaagattgatgtctacctctatgaggtagatattaaaccagacaagtgtcctaggagagtgaacagggaggtggttgactcaatggttcagcattttaaagtaactatatttggagaccgtagaccagtttatgatggaaaaagaagtctttacaccgccaatccacttcctgtggcaactacaggggtagatttagacgttactttacctggggaaggtggaaaagatcgacctttcaaggtgtcaatcaaatttgtctctcgggtgagttggcacctactgcatgaagtactgacaggacggaccttgcctgagccactggaattagacaagccaatcagcactaaccctgtccatgccgttgatgtggtgctacgacatctgccctccatgaaatacacacctgtggggcgttcatttttctccgctccagaaggatatgaccaccctctgggagggggcagggaagtgtggtttggattccatcagtctgttcggcctgccatgtggaaaatgatgcttaatatcgatgtttctgccactgccttctacaaagcacaacctgtaattcagttcatgtgtgaagttcttgatattcataatattgatgagcaaccaagacctctgactgattctcatcgggtaaaattcaccaaagagataaaaggtttgaaggttgaagtgactcattgtggaacaatgagacggaaataccgtgtttgtaatgtaacaaggaggcctgccagtcatcaaacctttcctttacagttagaaaacggccaaactgtggagagaacagtagcgcagtatttcagagaaaagtatactcttcagctgaagtacccgcaccttccctgtctgcaagtcgggcaggaacagaaacacacctacctgccactagaagtctgtaatattgtggcagggcaacgatgtatcaagaagctaacagacaatcagacttccactatgatcaaggcaacagcaagatctgcaccagatagacaagaggaaattagcagattggtaagaagtgcaaattatgaaacagatccatttgttcaggagtttcaatttaaagttcgggatgaaatggctcatgtaactggacgcgtacttccagcacctatgctccagtatggaggacggaatcggacagtagcaacaccgagccatggagtatgggacatgcgagggaaacaattccacacaggagttgaaatcaaaatgtgggctatcgcttgttttgccacacagaggcagtgcagagaagaaatattgaagggtttcacagaccagctgcgtaagatttctaaggatgcagggatgcccatccagggccagccatgcttctgcaaatatgcacagggggcagacagcgtagagcccatgttccggcatctcaagaacacatattctggcctacagcttattatcgtcatcctgccggggaagacaccagtgtatgcggaagtgaaacgtgtaggagacacacttttgggtatggctacacaatgtgttcaagtcaagaatgtaataaaaacatctcctcaaactctgtcaaacttgtgcctaaagataaatgttaaactcggagggatcaataatattcttgtacctcatcaaagaccttctgtgttccagcaaccagtgatctttttgggagccgatgtcactcatccacctgctggtgatggaaagaagccttctattgctgctgttgtaggtagtatggatgcacacccaagcagatactgtgccacagtaagagttcagagaccccgacaggagatcatccaggacttggcctccatggtccgggaacttcttattcaattttataagtcaactcggttcaagcctactcgtatcatcttttatcgggatggtgtttcagaggggcagtttaggcaggtattatattatgaactactagcaattcgagaagcctgcatcagtttggagaaagactatcaacctggaataacctacattgtagttcagaagagacatcacactcgattattttgtgctgataggacagaaagggttggaagaagtggcaatatcccagctggaacaacagttgatacagacattacacacccatatgagttcgatttttacctctgtagccatgctggaatacagggtaccagtcgtccttcacactatcatgttttatgggatgataactgctttactgcagatgaacttcagctgctaacttaccagctctgccacacttacgtacgctgtacacgatctgtttctatacctgcaccagcgtattatgctcacctggtagcatttagagccagatatcatcttgtggacaaagaacatgacagtgctgaaggaagtcacgtttcaggacaaagcaatgggcgagatccacaagctcttgccaaggctgtacagattcaccaagataccttacgcacaatgtacttcgcttaaatagtccaagtatattctctgagaggaagtactgaaagatgaattgacatacaacgtatgtttccagtgaagtcaattgagtaaggacacctccagccatacagaaaccaacactgtgtgggggccaaggtctgatccttatgttaatacaaggaagattgtttacttcatcaaggaacacagcatcattatgcaatatgaaaccagccaactgctttttgtgcggtctcctataggaagtatcgcaattgttttgttttcatttcttgtagtctaacccttttaatgcctttacctcaagttgcttggcagcacaactatctttgcaaaaaaaagtaaagaaaaagtaaatgatggtttaaaaaatacacaccttcatgaat

SEQ ID NO: 5948 - protein, 860 aa, Homo sapiens; identical to SEQ ID NO: 144

SEQ ID NO: 5949 - DNA, 3652 bp, Homo sapiens
acgccggcgagcttccggggcggccccgggcaggtcggcggcggcggcccgcagtcgtggaggagcggtgggagcgtcggcggccgcgggcgatgcaacttccggacgggactcccctctgtccgcgcctcacatctccccttcctctcgcctagtcctgtgccgttttccgtccgcgactcttccggcccagagctttcggagtgcggttgctcaggggaagccgtcgccgcccccgcctcggggccgagtgagagtgcccgtcgcgtcgcgccgcgtcgccccccgggccgcctccttgccgccagtggcgggctccgttctccctcgaagcactccccccagctccatgaatggaaatcggctccgcaggacccgctggggcccagcccctactcatggtgcccagaagacctggctatggcaccatgggcaaacccattaaactgctggctaactgttttcaagttgaaatcccaaagattgatgtctacctctatgaggtagatattaaaccagacaagtgtcctaggagagtgaacagggaggtggttgactcaatggttcagcattttaaagtaactatatttggagaccgtagaccagtttatgatggaaaaagaagtctttacaccgccaatccacttcctgtggcaactacaggggtagatttagacgttactttacctggggaaggtggaaaagatcgacctttcaaggtgtcaatcaaatttgtctctcgggtgagttggcacctactgcatgaagtactgacaggacggaccttgcctgagccactggaattagacaagccaatcagcactaaccctgtccatgccgttgatgtggtgctacgacatctgccctccatgaaatacacacctgtggggcgttcatttttctccgctccagaaggatatgaccaccctctgggagggggcagggaagtgtggtttggattccatcagtctgttcggcctgccatgtggaaaatgatgcttaatatcgatgtttctgccactgccttctacaaagcacaacctgtaattcagttcatgtgtgaagttcttgatattcataatattgatgagcaaccaagacctctgactgattctcatcgggtaaaattcaccaaagagataaaaggtttgaaggttgaagtgactcattgtggaacaatgagacggaaataccgtgtttgtaatgtaacaaggaggcctgccagtcatcaaacctttcctttacagttagaaaacggccaaactgtggagagaacagtagcgcagtatttcagagaaaagtatactcttcagctgaagtacccgcaccttccctgtctgcaagtcgggcaggaacagaaacacacctacctgccactagaagtctgtaatattgtggcagggcaacgatgtatcaagaagctaacagacaatcagacttccactatgatcaaggcaacagcaagatctgcaccagatagacaagaggaaattagcagattggtaagaagtgcaaattatgaaacagatccatttgttcaggagtttcaatttaaagttcgggatgaaatggctcatgtaactggacgcgtacttccagcacctatgctccagtatggaggacggaatcggacagtagcaacaccgagccatggagtatgggacatgcgagggaaacaattccacacaggagttgaaatcaaaatgtgggctatcgcttgttttgccacacagaggcagtgcagagaagaaatattgaagggtttcacagaccagctgcgtaagatttctaaggatgcagggatgcccatccagggccagccatgcttctgcaaatatgcacagggggcagacagcgtagagcccatgttccggcatctcaagaacacatattctggcctacagcttattatcgtcatcctgccggggaagacaccagtgtatgcggaagtgaaacgtgtaggagacacacttttgggtatggctacacaatgtgttcaagtcaagaatgtaataaaaacatctcctcaaactctgtcaaacttgtgcctaaagataaatgttaaactcggagggatcaataatattcttgtacctcatcaaagaccttctgtgttccagcaaccagtgatctttttgggagccgatgtcactcatccacctgctggtgatggaaagaagccttctattgctgctgttgtaggtagtatggatgcacacccaagcagatactgtgccacagtaagagttcagagaccccgacaggagatcatccaggacttggcctccatggtccgggaacttcttattcaattttataagtcaactcggttcaagcctactcgtatcatcttttatcgggatggtgtttcagaggggcagtttaggcaggtattatattatgaactactagcaattcgagaagcctgcatcagtttggagaaagactatcaacctggaataacctacattgtagttcagaagagacatcacactcgattattttgtgctgataggacagaaagggttggaagaagtggcaatatcccagctggaacaacagttgatacagacattacacacccatatgagttcgatttttacctctgtagccatgctggaatacagggtaccagtcgtccttcacactatcatgttttatgggatgataactgctttactgcagatgaacttcagctgctaacttaccagctctgccacacttacgtacgctgtacacgatctgtttctatacctgcaccagcgtattatgctcacctggtagcatttagagccagatatcatcttgtggacaaagaacatgacagtgctgaaggaagtcacgtttcaggacaaagcaatgggcgagatccacaagctcttgccaaggctgtacagattcaccaagataccttacgcacaatgtacttcgcttaaatagtccaagtatattctctgagaggaagtactgaaagatgaattgacatacaacgtatgtttccagtgaagtcaattgagtaaggacacctccagccatacagaaaccaacactgtgtgggggccaaggtctgatccttatgttaatacaaggaagattgtttacttcatcaaggaacacagcatcattatgcaatatgaaaccagccaactgctttttgtgcggtctcctataggaagtatcgcaattgttttgttttcatttcttgtagtctaacccttttaatgcctttacctcaagttgcttggcagcacaactatctttgcaaaaaaaagtaaagaaaaagtaaatgatggtttaaaaaatacacaccttcatgaataatcaaagtgatttttcagaattatgtgtgcaaaaaattaatgtgcattcatatattcttgtaaaaggtgtctgtgtatttttaaaatatatacatccatacttcatatgcatatatatctagatctggattgataatagatatatatgtgtctgttatatattttagagttcattccattggggaattttctttcccttttattctacccccactaccgcctttatttctctatttcccttgccttcatcacctacatttttttcccagtcctaccagtgacattcaaatgttgatgtatctggttcgtttgaatataaaatatggcaaact

SEQ ID NO: 5950 - protein, 860 aa, Homo sapiens; identical to SEQ ID NO: 144

SEQ ID NO: 5951 - DNA, 3026 bp, Homo sapiens
acttccggacgggactcccctctgtccgcgcctcacatctccccttcctctcgcctagtcctgtgccgttttccgtccgcgactcttccggcccagagctttcggagtgcggttgctcaggggaagccgtcgccgcccccgcctcggggccgagtgagagtgcccgtcgcgtcgcgccgcgtcgccccccgggccgcctccttgccgccagtggcgggctccgttctccctcgaagcactccccccagctccatgaatggaaatcggctccgcaggacccgctggggcccagcccctactcatggtgcccagaagacctggctatggcaccatgggcaaacccattaaactgctggctaactgttttcaagttgaaatcccaaagattgatgtctacctctatgaggtagatattaaaccagacaagtgtcctaggagagtgaacaggtagatttagacgttactttacctggggaaggtggaaaagatcgacctttcaaggtgtcaatcaaatttgtctctcgggtgagttggcacctactgcatgaagtactgacaggacggaccttgcctgagccactggaattagacaagccaatcagcactaaccctgtccatgccgttgatgtggtgctacgacatctgccctccatgaatttctgccactgccttctacaaagcacaacctgtaattcagttcatgtgtgaagttcttgatattcataatattgatgagcaaccaagacctctgactgattctcatcgggtaaaattcaccaaagagataaaaggtttgaaggttgaagtgactcattgtggaacaatgagacggaaataccgtgtttgtaatgtaacaaggaggcctgccagtcatcaaacctttcctttacagttagaaaacggccaaactgtggagagaacagtagcgcagtatttcagagaaaagtatactcttcagctgaagtacccgcaccttccctgtctgcaagtcgggcaggaacagaaacacacctacctgccactagaagtctgtaatattgtggcagggcaacgatgtatcaagaagctaacagacaatcagacttccactatgatcaaggcaacagcaagatctgcaccagatagacaagaggaaattagcagattggtaagaagtgcaaattatgaaacagatccatttgttcaggagtttcaatttaaagttcgggatgaaatggctcatgtaactggacgcgtacttccagcacctatgctccagtatggaggacggaatcggacagtagcaacaccgagccatggagtatgggacatgcgagggaaacaattccacacaggagttgaaatcaaaatgtgggctatcgcttgttttgccacacagaggcagtgcagagaagaaatattgaagggtttcacagaccagctgcgtaagatttctaaggatgcagggatgcccatccagggccagccatgcttctgcaaatatgcacagggggcagacagcgtagagcccatgttccggcatctcaagaacacatattctggcctacagcttattatcgtcatcctgccggggaagacaccagtgtatgcggaagtgaaacgtgtaggagacacacttttgggtatggctacacaatgtgttcaagtcaagaatgtaataaaaacatctcctcaaactctgtcaaacttgtgcctaaagataaatgttaaactcggagggatcaataatattcttgtacctcatcaaagaccttctgtgttccagcaaccagtgatctttttgggagccgatgtcactcatccacctgctggtgatggaaagaagccttctattgctgctgttgtaggtagtatggatgcacacccaagcagatactgtgccacagtaagagttcagagaccccgacaggagatcatccaggacttggcctccatggtccgggaacttcttattcaattttataagtcaactcggttcaagcctactcgtatcatcttttatcgggatggtgtttcagaggggcagtttaggcaggtattatattatgaactactagcaattcgagaagcctgcatcagtttggagaaagactatcaacctggaataacctacattgtagttcagaagagacatcacactcgattattttgtgctgataggacagaaagggttggaagaagtggcaatatcccagctggaacaacagttgatacagacattacacacccatatgagttcgatttttacctctgtagccatgctggaatacagggtaccagtcgtccttcacactatcatgttttatgggatgataactgctttactgcagatgaacttcagctgctaacttaccagctctgccacacttacgtacgctgtacacgatctgtttctatacctgcaccagcgtattatgctcacctggtagcatttagagccagatatcatcttgtggacaaagaacatgacagtgctgaaggaagtcacgtttcaggacaaagcaatgggcgagatccacaagctcttgccaaggctgtacagattcaccaagataccttacgcacaatgtacttcgcttaaatagtccaagtatattctctgagaggaagtactgaaagatgaattgacatacaacgtatgtttccagtgaagtcaattgagtaaggacacctccagccatacagaaaccaacactgtgtgggggccaaggtctgatccttatgttaatacaaggaagattgtttacttcatcaaggaacacagcatcattatgcaatatgaaaccagccaactgctttttgtgcggtctcctataggaagtatcgcaattgttttgttttcatttcttgtagtctaacccttttaatgcctttacctcaagttgcttggcagcacaactatctttgcaaaaaaaagtaaagaaaaagtaaatgatggtttaaaaaatacacaccttcatgaataatcaaagtgatttttcagaattatgtgtgcaaaaaattaatgtgcattcatatattcttgt

SEQ ID NO: 5952 - protein, 626 aa, Homo sapiens; identical to SEQ ID NO: 146

SEQ ID NO: 5953 - DNA, 3297 bp, Homo sapiens
acttccggacgggactcccctctgtccgcgcctcacatctccccttcctctcgcctagtcctgtgccgttttccgtccgcgactcttccggcccagagctttcggagtgcggttgctcaggggaagccgtcgccgcccccgcctcggggccgagtgagagtgcccgtcgcgtcgcgccgcgtcgccccccgggccgcctccttgccgccagtggcgggctccgttctccctcgaagcactccccccagctccatgaatggaaatcggctccgcaggacccgctggggcccagcccctactcatggtgcccagaagacctggctatggcaccatgggcaaacccattaaactgctggctaactgttttcaagttgaaatcccaaagattgatgtctacctctatgaggtagatattaaaccagacaagtgtcctaggagagtgaacaggtagatttagacgttactttacctggggaaggtggaaaagatcgacctttcaaggtgtcaatcaaatttgtctctcgggtgagttggcacctactgcatgaagtactgacaggacggaccttgcctgagccactggaattagacaagccaatcagcactaaccctgtccatgccgttgatgtggtgctacgacatctgccctccatgaatttctgccactgccttctacaaagcacaacctgtaattcagttcatgtgtgaagttcttgatattcataatattgatgagcaaccaagacctctgactgattctcatcgggtaaaattcaccaaagagataaaaggtttgaaggttgaagtgactcattgtggaacaatgagacggaaataccgtgtttgtaatgtaacaaggaggcctgccagtcatcaaacctttcctttacagttagaaaacggccaaactgtggagagaacagtagcgcagtatttcagagaaaagtatactcttcagctgaagtacccgcaccttccctgtctgcaagtcgggcaggaacagaaacacacctacctgccactagaagtctgtaatattgtggcagggcaacgatgtatcaagaagctaacagacaatcagacttccactatgatcaaggcaacagcaagatctgcaccagatagacaagaggaaattagcagattggtaagaagtgcaaattatgaaacagatccatttgttcaggagtttcaatttaaagttcgggatgaaatggctcatgtaactggacgcgtacttccagcacctatgctccagtatggaggacggaatcggacagtagcaacaccgagccatggagtatgggacatgcgagggaaacaattccacacaggagttgaaatcaaaatgtgggctatcgcttgttttgccacacagaggcagtgcagagaagaaatattgaagggtttcacagaccagctgcgtaagatttctaaggatgcagggatgcccatccagggccagccatgcttctgcaaatatgcacagggggcagacagcgtagagcccatgttccggcatctcaagaacacatattctggcctacagcttattatcgtcatcctgccggggaagacaccagtgtatgcggaagtgaaacgtgtaggagacacacttttgggtatggctacacaatgtgttcaagtcaagaatgtaataaaaacatctcctcaaactctgtcaaacttgtgcctaaagataaatgttaaactcggagggatcaataatattcttgtacctcatcaaagaccttctgtgttccagcaaccagtgatctttttgggagccgatgtcactcatccacctgctggtgatggaaagaagccttctattgctgctgttgtaggtagtatggatgcacacccaagcagatactgtgccacagtaagagttcagagaccccgacaggagatcatccaggacttggcctccatggtccgggaacttcttattcaattttataagtcaactcggttcaagcctactcgtatcatcttttatcgggatggtgtttcagaggggcagtttaggcaggtattatattatgaactactagcaattcgagaagcctgcatcagtttggagaaagactatcaacctggaataacctacattgtagttcagaagagacatcacactcgattattttgtgctgataggacagaaagggttggaagaagtggcaatatcccagctggaacaacagttgatacagacattacacacccatatgagttcgatttttacctctgtagccatgctggaatacagggtaccagtcgtccttcacactatcatgttttatgggatgataactgctttactgcagatgaacttcagctgctaacttaccagctctgccacacttacgtacgctgtacacgatctgtttctatacctgcaccagcgtattatgctcacctggtagcatttagagccagatatcatcttgtggacaaagaacatgacagtgctgaaggaagtcacgtttcaggacaaagcaatgggcgagatccacaagctcttgccaaggctgtacagattcaccaagataccttacgcacaatgtacttcgcttaaatagtccaagtatattctctgagaggaagtactgaaagatgaattgacatacaacgtatgtttccagtgaagtcaattgagtaaggacacctccagccatacagaaaccaacactgtgtgggggccaaggtctgatccttatgttaatacaaggaagattgtttacttcatcaaggaacacagcatcattatgcaatatgaaaccagccaactgctttttgtgcggtctcctataggaagtatcgcaattgttttgttttcatttcttgtagtctaacccttttaatgcctttacctcaagttgcttggcagcacaactatctttgcaaaaaaaagtaaagaaaaagtaaatgatggtttaaaaaatacacaccttcatgaataatcaaagtgatttttcagaattatgtgtgcaaaaaattaatgtgcattcatatattcttgtaaaaggtgtctgtgtatttttaaaatatatacatccatacttcatatgcatatatatctagatctggattgataatagatatatatgtgtctgttatatattttagagttcattccattggggaattttctttcccttttattctacccccactaccgcctttatttctctatttcccttgccttcatcacctacatttttttcccagtcctaccagtgacattcaaatgttgatgtatctggttcgtttgaatataaaatatggcaaact

SEQ ID NO: 5954 - protein, 626 aa, Homo sapiens; identical to SEQ ID NO: 146

SEQ ID NO: 5955 - DNA, 485 bp, Homo sapiens
gagactgtctcaaaaacaaaaaaaagaagtcagtggcctgataaaaataattcacatatgaaatgactacaaacataaaaaaaaaaaagaaaaaagatctaaaatataatccctctcttctctgttttgcataccttaaactttatcttgttgcacaagtatttattggctaccttctctgctagtaaccacagagtaataaagataagttagagattggaaggatacaaagagagactgccagctgttttagttgtgttttataaacctctggatgattttgacattttgttatactttagcaatcttctttctgtctatactgtagtgacacattcatttattgtagccatggataatgtcagtagacttttggggaaaatattctttcatgttgtcttctgtagactagaataatatttttcattctgtcttttgggagcagagaattaagaggtacctaataaagtgagatggaggtggat

SEQ ID NO: 5956 - protein, 40 aa, Homo sapiens
MTTNIKKKKKKDLKYNPSLLCFAYLKLYLVAQVFIGYLLC

SEQ ID NO: 5957 - DNA, 367 bp, Homo sapiens
ggtctaatcaatggtgctctaactacagaacagcgaatcttaacctggggaccatgggtcatgaatggactgcagaaattctgtgacctcctgagaagtgttctgggtgagacaaggcttgaaagagacaaagaaggctggagccccgtggcagatgagatggttagatctgcaggcatactaactggaagagatacaacagaggctccctggaagaaggatgccagacacagttgagagcacaagactgtaccaaaaacaagagattaaatgactttaacatattaaatgctgaatacagaagttcccccagctagaactcccaactaggcttccagaatgcaggcaaccacactgctatccttta

SEQ ID NO: 5958 - protein, 58 aa, Homo sapiens
MNGLQKFCDLLRSVLGETRLERDKEGWSPVADEMVRSAGILTGRDTTEAPWKKDARHS

SEQ ID NO: 5959 - DNA, 385 bp, Homo sapiens
cctaaaaatagaaaaagtttgtagttactctcaaaattcccccaaatcccctactttaatgcattagaaccctcttttttttcttcactgtgtccataatatattttccaacaggtctaatcaatggtgctctaactacagaacagcgaatcttaacctggggaccatgggtcatgaatggactgcagaaattctgtgacctcctgatcttgctgttgccttgatcatagtggaagtctgattgtctgttagcttcttgatacatcgttgccctgccacaatattacagacctacaaatggaaaaaagttttgtactacatgtatatatcttttttttttagctcttacttagtgccaattacatgtaaataaaaatttaaaatc

SEQ ID NO: 5960 - protein, 30 aa, Homo sapiens
YIVALPQYYRPTNGKKFCTTCIYLFFLALT

SEQ ID NO: 5961 - DNA, 602 bp, Homo sapiens
gcaacatgtaagaataggaactaggacctgcgtagtctgctctgaatgactgcttaagtcatatttcaaggtgaaagtagtgaaatgtaggatcagcctatgtattcatacattttttaaagtgctttcagatatatttttacctttttcttgtttgtttaaactttaaccaaacaaatctaggttggaagaagtggcaatatcccagctggaacaacagttgatacagacattacacacccatatgagttcgatttttacctctgtagccatgctggaatacagggtaccagtcgtccttcacactatcatgttttatgggatgataactgctttactgcagatgaacttcagctgctaacttaccagctctgccacacttacgtacgctgtacacgatctgtttctatacctgcaccagcgtattatgctcacctggtagcatttagagccagatatcatcttgtggacaaagaacatgacaggtaatataaaagcataacaggttctcacccaaatcccaatattgtctgcatggtaggattttcaagttccacaagctattagcggagtcagtgatccatgtgaaaaatgatgacaga

SEQ ID NO: 5962 - protein, 38 aa, Homo sapiens
MSSIFTSVAMLEYRVPVVLHTIMFYGMITALLQMNFSC

SEQ ID NO: 5963 - DNA, 1222 bp, Homo sapiens
gcagcacaactatctttgcaaaaaaaagtaaagaaaaagtaaatgatggtttaaaaaatacacaccttcatgaataatcaaagtgatttttcagaattatgtgtgcaaaaaattaatgtgcattcatatattcttgtaaaaggtgtctgtgtatttttaaaatatatacatccatacttcatatgcatatatatctagatctggattgataatagatatatatgtgtctgttatatattttagagttcattccattggggaattttctttcccttttattctacccccactaccgcctttatttctctatttcccttgccttcatcacctacatttttttcccagtcctaccagtgacattcaaatgttgatgtatctggttcgtttgaatataaaatatggcaaactagaattctacttttattttgcataccctactcctgactcctatctcatacacaattctgagttctcaactcttgatattgctgtcttaagaaacaaaattttatatatatatgtatacatacatacacagacacagacacacacatatatatacataaaataactttctgtgagagtgcgtctctcccctcccactcagaacatacatttaccatttgcgcaatttgtatataagcagtagcaacctgaactattctttttcttttttctttttcttttctttcttttttttttttaatgagacagagcctcgctctgtcaccaggctggagcaggattgcttgaacctaggaggcggaagttacagtgagccaagactgcaccattgcactccagcctgggcaacaaaaccaaaactccgtctcaaaagaaaaaaaaatcataatgaaaatgaagtgaaattgcctaaatgagtccaacttgaatattagaaataaagttgaacttttatataattgtgaatagcttaacatatttaaattatttgcaaatagattgtgtttattgaagaatcatattggctagatgcccattttcatttactaaaatgaatcaggaaaatgcaagatgatattttaaaacttttgctaatgtatcaccagtataactttccttttaaaattaaggtgatagtaacaaaggaagttaggactttgatcattttaaatcagttaaatcactgaaacgtgggaaattgttttacaaaacttttattgattacactttaaggtattaaaaagtactataaagctat

SEQ ID NO: 5964 - protein, 68 aa, Homo sapiens
MLMYLVRLNIKYGKLEFYFYFAYPTPDSYLIHNSEFSTLDIAVLRNKILYIYVYIHTQTQTHTYIYIK

SEQ ID NO: 5965 - DNA, 492 bp, Homo sapiens
aggcaggattgcttgaacctaggaggcggaagttacagtgagccaagactgcaccattgcactccagcctgggcaacaaaaccaaaactccgtctcaaaagaaaaaaaaatcataatgaaaatgaacttaacatatttaaattatttgcaaatagattgtgtttattgaagaatcatattggctagatgcccattttcatttactaaaatgaatcaggaaaatgcaagatgatattttaaaacttttgctaatgtatcaccagtataactttccttttaaaattaaggtgatagtaacaaaggaagttaggactttgatcattttaaatcagttaaatcactgaaacgtgggaaattgttttacaaaacttttattgattacactttaaggtattaaaaagtactataaagctatcaaaactgagtttatcagtaacattggattcaggggagctttgcactttgtaactcatgaaaattgcattttgattt

SEQ ID NO: 5966 - protein, 40 aa, Homo sapiens
MQDDILKLLLMYHQYNFPFKIKVIVTKEVRTLIILNQLNH

SEQ ID NO: 5967 - DNA, 497 bp, Homo sapiens
ctccacactgcctctcatggggggctgggatagagaggaagacaggtgtgcaggcctggtcctgttctgaggactctgctgaaccggatcctatgaggttattttgtaaactctaatatatgacttgtaaactggacatgaacaagaatttgtgatatagcctctttaccaggattgaagaagatagaaagaaaaaaatcttggacaaattaattgcaggaagaaatgatcaaattttggcttacatattttgcaacagtggtataacacaaagaagtaagcaaatatggcagaagtgtggtggctttggcgtctacttttgaccatagtggtggccctgttattcgtggctcccggggttcctacacatccttcccgatggaagaaggggttggccaaaaaggtcagccagctgatgggttggaccaagaaagacagagtgataagaatgagtgacaccatgttctatcattttgtattagatgcaccaaaaaact

SEQ ID NO: 5968 - protein, 69 aa, Homo sapiens
MAEVWWLWRLLLTIVVALLFVAPGVPTHPSRWKKGLAKKVSQLMGWTKKDRVIRMSDTMFYHFVLDAPK

SEQ ID NO: 5969 - DNA, 1510 bp, Homo sapiens
tggttgcctagcaaccggtggtgccaaacactggagctcagagcggggggcgcggagagcgaagcgggaaaggaggtggtgtctgtgaacaggcctaggggtttctgacccttctggtttctgtgccatggccacgctgagcgtcaagccaagtcggcgcttccagctgcccgactggcacactaacagctacctgctatccaccaatgcccagctgcagcgagatgcttcccatcagatccgccaggaggcccgggtgctccgcaacgagaccaacaaccagaccatttgggatgaacatgacaacaggactcgactggtggagaggattgatactgtcaaccggtggaaggagatgctggacaagtgtctgacagatttagatgccgagatcgatgccctgacacagatgaaggagtcagcagagcaaaacctgcaggccaagaacctgcctctggatgtggccattgagtgcctgaccctgcgggaaagccggcgagacattgatgtggtgaaggaccctgtggaggatgagctgcataaagaggtggaggtcatcgaggccaccaagaaggccttgcaacagaaggtcagccaggccttcgagcagctctgcctcttgcaggaagtccaacagcagctcaactccgaccatcggggcaaaatggagacactagagatcgacagaggctgtctctctctcaacctcagatccccaaacatctcgctgaaggttgaccccacacgtgtacctgatggctccaccacactccagcagtgggatgacttcagtcggttcaacaaggaccgagcggaggctgagatgaaggcagccacagagctgagggaggccactgctctaactattgctgagaccaacaacgagcttgaagcccagagagttgcaacggaatttgccttcaggaagcggctgcgggagatggagaaagtgtacagtgagctcaagtggcaagagaagaataccttggaggagatcgctgagctgcaggaggacatccggcacctggaggaggatctgcgcacaaagctcctgagcctgaagctgtcccatacccggctagaggccagaacctaccggcccaacgtggaactctgccgggaccaggcacagtacggcctcaccgacgaggttcaccagctagaggcaaccatcgctgccctgaagcagaagctggcgcaagcacaggacgcactggacgccctgtgcaagcacctggcccggctgcaggctgacattgcctgcaaggccaactccatgctgctggacaccaagtgcatggacacacggcgcaagctgaccgtgcctgctgagaggttcgtgcctgaggtggacaccttcacacgtaccacaaatagcaccctgagtccactcaaaagctgccagctggagctggcctagccttggaggactgcaggaggagggcagggttgggtgggcaatggaaggagggaggagagaaatgaatggaataaatgcagaggatctcag

SEQ ID NO: 5970 - protein, 430 aa, Homo sapiens; identical to SEQ ID NO: 148

SEQ ID NO: 5971 - DNA, 1752 bp, Homo sapiens
gggcgtggcggctaccagacggggagggggccgccccgggggccgccccccagctccccagtgccaacaggcacgcgtccctggagacagaacagggctcctgcccttagatcccccacggggactggcccgcagcctggggaagaaaggaaaggaagatcaacaaggcatggttggctgggggcaggtggtgtctgtgaacaggcctaggggtttctgacccttctggtttctgtgccatggccacgctgagcgtcaagccaagtcggcgcttccagctgcccgactggcacactaacagctacctgctatccaccaatgcccagctgcagcgagatgcttcccatcagatccgccaggaggcccgggtgctccgcaacgagaccaacaaccagaccatttgggatgaacatgacaacaggactcgactggtggagaggattgatactgtcaaccggtggaaggagatgctggacaagtgtctgacagatttagatgccgagatcgatgccctgacacagagacggggtttcaccattttggccaggctgttctcgaactcctgacctcaagtgttccatccaactcggcctcccgaagtgctgggattacagatgtgagccaccgtgcccggccgcgccctcttttctagatgaaggagtcagcagagcaaaacctgcaggccaagaacctgcctctggatgtggccattgagtgcctgaccctgcgggaaagccggcgagacattgatgtggtgaaggaccctgtggaggatgagctgcataaagaggtggaggtcatcgaggccaccaagaaggccttgcaacagaaggtcagccaggccttcgagcagctctgcctcttgcaggaagtccaacagcagctcaactccgaccatcggggcaaaatggagacactagagatcgacagaggctgtctctctctcaacctcagatccccaaacatctcgctgaaggttgaccccacacgtgtacctgatggctccaccacactccagcagtgggatgacttcagtcggttcaacaaggaccgagcggaggctgagatgaaggcagccacagagctgagggaggccactgctctaactattgctgagaccaacaacgagcttgaagcccagagagttgcaacggaatttgccttcaggaagcggctgcgggagatggagaaagtgtacagtgagctcaagtggcaagagaagaataccttggaggagatcgctgagctgcaggaggacatccggcacctggaggaggatctgcgcacaaagctcctgagcctgaagctgtcccatacccggctagaggccagaacctaccggcccaacgtggaactctgccgggaccaggcacagtacggcctcaccgacgaggttcaccagctagaggcaaccatcgctgccctgaagcagaagctggcgcaagcacaggacgcactggacgccctgtgcaagcacctggcccggctgcaggctgacattgcctgcaaggccaactccatgctgctggacaccaagtgcatggacacacggcgcaagctgaccgtgcctgctgagaggttcgtgcctgaggtggacaccttcacacgtaccacaaatagcaccctgagtccactcaaaagctgccagctggagctggcctagccttggaggactgcaggaggagggcagggttgggtgggcaatggaaggagggaggagagaaatgaatggaataaatgcagaggatctca

SEQ ID NO: 5972 - protein, 336 aa, Homo sapiens
MKESAEQNLQAKNLPLDVAIECLTLRESRRDIDVVKDPVEDELHKEVEVIEATKKALQQKVSQAFEQLCLLQEVQQQLNSDHRGKMETLEIDRGCLSLNLRSPNISLKVDPTRVPDGSTTLQQWDDFSRFNKDRAEAEMKAATELREATALTIAETNNELEAQRVATEFAFRKRLREMEKVYSELKWQEKNTLEEIAELQEDIRHLEEDLRTKLLSLKLSHTRLEARTYRPNVELCRDQAQYGLTDEVHQLEATIAALKQKLAQAQDALDALCKHLARLQADIACKANSMLLDTKCMDTRRKLTVPAERFVPEVDTFTRTTNSTLSPLKSCQLELA

SEQ ID NO: 5973 - DNA, 1662 bp, Homo sapiens
gtagggaaactgtgagggcggcaccggaagtggcgagcagtctgcgcgcggatggccgcagcggcgatggcggcagcggcaggtggaggggctggcgcggcccgctccctctcgcgcttccgaggctgcctggctggcgcgctgctcggggactgcgtgggctccttctacgaggcccacgacaccgtcgacctgacgtcagtcctgcgtcatgtccagagtctggaacagaagccttgtactacacagatgacacagccatggccagggccctggtgcagtccctgctagccaaggaggcctttgacgaggtggacatggctcacagatttgctcaggagtacaagaaagaccctgacaggggctatggtgctggagtagtcactgtcttcaagaagctcctgaaccccaaatgtcgcgatgtctttgagcctgcccgggcccagtttaacgggaaaggctcctatggcaatggaggtgccatgcgggtggctggcatctccctggcctatagcagtgtccaggatgtgcagaagtttgcccggctctcggcccagctgacacacgcctcctccctgggttacaatggcgccatcctgcaggccctggctgtgcacctggccttgcagggcgagtcttccagcgagcactttctcaagcaactcctgggccacatggaggatctggagggtgatgcccagtccgtcttggatgccagggagttgggcatggaggagcgtccatactccagccgcctgaagaagattggagagcttctagaccaggcatcggtgaccagggaggaagtggtgtctgagctagggaatggcattgctgcctttgagtcggtacccaccgccatctactgcttcctacgctgcatggagccagaccctgagatcccttctgccttcaatagcctccaaaggactctcatttattccatctcacttggtggggacacagacaccattgccaccatggctggggccattgctggtgcctactatgggatggatcaggtgccagagagctggcagcaaagctgtgaaggctacgaggagacagacatcctggcccaaagcctgcaccgtgtcttccagaagagttgatgagggctacagctgttggggctctgccaggtcccctgggaccaactacagctccaatcagaaaccctgcgcttccttgagtgtggcttcccacttttcctgcattgtggagctgactgagtacaccggtgaggctggggtctctgcaggggaggtcactggaacagcgagcaagggactggtgcctcgctggtgctgggtctctggtttgctgcagagccgtaggacactcctggctcctcagtaggacagacagacgcaggcgggtttattttggaggggtacttgtggcattttcctgtattgtcttggacatgggatgtggggaggtggaaatgatgagcagtagcatcatttctccctgttgggttttagccagtttgccagcaagcgcatcctagcagggtccccgagcagcaggttgtgtggatgaagggacaggcacttgcatccagctgatctaggtcacacctggctcttggctgccatgtggcttattaacagcttccagtggaagtcgcaataaacagtttttggtaaatctcaccac

SEQ ID NO: 5974 - protein, 283 aa, Homo sapiens
MARALVQSLLAKEAFDEVDMAHRFAQEYKKDPDRGYGAGVVTVFKKLLNPKCRDVFEPARAQFNGKGSYGNGGAMRVAGISLAYSSVQDVQKFARLSAQLTHASSLGYNGAILQALAVHLALQGESSSEHFLKQLLGHMEDLEGDAQSVLDARELGMEERPYSSRLKKIGELLDQASVTREEVVSELGNGIAAFESVPTAIYCFLRCMEPDPEIPSAFNSLQRTLIYSISLGGDTDTIATMAGAIAGAYYGMDQVPESWQQSCEGYEETDILAQSLHRVFQKS

SEQ ID NO: 5975 - DNA, 1680 bp, Homo sapiens
gtagggaaactgtgagggcggcaccggaagtggcgagcagtctgcgcgcggatggccgcagcggcgatggcggcagcggcaggtggaggggctggcgcggcccgctccctctcgcgcttccgaggctgcctggctggcgcgctgctcggggactgcgtgggctccttctacgaggcccacgacaccgtcgacctgacgtcagtcctgcgtcatgtccagagtctggagccggaccccggcacgcccgggagtgagcggacagatttgctcaggagtacaagaaagaccctgacaggggctatggtgctggagtagtcactgtcttcaagaagctcctgaaccccaaatgtcgcgatgtctttgagcctgcccgggcccagtttaacgggaaaggctcctatggcaatggaggtgccatgcgggtggctggcatctccctggcctatagcagtgtccaggatgtgcagaaggtattcagggcgggctggcttctgggctgtccccttcctcttctgcagcagggcttctgtgacagcaggtctcctcctccctagtttgcccggctctcggcccagctgacacacgcctcctccctgggttacaatggcgccatcctgcaggccctggctgtgcacctggccttgcagggcgagtcttccagcgagcactttctcaagcaactcctgggccacatggaggatctggagggtgatgcccagtccgtcttggatgccagggagttgggcatggaggagcgtccatactccagccgcctgaagaagattggagagcttctagaccaggcatcggtgaccagggaggaagtggtgtctgagctagggaatggcattgctgcctttgagtcggtacccaccgccatctactgcttcctacgctgcatggagccagaccctgagatcccttctgccttcaatagcctccaaaggactctcatttattccatctcacttggtggggacacagacaccattgccaccatggctggggccattgctggtgcctactatgggatggatcaggtgccagagagctggcagcaaagctgtgaaggctacgaggagacagacatcctggcccaaagcctgcaccgtgtcttccagaagagttgatgagggctacagctgttggggctctgccaggtcccctgggaccaactacagctccaatcagaaaccctgcgcttccttgagtgtggcttcccacttttcctgcattgtggagctgactgagtacaccggtgaggctggggtctctgcaggggaggtcactggaacagcgagcaagggactggtgcctcgctggtgctgggtctctggtttgctgcagagccgtaggacactcctggctcctcagtaggacagacagacgcaggcgggtttattttggaggggtacttgtggcattttcctgtattgtcttggacatgggatgtggggaggtggaaatgatgagcagtagcatcatttctccctgttgggttttagccagtttgccagcaagcgcatcctagcagggtccccgagcagcaggttgtgtggatgaagggacaggcacttgcatccagctgatctaggtcacacctggctcttggctgccatgtggcttattaacagcttccagtggaagtcgcaataaacagtttttggtaaatctcaccac

SEQ ID NO: 5976 - protein, 145 aa, Homo sapiens [sequence omitted]

SEQ ID NO: 5977 - DNA, 1596 bp, Homo sapiens
gtagggaaactgtgagggcggcaccggaagtggcgagcagtctgcgcgcggatggccgcagcggcgatggcggcagcggcaggtggaggggctggcgcggcccgctccctctcgcgcttccgaggctgcctggctggcgcgctgctcggggactgcgtgggctccttctacgaggcccacgacaccgtcgacctgacgtcagtcctgcgtcatgtccagagtctggagccggaccccggcacgcccgggagtgagcggacagatttgctcaggagtacaagaaagaccctgacaggggctatggtgctggagtagtcactgtcttcaagaagctcctgaaccccaaatgtcgcgatgtctttgagcctgcccgggcccagtttaacgggaaaggctcctatggcaatggaggtgccatgcgggtggctggcatctccctggcctatagcagtgtccaggatgtgcagaagtttgcccggctctcggcccagctgacacacgcctcctccctgggttacaatggcgccatcctgcaggccctggctgtgcacctggccttgcagggcgagtcttccagcgagcactttctcaagcaactcctgggccacatggaggatctggagggtgatgcccagtccgtcttggatgccagggagttgggcatggaggagcgtccatactccagccgcctgaagaagattggagagcttctagaccaggcatcggtgaccagggaggaagtggtgtctgagctagggaatggcattgctgcctttgagtcggtacccaccgccatctactgcttcctacgctgcatggagccagaccctgagatcccttctgccttcaatagcctccaaaggactctcatttattccatctcacttggtggggacacagacaccattgccaccatggctggggccattgctggtgcctactatgggatggatcaggtgccagagagctggcagcaaagctgtgaaggctacgaggagacagacatcctggcccaaagcctgcaccgtgtcttccagaagagttgatgagggctacagctgttggggctctgccaggtcccctgggaccaactacagctccaatcagaaaccctgcgcttccttgagtgtggcttcccacttttcctgcattgtggagctgactgagtacaccggtgaggctggggtctctgcaggggaggtcactggaacagcgagcaagggactggtgcctcgctggtgctgggtctctggtttgctgcagagccgtaggacactcctggctcctcagtaggacagacagacgcaggcgggtttattttggaggggtacttgtggcattttcctgtattgtcttggacatgggatgtggggaggtggaaatgatgagcagtagcatcatttctccctgttgggttttagccagtttgccagcaagcgcatcctagcagggtccccgagcagcaggttgtgtggatgaagggacaggcacttgcatccagctgatctaggtcacacctggctcttggctgccatgtggcttattaacagcttccagtggaagtcgcaataaacagtttttggtaaatctcaccac

SEQ ID NO: 5978 - protein, 209 aa, Homo sapiens
MRVAGISLAYSSVQDVQKFARLSAQLTHASSLGYNGAILQALAVHLALQGESSSEHFLKQLLGHMEDLEGDAQSVLDARELGMEERPYSSRLKKIGELLDQASVTREEVVSELGNGIAAFESVPTAIYCFLRCMEPDPEIPSAFNSLQRTLIYSISLGGDTDTIATMAGAIAGAYYGMDQVPESWQQSCEGYEETDILAQSLHRVFQKS

SEQ ID NO: 5979 - DNA, 1693 bp, Homo sapiens
gtagggaaactgtgagggcggcaccggaagtggcgagcagtctgcgcgcggatggccgcagcggcgatggcggcagcggcaggtggaggggctggcgcggcccgctccctctcgcgcttccgaggctgcctggctggcgcgctgctcggggactgcgtgggctccttctacgaggcccacgacaccgtcgacctgacgtcagtcctgcgtcatgtccagagtctggagccggaccccggcacgcccgggagtgagcggacagaagccttgtactacacagatgacacagccatggccagggccctggtgcagtccctgctagccaaggaggcctttgacgaggtggacatggctcacagatttgctcaggagtacaagaaagaccctgacaggggctatggtgctggagtagtcactgtcttcaagaagctcctgaaccccaaatgtcgcgatgtctttgagcctgcccgggcccagtttaacgggaaaggctcctatggcaatggaggtgccatgcgggtggctggcatctccctggcctatagcagtgtccaggatgtgcagaagtttgcccggctctcggcccagctgacacacgcctcctccctgggttacaatggcgccatcctgcaggccctggctgtgcacctggccttgcagggcgagtcttccagcgagcactttctcaagcaactcctgggccacatggaggatctggagggtgatgcccagtccgtcttggatgccagggagttgggcatggaggagcgtccatactccagccgcctgaagaagattggagagcttctagaccaggcatcggtgaccagggaggaagtggtgtctgagctagggaatggcattgctgcctttgagtcggtacccaccgccatctactgcttcctacgctgcatggagccagaccctgagatcccttctgccttcaatagcctccaaaggactctcatttattccatctcacttggtggggacacagacaccattgccaccatggctggggccattgctggtgcctactatgggatggatcaggtgccagagagctggcagcaaagctgtgaaggctacgaggagacagacatcctggcccaaagcctgcaccgtgtcttccagaagagttgatgagggctacagctgttggggctctgccaggtcccctgggaccaactacagctccaatcagaaaccctgcgcttccttgagtgtggcttcccacttttcctgcattgtggagctgactgagtacaccggtgaggctggggtctctgcaggggaggtcactggaacagcgagcaagggactggtgcctcgctggtgctgggtctctggtttgctgcagagccgtaggacactcctggctcctcagtaggacagacagacgcaggcgggtttattttggaggggtacttgtggcattttcctgtattgtcttggacatgggatgtggggaggtggaaatgatgagcagtagcatcatttctccctgttgggttttagccagtttgccagcaagcgcatcctagcagggtccccgagcagcaggttgtgtggatgaagggacaggcacttgcatccagctgatctaggtcacacctggctcttggctgccatgtggcttattaacagcttccagtggaagtcgcaataaacagtttttggtaaatctcaccac

SEQ ID NO: 5980 - protein, 363 aa, Homo sapiens; identical to SEQ ID NO: 150

SEQ ID NO: 5981 - DNA, 1136 bp, Homo sapiens
cagctggccactagtcgtaaaaatgttgataatggattttatttgtctagcatctatactgggcgttgtgcagaatgcttcacagacacgatctcgcttcatcctcacaacagccctgtcagagagttgctaacgttactccctgtctgcttaaggagttgaatctgggagcaggaagcttagcggtcccctaggtaactctcccagtcacgcagccagtgtgtggtggagccaggatttgagcccaggtggtctaactgtagagcctgagatcttagtcacagcctgcttgaagccgagagtgctgacttgtgtcaaatggtaggaggcctggggaagcatgcagcccctctaacctggcttccccacagggaatggcattgctgcctttgagtcggtacccaccgccatctactgcttcctacgctgcatggagccagaccctgagatcccttctgccttcaatagcctccaaaggactctcatttattccatctcacttggtggggacacagacaccattgccaccatggctggggccattgctggtgcctactatgggatggatcaggtgccagagagctggcagcaaagctgtgaaggctacgaggagacagacatcctggcccaaagcctgcaccgtgtcttccaaaaccctgcgcttccttgagtgtggcttcccacttttcctgcattgtggagctgactgagtacaccggtgaggctggggtctctgcaggggaggtcactggaacagcgagcaagggactggtgcctcgctggtgctgggtctctggtttgctgcagagccgtaggacactcctggctcctcagtaggacagacagacgcaggcgggtttattttggaggggtacttgtggcattttcctgtattgtcttggacatgggatgtggggaggtggaaatgatgagcagtagcatcatttctccctgttgggttttagccagtttgccagcaagcgcatcctagcagggtccccgagcagcaggttgtgtggatgaagggacaggcacttgcatccagctgatctaggtcacacctggctcttggctgccatgtggcttattaacagcttccagtggaagtcgcaataaacagtttttggtaaatctca

SEQ ID NO: 5982 - protein, 111 aa, Homo sapiens [sequence omitted]

SEQ ID NO: 5983 - DNA, 4451 bp, Homo sapiens
ggacgccatgctggggactctgacacccctgtcttcgctgctgctgctgctactggtgctggtgctggggtgtgggccgcgggcgtcctctggtggcggggccggtggggcggcgggctatgccccagtgaagtacatccagcccatgcagaaaggacctgtgggaccgcccttccgtgagggcaaaggccagtacctggaaatgcctctaccgctgctgccgatggacctgaagggagagcccggcccccctgggaagcccgggcctcggggtccccctggcccccctggcttcccaggaaaaccaggcatgggaaagccaggactccatgggcagcctggccctgctgggccccctggcttctcccggatgggcaaggctggtcccccagggctccctggcaaggtcgggccaccagggcagccggggcttcggggggagccaggaatacgaggggaccagggcctccggggacccccaggaccccctggcctcccgggcccctcaggcattactatccctggaaaaccaggtgcccaaggggtgccagggcccccaggattccagggggaaccagggccccagggggagcctgggcccccaggtgatcgaggcctcaagggggataatggagtgggccagcccgggctgcctggggccccagggcaggggggtgcccccggcccccccggcctccctggtccagctggcttaggcaaacctggtttggatgggcttcctggggccccaggagacaagggtgagtctgggcctcctggagttccaggccccaggggggagccaggagctgtgggcccaaaaggacctcctggagtagacggtgtgggagtcccaggggcagcagggttgccaggaccacagggcccatcaggggccaaaggggagccagggacccggggcccccctgggctgataggccccactggctatgggatgccaggactgccaggccccaagggggacaggggcccagctggggtcccaggactcttgggggacaggggtgagccaggggaggatggggagccaggggagcagggcccacagggtcttgggggtccccctggacttcctgggtctgcagggcttcctggcagacgtgggccccctgggcctaagggtgaggcagggcctggaggacccccaggagtgcctggcattcgaggtgaccaggggcctagtggcctggctgggaaaccaggggtcccaggtgagaggggacttcctggggcccatggaccccctggaccaactgggcccaagggtgagccgggtttcacgggtcgccctggaggaccaggggtggcaggagccctggggcagaaaggtgacttggggctccctgggcagcctggcctgaggggtccctcaggaatcccaggactccagggtccagctggccctattgggccccaaggcctgccgggcctgaagggggaaccaggcctgccagggccccctggagaggggagagcaggggaacctggcacggctgggcccacggggcccccaggggtccctggctcccctggaatcacgggccctccggggcctcccgggcccccgggaccccctggtgcccctggggccttcgatgagactggcatcgcaggcttgcacctgcccaacggcggtgtggagggtgccgtgctgggcaaggggggcaagccacagtttgggctgggcgagctgtctgcccatgccacaccggccttcactgcggtgctcacctcgcccttccccgcctcgggcatgcccgtgaaatttgaccggactctctacaatggccacagcggctacaacccagccactggcatcttcacctgccctgtgggcggcgtctactactttgcttaccatgtgcacgtcaagggcaccaacgtgtgggtggccctgtacaagaacaacgtgccggccacctatacctacgatgagtacaagaagggctacctggaccaggcatctggtggggccgtgctccagctgcggcccaacgaccaggtctgggtgcagatgccgtcggaccaggccaacggcctctactccacggagtacatccactcctccttttcaggattcttgctctgccccacataacccgcggggggggtcctgctgccctggcctcctcccctttagtggtagagcgaccttttcaattacaaagaacctcctggaaaaaaaaacaaaagctgaacagaggcggccgtggccttggcccgaggagactaacttgctttctccctgcatgcaggctgagattgtttctggaaggggctggcctgagtttctttcccccaaatgtctgtgcagtgtcagggctgcaccccataggccctgaggcacacagcccagccccttgtgagtcctggcctctgctgggccctgaaggagctgagagggagctcaactccccaccccgccacgtggggagacagcccttcccactggctccctgatggcacctgctggaggaaaggggcacggcctccctcacagcccttggctggggctcctccagctccccctgggacctccagcatatgacagtggactaaggactgtggggttttcctccaaggggaagggagaagaggggaccatcgaggtggcgagtgtggacaccctgccaggactgcagcccccatggtgatgctgtggcatcagacatgtccgtggtgggcacagtgcctgttgccctgggaaagggcaacctccctttcactgctccagtggcagccatggggaaggcagtttgtgagggcttggggcacagacctggggcaggaggcagctcttcacgttcatccctgtctctcccgggctgcccccgccagctctggctgtttagcttgagggcagcacagaggcccctgggacacctacaggccagaaagatcaacctctgtgaagtgtctagaagtatctagtgcagatggtggcggaggcagaatcgaccatcagcaaacatgagcactcttccctttctccccttccacctgctgcgggctgggctggttttctcaatacaaaattgtaagaggatccttgtcaccccagccaggtatccccaaggcagagcacctctcgtttggccctctgaacaaggtgcacgcgagctgggggatgaagacggctcccacttccttttccttaataagaaccatatggtgggtgtatgtgtgtacaagaggggttcatctgtgggggcttcctctccttccaccctctggttccaatttcctgttctaagcaggactagggcccaggaggctaaggctgggagagaaagggtgccaacaggtcccttgggaatgagttggctctggacgtttctgccctgttccccgatcagagctcctctgcaggaaacaggcaggatgcccctcccaacccctcagtccctacgtcaagcggagtggataaggctgagatgagtgctgggagtggtggacattcctgctcgtgcaaagatggccactttccccgcagctgcagggcctcgcgctcggccctcgccaggccagccccactccttgtaccaagtgtgaactggggtcattcggtctgtgatctcgttgcactgctccaagtctggctgtgtccaggcggtccatgttgaaaatggaggatggctgctgacttctgactggctgagcagtgggttccttcaggttccttgccaaccctcctcccctgcccacaacttctccaaacaaagcaggctgtttgctcacttcttcaaaaggaggaatgataacccaaatctgcccaagtgacacttgagaaggttttggctggggttcctggtggatttcttactacctaacgcccaagaaaaccaactaaggactctcaaaccatacctggtgggggttcttcgctcaacctcttcttccctaggtcaaagccactatcatctgatgtgttagggatgggttctgattggcagaaattaatcagctcccaatgggagcccacggaactaagtagggtcccaagaaaaaaaacgggagctatttcacagagctgagcttctgccaaatttcattcctcaaacctttcaggaggggtggttggcgtttctaaaatgtttatgggatttgagttgcaggtgtccacttaactgactagctttgataaacaatgtcagattttaactatgaaaacgacattaccttgtgcatttttatattgattcctattttttttttaagattaaagtttaaatgttttccactagtcatttcacttctaacttggtataggaagcttagctctctacatacctatcatgtgccctgtatcacagaagattcaggaaaaatgcacttgggaatcaaagaaaatggaacttctttttgaaaagacaagcaaccatgttaactgtattgacacatcctcaataaaacctgttgtataaaacagc

SEQ ID NO: 5984 - protein, 703 aa, Homo sapiens; identical to SEQ ID NO: 152

SEQ ID NO: 5985 - DNA, 2436 bp, Homo sapiens
agtagagacagggttttgccatgttggccaggttggtctcaaacccctgacctcaggtgatccacccgccttgccctcccaaagtgctgggattacaggcatgagtcactgctcctggccccagaattctttatgtgagaaggagtttctgtgattttaactgctattgtaatagaaaccagttgattctgaagagtcacctcttttcctggaaatattttggctgtgagttaagaggaacattattttctcccatgctggtgactttggaaaggggttgtcatcagtgcaatgaacttggtctgggacttccttccttccccatggactgggcccctgggtcctctgttgcttctgggaggggccttgggagtacagtttactctaggccaggacattctaagacatgtggaaaccattggtcacacctgccagcaacagagattagtttgtaaatgtctgtttcaggtgtttcacagcatctagtgaatgaccgttgctcccataccagattctggtgacctgatcttaggcttgacagctgtggtggagacttgggttggcagaagcctaccttggtgtgttggaagagtgattgcttagtgcatgaggtgccttttacagcccattttgcagtagttctggctgcagccctgctgctttgaccttgcaggccaaatttcctggctcctccaaaggggatgatgttctttccctccagacacagttagagggaatcctgacagttgcatcaaggctggtccagactctcaccacgctttctcttttgtgctgcttggtcctgactgccttttgaatctcttttagagctctgagctcttcaccctgacctatggtgccctggtcacccagctatgtaaggactatgaaaatgatgaagatgtgaataaacagctggacaaaatgggctttaacattggagtccggctgattgaagatttcttggctcggtcaaatgttgggaggtgccatgactttcgggaaactgcggatgtcattgccaaggtggcgttcaagatgtacttgggcatcactccaagcattactaattggagcccagctggtgatgaattctccctcattttggaaaataaccccttggtggactttgtggaacttcctgataaccactcatcccttatttattccaatctcttgtgtggggtgttgcggggagctttggagatggtgagtgcaactctttatcttctgggacacccgaaatgcaatagggacttgataagtgtttaaatgaatgaaagagagaaaagaaagggctttggctcaccccagcgctttactgcctgagatggtgatgctgctgaggtaggatccaagtcggacatctttacatggtgatactcctccataccaggctggtggaaggtggtgctgtcagtccccaaagcccaggaacatccattctcagataggcttatttggtgacagtctcattcttgggtattctttgctaagtttctccttaagggttggagccattgtcttatgcaacagaatgttggcgctgtcaatcttgtccttgtgggaaaccagccccccttttttggatgctgtggatgagtcagttatgccccatccccactggttccctagaggctgtggccaggcagctaccccttcgttttcccactgtcccccaggtccagatggctgtggaggccaagtttgtccaggacaccctgaaaggagacggtgtgacagaaatccggatgagattcatcaggcggattgaggacaatcttccagctggagaggaataaccatccctacaactcgaggatagccatcaggagcactgttggaatcagcaggcctctgtgctccctctgccctccagaactcagtgactcttgaacatggatgttatatattcttataacctgtttccattctccattcaaataaagagcagactgcgatatagtccatttaccccatgtgtgcacattcaggagcgacagtctctgcccccattcccttgagaggggctggatgtaatcacctttggttggactagaaagagctcaaaccattttacattcctgtttgaatttttccaaagcaaaactcactttgaccccattaagaggcaagcctggcacatctatccctgggcctttagaaagccatttgcctcaaatggctatagggttgtggggtggagggaggaagggctgggagggagtggggaggaattgctagctgtagtgtgacacattgtagtgtttgccaggaaaggagccagtcatgccggaaacactgacttctgggaagccacccaggtctcattcctccctgctgttggaggcaacatctcctctttttacagagggtacatccttttttcttacaaattcttcaataaagacacattcttgagtgaaatcccaatca

SEQ ID NO: 5986 - protein, 115 aa, Homo sapiens
MGFNIGVRLIEDFLARSNVGRCHDFRETADVIAKVAFKMYLGITPSITNWSPAGDEFSLILENNPLVDFVELPDNHSSLIYSNLLCGVLRGALEMVSATLYLLGHPKCNRDLISV

SEQ ID NO: 5987 - DNA, 1349 bp, Homo sapiens
cttgtgggctgaggggcagcggcttaggctccggcgtctgcaggggtcgccgagctaacccgtggctaggcgagtggggcggggcggccggcaccatgtcgaggcaggcgaaccgtggcaccgagagcaagaaaatggtaacttggagcgcgtgacctcggcgggcggggcgaaattgaggcgtacagggaaggggcccggcgccgagcgcgagagctctgagctcttcaccctgacctatggtgccctggtcacccagctatgtaaggactatgaaaatgatgaagatgtgaataaacagctggacaaaatgggctttaacattggagtccggctgattgaagatttcttggctcggtcaaatgttgggaggtgccatgactttcgggaaactgcggatgtcattgccaaggtggcgttcaagatgtacttgggcatcactccaagcattactaattggagcccagctggtgatgaattctccctcattttggaaaataaccccttggtggactttgtggaacttcctgataaccactcatcccttatttattccaatctcttgtgtggggtgttgcggggagctttggagatggtccagatggctgtggaggccaagtttgtccaggacaccctgaaaggagacggtgtgacagaaatccggatgagattcatcaggcggattgaggacaatcttccagctggagaggaataaccatccctacaactcgaggatagccatcaggagcactgttggaatcagcaggcctctgtgctccctctgccctccagaactcagtgactcttgaacatggatgttatatattcttataacctgtttccattctccattcaaataaagagcagactgcgatatagtccatttaccccatgtgtgcacattcaggagcgacagtctctgcccccattcccttgagaggggctggatgtaatcacctttggttggactagaaagagctcaaaccattttacattcctgtttgaatttttccaaagcaaaactcactttgaccccattaagaggcaagcctggcacatctatccctgggcctttagaaagccatttgcctcaaatggctatagggttgtggggtggagggaggaagggctgggagggagtggggaggaattgctagctgtagtgtgacacattgtagtgtttgccaggaaaggagccagtcatgccggaaacactgacttctgggaagccacccaggtctcattcctccctgctgttggaggcaacatctcctctttttacagagggtacatccttttttcttacaaattcttcaataaagacacattcttgagtgaaatcccaatca

SEQ ID NO: 5988 - protein, 134 aa, Homo sapiens
MGFNIGVRLIEDFLARSNVGRCHDFRETADVIAKVAFKMYLGITPSITNWSPAGDEFSLILENNPLVDFVELPDNHSSLIYSNLLCGVLRGALEMVQMAVEAKFVQDTLKGDGVTEIRMRFIRRIEDNLPAGEE

SEQ ID NO: 5989 - DNA, 891 bp, Homo sapiens
cttgtgggctgaggggcagcggcttaggctccggcgtctgcaggggtcgccgagctaacccgtggctaggcgagtggggcggggcggccggcaccatgtcgaggcaggcgaaccgtggcaccgagagcaagaaaatggtccagatggctgtggaggccaagtttgtccaggacaccctgaaaggagacggtgtgacagaaatccggatgagattcatcaggcggattgaggacaatcttccagctggagaggaataaccatccctacaactcgaggatagccatcaggagcactgttggaatcagcaggcctctgtgctccctctgccctccagaactcagtgactcttgaacatggatgttatatattcttataacctgtttccattctccattcaaataaagagcagactgcgatatagtccatttaccccatgtgtgcacattcaggagcgacagtctctgcccccattcccttgagaggggctggatgtaatcacctttggttggactagaaagagctcaaaccattttacattcctgtttgaatttttccaaagcaaaactcactttgaccccattaagaggcaagcctggcacatctatccctgggcctttagaaagccatttgcctcaaatggctatagggttgtggggtggagggaggaagggctgggagggagtggggaggaattgctagctgtagtgtgacacattgtagtgtttgccaggaaaggagccagtcatgccggaaacactgacttctgggaagccacccaggtctcattcctccctgctgttggaggcaacatctcctctttttacagagggtacatccttttttcttacaaattcttcaataaagacacattcttgagtgaaatcccaatca

SEQ ID NO: 5990 - protein, 53 aa, Homo sapiens
MSRQANRGTESKKMVQMAVEAKFVQDTLKGDGVTEIRMRFIRRIEDNLPAGEE

SEQ ID NO: 5991 - DNA, 1541 bp, Homo sapiens
cgcagtgagtcagtgccggtcggtcttgtgggctgaggggcagcggcttaggctccggcgtctgcaggggtcgccgagctaacccgtggctaggcgagtggggcggggcggccggcaccatgtcgaggcaggcgaaccgtggcaccgagagcaagaaaatggtaacttggagcgcgtgacctcggcgggcggggcgaaattgaggcgtacagggaaggggcccggcgccgagcgcgaggtgcgtttggaaaagggccttcctgtgagctctggcaaggggaagcctcttgctgggtcactccgggggcgttccaggcaggtgaggggaccgtcggagaagttccccggaggagaccccgcccccaaggcctgagtgcagctctgtgctaagccaacaacaacgacgagctctgagctcttcaccctgacctatggtgccctggtcacccagctatgtaaggactatgaaaatgatgaagatgtgaataaacagctggacaaaatgggctttaacattggagtccggctgattgaagatttcttggctcggtcaaatgttgggaggtgccatgactttcgggaaactgcggatgtcattgccaaggtggcgttcaagatgtacttgggcatcactccaagcattactaattggagcccagctggtgatgaattctccctcattttggaaaataaccccttggtggactttgtggaacttcctgataaccactcatcccttatttattccaatctcttgtgtggggtgttgcggggagctttggagatggtccagatggctgtggaggccaagtttgtccaggacaccctgaaaggagacggtgtgacagaaatccggatgagattcatcaggcggattgaggacaatcttccagctggagaggaataaccatccctacaactcgaggatagccatcaggagcactgttggaatcagcaggcctctgtgctccctctgccctccagaactcagtgactcttgaacatggatgttatatattcttataacctgtttccattctccattcaaataaagagcagactgcgatatagtccatttaccccatgtgtgcacattcaggagcgacagtctctgcccccattcccttgagaggggctggatgtaatcacctttggttggactagaaagagctcaaaccattttacattcctgtttgaatttttccaaagcaaaactcactttgaccccattaagaggcaagcctggcacatctatccctgggcctttagaaagccatttgcctcaaatggctatagggttgtggggtggagggaggaagggctgggagggagtggggaggaattgctagctgtagtgtgacacattgtagtgtttgccaggaaaggagccagtcatgccggaaacactgacttctgggaagccacccaggtctcattcctccctgctgttggaggcaacatctcctctttttacagagggtacatccttttttcttacaaattcttcaataaagacacattcttgagtgaaatcccaatca

SEQ ID NO: 5992 - protein, 134 aa, Homo sapiens; identical to SEQ ID NO: 5988

SEQ ID NO: 5993 - DNA, 1314 bp, Homo sapiens
cgcgggaggccgcgcaggcgcagtgagtcagtgccggtcggtcttgtgggctgaggggcagcggcttaggctccggcgtctgcaggggtcgccgagctaacccgtggctaggcgagtggggcggggcggccggcaccatgtcgaggcaggcgaaccgtggcaccgagagcaagaaaatgagctctgagctcttcaccctgacctatggtgccctggtcacccagctatgtaaggactatgaaaatgatgaagatgtgaataaacagctggacaaaatgggctttaacattggagtccggctgattgaagatttcttggctcggtcaaatgttgggaggtgccatgactttcgggaaactgcggatgtcattgccaaggtggcgttcaagatgtacttgggcatcactccaagcattactaattggagcccagctggtgatgaattctccctcattttggaaaataaccccttggtggactttgtggaacttcctgataaccactcatcccttatttattccaatctcttgtgtggggtgttgcggggagctttggagatggtccagatggctgtggaggccaagtttgtccaggacaccctgaaaggagacggtgtgacagaaatccggatgagattcatcaggcggattgaggacaatcttccagctggagaggaataaccatccctacaactcgaggatagccatcaggagcactgttggaatcagcaggcctctgtgctccctctgccctccagaactcagtgactcttgaacatggatgttatatattcttataacctgtttccattctccattcaaataaagagcagactgcgatatagtccatttaccccatgtgtgcacattcaggagcgacagtctctgcccccattcccttgagaggggctggatgtaatcacctttggttggactagaaagagctcaaaccattttacattcctgtttgaatttttccaaagcaaaactcactttgaccccattaagaggcaagcctggcacatctatccctgggcctttagaaagccatttgcctcaaatggctatagggttgtggggtggagggaggaagggctgggagggagtggggaggaattgctagctgtagtgtgacacattgtagtgtttgccaggaaaggagccagtcatgccggaaacactgacttctgggaagccacccaggtctcattcctccctgctgttggaggcaacatctcctctttttacagagggtacatccttttttcttacaaattcttcaataaagacacattcttgagtgaaatcccaatca

SEQ ID NO: 5994 - protein, 180 aa, Homo sapiens; identical to SEQ ID NO: 154

SEQ ID NO: 5995 - DNA, 1306 bp, Homo sapiens
cgccgtccgcgccgttcgcgccgcccccgccccggagccccgcgcccgcagcctcccggcgcctctcccacggccacggccgagcgggctccacggctccaggagttcgccgcgctagctgcctccccctgcgtccgcgtcttggtacgcgccgcagcgcctgaggactaaagctctgagctcttcaccctgacctatggtgccctggtcacccagctatgtaaggactatgaaaatgatgaagatgtgaataaacagctggacaaaatgggctttaacattggagtccggctgattgaagatttcttggctcggtcaaatgttgggaggtgccatgactttcgggaaactgcggatgtcattgccaaggtggcgttcaagatgtacttgggcatcactccaagcattactaattggagcccagctggtgatgaattctccctcattttggaaaataaccccttggtggactttgtggaacttcctgataaccactcatcccttatttattccaatctcttgtgtggggtgttgcggggagctttggagatggtccagatggctgtggaggccaagtttgtccaggacaccctgaaaggagacggtgtgacagaaatccggatgagattcatcaggcggattgaggacaatcttccagctggagaggaataaccatccctacaactcgaggatagccatcaggagcactgttggaatcagcaggcctctgtgctccctctgccctccagaactcagtgactcttgaacatggatgttatatattcttataacctgtttccattctccattcaaataaagagcagactgcgatatagtccatttaccccatgtgtgcacattcaggagcgacagtctctgcccccattcccttgagaggggctggatgtaatcacctttggttggactagaaagagctcaaaccattttacattcctgtttgaatttttccaaagcaaaactcactttgaccccattaagaggcaagcctggcacatctatccctgggcctttagaaagccatttgcctcaaatggctatagggttgtggggtggagggaggaagggctgggagggagtggggaggaattgctagctgtagtgtgacacattgtagtgtttgccaggaaaggagccagtcatgccggaaacactgacttctgggaagccacccaggtctcattcctccctgctgttggaggcaacatctcctctttttacagagggtacatccttttttcttacaaattcttcaataaagacacattcttgagtgaaatcccaatca

SEQ ID NO: 5996 - protein, 134 aa, Homo sapiens; identical to SEQ ID NO: 5988

SEQ ID NO: 5997 - DNA, 707 bp, Homo sapiens
gttccctagaggctgtggccaggcagctaccccttcgttttcccactgtcccccaggtccagatggctgtggaggccaagtttgtccaggacaccctgaaaggagacggtgtgacagaaatccggatgagattcatcaggcggattgaggacaatcttccagctggagaggaataaccatccctacaactcgaggatagccatcaggagcactgttggaatcagcaggcctctgtgctccctctgccctccagaactcagtgactcttgaacatggatgttatatattcttataacctgtttccattctccattcaaataaagagcagactgcgatatagtccatttaccccatgtgtgcacattcaggagcgacagtctctgcccccattcccttgagaggggctggatgtaatcacctttggttggactagaaagagctcaaaccattttacattcctgtttgaatttttccaaagcaaaactcactttgaccccattaagaggcaagcctggcacatctatccctgggcctttagaaagccatttgcctcaaatggctatagggttgtggggtggagggaggaagggctgggagggagtggggaggaattgctagctgtagtgcaacatctcctctttttacagagggtacatccttttttcttacaaattcttcaataaagacacattcttgagtgaaatccc

SEQ ID NO: 5998 - protein, 41 aa, Homo sapiens
MDVIYSYNLFPFSIQIKSRLRYSPFTPCVHIQERQSLPPFP

SEQ ID NO: 5999 - DNA, 886 bp, Homo sapiens
cttgtgggctgaggggcagcggcttaggctccggcgtctgcaggggtcgccgagctaacccgtggctaggcgagtggggcggggcggccggcaccatgtcgaggcaggcgaaccgtggcaccgagagcaagaaaatggtaacttggagcgcgtgacctcggcgggcggggcgaaattgaggcgtacagggaaggggcccggcgccgagcgcgagagctctgagctcttcaccctgacctatggtgccctggtcacccagctatgtaaggactatgaaaatgatgaagatgtgaataaacagctggacaaaatgggctttaacattggagtccggctgattgaagatttcttggctcggtcaaatgttgggaggtgccatgactttcgggaaactgcggatgtcattgccaaggtggcgttcaagatgtacttgggcatcactccaagcattactaattggagcccagctggtgatgaattctccctcattttggaaaataaccccttggtggactttgtggaacttcctgataaccactcatcccttatttattccaatctcttgtgtggggtgttgcggggagctttggagatggtccagatggctgtggaggccaagtttgtccaggacaccctgaaaggagacggtgtgacagaaatccggatgagattcatcaggcggattgaggacaatcttccagctggagaggaataaccatccctacaactcgaggatagccatcaggagcactgttggaatcagcaggcctctgtgctccctctgccctccagaactcagtgactcttgaacatggatgttatatattcttataacctgtttccattctccattcaaataaagagcagactgcgatatagtccattt

SEQ ID NO: 6000 - protein, 134 aa, Homo sapiens; identical to SEQ ID NO: 5988

SEQ ID NO: 6001 - DNA, 428 bp, Homo sapiens
cttgtgggctgaggggcagcggcttaggctccggcgtctgcaggggtcgccgagctaacccgtggctaggcgagtggggcggggcggccggcaccatgtcgaggcaggcgaaccgtggcaccgagagcaagaaaatggtccagatggctgtggaggccaagtttgtccaggacaccctgaaaggagacggtgtgacagaaatccggatgagattcatcaggcggattgaggacaatcttccagctggagaggaataaccatccctacaactcgaggatagccatcaggagcactgttggaatcagcaggcctctgtgctccctctgccctccagaactcagtgactcttgaacatggatgttatatattcttataacctgtttccattctccattcaaataaagagcagactgcgatatagtccattt

SEQ ID NO: 6002 - protein, 53 aa, Homo sapiens; identical to SEQ ID NO: 5990

SEQ ID NO: 6003 - DNA, 1078 bp, Homo sapiens
cgcagtgagtcagtgccggtcggtcttgtgggctgaggggcagcggcttaggctccggcgtctgcaggggtcgccgagctaacccgtggctaggcgagtggggcggggcggccggcaccatgtcgaggcaggcgaaccgtggcaccgagagcaagaaaatggtaacttggagcgcgtgacctcggcgggcggggcgaaattgaggcgtacagggaaggggcccggcgccgagcgcgaggtgcgtttggaaaagggccttcctgtgagctctggcaaggggaagcctcttgctgggtcactccgggggcgttccaggcaggtgaggggaccgtcggagaagttccccggaggagaccccgcccccaaggcctgagtgcagctctgtgctaagccaacaacaacgacgagctctgagctcttcaccctgacctatggtgccctggtcacccagctatgtaaggactatgaaaatgatgaagatgtgaataaacagctggacaaaatgggctttaacattggagtccggctgattgaagatttcttggctcggtcaaatgttgggaggtgccatgactttcgggaaactgcggatgtcattgccaaggtggcgttcaagatgtacttgggcatcactccaagcattactaattggagcccagctggtgatgaattctccctcattttggaaaataaccccttggtggactttgtggaacttcctgataaccactcatcccttatttattccaatctcttgtgtggggtgttgcggggagctttggagatggtccagatggctgtggaggccaagtttgtccaggacaccctgaaaggagacggtgtgacagaaatccggatgagattcatcaggcggattgaggacaatcttccagctggagaggaataaccatccctacaactcgaggatagccatcaggagcactgttggaatcagcaggcctctgtgctccctctgccctccagaactcagtgactcttgaacatggatgttatatattcttataacctgtttccattctccattcaaataaagagcagactgcgatatagtccattt

SEQ ID NO: 6004 - protein, 134 aa, Homo sapiens; identical to SEQ ID NO: 5988

SEQ ID NO: 6005 - DNA, 851 bp, Homo sapiens
cgcgggaggccgcgcaggcgcagtgagtcagtgccggtcggtcttgtgggctgaggggcagcggcttaggctccggcgtctgcaggggtcgccgagctaacccgtggctaggcgagtggggcggggcggccggcaccatgtcgaggcaggcgaaccgtggcaccgagagcaagaaaatgagctctgagctcttcaccctgacctatggtgccctggtcacccagctatgtaaggactatgaaaatgatgaagatgtgaataaacagctggacaaaatgggctttaacattggagtccggctgattgaagatttcttggctcggtcaaatgttgggaggtgccatgactttcgggaaactgcggatgtcattgccaaggtggcgttcaagatgtacttgggcatcactccaagcattactaattggagcccagctggtgatgaattctccctcattttggaaaataaccccttggtggactttgtggaacttcctgataaccactcatcccttatttattccaatctcttgtgtggggtgttgcggggagctttggagatggtccagatggctgtggaggccaagtttgtccaggacaccctgaaaggagacggtgtgacagaaatccggatgagattcatcaggcggattgaggacaatcttccagctggagaggaataaccatccctacaactcgaggatagccatcaggagcactgttggaatcagcaggcctctgtgctccctctgccctccagaactcagtgactcttgaacatggatgttatatattcttataacctgtttccattctccattcaaataaagagcagactgcgatatagtccattt

SEQ ID NO: 6006 - protein, 180 aa, Homo sapiens; identical to SEQ ID NO: 154

SEQ ID NO: 6007 - DNA, 599 bp, Homo sapiens
caacgacggtaataaataccaataactgccacttaacttctctcttactatgtgttgggcaccgggccacgcacgttacagcatctcagttaatctgcagagtagcccctatcagatggataacattgccgttttacagcttggagagcttacgtaatttgcccatatttacacctgggaagttaggatttggacccgtgtttaactccaaagctaatgctaggagctgactgttaggctttactcttaggctacagtgtctcgtactgtggcgtgggtattgtgagagatgttcagatactggtcgtgccagaaaggaacgttttattcaatggaataagagatgggccagagtaagcagtgagtggtgcccctctaatggagtgggtggctcccttctttcccagggaatagtttggacaccatatggtcctataaagttggactaggggctggggctgcagacttaggtcatttttctttcgttcttccctccctccccccgcccccagacgaaatctctgtcacccggggtggagtgcatgagccgagatcacatcactgcattccatcctgggtaacagagcaagactccatct

SEQ ID NO: 6008 - protein, 35 aa, Homo sapiens
MCWAPGHARYSISVNLQSSPYQMDNIAVLQLGELT

SEQ ID NO: 6009 - DNA, 711 bp, Homo sapiens
agggaaggggcccggcgccgagcgcgaggtgcgtttggaaaagggccttcctgtgagctctggcaaggggaagcctcttgctgggtcactccgggggcgttccaggcaggtgaggggaccgtcggagaagttccccggaggagaccccgcccccaaggcctgagtgcagctctgtgctaagccaacaacaacgacgagctctgagctcttcaccctgacctatggtgccctggtcacccagctatgtaaggactatgaaaatgatgaagatgtgaataaacagctggacaaaatgggctttaacattggagtccggctgattgaagatttcttggctcggtcaaatgttgggaggtgccatgactttcgggaaactgcggatgtcattgccaaggtcattattctgggccacctgtccatgctgaagaattgctgctgagaggcactgcttaccactctttctatctcccttagagaggcctttaatctcccaaaagactggctaggcagctctttgggtcaaaaaaacattccaggtcgttagggaatagcatagattatttaatccctgtggattaaagccccactgaaatcaaagcctgagcttttccactgtgaaggtgtagcagagtagcatgggggtaaagaatacagactcggtcgggcgtggtggctcacatctgtaatcctagcactttgggaggcccaggc

SEQ ID NO: 6010 - protein, 48 aa, Homo sapiens
MGFNIGVRLIEDFLARSNVGRCHDFRETADVIAKVIILGHLSMLKNCC

SEQ ID NO: 6011 - DNA, 3113 bp, Homo sapiens
ccggagcaagggcggcagcaaggctcccagacctgtccccagcccagccatcagcaggggagagaaagcgaaaccctttcaggggtctccttgtgactctccttcatgcctcccgacgtcccccgggccgctttggtttagctgtggtcgccaggacccccccagagccaagaccttctccagaaggtgacccttcccccccaccaccaccaatgtcagccctggtccccgacactcccccggacacccctcctgccatgaagaatgccactagctctaagcagctcccactggaaccagagagcccctcagggcaggtcgggcctaggccagcccccccgcaggaagagtccccttcctctgaagcaaagagcagaggacccaccccaccagccatgggcccacgggatgccagacctcctcgaaggagcagccagccatctccaacagcagtgccagcctccgacagccctcccaccaagcaagaggtgaagaaggcaggagagagacacaagctggcaaaggagcggcgagaagagcgggccaagtacctggcggccaagaaggcagtgtggctggagaaggaggagaaggccaaggcgctgcgggagaagcagctccaggagcgccggcgccggctggaggagcaacgtcttaaagccgagcaacgccgtgcagccctggaggaacggcagcggcagaagctcgagaaaaacaaggagcgctatgaagcagccatccaacggtcagtgaagaagacgtgggccgaaatccggcagcagcgctggtcctgggcaggggccctgcaccacagctctccaggacataagaccagtgggagcaggtgctccgtgtcggcagttaacctgcccaaacacgtggactctataatcaacaagcggctctcaaagtcctctgccacgctctggaactcccccagtagaaatcgcagcctgcagctgagcgcatgggagagcagcatcgtggatcgtctgatgacgcccactctctccttccttgctcggagtcgcagcgcggtcacactgccccgcaacggccgggaccaggccgtgccggtgtgcccgcgctcggcctccgccagccccctgacgccgtgcagcgtcacccgaagcgtgcaccgctgcgcccccgccggtgagcgcggggagcgccgcaagcccaacgccgggggcagccccgctccggtgcgccgccggccggaggcctcgccggtgcagaaaaaggagaagaaggacaaggagcgggaaaacgagaaggagaagagtgccctagcccgggagcgcagcctcaagaagcgccagtcgctgcccgcctccccacgtgcccgcctctctgccagcaccgcctctgagctcagccccaaatccaaggccaggccatcctctccctccacatcctggcacaggcctgcctccccctgccccagcccagggccaggccacactctgcctccaaagccaccgtccccccgaggcaccactgcatcccccaaggggcgggttcggaggaaggaggaggcaaaggagagccccagcgccgcagggcccgaggacaagagccagagcaagcgcagggccagtaacgagaaggagtcagcagccccagcctcaccggcaccttcgccggcgccctcgcccaccccagccccgccccagaaggagcagccccccgcggagacccctacagacgctgctgtcttgacctcacccccagcccctgctcccccggtgacccctagcaaaccaatggccggcaccacagaccgagaagaagccactcggctcttggctgagaagcggcgccaggcccgggagcagcgggagcgcgaggagcaggagcggaggctgcaggcagaaagggacaagcgaatgcgagaggagcagctggcacgggaggccgaggcccgggcggagcgggaggcggaggcccggaggcgggaggagcaggaggcacgagagaaggcgcaggccgagcaggaggagcaggagcggctgcagaagcagaaagaggaggccgaagctcggtcgcgggaagaggcggagcggcagcgtctggagcgggaaaagcacttccagcagcaggagcaagagcggcaagagcgcagaaagcgtctggaggagatcatgaagaggactcggaagtcagaagtttctgaaaccaagaagcaggacagcaaggaggccaacgccaacggttccagcccagagcctgtgaaagctgtggaggctcggtccccagggctgcagaaggaggctgtgcagaaagaggagcccatcccacaggagcctcagtggagtctcccaagcaaggagttgccagcgtccctggtgaatggcctgcagcctctcccagcacaccaggagaatggcttctccaccaacggaccctctggggacaagagtctgagccgaacaccagagacactcctgccctttgcagaggcagaagccttcctcaagaaagctgtggtgcagtccccgcaggtcacagaagtcctttaagagggtttgccttggatccgggcacagttgtgagggctcctctgcatcacctaccaggatgtctggaggagaaaaagacagaacaaagatggaagtggcctgggcccctgggggtgggtcctctctgttgtttttaatctgcaccttatagactgatgtctctttggccggagccagatctgcccctcagtgcattcgtgtgctcgcacgcgcagacatcccttctcccccatacacacatatacactcacagcctctctggcctcttcccttggggaggggccacctgtagtatttgccttgatttggtggggtacagtggatgtgaatactgtaaatagcttgtgctcagactcctctgcgtggagagggtgggtgcaggaggcagaccctccccccaaagccccctggggagatcttcctctctctatttaactgtaactgagggggatcccaggtctggggatgggggacaccttgggccacaggatactggttgcttcaggggtacccatgccccctgccctcgcctggaatcagtgttactgcatctgattaaatgtctccagaaataaagaataattctgccaa

SEQ ID NO: 6012 - protein, 769 aa, Homo sapiens [sequence omitted]

SEQ ID NO: 6013 - DNA, 3754 bp, Homo sapiens
cttgtgactctccttcatgcctcccgacgtcccccgggccgctttggtttaggtgggtttgagcgagaatttggactcgaagctgccctctcagccccagtgccagagcccccaaactccagggtgggaaaggggagtcccagccctgctccccctctcccccagtccccgcggcgggtgagtcacccgagcgctccctacttagtcctcaggcgctgcggcgcgtaccaagacgcggacgcagggggaggcagctagcgcggcgaactcctggagccgtggagcccgctcggccgtggccgtgggagaggcgccgggaggctgcgggcgcggggctccggggcgggggcggcgcgaacggcgcggacggcgcgggcgcggggggctgggtcccggggcgctgctggggtggacccccccgcctcgaacttggtacgcgccagcgagaggccaggcccagcccgggcggtacaatagggttgggccgaggccgggactgggccggcgccgggcggggaacgggttcgcgaccgcagccgagagaccccgggcgaccggcacctccgagactcgcgggccacctgcctcgaccttccccggagcgcccccgcctccgagtcgctacttgccgggccgggccgggccgggcgtgatgcgccgcgggacccctgtcctggccactggccgccgccgccgccgccgctgagaccccgagacccccagtgacgccgcagccatggagagcggcccgcgtgcggagctgggggcgggcgcacccccagctgtggtcgccaggacccccccagagccaagaccttctccagaaggtgacccttcccccccaccaccaccaatgtcagccctggtccccgacactcccccggacacccctcctgccatgaagaatgccactagctctaagcagctcccactggaaccagagagcccctcagggcaggtcgggcctaggccagcccccccgcaggaagagtccccttcctctgaagcaaagagcagaggacccaccccaccagccatgggcccacgggatgccagacctcctcgaaggagcagccagccatctccaacagcagtgccagcctccgacagccctcccaccaagcaagaggtgaagaaggcaggagagagacacaagctggcaaaggagcggcgagaagagcgggccaagtacctggcggccaagaaggcagtgtggctggagaaggaggagaaggccaaggcgctgcgggagaagcagctccaggagcgccggcgccggctggaggagcaacgtcttaaagccgagcaacgccgtgcagccctggaggaacggcagcggcagaagctcgagaaaaacaaggagcgctatgaagcagccatccaacggtcagtgaagaagacgtgggccgaaatccggcagcagcgctggtcctgggcaggggccctgcaccacagctctccaggacataagaccagtgggagcaggtgctccgtgtcggcagttaacctgcccaaacacgtggactctataatcaacaagcggctctcaaagtcctctgccacgctctggaactcccccagtagaaatcgcagcctgcagctgagcgcatgggagagcagcatcgtggatcgtctgatgacgcccactctctccttccttgctcggagtcgcagcgcggtcacactgccccgcaacggccgggaccaggccgtgccggtgtgcccgcgctcggcctccgccagccccctgacgccgtgcagcgtcacccgaagcgtgcaccgctgcgcccccgccggtgagcgcggggagcgccgcaagcccaacgccgggggcagccccgctccggtgcgccgccggccggaggcctcgccggtgcagaaaaaggagaagaaggacaaggagcgggaaaacgagaaggagaagagtgccctagcccgggagcgcagcctcaagaagcgccagtcgctgcccgcctccccacgtgcccgcctctctgccagcaccgcctctgagctcagccccaaatccaaggccaggccatcctctccctccacatcctggcacaggcctgcctccccctgccccagcccagggccaggccacactctgcctccaaagccaccgtccccccgaggcaccactgcatcccccaaggggcgggttcggaggaaggaggaggcaaaggagagccccagcgccgcagggcccgaggacaagagccagagcaagcgcagggccagtaacgagaaggagtcagcagccccagcctcaccggcaccttcgccggcgccctcgcccaccccagccccgccccagaaggagcagccccccgcggagacccctacagacgctgctgtcttgacctcacccccagcccctgctcccccggtgacccctagcaaaccaatggccggcaccacagaccgagaagaagccactcggctcttggctgagaagcggcgccaggcccgggagcagcgggagcgcgaggagcaggagcggaggctgcaggcagaaagggacaagcgaatgcgagaggagcagctggcacgggaggccgaggcccgggcggagcgggaggcggaggcccggaggcgggaggagcaggaggcacgagagaaggcgcaggccgagcaggaggagcaggagcggctgcagaagcagaaagaggaggccgaagctcggtcgcgggaagaggcggagcggcagcgtctggagcgggaaaagcacttccagcagcaggagcaagagcggcaagagcgcagaaagcgtctggaggagatcatgaagaggactcggaagtcagaagtttctgaaaccaagaagcaggacagcaaggaggccaacgccaacggttccagcccagagcctgtgaaagctgtggaggctcggtccccagggctgcagaaggaggctgtgcagaaagaggagcccatcccacaggagcctcagtggagtctcccaagcaaggagttgccagcgtccctggtgaatggcctgcagcctctcccagcacaccaggagaatggcttctccaccaacggaccctctggggacaagagtctgagccgaacaccagagacactcctgccctttgcagaggcagaagccttcctcaagaaagctgtggtgcagtccccgcaggtcacagaagtcctttaagagggtttgccttggatccgggcacagttgtgagggctcctctgcatcacctaccaggatgtctggaggagaaaaagacagaacaaagatggaagtggcctgggcccctgggggtgggtcctctctgttgtttttaatctgcaccttatagactgatgtctctttggccggagccagatctgcccctcagtgcattcgtgtgctcgcacgcgcagacatcccttctcccccatacacacatatacactcacagcctctctggcctcttcccttggggaggggccacctgtagtatttgccttgatttggtggggtacagtggatgtgaatactgtaaatagcttgtgctcagactcctctgcgtggagagggtgggtgcaggaggcagaccctccccccaaagccccctggggagatcttcctctctctatttaactgtaactgagggggatcccaggtctggggatgggggacaccttgggccacaggatactggttgcttcaggggtacccatgccccctgccctcgcctggaatcagtgttactgcatctgattaaatgtctccagaaataaagaataattctgccaa

SEQ ID NO: 6014 - protein, 808 aa, Homo sapiens
MESGPRAELGAGAPPAVVARTPPEPRPSPEGDPSPPPPPMSALVPDTPPDTPPAMKNATSSKQLPLEPESPSGQVGPRPAPPQEESPSSEAKSRGPTPPAMGPRDARPPRRSSQPSPTAVPASDSPPTKQEVKKAGERHKLAKERREERAKYLAAKKAVWLEKEEKAKALREKQLQERRRRLEEQRLKAEQRRAALEERQRQKLEKNKERYEAAIQRSVKKTWAEIRQQRWSWAGALHHSSPGHKTSGSRCSVSAVNLPKHVDSIINKRLSKSSATLWNSPSRNRSLQLSAWESSIVDRLMTPTLSFLARSRSAVTLPRNGRDQAVPVCPRSASASPLTPCSVTRSVHRCAPAGERGERRKPNAGGSPAPVRRRPEASPVQKKEKKDKERENEKEKSALARERSLKKRQSLPASPRARLSASTASELSPKSKARPSSPSTSWHRPASPCPSPGPGHTLPPKPPSPRGTTASPKGRVRRKEEAKESPSAAGPEDKSQSKRRASNEKESAAPASPAPSPAPSPTPAPPQKEQPPAETPTDAAVLTSPPAPAPPVTPSKPMAGTTDREEATRLLAEKRRQAREQREREEQERRLQAERDKRMREEQLAREAEARAEREAEARRREEQEAREKAQAEQEEQERLQKQKEEAEARSREEAERQRLEREKHFQQQEQERQERRKRLEEIMKRTRKSEVSETKKQDSKEANANGSSPEPVKAVEARSPGLQKEAVQKEEPIPQEPQWSLPSKELPASLVNGLQPLPAHQENGFSTNGPSGDKSLSRTPETLLPFAEAEAFLKKAVVQSPQVTEVL

SEQ ID NO: 6015 - DNA, 3739 bp, Homo sapiens
cttgtgactctccttcatgcctcccgacgtcccccgggccgctttggtttaggtgggtttgagcgagaatttggactcgaagctgccctctcagccccagtgccagagcccccaaactccagggtgggaaaggggagtcccagccctgctccccctctcccccagtccccgcggcgggtgagtcacccgagcgctccctacttagtcctcaggcgctgcggcgcgtaccaagacgcggacgcagggggaggcagctagcgcggcgaactcctggagccgtggagcccgctcggccgtggccgtgggagaggcgccgggaggctgcgggcgcggggctccggggcgggggcggcgcgaacggcgcggacggcgcgggcgcggggggctgggtcccggggcgctgctggggtggacccccccgcctcgaacttggtacgcgccagcgagaggccaggcccagcccgggcggtacaatagggttgggccgaggccgggactgggccggcgccgggcggggaacgggttcgcgaccgcagccgagagaccccgggcgaccggcacctccgagactcgcgggccacctgcctcgaccttccccggagcgcccccgcctccgagtcgctacttgccgggccgggccgggccgggcgtgatgcgccgcgggacccctgtcctggccactggccgccgccgccgccgccgctgagaccccgagacccccagtgacgccgcagccatggagagcggcccgcgtgcggagctgggggcgggcgcacccccagctgtggtcgccaggacccccccagagccaagaccttctccagaaggtgacccttcccccccaccaccaccaatgtcagccctggtccccgacactcccccggacacccctcctgccatgaagaatgccactagctctaagcagctcccactggaaccagagagcccctcagggcaggtcgggcctaggccagcccccccgcaggaagagtccccttcctctgaagcaaagagcagaggacccaccccaccagccatgggcccacgggatgccagacctcctcgaaggagcagccagccatctccaacagcagtgccagcctccgacagccctcccaccaagcaagaggtgaagaaggcaggagagagacacaagctggcaaaggagcggcgagaagagcgggccaagtacctggcggccaagaaggcagtgtggctggagaaggaggagaaggccaaggcgctgcgggagaagcagctccaggagcgccggcgccggctggaggagcaacgtcttaaagccgagcaacgccgtgcagccctggaggaacggcagcggcagaagctcgagaaaaacaaggagcgctatgaagcagccatccaacggtcagtgaagaagacgtgggccgaaatccggcagcagcgctggtcctgggcaggggccctgcaccacagctctccaggacataagaccaatcgcagcctgcagctgagcgcatgggagagcagcatcgtggatcgtctgatgacgcccactctctccttccttgctcggagtcgcagcgcggtcacactgccccgcaacggccgggaccagggtaggggctgcgaccctgggagaggccccacgtggggccgggcaggggccagcctggcgcgcgggccgcaacccgaccgcactcatccctctgcagccgtgccggtgtgcccgcgctcggcctccgccagccccctgacgccgtgcagcgtcacccgaagcgtgcaccgctgcgcccccgccggtgagcgcggggagcgccgcaagcccaacgccgggggcagccccgctccggtgcgccgccggccggaggcctcgccggtgcagaaaaaggagaagaaggacaaggagcgggaaaacgagaaggagaagagtgccctagcccgggagcgcagcctcaagaagcgccagtcgctgcccgcctccccacgtgcccgcctctctgccagcaccgcctctgagctcagccccaaatccaaggccaggccatcctctccctccacatcctggcacaggcctgcctccccctgccccagcccagggccaggccacactctgcctccaaagccaccgtccccccgaggcaccactgcatcccccaaggggcgggttcggaggaaggaggaggcaaaggagagccccagcgccgcagggcccgaggacaagagccagagcaagcgcagggccagtaacgagaaggagtcagcagccccagcctcaccggcaccttcgccggcgccctcgcccaccccagccccgccccagaaggagcagccccccgcggagacccctacagacgctgctgtcttgacctcacccccagcccctgctcccccggtgacccctagcaaaccaatggccggcaccacagaccgagaagaagccactcggctcttggctgagaagcggcgccaggcccgggagcagcgggagcgcgaggagcaggagcggaggctgcaggcagaaagggacaagcgaatgcgagaggagcagctggcacgggaggccgaggcccgggcggagcgggaggcggaggcccggaggcgggaggagcaggaggcacgagagaaggcgcaggccgagcaggaggagcaggagcggctgcagaagcagaaagaggaggccgaagctcggtcgcgggaagaggcggagcggcagcgtctggagcgggaaaagcacttccagcagcaggagcaagagcggcaagagcgcagaaagcgtctggaggagatcatgaagaggactcggaagtcagaagtttctgaaaccaagaagcaggacagcaaggaggccaacgccaacggttccagcccagagcctgtgaaagctgtggaggctcggtccccagggctgcagaaggaggctgtgcagaaagaggagcccatcccacaggagcctcagtggagtctcccaagcaaggagttgccagcgtccctggtgaatggcctgcagcctctcccagcacaccaggagaatggcttctccaccaacggaccctctggggacaagagtctgagccgaacaccagagacactcctgccctttgcagaggcagaagccttcctcaagaaagctgtggtgcagtccccgcaggtcacagaagtcctttaagagggtttgccttggatccgggcacagttgtgagggctcctctgcatcacctaccaggatgtctggaggagaaaaagacagaacaaagatggaagtggcctgggcccctgggggtgggtcctctctgttgtttttaatctgcaccttatagactgatgtctctttggccggagccagatctgcccctcagtgcattcgtgtgctcgcacgcgcagacatcccttctcccccatacacacatatacactcacagcctctctggcctcttcccttggggaggggccacctgtagtatttgccttgatttggtggggtacagtggatgtgaatactgtaaatagcttgtgctcagactcctctgcgtggagagggtgggtgcaggaggcagaccctccccccaaagccccctggggagatcttcctctctctatttaactgtaactgagggggatcccaggtctggggatgggggacaccttgggccacaggatactggttgcttcaggggtacccatgccccctgccctcgcctggaatcagtgttactgcatctgattaaatgtctccagaaataaagaataattctgccaa

SEQ ID NO: 6016 - protein, 803 aa, Homo sapiens
MESGPRAELGAGAPPAVVARTPPEPRPSPEGDPSPPPPPMSALVPDTPPDTPPAMKNATSSKQLPLEPESPSGQVGPRPAPPQEESPSSEAKSRGPTPPAMGPRDARPPRRSSQPSPTAVPASDSPPTKQEVKKAGERHKLAKERREERAKYLAAKKAVWLEKEEKAKALREKQLQERRRRLEEQRLKAEQRRAALEERQRQKLEKNKERYEAAIQRSVKKTWAEIRQQRWSWAGALHHSSPGHKTNRSLQLSAWESSIVDRLMTPTLSFLARSRSAVTLPRNGRDQGRGCDPGRGPTWGRAGASLARGPQPDRTHPSAAVPVCPRSASASPLTPCSVTRSVHRCAPAGERGERRKPNAGGSPAPVRRRPEASPVQKKEKKDKERENEKEKSALARERSLKKRQSLPASPRARLSASTASELSPKSKARPSSPSTSWHRPASPCPSPGPGHTLPPKPPSPRGTTASPKGRVRRKEEAKESPSAAGPEDKSQSKRRASNEKESAAPASPAPSPAPSPTPAPPQKEQPPAETPTDAAVLTSPPAPAPPVTPSKPMAGTTDREEATRLLAEKRRQAREQREREEQERRLQAERDKRMREEQLAREAEARAEREAEARRREEQEAREKAQAEQEEQERLQKQKEEAEARSREEAERQRLEREKHFQQQEQERQERRKRLEEIMKRTRKSEVSETKKQDSKEANANGSSPEPVKAVEARSPGLQKEAVQKEEPIPQEPQWSLPSKELPASLVNGLQPLPAHQENGFSTNGPSGDKSLSRTPETLLPFAEAEAFLKKAVVQSPQVTEVL

SEQ ID NO: 6017 - DNA, 1417 bp, Homo sapiens
cgaggccgggactgggccggcgccgggcggggaacgggttcgcgaccgcagccgagagaccccgggcgaccggcacctccgagactcgcgggccacctgcctcgaccttccccggagcgcccccgcctccgagtcgctacttgccgggccgggccgggccgggcgtgatgcgccgcgggacccctgtcctggccactggccgccgccgccgccgccgctgagaccccgagacccccagtgacgccgcagccatggagagcggcccgcgtgcggagctgggggcgggcgcacccccagctgtggtcgccaggacccccccagagccaagaccttctccagaaggtggtggctgggggtggggacaggcaggcagccttttctgcaaccacagccagctggtctgggccaaccttagccaggtggcattgtccccatgtgtcagactggcctgggtgctgtggggtggaggggtccctcattctggctccaccctagagggcccatgcaatcctgccctctctgtcttcagagccccagtcatggccttggctggtcccagagttgagccaaccaaggtggcatagcccctgcattcccaccatgccctggtgctcatatgtgaaggagccatggtgggagttatttataagtttctcttgcatttgtttggctgctttgttgcctagcaaccaaatcagctgctgtaccaaccccacctgactgaggcttaaaaatagcccagcagctgaggggacagagcagggtggcctagggcaggcaggcaccctagcagcctctccctggcacaggactgctaaaagctgggtcagaggagcacaaggaccctcactgtcctgaatccatgggacagcctcggctgggtcagccctctgacagcaggaggggcaagaccttacactgggacatggcagagggcaattgggttttcttccaatcctggatggctccttcctatatgcgccgttcagggccccttcacctggggagcgttgtaggcggggaccctcatccgatgcaggatgttgccctgggaagtgtctggttgcctgggtctgtagtggaagtccagatcatagggaggacaagtgtggccccggtgtgattgtggggagaggactcccgggtgagaagccttggccttggcatggggatggtgcctggtctgctcccttgcctcttcctgcctcctacggcccccacggtgaccggcttcgcctggccttctacccccagatcgcagcctgcagctgagcgcatgggagagcagcatcgtggatcgtctgatgacgcccactctctccttccttgctcggagtcgcagcgcggtcacactgccccgcaacggccgggaccagggtaggggctgcgaccctgggagaggccccacgtggggccg

SEQ ID NO: 6018 - protein, 110 aa, Homo sapiens
MESGPRAELGAGAPPAVVARTPPEPRPSPEGGGWGWGQAGSLFCNHSQLVWANLSQVALSPCVRLAWVLWGGGVPHSGSTLEGPCNPALSVFRAPVMALAGPRVEPTKVA

SEQ ID NO: 6019 - DNA, 1841 bp, Homo sapiens
atgtatgatgatgccactgcactccagcctgggggtcagccagattctgtcttaaaaacaacaacaacaacaacaacaaaacctgctgaatgaatggacctgtcagccccaaatccaaggccaggccatcctctccctccacatcctggcacaggcctgcctccccctgccccagcccagggccaggccacactctgcctccaaagccaccgtccccccgaggcaccactgcatcccccaaggggcgggttcggaggaaggaggaggcaaaggagagccccagcgccgcagggcccgaggacaagagccagagcaagcgcagggccagtaacgagaaggagtcagcagccccagcctcaccggcaccttcgccggcgccctcgcccaccccagccccgccccagaaggagcagccccccgcggagacccctacagacgctgctgtcttgacctcacccccagcccctgctcccccggtgacccctagcaaaccaatggccggcaccacagaccgagaagaagccactcggctcttggctgagaagcggcgccaggcccgggagcagcgggagcgcgaggagcaggagcggaggctgcaggcagaaagggacaagcgaatgcgagaggagcagctggcacgggaggccgaggcccgggcggagcgggaggcggaggcccggaggcgggaggagcaggaggcacgagagaaggcgcaggccgagcaggaggagcaggagcggctgcagaagcagaaagaggaggccgaagctcggtcgcgggaagaggcggagcggcagcgtctggagcgggaaaagcacttccagcagcaggagcaagagcggcaagagcgcagaaagcgtctggaggagatcatgaagaggactcggaagtcagaagtttctgaaaccaagaagcaggacagcaaggaggccaacgccaacggttccagcccagagcctgtgaaagctgtggaggctcggtccccagggctgcagaaggaggctgtgcagaaagaggagcccatcccacaggagcctcagtggagtctcccaagcaaggagttgccagcgtccctggtgaatggcctgcagcctctcccagcacaccaggagaatggcttctccaccaacggaccctctggggacaagagtctgagccgaacaccagagacactcctgccctttgcagaggcagaagccttcctcaagaaagctgtggtgcagtccccgcaggtcacagaagtcctttaagagggtttgccttggatccgggcacagttgtgagggctcctctgcatcacctaccaggatgtctggaggagaaaaagacagaacaaagatggaagtggcctgggcccctgggggtgggtcctctctgttgtttttaatctgcaccttatagactgatgtctctttggccggagccagatctgcccctcagtgcattcgtgtgctcgcacgcgcagacatcccttctcccccatacacacatatacactcacagcctctctggcctcttcccttggggaggggccacctgtagtatttgccttgatttggtggggtacagtggatgtgaatactgtaaatagcttgtgctcagactcctctgcgtggagagggtgggtgcaggaggcagaccctccccccaaagccccctggggagatcttcctctctctatttaactgtaactgagggggatcccaggtctggggatgggggacaccttgggccacaggatactggttgcttcaggggtacccatgccccctgccctcgcctggaatcagtgttactgcatctgattaaatgtctccagaaataaagaataattctgccaa

SEQ ID NO: 6020 - protein, 386 aa, Homo sapiens
MNGPVSPKSKARPSSPSTSWHRPASPCPSPGPGHTLPPKPPSPRGTTASPKGRVRRKEEAKESPSAAGPEDKSQSKRRASNEKESAAPASPAPSPAPSPTPAPPQKEQPPAETPTDAAVLTSPPAPAPPVTPSKPMAGTTDREEATRLLAEKRRQAREQREREEQERRLQAERDKRMREEQLAREAEARAEREAEARRREEQEAREKAQAEQEEQERLQKQKEEAEARSREEAERQRLEREKHFQQQEQERQERRKRLEEIMKRTRKSEVSETKKQDSKEANANGSSPEPVKAVEARSPGLQKEAVQKEEPIPQEPQWSLPSKELPASLVNGLQPLPAHQENGFSTNGPSGDKSLSRTPETLLPFAEAEAFLKKAVVQSPQVTEVL

SEQ ID NO: 6021 - DNA, 4433 bp, Homo sapiens
ggagacgctgggcgcgctgtggggcgggggcgaggttcgggctggttgttccgttgcgagctgcagctgcgatctctgtggtaggcccagaagtgtatgctgacttgtaaagtgaagaagccagtggtgctgcgggtgttcttttggggtagtgtctgggatccagtacgagttgaatcattgttcaaataaggtgtaattgaaaagtgatcctctcttcagagatgtcaaaaacaaacaaatccaagtctggatctcgctcttctcgctcaagatctgcatcaagatctcgttctcgttcattttcgaagtctcggtcccgaagccgatctctctctcgttcaaggaagcgcaggctgagttctaggtctcgttccagatcatattctccagctcataacagagaaagaaaccacccaagagtatatcagaatcgggatttccgaggtcacaacagaggctatagaaggccctattatttccgtgggcgtaacagaggcttttatccatggggccaatataaccgaggaggctatggaaactaccgctcaaattggcagaattaccggcaagcatacagtcctcgtcgaggccgttcaagatcccggtccccaaagagaaggtccccttcaccaaggtccaggagccattctagaaactctgataagtcgtcttctgaccggtcaaggcgctcctcatcctcccgttcttcctccaaccatagccgagttgaatcttctaagcgcaagtctgcaaaggagaaaaagtcctcttctaaggatagccggccatctcaggctgccggggataaccagggagatgaggccaaggagcagacattctctggaggcacctctcaagatacaaaagcatctgagagctcgaagccatggccagatgccacctacggcactggttctgcatcacgggcctcagcagtttctgagctgagtcctcgggagcgaagcccagctctcaaaagccccctccagtctgtggtggtgaggcggcggtcaccccgtcctagccccgtgccaaaacctagtcctccactttccagcacatcccagatgggctcaactctgccgagtggtgccgggtatcagtctgggacacaccaaggtcagttcgaccatggttctgggtccctgagtccatccaaaaagagccctgtgggtaagagtccaccatccactggctccacatatggctcatctcagaaggaggagagtgctgcttcaggaggagcagcctatacaaagaggtatctagaagagcagaagacagagaatggaaaagataaggaacagaaacaaacaaataccgataaagaaaaaataaaagagaaagggagcttctctgacacaggcttgggtgatggaaaaatgaaatctgattcttttgctcccaaaactgattctgagaagccttttcggggcagtcagtctcccaaaaggtataagctccgagatgactttgagaagaagatggctgacttccacaaggaggagatggatgatcaagataaggacaaagctaagggaagaaaggaatctgagtttgatgatgaacccaaatttatgtctaaagtcataggtgcaaacaaaaaccaggaggaggagaagtcaggcaaatgggagggcctggtatatgcacctccagggaaggaaaagcagagaaaaacagaggagctggaggaggagtctttcccagagagatccaaaaaggaagatcggggcaagagaagcgaaggtgggcacaggggctttgtgcctgagaagaatttccgagtgactgcttataaagcagtccaggagaaaagctcatcacctcccccaagaaagacctctgagagccgagacaagctgggagcgaaaggagattttcccacaggaaagtcttccttttccattactcgagaggcacaggtcaatgtccggatggactcttttgatgaggacctcgcacgacccagtggcttattggctcaggaacgcaagctttgccgagatctagtccatagcaacaaaaaggaacaggagtttcgttccattttccagcacatacaatcagctcagtctcagcgtagcccctcagaactgtttgcccaacatatagtgaccattgttcaccatgttaaagagcatcactttgggtcctcaggaatgacattacatgaacgctttactaaatacctaaagagaggaactgagcaggaggcagccaaaaacaagaaaagcccagagatacacaggagaatagacatttcccccagtacattcagaaaacatggtttggctcatgatgaaatgaaaagtccccgggaacctggctacaaggctgagggaaaatacaaagatgatcctgttgatctccgccttgatattgaacgtcgtaaaaaacataaggagagagatcttaaacgaggtaaatcgagagaatcagtggattcccgagactccagtcactcaagggaaaggtcagctgaaaaaacagagaaaactcataaaggatcaaagaaacagaagaagcatcggagagcaagagacaggtccagatcctcctcctcttcctcccagtcatctcactcctacaaagcagaagagtacactgaagagacagaggaaagagaggagagcaccacgggctttgacaaatcaagactggggaccaaagactttgtgggtccaagtgaaagaggaggtggcagagctcgaggaacctttcagtttcgagccagaggaagaggctggggcagaggcaactactctgggaacaataacaacaacagcaacaacgattttcaaaaaagaaaccgggaagaggagtgggacccagagtacacacccaaaagcaagaagtattacttgcatgatgaccgtgaaggcgaaggcagtgacaagtgggtgagccggggccggggccgaggagcctttcctcggggtcggggccggttcatgttccggaaatcaagtaccagccccaagtgggcccatgacaagttcagtggggaggaaggggagattgaagacgacgagagtgggacagagaaccgagaagagaaggacaatatacagcccacaaccgagtaggggccacccttgacgggattcctgcccaggggagagaggcgctgggaagatggctggtgaggagcttaacagaggaacctcaagaagattctgaaaatcctacccccaccccccaccagccgcacagattgtactaccgcgagaggcatccctggcgctgtctcccactggacagaggaggctggccatggggcccaggggtcaggcccagcttttgagcagaatacaacgcattgggctttagctgtttttctcatttgttggtgtgtggggtgggggcaggggtagggcgggagagcgatgcttggatttttgtttcctattagaaaccaacagttttgttctaatttcatttcatttggagctaagatgactaatttgatgattttcgatctcttttcccctgtcctgattttaaaagccccctcctttttttttttttttttctttttttaggcatatgtagtaatattagaaacatttaatttgggaaactttgattcttgaaagagaaaacaaaagcatgtgaataaactttgaagtgttcacctcagtttgggaccaaactgcttggatctttgtaaaaaccggttttgtatgtcaaggaggagtttaaggcctttccgaccaccttgtgttccccttttctgcgcagccatgtatcacgtggagttgctccttaccacacctcacgtgcccctgagccctatttcctgatttcttctgggctggacttccccgttctccaccagcagctccagtatcccaaactttctagtcctgctgatcctcccagcaacggggtggaaactggagggcagtgtctggtctgttttctaagaaacttatgaattctattatctttacaaatatgagaaaattttttcaatattttttattaatctttttataaaatgaaaagaaactcctatgatcgattaaggaaggtggttatggctgggtggttcaggggtttttttgggtttctttttttttttctttgtctttttaaccttaagctgtttaagttgaagcattctcagatgtttggggggaaacatcctcttaaaatgggtccttgtgcttgccttctggggaggcggtcctgagcaggtgaatcataaggcatttatgcatatgttatatgcggactgcacccacctctcccccccagcctttgcctcttgcgttgttgtgctgctttccccttactttgctacatttctatagttaagttggttttacttgaatgattcatgtttagggggaaaatgaaaatctcccttaaaatttgtttcaactcctcctgcaaataaaataaatgaagtggcagatgtaaac

SEQ ID NO: 6022 - protein, 955 aa, Homo sapiens
MSKTNKSKSGSRSSRSRSASRSRSRSFSKSRSRSRSLSRSRKRRLSSRSRSRSYSPAHNRERNHPRVYQNRDFRGHNRGYRRPYYFRGRNRGFYPWGQYNRGGYGNYRSNWQNYRQAYSPRRGRSRSRSPKRRSPSPRSRSHSRNSDKSSSDRSRRSSSSRSSSNHSRVESSKRKSAKEKKSSSKDSRPSQAAGDNQGDEAKEQTFSGGTSQDTKASESSKPWPDATYGTGSASRASAVSELSPRERSPALKSPLQSVVVRRRSPRPSPVPKPSPPLSSTSQMGSTLPSGAGYQSGTHQGQFDHGSGSLSPSKKSPVGKSPPSTGSTYGSSQKEESAASGGAAYTKRYLEEQKTENGKDKEQKQTNTDKEKIKEKGSFSDTGLGDGKMKSDSFAPKTDSEKPFRGSQSPKRYKLRDDFEKKMADFHKEEMDDQDKDKAKGRKESEFDDEPKFMSKVIGANKNQEEEKSGKWEGLVYAPPGKEKQRKTEELEEESFPERSKKEDRGKRSEGGHRGFVPEKNFRVTAYKAVQEKSSSPPPRKTSESRDKLGAKGDFPTGKSSFSITREAQVNVRMDSFDEDLARPSGLLAQERKLCRDLVHSNKKEQEFRSIFQHIQSAQSQRSPSELFAQHIVTIVHHVKEHHFGSSGMTLHERFTKYLKRGTEQEAAKNKKSPEIHRRIDISPSTFRKHGLAHDEMKSPREPGYKAEGKYKDDPVDLRLDIERRKKHKERDLKRGKSRESVDSRDSSHSRERSAEKTEKTHKGSKKQKKHRRARDRSRSSSSSSQSSHSYKAEEYTEETEEREESTTGFDKSRLGTKDFVGPSERGGGRARGTFQFRARGRGWGRGNYSGNNNNNSNNDFQKRNREEEWDPEYTPKSKKYYLHDDREGEGSDKWVSRGRGRGAFPRGRGRFMFRKSSTSPKWAHDKFSGEEGEIEDDESGTENREEKDNIQPTTE

SEQ ID NO: 6023 - DNA, 263 bp, Homo sapiens
tgcgagctgcagctgcgatctctgtggtaggcccagaagtgtatgctgacttgtaaagtgaagaagccagtggtgctgcgggtgttcttttggggtagtgtctgggatccagtacgagttgaatcattgttcaaataaggtaaaagcatggtggtaaaagaaactaataacttcactaatttgtaaaaccaatcttacgttaagaattgattatttcgagaccagcctatgcaacatggtgagatcctgtctctacaaaaaat

SEQ ID NO: 6024 - protein, 31 aa, Homo sapiens
MLTCKVKKPVVLRVFFWGSVWDPVRVESLFK

SEQ ID NO: 6025 - DNA, 429 bp, Homo sapiens
atggcgactacgccagagtcttcactggaggacccagtgcggagctttgtgcaagttttggagaagtgggatggtacggtgctaccactacagcagtatggctctggcggcatgggttgcatcgtttgggacgctgcatatgtcctttctaaatacctggaaacgcctgagttttctggcgactgggcccacacgctgagccggcggttggtgctggagctgggttcgggcaccggggccgtggggtgcatggccgctaccctcagggctaatgttgtagtcactgatcttgaggaattgcaagacttacatgagcaagcaccttgtcactggttctgttcaagccaaggtactgaaatggggggaagaaatagaagactttcctcctccactcgtctacatactgatggccgactgcatatactatga

SEQ ID NO: 6026 - protein, 142 aa, Homo sapiens [sequence omitted]

SEQ ID NO: 6027 - DNA, 1955 bp, Homo sapiens
cgcgagggccactacattcactgggaccacgtcatggtgccgcactgggaccccaagatctcggccagctacccccgcggccgccacagccccccagacgacttgggctccagcttctacccggagctggggccctacagctcccgggaccccgaagtgctgcgggagcatatgacccagctcaaggaagccgccatcggcgtcctggtcctgtcctggtacccacctggcatggctgatgataacggggagccctcagatgacctggtgcccgccattctggacaccgcccatcagtacagcatccaggtggccttccacatccaaccctacaagggccgggatgacatcactgtacatgacaacatcaagtacatcattgacacgtatggctcccatggtgcattttaccgctataagaacagcatgggcaagagcctcccactcttttatatctacgactcatacctgacgtcccctgaggcctgggcccacctcctgacaccaaacgggccccattcgatccgcaacacgccctacgatggggtcttcatagcgctgctggtggaggagggccacacccacgatatcctggccgccggatttgacggcatgtacacctactttgcctccaatggtttctcctttggttcttcccatcagaactggaaagctgtgaagaacttttgtgatgccaacaacctcatgttcatccccagtgtggggcctggctacatagacaccagcattcggccctggaacaaccacaatacgcgcaacagggtcaatggcaagtactatgagacggccctgcaggcggccctgacagtgaggcccgagatcgtttccattacctccttcaatgagtggcacgagggcacccagattgagaaggccattcccaagaagacacccacccgcctgtatttggactacctgcctcaccagcccagcctgtacctggagctgacacgccgctgggcggagcacttcatcaaagagaaggagcagtggctcatgtgaggggcctgtaaatgggcgtgaggtgctgatgtccttgccttgctggaagatgtcaccatgtggggttcagctgaggttgtagccactcactcgttcccaggtcagaggtcagcagatgggtgtttctgggtgggccgtcaggcatgggcctgtgcaacacagagcccgttcctcaggcgagtggtgctgaggtgctctgtggtgatgggaacggcagaggctggcaggtgactgaacttagcccagggcagctccacatcctgggaacactttcatgtaaccccttctagttttgaactctgcagcaggctggtgctgtgtagtggccacccagtcaccacccttggaagggtgtcagggtctgggctcgcatgcaccctgctcccttctgccagcctgcatcctctcctcaggcctccttcccacatcatctgtcttctctaagttagggaaccatatttgagactttcaaaaagggaacttctaggtttaagctcctcccagtagattcctgaacccaattatcaggaaatcatcctgagcactcacaggttcatttaacactcactcatcaagcaccttcctatgtgctaggtgctggggaaaacttgaccaaggaagagttcctgtcctgaagcttccaggacccagctttccttttctggtgtggccttgtagctagtgcctgggcacaggtgtttttctttttgcagttttacctagtgctgggagttcagttctttttcctctagaaaaatacctctgtgctccagagcctaatttttcccagatgcatatttagctctagggagaggactaggaggaaatccccctccctttagctgcctgaactgactgaggcccactcactagagccatgttcagtgctactgtgattagtagtaattaaatatgaactggtattctcaagt

SEQ ID NO: 6028 - protein, 329 aa, Homo sapiens
MVPHWDPKISASYPRGRHSPPDDLGSSFYPELGPYSSRDPEVLREHMTQLKEAAIGVLVLSWYPPGMADDNGEPSDDLVPAILDTAHQYSIQVAFHIQPYKGRDDITVHDNIKYIIDTYGSHGAFYRYKNSMGKSLPLFYIYDSYLTSPEAWAHLLTPNGPHSIRNTPYDGVFIALLVEEGHTHDILAAGFDGMYTYFASNGFSFGSSHQNWKAVKNFCDANNLMFIPSVGPGYIDTSIRPWNNHNTRNRVNGKYYETALQAALTVRPEIVSITSFNEWHEGTQIEKAIPKKTPTRLYLDYLPHQPSLYLELTRRWAEHFIKEKEQWLM

SEQ ID NO: 6029 - DNA, 3235 bp, Homo sapiens
cgcgagggccactacattcactgggaccacgtcatggtgccgcactgggaccccaagatctcggccagctacccccgcggccgccacagccccccagacgacttgggctccagcttctacccggagctggggccctacagctcccgggaccccgaagtgctgcgggagcatatgacccagctcaaggaagccgccatcggcgtcctggtcctgtcctggtacccacctggcatggctgatgataacggggagccctcagatgacctggtgcccgccattctggacaccgcccatcagtacagcatccaggtggccttccacatccaaccctacaagggccgggatgacatcactgtacatgacaacatcaagtacatcattgacacgtatggctcccatggtgcattttaccgctataagaacagcatgggcaagagcctcccactcttttatatctacgactcatacctgacgtcccctgaggcctgggcccacctcctgacaccaaacgggccccattcgatccgcaacacgccctacgatggggtcttcatagcgctgctggtggaggagggccacacccacgatatcctggccgccggatttgacggcatgtacacctactttgcctccaatggtttctcctttggttcttcccatcagaactggaaagctgtgaagaacttttgtgatgccaacaacctcatgttcatccccagtgtggggcctggctacatagacaccagcattcggccctggaacaaccacaatacgcgcaacagggtcaatggcaagtactatgagacggccctgcaggcggccctgacagtgaggcccgagatcgtttccattacctccttcaatgagtggcacgagggcacccagattgagaaggccattcccaagaagacacccacccgcctgtatttggactacctgcctcaccagcccagcctgtacctggagctgacacgccgctgggcggagcacttcatcaaagagaaggagcagtggctcatgtgaggggcctgtaaatgggcgtgaggtgctgatgtccttgccttgctggaagatgtcaccatgtggggttcagctgaggttgtagccactcactcgttcccaggtcagaggtcagcagatgggtgtttctgggtgggccgtcaggcatgggcctgtgcaacacagagcccgttcctcaggcgagtggtgctgaggtgctctgtggtgatgggaacggcagaggctggcaggtgactgaacttagcccagggcagctccacatcctgggaacactttcatgtaaccccttctagttttgaactctgcagcaggctggtgctgtgtagtggccacccagtcaccacccttggaagggtgtcagggtctgggctcgcatgcaccctgctcccttctgccagcctgcatcctctcctcaggcctccttcccacatcatctgtcttctctaagttagggaaccatatttgagactttcaaaaagggaacttctaggtttaagctcctcccagtagattcctgaacccaattatcaggaaatcatcctgagcactcacaggttcatttaacactcactcatcaagcaccttcctatgtgctaggtgctggggaaaacttgaccaaggaagagttcctgtcctgaagcttccaggacccagctttccttttctggtgtggccttgtagctagtgcctgggcacaggtgtttttctttttgcagttttacctagtgctgggagttcagttctttttcctctagaaaaatacctctgtgctccagagcctaatttttcccagatgcatatttagctctagggagaggactaggaggaaatccccctccctttagctgcctgaactgactgaggcccactcactagagccatgttcagtgctactgtgattagtagtaattaaatatgaactggtattctcaagtaagcattccttttgctctctttaagacctcacagattctgaccttagattctgtgacaaactgatacaggagctgggctggctatggctttaccacaacaagtaggtttgcttaagaaattactaaacaatggctgggcgtggtggctcactcctgtaatcccagcactttgggaggccgagatgggcggatcacgaggtcaggagatcgagaccatcctggctaacagggtgaaaccacgtctctactaaaaatacaaaaaaattagccaggcgtagtggtgggcgcctgtagtcccagctacttgggaggctgaggcaggagaatggcgtgaacccgggaggcggagcttgcagtgagccgagatcacgccactgcactccagcctgggcgacagagcgagactccgtctcaaaaaaaaaaaagttactaaacaaggctgggcgtggtggctcacacctgtaatcccagcactttgggaggccaaggaaggtggatcacctgaggtcaggagttcgagaccagcctggccaacatggtgaaaccccatccctactaaaaatacaaaaattagctgggcgtgggtgcctgtaatcccagctacttctgaggctgaggcaggagaaccgcttgaacctgggaggcggaggttgcagtgagccaatgtggcaccactggactccagcctgggcaagagcaagactgtctcaaaacaaaaacaacaaacaaacaaacaaaaagaaaacacaaaaaacattactaaacaagatttctagagggaattaacaaaccagtgcttatttaccaataaactaatacgctaattgcaggaaccctgattaaagcaggcccctgttaacacaagattcttaggatatacttggaaacaggtgcattggaaaccactgtactgagaagtttatgggctcaagactgaattggaagctaggcgtggtcgctcatgcctgtaatcccagcactctgggaggctgaggtggaaggatgagttcaggagttcgagaccagcctgggcaacacagagagacgtgtctttaaaaaagtaaaaaatgggctgagtgccttggctcatgcctgtaatcccagcactttgggaagccaaggcgggtggatcacttcaggccaggagttcaagaacagcctgaccaacatggcaaaactccatctctactaaaaataccaaaaaaattagcagggtgtggtggtgcacacctgtagtcccagctactcaggaggctgatgtgtgagaatcacttgaacct

SEQ ID NO: 6030 - protein, 329 aa, Homo sapiens; identical to SEQ ID NO: 6028

SEQ ID NO: 6031 - DNA, 3208 bp, Homo sapiens
agtctaaagcctggctcccttccggcctggcgcgctacggttcccgcaggcgctccgcttcagcaccgcgggcgtggacagctccggggcgcgaggctctgggactcatctgcaggaagtgaacctggcaggaggcttgcttcaggtttttaggaaccatttttgcaattggagatgtttgtgaggaaaaaaatctctgttgaggggggtactgtgtgtctctgaagtggcctctgtgttgcgtctcaggcgtcctggtcctgtcctggtacccacctggcatggctgatgataacggggagccctcagatgacctggtgcccgccattctggacaccgcccatcagtacagcatccaggtatggctcccatggtgcattttaccgctataagaacagcatgggcaagagcctcccactcttttatatctacgactcatacctgacgtcccctgaggcctgggcccacctcctgacaccaaacgggccccattcgatccgcaacacgccctacgatggggtcttcatagcgctgctggtggaggagggccacacccacgatatcctggccgccggatttgacggcatgtacacctactttgcctccaatggtttctcctttggttcttcccatcagaactggaaagctgtgaagaacttttgtgatgccaacaacctcatgttcatccccagtgtggggcctggctacatagacaccagcattcggccctggaacaaccacaatacgcgcaacagggtcaatggcaagtactatgagacggccctgcaggcggccctgacagtgaggcccgagatcgtttccattacctccttcaatgagtggcacgagggcacccagattgagaaggccattcccaagaagacacccacccgcctgtatttggactacctgcctcaccagcccagcctgtacctggagctgacacgccgctgggcggagcacttcatcaaagagaaggagcagtggctcatgtgaggggcctgtaaatgggcgtgaggtgctgatgtccttgccttgctggaagatgtcaccatgtggggttcagctgaggttgtagccactcactcgttcccaggtcagaggtcagcagatgggtgtttctgggtgggccgtcaggcatgggcctgtgcaacacagagcccgttcctcaggcgagtggtgctgaggtgctctgtggtgatgggaacggcagaggctggcaggtgactgaacttagcccagggcagctccacatcctgggaacactttcatgtaaccccttctagttttgaactctgcagcaggctggtgctgtgtagtggccacccagtcaccacccttggaagggtgtcagggtctgggctcgcatgcaccctgctcccttctgccagcctgcatcctctcctcaggcctccttcccacatcatctgtcttctctaagttagggaaccatatttgagactttcaaaaagggaacttctaggtttaagctcctcccagtagattcctgaacccaattatcaggaaatcatcctgagcactcacaggttcatttaacactcactcatcaagcaccttcctatgtgctaggtgctggggaaaacttgaccaaggaagagttcctgtcctgaagcttccaggacccagctttccttttctggtgtggccttgtagctagtgcctgggcacaggtgtttttctttttgcagttttacctagtgctgggagttcagttctttttcctctagaaaaatacctctgtgctccagagcctaatttttcccagatgcatatttagctctagggagaggactaggaggaaatccccctccctttagctgcctgaactgactgaggcccactcactagagccatgttcagtgctactgtgattagtagtaattaaatatgaactggtattctcaagtaagcattccttttgctctctttaagacctcacagattctgaccttagattctgtgacaaactgatacaggagctgggctggctatggctttaccacaacaagtaggtttgcttaagaaattactaaacaatggctgggcgtggtggctcactcctgtaatcccagcactttgggaggccgagatgggcggatcacgaggtcaggagatcgagaccatcctggctaacagggtgaaaccacgtctctactaaaaatacaaaaaaattagccaggcgtagtggtgggcgcctgtagtcccagctacttgggaggctgaggcaggagaatggcgtgaacccgggaggcggagcttgcagtgagccgagatcacgccactgcactccagcctgggcgacagagcgagactccgtctcaaaaaaaaaaaagttactaaacaaggctgggcgtggtggctcacacctgtaatcccagcactttgggaggccaaggaaggtggatcacctgaggtcaggagttcgagaccagcctggccaacatggtgaaaccccatccctactaaaaatacaaaaattagctgggcgtgggtgcctgtaatcccagctacttctgaggctgaggcaggagaaccgcttgaacctgggaggcggaggttgcagtgagccaatgtggcaccactggactccagcctgggcaagagcaagactgtctcaaaacaaaaacaacaaacaaacaaacaaaaagaaaacacaaaaaacattactaaacaagatttctagagggaattaacaaaccagtgcttatttaccaataaactaatacgctaattgcaggaaccctgattaaagcaggcccctgttaacacaagattcttaggatatacttggaaacaggtgcattggaaaccactgtactgagaagtttatgggctcaagactgaattggaagctaggcgtggtcgctcatgcctgtaatcccagcactctgggaggctgaggtggaaggatgagttcaggagttcgagaccagcctgggcaacacagagagacgtgtctttaaaaaagtaaaaaatgggctgagtgccttggctcatgcctgtaatcccagcactttgggaagccaaggcgggtggatcacttcaggccaggagttcaagaacagcctgaccaacatggcaaaactccatctctactaaaaataccaaaaaaattagcagggtgtggtggtgcacacctgtagtcccagctactcaggaggctgatgtgtgagaatcacttgaacct

SEQ ID NO: 6032 - protein, 235 aa, Homo sapiens; identical to SEQ ID NO: 162

SEQ ID NO: 6033 - DNA, 779 bp, Homo sapiens
gtatggctcccatggtgcattttaccgctataagaacagcatgggcaagagcctcccactcttttatatctacgactcatacctgacgtcccctgaggcctgggcccacctcctgacaccaaacgggccccattcgatccgcaacacgccctacgatggggtcttcatagcgctgctggtggaggagggccacacccacgatatcctggccgccggatttgacggcatgtacacctactttgcctccaatggtttctcctttggttcttcccatcagaactggaaagctgtgaagaacttttgtgatgccaacaacctcatgttcatccccagtgtggggcctggctacatagacaccagcattcggccctggaacaaccacaatacgcgcaacagggtcaatggcaagtactatgagacggccctgcaggcggccctgacagtgaggcccgagatcgtttccattacctccttcaatgagtggcacgagggcacccagattgagaaggccattcccaagaagacacccacccgcctgtatttggactacctgcctcaccagcccagcctgtacctggagctgacacgccgctgggcggagcacttcatcaaagagaaggagcagtggctcatgtgaggggcctgtaaatgggcgtgaggtgctgatgtccttgccttgctggaagatgtcaccatgtggggttcagctgaggttgtagccatcactagagccatgttcagtgctactgtgattagtagtaattaaatatgaactggta

SEQ ID NO: 6034 - protein, 198 aa, Homo sapiens
MGKSLPLFYIYDSYLTSPEAWAHLLTPNGPHSIRNTPYDGVFIALLVEEGHTHDILAAGFDGMYTYFASNGFSFGSSHQNWKAVKNFCDANNLMFIPSVGPGYIDTSIRPWNNHNTRNRVNGKYYETALQAALTVRPEIVSITSFNEWHEGTQIEKAIPKKTPTRLYLDYLPHQPSLYLELTRRWAEHFIKEKEQWLM

SEQ ID NO: 6035 - DNA, 1468 bp, Homo sapiens
gtatggctcccatggtgcattttaccgctataagaacagcatgggcaagagcctcccactcttttatatctacgactcatacctgacgtcccctgaggcctgggcccacctcctgacaccaaacgggccccattcgatccgcaacacgccctacgatggggtcttcatagcgctgctggtggaggagggccacacccacgatatcctggccgccggatttgacggcatgtacacctactttgcctccaatggtttctcctttggttcttcccatcagaactggaaagctgtgaagaacttttgtgatgccaacaacctcatgttcatccccagtgtggggcctggctacatagacaccagcattcggccctggaacaaccacaatacgcgcaacagggtcaatggcaagtactatgagacggccctgcaggcggccctgacagtgaggcccgagatcgtttccattacctccttcaatgagtggcacgagggcacccagattgagaaggccattcccaagaagacacccacccgcctgtatttggactacctgcctcaccagcccagcctgtacctggagctgacacgccgctgggcggagcacttcatcaaagagaaggagcagtggctcatgtgaggggcctgtaaatgggcgtgaggtgctgatgtccttgccttgctggaagatgtcaccatgtggggttcagctgaggttgtagccactcactcgttcccaggtcagaggtcagcagatgggtgtttctgggtgggccgtcaggcatgggcctgtgcaacacagagcccgttcctcaggcgagtggtgctgaggtgctctgtggtgatgggaacggcagaggctggcaggtgactgaacttagcccagggcagctccacatcctgggaacactttcatgtaaccccttctagttttgaactctgcatcctctcctcaggcctccttcccacatcatctgtcttctctaagttagggaaccatatttgagactttcaaaaagggaacttctaggtttaagctcctcccagtagattcctgaacccaattatcaggaaatcatcctgagcactcacaggttcatttaacactcactcatcaagcaccttcctatgtgctaggtgctggggaaaacttgaccaaggaagagttcctgtcctgaagcttccaggacccagctttccttttctggtgtggccttgtagctagtgcctgggcacaggtgtttttctttttgcagttttacctagtgctgggagttcagttctttttcctctagaaaaatacctctgtgctccagagcctaatttttcccagatgcatatttagctctagggagaggactaggaggaaatccccctccctttagctgcctgaactgactgaggcccactcactagagccatgttcagtgctactgtgattagtagtaattaaatatgaactggtattctc

SEQ ID NO: 6036 - protein, 198 aa, Homo sapiens; identical to SEQ ID NO: 6034

SEQ ID NO: 6037 - DNA, 1105 bp, Homo sapiens
gtatggctcccatggtgcattttaccgctataagaacagcatgggcaagagcctcccactcttttatatctacgactcatacctgacgtcccctgaggcctgggcccacctcctgacaccaaacgggccccattcgatccgcaacacgccctacgatggggtcttcatagcgctgctggtggaggagggccacacccacgatatcctggccgccggatttgacggcatgtacacctactttgcctccaatggtttctcctttggttcttcccatcagaactggaaagctgtgaagaacttttgtgatgccaacaacctcatgttcatccccagtgtggggcctggctacatagacaccagcattcggccctggaacaaccacaatacgcgcaacagggtcaatggcaagtactatgagacggccctgcaggcggccctgacagtgaggcccgagatcgtttccattacctccttcaatgagtggcacgagggcacccagattgagaaggccattcccaagaagacacccacccgcctgtatttggactacctgcctcaccagcccagcctgtacctggagctgacacgccgctgggcggagcaatcatctgtcttctctaagttagggaaccatatttgagactttcaaaaagggaacttctaggtttaagctcctcccagtagattcctgaacccaattatcaggaaatcatcctgagcactcacaggttcatttaacactcactcatcaagcaccttcctatgtgctaggtgctggggaaaacttgaccaaggaagagttcctgtcctgaagcttccaggacccagctttccttttctggtgtggccttgtagctagtgcctgggcacaggtgtttttctttttgcagttttacctagtgctgggagttcagttctttttcctctagaaaaatacctctgtgctccagagcctaatttttcccagatgcatatttagctctagggagaggactaggaggaaatccccctccctttagctgcctgaactgactgaggcccactcactagagccatgttcagtgctactgtgattagtagtaattaaatatgaactggtattctc

SEQ ID NO: 6038 - protein, 199 aa, Homo sapiens
MGKSLPLFYIYDSYLTSPEAWAHLLTPNGPHSIRNTPYDGVFIALLVEEGHTHDILAAGFDGMYTYFASNGFSFGSSHQNWKAVKNFCDANNLMFIPSVGPGYIDTSIRPWNNHNTRNRVNGKYYETALQAALTVRPEIVSITSFNEWHEGTQIEKAIPKKTPTRLYLDYLPHQPSLYLELTRRWAEQSSVFSKLGNHI

SEQ ID NO: 6039 - DNA, 2752 bp, Homo sapiens
gtatggctcccatggtgcattttaccgctataagaacagcatgggcaagagcctcccactcttttatatctacgactcatacctgacgtcccctgaggcctgggcccacctcctgacaccaaacgggccccattcgatccgcaacacgccctacgatggggtcttcatagcgctgctggtggaggagggccacacccacgatatcctggccgccggatttgacggcatgtacacctactttgcctccaatggtttctcctttggttcttcccatcagaactggaaagctgtgaagaacttttgtgatgccaacaacctcatgttcatccccagtgtggggcctggctacatagacaccagcattcggccctggaacaaccacaatacgcgcaacagggtcaatggcaagtactatgagacggccctgcaggcggccctgacagtgaggcccgagatcgtttccattacctccttcaatgagtggcacgagggcacccagattgagaaggccattcccaagaagacacccacccgcctgtatttggactacctgcctcaccagcccagcctgtacctggagctgacacgccgctgggcggagcacttcatcaaagagaaggagcagtggctcatgtgaggggcctgtaaatgggcgtgaggtgctgatgtccttgccttgctggaagatgtcaccatgtggggttcagctgaggttgtagccactcactcgttcccaggtcagaggtcagcagatgggtgtttctgggtgggccgtcaggcatgggcctgtgcaacacagagcccgttcctcaggcgagtggtgctgaggtgctctgtggtgatgggaacggcagaggctggcaggtgactgaacttagcccagggcagctccacatcctgggaacactttcatgtaaccccttctagttttgaactctgcatcctctcctcaggcctccttcccacatcatctgtcttctctaagttagggaaccatatttgagactttcaaaaagggaacttctaggtttaagctcctcccagtagattcctgaacccaattatcaggaaatcatcctgagcactcacaggttcatttaacactcactcatcaagcaccttcctatgtgctaggtgctggggaaaacttgaccaaggaagagttcctgtcctgaagcttccaggacccagctttccttttctggtgtggccttgtagctagtgcctgggcacaggtgtttttctttttgcagttttacctagtgctgggagttcagttctttttcctctagaaaaatacctctgtgctccagagcctaatttttcccagatgcatatttagctctagggagaggactaggaggaaatccccctccctttagctgcctgaactgactgaggcccactcactagagccatgttcagtgctactgtgattagtagtaattaaatatgaactggtattctcaagtaagcattccttttgctctctttaagacctcacagattctgaccttagattctgtgacaaactgatacaggagctgggctggctatggctttaccacaacaagtaggtttgcttaagaaattactaaacaatggctgggcgtggtggctcactcctgtaatcccagcactttgggaggccgagatgggcggatcacgaggtcaggagatcgagaccatcctggctaacagggtgaaaccacgtctctactaaaaatacaaaaaaattagccaggcgtagtggtgggcgcctgtagtcccagctacttgggaggctgaggcaggagaatggcgtgaacccgggaggcggagcttgcagtgagccgagatcacgccactgcactccagcctgggcgacagagcgagactccgtctcaaaaaaaaaaaagttactaaacaaggctgggcgtggtggctcacacctgtaatcccagcactttgggaggccaaggaaggtggatcacctgaggtcaggagttcgagaccagcctggccaacatggtgaaaccccatccctactaaaaatacaaaaattagctgggcgtgggtgcctgtaatcccagctacttctgaggctgaggcaggagaaccgcttgaacctgggaggcggaggttgcagtgagccaatgtggcaccactggactccagcctgggcaagagcaagactgtctcaaaacaaaaacaacaaacaaacaaacaaaaagaaaacacaaaaaacattactaaacaagatttctagagggaattaacaaaccagtgcttatttaccaataaactaatacgctaattgcaggaaccctgattaaagcaggcccctgttaacacaagattcttaggatatacttggaaacaggtgcattggaaaccactgtactgagaagtttatgggctcaagactgaattggaagctaggcgtggtcgctcatgcctgtaatcccagcactctgggaggctgaggtggaaggatgagttcaggagttcgagaccagcctgggcaacacagagagacgtgtctttaaaaaagtaaaaaatgggctgagtgccttggctcatgcctgtaatcccagcactttgggaagccaaggcgggtggatcacttcaggccaggagttcaagaacagcctgaccaacatggcaaaactccatctctactaaaaataccaaaaaaattagcagggtgtggtggtgcacacctgtagtcccagctactcaggaggctgatgtgtgagaatcacttgaacct

SEQ ID NO: 6040 - protein, 198 aa, Homo sapiens; identical to SEQ ID NO: 6034

SEQ ID NO: 6041 - DNA, 2389 bp, Homo sapiens
gtatggctcccatggtgcattttaccgctataagaacagcatgggcaagagcctcccactcttttatatctacgactcatacctgacgtcccctgaggcctgggcccacctcctgacaccaaacgggccccattcgatccgcaacacgccctacgatggggtcttcatagcgctgctggtggaggagggccacacccacgatatcctggccgccggatttgacggcatgtacacctactttgcctccaatggtttctcctttggttcttcccatcagaactggaaagctgtgaagaacttttgtgatgccaacaacctcatgttcatccccagtgtggggcctggctacatagacaccagcattcggccctggaacaaccacaatacgcgcaacagggtcaatggcaagtactatgagacggccctgcaggcggccctgacagtgaggcccgagatcgtttccattacctccttcaatgagtggcacgagggcacccagattgagaaggccattcccaagaagacacccacccgcctgtatttggactacctgcctcaccagcccagcctgtacctggagctgacacgccgctgggcggagcaatcatctgtcttctctaagttagggaaccatatttgagactttcaaaaagggaacttctaggtttaagctcctcccagtagattcctgaacccaattatcaggaaatcatcctgagcactcacaggttcatttaacactcactcatcaagcaccttcctatgtgctaggtgctggggaaaacttgaccaaggaagagttcctgtcctgaagcttccaggacccagctttccttttctggtgtggccttgtagctagtgcctgggcacaggtgtttttctttttgcagttttacctagtgctgggagttcagttctttttcctctagaaaaatacctctgtgctccagagcctaatttttcccagatgcatatttagctctagggagaggactaggaggaaatccccctccctttagctgcctgaactgactgaggcccactcactagagccatgttcagtgctactgtgattagtagtaattaaatatgaactggtattctcaagtaagcattccttttgctctctttaagacctcacagattctgaccttagattctgtgacaaactgatacaggagctgggctggctatggctttaccacaacaagtaggtttgcttaagaaattactaaacaatggctgggcgtggtggctcactcctgtaatcccagcactttgggaggccgagatgggcggatcacgaggtcaggagatcgagaccatcctggctaacagggtgaaaccacgtctctactaaaaatacaaaaaaattagccaggcgtagtggtgggcgcctgtagtcccagctacttgggaggctgaggcaggagaatggcgtgaacccgggaggcggagcttgcagtgagccgagatcacgccactgcactccagcctgggcgacagagcgagactccgtctcaaaaaaaaaaaagttactaaacaaggctgggcgtggtggctcacacctgtaatcccagcactttgggaggccaaggaaggtggatcacctgaggtcaggagttcgagaccagcctggccaacatggtgaaaccccatccctactaaaaatacaaaaattagctgggcgtgggtgcctgtaatcccagctacttctgaggctgaggcaggagaaccgcttgaacctgggaggcggaggttgcagtgagccaatgtggcaccactggactccagcctgggcaagagcaagactgtctcaaaacaaaaacaacaaacaaacaaacaaaaagaaaacacaaaaaacattactaaacaagatttctagagggaattaacaaaccagtgcttatttaccaataaactaatacgctaattgcaggaaccctgattaaagcaggcccctgttaacacaagattcttaggatatacttggaaacaggtgcattggaaaccactgtactgagaagtttatgggctcaagactgaattggaagctaggcgtggtcgctcatgcctgtaatcccagcactctgggaggctgaggtggaaggatgagttcaggagttcgagaccagcctgggcaacacagagagacgtgtctttaaaaaagtaaaaaatgggctgagtgccttggctcatgcctgtaatcccagcactttgggaagccaaggcgggtggatcacttcaggccaggagttcaagaacagcctgaccaacatggcaaaactccatctctactaaaaataccaaaaaaattagcagggtgtggtggtgcacacctgtagtcccagctactcaggaggctgatgtgtgagaatcacttgaacct

SEQ ID NO: 6042 - protein, 199 aa, Homo sapiens; identical to SEQ ID NO: 6038

SEQ ID NO: 6043 - DNA, 1061 bp, Homo sapiens
aacacgccctacgatggggtcttcatagcgctgctggtggaggagggccacacccacgatatcctggccgccggatttgacggcatgtacacctactttgcctccaatggtttctcctttggttcttcccatcagaactggaaagctgtgaagaacttttgtgatgccaacaaccacaatacgcgcaacagggtcaatggcaagtactatgagacggccctgcaggcggccctgacagtgaggcccgagatcgtttccattacctccttcaatgagtggcacgagggcacccagattgagaaggccattcccaagaagacacccacccgcctgtatttggactacctgcctcaccagcccagcctgtacctggagctgacacgccgctgggcggagcacttcatcaaagagaaggagcagtggctcatgtgaggggcctgtaaatgggcgtgaggtgctgatgtccttgccttgctggaagatggtgtcagggtctgggctcgcatgcaccctgctcccttctgccagcctgcatcctctcctcaggcctccttcccacatcatctgtcttctctaagttagggaaccatatttgagactttcaaaaagggaacttctaggtttaagctcctcccagtagattcctgaacccaattatcaggaaatcatcctgagcactcacaggttcatttaacactcactcatcaagcaccttcctatgtgctaggtgctggggaaaacttgaccaaggaagagttcctgtcctgaagcttccaggacccagctttccttttctggtgtggccttgtagctagtgcctgggcacaggtgtttttctttttgcagttttacctagtgctgggagttcagttctttttcctctagaaaaatacctctgtgctccagagcctaatttttcccagatgcatatttagctctagggagaggactaggaggaaatccccctccctttagctgcctgaactgactgaggcccactcactagagccatgttcagtgctactgtgattagtagtaattaaatatgaactggtattctc

SEQ ID NO: 6044 - protein, 115 aa, Homo sapiens
MYTYFASNGFSFGSSHQNWKAVKNFCDANNHNTRNRVNGKYYETALQAALTVRPEIVSITSFNEWHEGTQIEKAIPKKTPTRLYLDYLPHQPSLYLELTRRWAEHFIKEKEQWLM

SEQ ID NO: 6045 - DNA, 2324 bp, Homo sapiens
ttcatagcgctgctggtggaggagggccacacccacgatatcctggccgccggatttgacggcatgtacacctactttgcctccaatggtttctcctttggttcttcccatcagaactggaaagctgtgaagaacttttgtgatgccaacaaccacaatacgcgcaacagggtcaatggcaagtactatgagacggccctgcaggcggccctgacagtgaggcccgagatcgtttccattacctccttcaatgagtggcacgagggcacccagattgagaaggccattcccaagaagacacccacccgcctgtatttggactacctgcctcaccagcccagcctgtacctggagctgacacgccgctgggcggagcacttcatcaaagagaaggagcagtggctcatgtgaggggcctgtaaatgggcgtgaggtgctgatgtccttgccttgctggaagatggtgtcagggtctgggctcgcatgcaccctgctcccttctgccagcctgcatcctctcctcaggcctccttcccacatcatctgtcttctctaagttagggaaccatatttgagactttcaaaaagggaacttctaggtttaagctcctcccagtagattcctgaacccaattatcaggaaatcatcctgagcactcacaggttcatttaacactcactcatcaagcaccttcctatgtgctaggtgctggggaaaacttgaccaaggaagagttcctgtcctgaagcttccaggacccagctttccttttctggtgtggccttgtagctagtgcctgggcacaggtgtttttctttttgcagttttacctagtgctgggagttcagttctttttcctctagaaaaatacctctgtgctccagagcctaatttttcccagatgcatatttagctctagggagaggactaggaggaaatccccctccctttagctgcctgaactgactgaggcccactcactagagccatgttcagtgctactgtgattagtagtaattaaatatgaactggtattctcaagtaagcattccttttgctctctttaagacctcacagattctgaccttagattctgtgacaaactgatacaggagctgggctggctatggctttaccacaacaagtaggtttgcttaagaaattactaaacaatggctgggcgtggtggctcactcctgtaatcccagcactttgggaggccgagatgggcggatcacgaggtcaggagatcgagaccatcctggctaacagggtgaaaccacgtctctactaaaaatacaaaaaaattagccaggcgtagtggtgggcgcctgtagtcccagctacttgggaggctgaggcaggagaatggcgtgaacccgggaggcggagcttgcagtgagccgagatcacgccactgcactccagcctgggcgacagagcgagactccgtctcaaaaaaaaaaaagttactaaacaaggctgggcgtggtggctcacacctgtaatcccagcactttgggaggccaaggaaggtggatcacctgaggtcaggagttcgagaccagcctggccaacatggtgaaaccccatccctactaaaaatacaaaaattagctgggcgtgggtgcctgtaatcccagctacttctgaggctgaggcaggagaaccgcttgaacctgggaggcggaggttgcagtgagccaatgtggcaccactggactccagcctgggcaagagcaagactgtctcaaaacaaaaacaacaaacaaacaaacaaaaagaaaacacaaaaaacattactaaacaagatttctagagggaattaacaaaccagtgcttatttaccaataaactaatacgctaattgcaggaaccctgattaaagcaggcccctgttaacacaagattcttaggatatacttggaaacaggtgcattggaaaccactgtactgagaagtttatgggctcaagactgaattggaagctaggcgtggtcgctcatgcctgtaatcccagcactctgggaggctgaggtggaaggatgagttcaggagttcgagaccagcctgggcaacacagagagacgtgtctttaaaaaagtaaaaaatgggctgagtgccttggctcatgcctgtaatcccagcactttgggaagccaaggcgggtggatcacttcaggccaggagttcaagaacagcctgaccaacatggcaaaactccatctctactaaaaataccaaaaaaattagcagggtgtggtggtgcacacctgtagtcccagctactcaggaggctgatgtgtgagaatcacttgaacct

SEQ ID NO: 6046 - protein, 115 aa, Homo sapiens; identical to SEQ ID NO: 6044

SEQ ID NO: 6047 - DNA, 895 bp, Homo sapiens
ctccttcaatgagtggcacgagggcacccagattgagaaggccattcccaagaagacacccacccgcctgtatttggactacctgcctcaccagcccagcctgtacctggagctgacacgccgctgggcggagcacttcatcaaagagaaggagcagtggctcatgtgaggggcctgtaaatgggcgtgaggtgctgatgtccttgccttgctggaagatgtcaccatgtggggttcagctgaggttgtagccactcactcgttcccaggtcagaggtcagcagatgggtgtttctgggtgggccgtcaggcatgggcctgtgcaacacagagcccgttcctcaggcgagtggtgctgaggtgctctgtggtgatgggaacggcagaggctggcaggtgactgaacttagcccagggcagctccacatcctgggaacactttcatgtaaccccttctagttttgaactctgcagcaggctggtgctgtgtagaaatcatcctgagcactcacaggttcatttaacactcactcatcaagcaccttcctatgtgctaggtgctggggaaaacttgaccaaggaagagttcctgtcctgaagcttccaggacccagctttccttttctggtgtggccttgtagctagtgcctgggcacaggtgtttttctttttgcagttttacctagtgctgggagttcagttctttttcctctagaaaaatacctctgtgctccagagcctaatttttcccagatgcatatttagctctagggagaggactaggaggaaatccccctccctttagctgcctgaactgactgaggcccactcactagagccatgttcagtgctactgtgattagtagtaattaaatatgaactggtattctcaagt

SEQ ID NO: 6048 - protein, 57 aa, Homo sapiens
MWGSAEVVATHSFPGQRSADGCFWVGRQAWACATQSPFLRRVVLRCSVVMGTAEAGR

SEQ ID NO: 6049 - DNA, 1845 bp, Homo sapiens
tcccggaagcgggcctgggcggatgtctccggcgcgtcggtgcagggggatgagggccgcggtggctgccagcgtggggttgagcgaggggcctgctggctcccggagcggtcgcctcttccgcccgccgagtcccgctccggcggcccccggcgcccggctgttgcggctcccggggagcggggccgtgcaggccgcgagcccggagcgcgccggctggaccgaggcgctgcgggccgccgtggccgagctgcgcgccggcgccgtggtggccgtccccaccgatacgctgtacggcctggcctgcgcggcgagctgctcggcggctctgcgcgctgtgtaccgcctcaagggtcgcagcgaggccaagcctctggccgtatgcctcggccgcgtggccgacgtctacagatactgccgtgtgagagtacctgaggggctcctgaaagacctactgccaggaccagtgaccctggtgatggaacgctcggaggagctcaacaaggacctaaacccttttacgcctcttgtaggcattcggattcctgatcatgcttttatgcaagacttggctcagatgtttgagggtccgcttgctctcactagtgccaacctcagctcccaggccagttctctgaatgtcgaggagttccaggatctctggcctcagttgtccttggttattgatgggggacaaattggggatggccagagccccgagtgtcgccttggctcaactgtggttgatttgtctgtgcccggaaagtttggcatcattcgtccaggctgtgccctggaaagtactacagccatcctccaacagaagtacggactgctcccctcacatgcgtcctacctgtgaaactctgggaagcaggaaggcccaagacctggtgctggatactatgtgtctgtccactgacgactgtcaaggcctcatttgcagaggccaccggagctagggcactagcctgacttttaaggcagtgtgtctttctgagcactgtagaccaagcccttggagctgctggtttagccttgcacctggggaaaggatgtatttatttgtattttcatatatcagccaaaagctgaatggaaaagttaagaacattcctaggtggccttattctaataagtttcttctgtctgttttgtttttcaattgaaaagtaattaaataacagatttagaatctagtgagagcctcctctctggtgggtggtggcatttaaggttcaaaccagccagaagtgctggtgctgtttaaaaagtctcaggtggctgcgtgtggtggctcatgcctgtaatcccaacattctgggaggcccaggcgggagaactgcttgagcccaggagttcagaatcagcctgggcaacatagcaatactccgtctcataaaaattaataaataaaaagtctcaggtgaccaaaggctcctgaagctagaaccaggtttggataaagattgaagagccacaggccactcttccctctgagccattgggcctagtggtgtcatgtattgtaattgctcgcagggagagcagtctttttggtgtaatagtgggatgtctgcttagttggcaggggttcagtccaaatggaagaatattgggaaataaacctccactatcctttatagccagggacttttttcttatttattcataaaataaattatagttaattatacccataacacctttatttaaatccagtgttctccgcagccttttgtctatttatatgtgtaccaagtgttaaacataattattattgggcatttgaactttgtttttctttaaagaaatgctgctattaaacatatttgtaaatggttt

SEQ ID NO: 6050 - protein, 279 aa, Homo sapiens; identical to SEQ ID NO: 164

SEQ ID NO: 6051 - DNA, 1198 bp, Homo sapiens
tcccggaagcgggcctgggcggatgtctccggcgcgtcggtgcagggggatgagggccgcggtggctgccagcgtggggttgagcgaggggcctgctggctcccggagcggtcgcctcttccgcccgccgagtcccgctccggcggcccccggcgcccggctgttgcggctcccggggagcggggccgtgcaggccgcgagcccggagcgcgccggctggaccgaggcgctgcgggccgccgtggccgagctgcgcgccggcgccgtggtggccgtccccaccgatacgctgtacggcctggcctgcgcggcgagctgctcggcggctctgcgcgctgtgtaccgcctcaagggtcgcagcgaggccaagcctctggccgtatgcctcggccgcgtggccgacgtctacagatactgccgtgtgagagtacctgaggggctcctgaaagacctactgccaggaccagtgaccctggtgatggaacgctcggaggagctcaacaaggacctaaacccttttacgcctcttgtaggcattcggattcctgatcatgcttttatgcaagacttggctcagatgtttgagggtccgcttgctctcactagtgccaacctcagctcccaggccagttctctgaatgtcgaggagttccaggatctctggcctcagttgtccttggttattgatgggggacaaattggggatggccagagccccgagtgtcgccttggctcaactgtggttgatttgtctgtgcccggaaagtttggcatcattcgtccaggctgtgccctggaaagtactacagccatcctccaacagaagtacggactgctcccctcacatgcgtcctacctgtgaaactctgggaagcaggaaggcccaagacctggtgctggatactatgtgtctgtccactgacgactgtcaaggcctcatttgcagaggccaccggagctagggcactagcctgacttttaaggcagtgtgtctttctgagcactgtagaccaagcccttggagctgctggtttagccttgcacctggggaaaggatgtatttatttgtattttcatatatcagccaaaagctgaatggaaaagttaagaacattcctaggtggccttattctaataagtttcttctgtctgttttgtttttcaattgaaaagtaattaaataacagatttagaatct

SEQ ID NO: 6052 - protein, 279 aa, Homo sapiens; identical to SEQ ID NO: 164

SEQ ID NO: 6053 - DNA, 1133 bp, Homo sapiens
tcccggaagcgggcctgggcggatgtctccggcgcgtcggtgcagggggatgagggccgcggtggctgccagcgtggggttgagcgaggggcctgctggctcccggagcggtcgcctcttccgcccgccgagtcccgctccggcggcccccggcgcccggctgttgcggctcccggggagcggggccgtgcaggccgcgagcccggagcgcgccggctggaccgaggcgctgcgggccgccgtggccgagctgcgcgccggcgccgtggtggccgtccccaccgatacgctgtacggcctggcctgcgcggcgagctgctcggcggctctgcgcgctgtgtaccgcctcaagggtcgcagcgaggccaagcctctggccgtatgcctcggccgcgtggccgacgtctacagatactgccgtgtgagagtacctgaggggctcctgaaagacctactgccaggaccagtgaccctggtgatggaacgctcggaggagctcaacaaggacctaaacccttttacgcctcttgtaggcattcggattcctgatcatgcttttatgcaagacttggctcagatgtttgagggtccgcttgctctcactagtgccaacctcagctcccaggccagttctctgaatgtcgaggagttccaggatctctggcctcagttgtccttggttattgatgggggacaaattggggatggccagagccccgagtgtcgccttggctcaactgtggttgatttgtctgtgcccggaaagtttggcatcattcgtccaggctgtgccctggaaagtactacagccatcctccaacagaagtacggactgctcccctcacatgcgtcctacctgtgaaactctgggaagcaggaaggcccaagacctggtgctggatactatgtgtctgtccactgacgactgtcaaggcctcatttgcagaggccaccggagctagggcactagcctgacttttaaggcagtgtgtctttctgagcactgtagaccaagcccttggagctgctggtttagccttgcacctggggaaaggatgtatttatttgtattttcatatatcagccaaaagctgaatggaaaagttaagaacattcctaggtggccttattct

SEQ ID NO: 6054 - protein, 279 aa, Homo sapiens; identical to SEQ ID NO: 164

SEQ ID NO: 6055 - DNA, 2553 bp, Homo sapiens
tttgagataaaatctttcaaatttttttaatttatattgccccccaccacctccctgccagctgggcaaccttcccactgttggcccaagaactctcatgcctggccatcccagtgtactatcaatgccactgattcacagaaaacagtatgtgcgctggtgacatttccaggggaaggactgggtaaactcacctcgacattcagagaactggcctgggagctgaggttggcactagtgagagcaagcggaccctcaaacatctgagccaagtcttgcataaaagcatgatcaggaatccgaatgcctacaagctgtaaggcaaggggaaagggatcatgagaaaggttggaagggataagagggtaagtcttatctggatcctagtgaaagccaagtggcctggagtctggggacacaagagaaaacttgactcacaggcgtaaaagggtttaggtccttgttgagctcctccgagcgttccatcaccagggtcactggtcctggcagtaggtctttcaggagcccctcaggtactctcacacggcagtatctgggaaacacagaagaataaatccattcaaaattgaagggccactggtggtcctttcctagactctaggcagacgtagaaaaggaatccttcgagtttacaatgggagccgcctgtctccctgcttcacctccctaagagcttgagcagaaagcagggctccagaggcgcacccctggcttgacgcccatgtgcctctggtctcagggactacaacagctgcaccgctgtgatatcatgatagtgggatcaagctccacgttttattttcttcaaggcattcgctattaaattaagctactgtgtttgtttgcttttttcccgggggcctccccaattagcacaaatacgccaagggaacagggtccctgcctttctcgtgtgttgctgcttcccagcagcatgtagttcagggcccggggcacgttaagtcctcggtacatatttccagttccggattccttggtgagcctggacaagcccctcccgctctctgcgcctcagtctcccaagcctgtcaccggaaacccctcccgcggtgccgcccctagcggggccgggtcggggcggccttacctgtagacgtcggccacgcggccgaggcatacggccagaggcttggcctcgctgcgacccttgaggcggtacacagcgcgcagagccgccgagcagctcgccgcgcaggccaggccgtacagcgtatcggtggggacggccaccacggcgccggcgcgcagctcggccacggcggcccgcagcgcctcggtccagccggcgcgctccgggctcgcggcctgcacggccccgctccccgggagccgcaacagccgggcgccgggggccgccggagcgggactcggcgggcggaagaggcgaccgctccgggagccagcaggcccctcgctcaaccccacgctggcagccaccgcggccctcatccccctgcaccgacgcgccggagacatccgcccaggcccgcttccgggaggaagtgacgctcccagccagcttccggtccaggagactcggccccgcctctgcgccgggcagcttaaagggaccacgacccccaggaggattgaaggagaccggtggggacggggcggggcgcagccttgcgaagccctaacgcagcgctggggaggggggcggccgaaaggggggcggtggtcgggccgcgcaagcggagatggaatggggcccgggctcagactggtcacgggggtgagagggggcccgtcggggcgggaggaaggggcttggccccgcgcaagcgccggccctgaccgtctgtctctcgctctctcccgggcagggaggctgccggcgtggaccgcgggaaggcggggctggggctcggcgggaggccacccccacagccgccccgggaggagcgcgcccagcagctgctggacgcggtggagcagcggcagcggcagctcctggacaccatcgcagcctgcgaggagatgttacggcagctgggccgccggcgcccggagccggctggtggcgggaacgtctcagccaaacctggagcgcccccccagccggctgtctccgccagaggcggctttccaaaggatgctggcgatggagctgcggagccctgaccatccccgagcagaataccctgacttctctccctccccagggccggtggctggactctgaacaactcccttcagtaaaggggccagtcttcactggcagtggctggtacttggctctcagcctggagtggcagctctgctagcagctgggttcactcccacttcatcctggctgaaagcagtgctgtgctttgaaatgcagccaatgaatacccagtctgattacccagatttgggcagaccagcagtgctcgccagagtggtctggcctgctatgggggatccaggtggtgttacatgtccatttcatgttttgggggcttttagccccacaaaacaccttcagtagagccttgattaaaaggaaacctgcagactctcctggtg

SEQ ID NO: 6056 - protein, 159 aa, Homo sapiens
MGPGLRLVTGVRGGPSGREEGAWPRASAGPDRLSLALSRAGRLPAWTAGRRGWGSAGGHPHSRPGRSAPSSCWTRWSSGSGSSWTPSQPARRCYGSWAAGARSRLVAGTSQPNLERPPSRLSPPEAAFQRMLAMELRSPDHPRAEYPDFSPSPGPVAGL

SEQ ID NO: 6057 - DNA, 1237 bp, Homo sapiens
tgccgcccctagcggggccgggtcggggcggccttacctgtagacgtcggccacgcggccgaggcatacggccagaggcttggcctcgctgcgacccttgaggcggtacacagcgcgcagagccgccgagcagctcgccgcgcaggccaggccgtacagcgtatcggtggggacggccaccacggcgccggcgcgcagctcggccacggcggcccgcagcgcctcggtccagccggcgcgctccgggctcgcggcctgcacggccccgctccccgggagccgcaacagccgggcgccgggggccgccggagcgggactcggcgggcggaagaggcgaccgctccgggagccagcaggcccctcgctcaaccccacgctggcagccaccgcggccctcatccccctgcaccgacgcgccggagacatccgcccaggcccgcttccgggaggaagtgacgctcccagccagcttccggtccaggagactcggccccgcctctgcgccgggcagcttaaagggaccacgacccccaggaggattgaaggagaccgggaggctgccggcgtggaccgcgggaaggcggggctggggctcggcgggaggccacccccacagccgccccgggaggagcgcgcccagcagctgctggacgcggtggagcagcggcagcggcagctcctggacaccatcgcagcctgcgaggagatgttacggcagctgggccgccggcgcccggagccggctggtggcgggaacgtctcagccaaacctggagcgcccccccagccggctgtctccgccagaggcggctttccaaaggatgctggcgatggagctgcggagccctgaccatccccgagcagaataccctgacttctctccctccccagggccggtggctggactctgaacaactcccttcagtaaaggggccagtcttcactggcagtggctggtacttggctctcagcctggagtggcagctctgctagcagctgggttcactcccacttcatcctggctgaaagcagtgctgtgctttgaaatgcagccaatgaatacccagtctgattacccagatttgggcagaccagcagtgctcgccagagtggtctggcctgctatgggggatccaggtggtgttacatgtccatttcatgttttgggggcttttagccccacaaaacaccttcagtagagccttgattaaaaggaaacctgcagactctcctggtg

SEQ ID NO: 6058 - protein, 47 aa, Homo sapiens
MLRQLGRRRPEPAGGGNVSAKPGAPPQPAVSARGGFPKDAGDGAAEP

SEQ ID NO: 6059 - DNA, 1358 bp, Homo sapiens
ggggccgggtcggggcggccttacctgtagacgtcggccacgcggccgaggcatacggccagaggcttggcctcgctgcgacccttgaggcggtacacagcgcgcagagccgccgagcagctcgccgcgcaggccaggccgtacagcgtatcggtggggacggccaccacggcgccggcgcgcagctcggccacggcggcccgcagcgcctcggtccagccggcgcgctccgggctcgcggcctgcacggccccgctccccgggagccgcaacagccgggcgccgggggccgccggagcgggactcggcgggcggaagaggcgaccgctccgggagccagcaggcccctcgctcaaccccacgctggcagccaccgcggccctcatccccctgcaccgacgcgccggagacatccgcccaggcccgcttccgggaggaagtgacgctcccagccagcttccggtccaggagactcggccccgcctctgcgccgggcagcttaaagggaccacgacccccaggaggattgaaggagaccggtggggacggggcggggcgcagccttgcgaagccctaacgcagcgctggggaggggggcggccgaaaggggggcggtggtcgggccgcgcaagcggagatggaatggggcccgggctcagactggtcacggggggaggctgccggcgtggaccgcgggaaggcggggctggggctcggcgggaggccacccccacagccgccccgggaggagcgcgcccagcagctgctggacgcggtggagcagcggcagcggcagctcctggacaccatcgcagcctgcgaggagatgttacggcagctgggccgccggcgcccggagccggctggtggcgggaacgtctcagccaaacctggagcgcccccccagccggctgtctccgccagaggcggctttccaaaggatgctggcgatggagctgcggagccctgaccatccccgagcagaataccctgacttctctccctccccagggccggtggctggactctgaacaactcccttcagtaaaggggccagtcttcactggcagtggctggtacttggctctcagcctggagtggcagctctgctagcagctgggttcactcccacttcatcctggctgaaagcagtgctgtgctttgaaatgcagccaatgaatacccagtctgattacccagatttgggcagaccagcagtgctcgccagagtggtctggcctgctatgggggatccaggtggtgttacatgtccatttcatgttttgggggcttttagccccacaaaacaccttcagtagagccttgattaaaaggaaacctgcagactctcctggtga

SEQ ID NO: 6060 - protein, 156 aa, Homo sapiens; identical to SEQ ID NO: 166

SEQ ID NO: 6061 - DNA, 756 bp, Homo sapiens
gaatggggcccgggctcagactggtcacgggggtgagagggggcccgtcggggcgggaggaaggggcttggccccgcgcaagcgccggccctgaccgtctgtctctcgctctctcccgggcagggaggctgccggcgtggaccgcgggaaggcggggctggggctcggcgggaggccacccccacagccgccccgggaggagcgcgcccagcagctgctggacgcggtggagcagcggcagcggcagctcctggacaccatcgcagcctgcgaggagatgttacggcagctgggccgccggcgcccccggctgtctccgccagaggcggctttccaaaggatgctggcgatggagctgcggagccctgaccatccccgagcagaataccctgacttctctccctccccagggccggtggctggactctgaacaactcccttcagtaaaggggccagtcttcactggcagtggctggtacttggctctcagcctggagtggcagctctgctagcagctgggttcactcccacttcatcctggctgaaagcagtgctgtgctttgaaatgcagccaatgaatacccagtctgattacccagatttgggcagaccagcagtgctcgccagagtggtctggcctgctatgggggatccaggtggtgttacatgtccatttcatgttttgggggcttttagccccacaaaacaccttcagtagagccttgattaaaaggaaacctgcagactctcctggtg

SEQ ID NO: 6062 - protein, 169 aa, Homo sapiens
MGPGLRLVTGVRGGPSGREEGAWPRASAGPDRLSLALSRAGRLPAWTAGRRGWGSAGGHPHSRPGRSAPSSCWTRWSSGSGSSWTPSQPARRCYGSWAAGAPGCLRQRRLSKGCWRWSCGALTIPEQNTLTSLPPQGRWLDSEQLPSVKGPVFTGSGWYLALSLEWQLC

SEQ ID NO: 6063 - DNA, 7972 bp, Homo sapiens
ggaagtgacgttaggggaaggtgggggcaatcatggtgccgctggggaggggagaagctgctgctgccgccgttgccgggagccgcggagacaagtcattacgttttcatttctcacaactgggctgagcacaactgaaccatgggggaacacagtccagacaacaacatcatctactttgaggcagaggaagatgagctgacccccgatgataaaatgctcaggtttgtggataaaaacggactggtgccttcctcatctggaactgtttatgataggaccactgttcttattgagcaggaccctggcactttggaggatgaagatgacgacggacagtgcggagaacacttgccttttctagtagggggtgaagagggctttcacctgatagatcatgaagcaatgtcccagggttatgtgcagcacattatctcaccagatcagattcatttgacaataaaccctggttccacacccatgccaagaaatattgaaggtgcaaccctcactctgcagtcggaatgtccggaaacaaaacgtaaagaagtaaagcggtaccaatgtacctttgagggctgtccccgcacctacagcacagcaggcaacctgcgaacccaccagaagactcaccgaggagagtacacctttgtctgtaatcaggagggctgtggcaaagccttccttacctcttacagcctcaggatccacgtgcgagtgcacacgaaggagaagccatttgagtgtgacgtgcagggctgtgagaaggcattcaacacactgtacaggctgaaagcacatcagaggcttcacacagggaaaacgtttaactgtgaatctgaaggctgcagcaaatacttcaccacactcagtgatctgaggaagcacattcgaactcatacaggggaaaagccatttcggtgcgatcacgatggctgtggaaaagcatttgcagcaagccaccaccttaaaactcacgttcgtacacatactggtgaaagacccttcttctgccccagtaatggctgtgagaaaacattcagcactcaatacagtctcaaaagtcacatgaaaggtcatgataacaaaggacactcatacaatgcacttccacaacacaatggatcagaggatacaaatcactcactttgtctaagtgacttgagccttctgtccacagattctgaattgcgagaaaattccagtacgacccagggccaggacctcagcacaatttcaccagcaatcatctttgaatcaatgttccagaattcagatgatacggcaattcaggaagatcctcaacagacagcttccttgactgaaagttttaatggtgatgcagagtcagtcagtgatgttccgccatccacaggaaattcagcatctttatctcttccacttgtactgcaacctggcctctccgagccaccccagcctctactacctgcctcagctccgtctgctcctccgcctgctccctccctaggacctggctcccagcaagctgcatttggcaacccccctgctctcttacaacctccagaagtgcctgttccccacagcacacagtttgctgctaatcatcaagagtttcttccgcacccccaggcaccgcagcccattgtaccaggactttctgttgttgctggggcttctgcatcagcagcggcagtggcatcagctgtggcagcaccagccccaccacaaagtactactgagcccctgccagccatggtccagactctgcccctgggtgccaactctgtcctaactaataatcccacaataaccatcaccccaactcccaacacagctatcctgcagtccagcctagtcatgggagaacagaacttacaatggatattaaatggtgccaccagttctccacaaaaccaagaacaaattcagcaagcatctaaagttgagaaggtgttttttaccactgcagtaccagtagccagtagcccagggagctctgtccagcagattggcctcagtgttcctgtgatcatcatcaaacaagaagaggcatgtcagtgtcagtgtgcatgccgggactctgcaaaggagcgggcatccagcaggagaaagggctgctcctccccaccccctccagagccgagcccccaggctcctgatgggcccagcctgcagctcccagcgcagactttctcttcagcccctgttcccgggtcatcatcctctaccttgccctcctcctgtgagcaaagccgacaagcagagactccttcagaccctcagacagaaacattaagtgccatggatgtgtcagagtttctatccctccagagcctggacaccccgtccaatctgattcccattgaagcactactgcagggggaggaggagatgggcctcaccagcagcttctccaagtgaagggcccatgtgtgctcacctctgggaaaagcgggtgagcaggaggcatgaggtacaatgcctgccatcatgggtcagaaatttgaaggatgaagaaatctactgtttgaaatcctcacctttcagacgtattttctttattcacatcccaggagcatccattttaaggaactattctttggaaaaaaacaaaaaacaaaaaaaacaacaaaaaaagctaagttataagtgaactgtttggctgcactgtatgtcacttttgcttgttgtcatgtgaacttggaaactaaggttactcgtgtgcataaaaattctaaatgaaagggtgtggtttccatcaatctgatgctgcccatcgcttgcactggggtctttgtggatcgggcaggagttttcagtgtgttgggtgttgctccttcctatgtgtcttttgaatctgaggctgacatttgcttggaaggccagacccttgctccatcagagagggcagtggcaaaggccagtgaggcagctgtgagttggacagggttcaggtgagatggtgttgtcatttgtgcttagtgttggtggtgctcagggtggataacacgggtcgttctgcagcccgcttcagcacaaataggcagcttaaggcctggctcacaggctgtggggttgatctggctctgcagaggccctaggcagcttgttgactgctgtctgttgatgacgtgtgtgcaaagcaggctctagcaacatgatcactgtccttgccttcctggttctttctctcggttggttgccagggcttgcagatcgcagtgaattttccttggggaacatcgctgttttgtcctagagtgaacttgtggcttatggccagtgctgtttggtggtctgccttctttttaatggtattttcttcctcagagcagaagggctgcattttgcttatcagaagaaggtgcagatttaagggaattcatatgaggtggcatgtaattggcaggccaggtgtcctggttccaggttccagccaggctttgggttgccccctccatctctgcccccctctggattttgcatacagcctcatacagtgcaaacaaggatgtgacttgctcagcttagtcatgtgatttatttaaaaaaaaaaaaaaaagaaacacaaaacgatgatcttctactcagggtatagcaaaacaaaaaaattccctttccaccaaaaagcctgaaatgttgcaataagttatctcatttggaatgtttcattaagttgtgttataggaaaaaattgtgtgtgtgtgttatagaattatatccatatgtctgcctttggctccaagtcattgcctcttaaaataaaagatacaatccatactagcatgaaaagtttccctcaacaggctatattaacatagtcatgagtgctgaccaaactcaccgagctcagaggccaggcatggcctgaggtgcagaataggcctctgcctcccaagagccctttccttgccctgagcaaggagtggtgttccacaaacaaggctgctcttctaagccaacagtgtcaggcaggaagcagccataattttgccttgcattttcattccctaatgtaaagggatctgcattggtcactctcctgttctctgagccattgctcagggccagccaagatattattgagaacagataatttaccttggagccagaggccctccctgcctttagcaaggatgttcagggacagacaaagagggcagtggtggtgaatgttgttactgccatgaggagaaatggcagtaagaaatcttaactacaagcagccaatttctcattccaggaccctagccagaataattgacttctttttttttttgagacagagttttgcttttgttgccctggctggagtgcagtggcgcaatcttggctcaccgcaacctccacttcccaggttcaagcaattctgcctcagcctcccgagtagctgggattacaggcatgcgccaccacgcctggctaattttgtatttttagtagagacggggtttctccatgttggtcaggctggtctcgaactcccaacgtcaggtgatcctcccgcctcagtctcccaaagtgctgggattacaggtgtgagccaccatgcctggtctagggaattgacttctttttgaccttctgcactcccttccccaaaaggattgtggcttctgttgaccattgacctcagcagaagttgataaggcaggaggtttccagtcctcctggaaaaccaactgctgagcatgagttgtccttggctgtctctgggcctcgcacccatgggaagttttgaggtagggcccttgctgtttacaacttctgagagagtagtgatgggaccccaaagtaagcttgtatcagagggcagtaatgaccttcccatatccccatcctgtggtcacctgggatttgggttccctggggcggaagtgggaaataggagcccagggaaggacatctgaagcacccacagtttaaatagcgactcttcttggttagccagggctgtgctcatgttgggccctacccaggtcagtggccttttcactctcaaagatcgggggtgacgaagcagcatcttaaacagtgtttaggctgacagatttttccagttgaagaagctgaagtatctgccttttgagggtgactctagattacaagagagactatcagatccaatcagcttttgaaaaatcaggaatgtgcttaaaatgccagtgagtggttgtgaagatcaggtttatttcccaggataggcagtctttctttccctccttttccagttctcttttcctacctgtccttccataagcctggtctctagtgccgaggaccttggagaagagagggcccctagctaagctggagccagaaagaaccttcatggtgagtgtggtttcccaaacttgggaaatgaacctagggtgaggttagggaggatttgtagaattctagcaggtaaaaatcaagcctttttcccctcccatagtaaacttaaccattttcaccctgtacgttatcttctagctcctactaacatctccaattagacaaccgcttcaaagggtgcttagcaccagggattggggttcatggacttaggaggtggtaaggaaactggctggcaccaccaaactgccttagtgaacttggcccttcccaggcaggtaggttgggcattgagggaaggtggcccagtctttgctggcagggtctggccagtctcatgggggcaccaccagtttggtgacagaagtggtgtcatttattgaattccacctccgtttagaaggagatcatggtacaaagcccaggaggggccttaagatgtgaagatctctctgagtaaaaggcaaggggcttctcttcttcacctctgggatagttggtagatcggagagttttattttcagggtcaaggctgtggactgatggggatattggagggtgggtgggttttcctgagagactttgtataatgctgaatgtgtccagagggacaagtttgcagaacctcatattggtatattaaagaaataataaaataaaaaagcactttaggttattttatctttaacccgattgctgcaatttcttttgtgtgtatatatacatatatatactttccacaaagttttattttttgctcagaataaaaagttaaattgaggtgtgaaaagaaaagcacttaccttggtgcaatatgtgtagcttgatggtcgttgtcccatgtggccctggcctggcagcgtttttccgctcaatcagccctgtgctgtgagactgtccatagggaaacactattatgcattctcagcaaccgctcaatctatgcaagccttccctgtgtgccccagggcgccccctcaggctctctgaagaactgctgtgggtcctgttttctgctgactgttgaggccctttttcatcacttcttggtctctcgccatcttttccctcttcaccattacaaaatgatgcctgaaaggaaggaacagattgttcctaggtagaaacctggcaccttctagacttttatatttgtaatcacatccattgtccttaaagacttttccagagtgattgaaaccattgatttgtggaactgcaacaatatttctcaagagtttacaattgtcttacaccaccaatcagaaatatgtttggggaggcatgggtggcagggggcaacatgagccatttccatactgctccccatactacctgtgttggttccttaagcaaaaaggcctccagccttcattaaatcctataaacaaacattacatcccatgaatcattatcaactttcttcctttactccacctcccccattttatcttcaattctcaggctatagaatagacaagttttagaatatacttcagccaaagcagaaggattttcatagatccaatatgcaaatagttctgctgtgacatagatcagaaattgtctgttccttaatatttgggggtggaggcaacaaaactgaagcatatttctgattggttagccattttggcctgtttcctcttgcatgttttttagggagagagggaaacagtcctgtatttcttctgatgccctttggggaagccgacgaccactgggcatttctcactgttactcctgttcaagagagggcttctcagtctgcactgaaaaatgcaaattaaactggatctttatgtcaatgtgtacatagtacaagcttttttactggaattgaggtttaaaaccacacactgcccttttggtggtgtgcctgttgggccaaaaattgggtgataatgtagtgtcactttctcagctcaatgcagtttctactttttcttatgggaaaatttttcataaaacctttttgcaccaaaacccaggggtgttttttgcaatatccttgttatcctcgtagtgtgccaagtcagaggctttctcttgcccttttcctgctgtgttctcaggcctcccaagggctatttgactcaacagtctacatccttcgttgtgttttggagaatgtgggggtgggggtcagagttcaaggtgtctgttcccttttcctgtgaactctttctagtccctatttggggagggtggctggaaacagatttttgctgaatttctggctcagatcttctagccaggaaaggcaagagcccccaagagcccttttttttgacatacactaatcattggccggggtcttggtgacaacttttaaaatcccaaatagttttatttggattatgtaaaagtaagtgtgaaacatgggaacaacggacttccactgagcgatgtgaaaacgttacaggttcagtacttccaaaggaagaaacctccaaacccaaaaaagaataaatatgaatttgtatttttgaagaatgtgaaataatggtgtttgcttaattgctcattttgtataaacttaatattgtactttaaaatatctgctaaaaagtgaaaatttaactttttggaattgaaaaagcaatattaaatactaatgaaatcctaattaaatgcttatttaaatctggta

SEQ ID NO: 6064 - protein, 753 aa, Homo sapiens
MGEHSPDNNIIYFEAEEDELTPDDKMLRFVDKNGLVPSSSGTVYDRTTVLIEQDPGTLEDEDDDGQCGEHLPFLVGGEEGFHLIDHEAMSQGYVQHIISPDQIHLTINPGSTPMPRNIEGATLTLQSECPETKRKEVKRYQCTFEGCPRTYSTAGNLRTHQKTHRGEYTFVCNQEGCGKAFLTSYSLRIHVRVHTKEKPFECDVQGCEKAFNTLYRLKAHQRLHTGKTFNCESEGCSKYFTTLSDLRKHIRTHTGEKPFRCDHDGCGKAFAASHHLKTHVRTHTGERPFFCPSNGCEKTFSTQYSLKSHMKGHDNKGHSYNALPQHNGSEDTNHSLCLSDLSLLSTDSELRENSSTTQGQDLSTISPAIIFESMFQNSDDTAIQEDPQQTASLTESFNGDAESVSDVPPSTGNSASLSLPLVLQPGLSEPPQPLLPASAPSAPPPAPSLGPGSQQAAFGNPPALLQPPEVPVPHSTQFAANHQEFLPHPQAPQPIVPGLSVVAGASASAAAVASAVAAPAPPQSTTEPLPAMVQTLPLGANSVLTNNPTITITPTPNTAILQSSLVMGEQNLQWILNGATSSPQNQEQIQQASKVEKVFFTTAVPVASSPGSSVQQIGLSVPVIIIKQEEACQCQCACRDSAKERASSRRKGCSSPPPPEPSPQAPDGPSLQLPAQTFSSAPVPGSSSSTLPSSCEQSRQAETPSDPQTETLSAMDVSEFLSLQSLDTPSNLIPIEALLQGEEEMGLTSSFSK

SEQ ID NO: 6065 - DNA, 1296 bp, Homo sapiens
tgtcttacaccaccaatcagaaatatgtttggggaggcatgggtggcagggggcaacatgagccatttccatactgctccccatactacctgtgttggttccttaagcaaaaaggcctccagccttcattaaatcctataaacaaacattacatcccatgaatcattatcaactttcttcctttactccacctcccccattttatcttcaattctcaggctatagaatagacaagttttagaatatacttcagccaaagcagaaggattttcatagatccaatatgcaaatagttctgctgtgacatagatcagaaattgtctgttccttaatatttgggggtggaggcaacaaaactgaagcatatttctgattggttagccattttggcctgtttcctcttgcatgttttttagggagagagggaaacagtcctgtatttcttctgatgccctttggggaagccgacgaccactgggcatttctcactgttactcctgttcaagagagggcttctcagtctgcactgaaaaatgcaaattaaactggatctttatgtcaatgtgtacatagtacaagcttttttactggaattgaggtttaaaaccacacactgcccttttggtggtgtgcctgttgggccaaaaattgggtgataatgtagtgtcactttctcagctcaatgcagtttctactttttcttatgggaaaatttttcataaaacctttttgcaccaaaacccaggggtgttttttgcaatatccttgttatcctcgtagtgtgccaagtcagagttcaaggtgtctgttcccttttcctgtgaactctttctagtccctatttggggagggtggctggaaacagatttttgctgaatttctggctcagatcttctagccaggaaaggcaagagcccccaagagcccttttttttgacatacactaatcattggccggggtcttggtgacaacttttaaaatcccaaatagttttatttggattatgtaaaagtaagtgtgaaacatgggaacaacggacttccactgagcgatgtgaaaacgttacaggttcagtacttccaaaggaagaaacctccaaacccaaaaaagaataaatatgaatttgtatttttgaagaatgtgaaataatggtgtttgcttaattgctcattttgtataaacttaatattgtactttaaaatatctgctaaaaagtgaaaatttaactttttggaattgaaaaagcaatattaaatactaatgaaatcctaattaaatgcttatttaaatctggt

SEQ ID NO: 6066 - protein, 50 aa, Homo sapiens
MQFLLFLMGKFFIKPFCTKTQGCFLQYPCYPRSVPSQSSRCLFPFPVNSF

SEQ ID NO: 6067 - DNA, 464 bp, Homo sapiens
cactgttaaaaatacatttatcattaaaatatattacacatggagacaggatgcatcatatacagtttggaagacttgctggcccagaaaatcccacttgtttcaccgaacactcattttttcagtgattttacattttatttttagagacggggtctccctctctcacccgggctggcgtacagtgatgtggtcataggtcactgcagcctcaaactcctgtgctcaagtgagccacccacgtcagcctcccaagtaactgggaccacaggcatgcatcaccacacccagctaattttttaaaaatgtttttgtagagagggggtctccctgtgttgcccagcctggtcccaaactcctggtctcaagtgatgctcccacctcagtctcccaaagcaggtggatcacctgaggccaggcattcgagaccagcctggccaacatggtgaaaccgtgtctatact

SEQ ID NO: 6068 - protein, 35 aa, Homo sapiens
METGCIIYSLEDLLAQKIPLVSPNTHFFSDFTFYF

SEQ ID NO: 6069 - DNA, 858 bp, Homo sapiens
caccagttcctctgcaacccactctgagcctctctctcctcctattttacttgaggctgccaattaccagccccacctgtttcagctcaagagatgccttaagataattatgtgaggccacttggtagcaagaatggcagctatttcctgagcctagtaccccaattaagcccaccattggttagcacactcagcgctgtgagtcgtgaagacacgggagaaaatccaccataataaaactgacattcaattttcaactttagttatttaacacagatttttttattttttatttttttttattttgagacggagttttgctctgtcgcgcagggtggagtgcggtggcacgatctcggctcactgcaacctctgcctcctgggtgcaagcaattatcctgcctcagcctcccgagtagctgggactgcaggcacacactgccacgcccagctaattttttgcattttagtagagacggggtttcaccgtgttgcccaggctgttctaaaactcctgaactcaggtaatctgcctgcctcggcctccccaagtgctaggattacagatgtgagccaccacgcccggccttttttttttttttttcttttttgagatggagtttcactcttgttgcccaggctggagtgcgttggctgacctatgaccacatcactgtacgccagcccgggtgagagagggagaccccgtctctaaaaataaaatgtaaaatcactgaaaaaatgagtgttcggtgaaacaagtgggattttctgggccagcaagtcttccaaactgtatatgatgcatcctgtctccatgtgtaatatattttaatgataaatgtatttttaacagtg

SEQ ID NO: 6070 - protein, 44 aa, Homo sapiens [sequence omitted]

SEQ ID NO: 6071 - DNA, 763 bp, Homo sapiens
agctagcatatttggcagcttattgcttcgaaacccagctggtcaccaaaagcttgatatgacagagaagaagaaggctcaagaatttattcaccagttcctctgcaacccactctgagcctctctctcctcctattttacttgaggctgccaattaccagccccacctgtttcagctcaagagatgccttaagataattatgtgaggccacttggtagcaagaatggcagctatttcctgagcctagtaccccaattaagcccaccattggttagcacactcagcgctgtgagtcgtgaagacacgggagaaaatccaccataataaaactgacattcaattttcaactttagttatttaacacagatttttttattttttatttttttttattttgagacggagttttgctctgtcgcgcagggtggagtgcggtggcacgatctcggctcactgcaacctctgcctcctgggtgcaagcaattatcctgcctcagcctcccttacttgggaggctgacgtgggtggctcacttgagcacaggagtttgaggctgcagtgacctatgaccacatcactgtacgccagcccgggtgagagagggagaccccgtctctaaaaataaaatgtaaaatcactgaaaaaatgagtgttcggtgaaacaagtgggattttctgggccagcaagtcttccaaactgtatatgatgcatcctgtctccatgtgtaatatattttaatgataaatgtatttttaacagtg

SEQ ID NO: 6072 - protein, 66 aa, Homo sapiens [sequence omitted]

SEQ ID NO: 6073 - DNA, 2272 bp, Homo sapiens
agtactcattgatcagggcctgatcaacccttctaattatgctcctgccaaaattgacttctcataaagtgttctctctacttacttcactatttcccttctcctgccctttttttatactttctttgctctcaccccagttattaacctctgtaagtcccattttgtcttacattcaagacccaactaaaatgtcttatttctttcagtcttataggaacatgtagttaaaagtttgacttctaaattcatgttgcatttgacccgtacctctcttttgatacttatgccaagtggtaagcaaccagttttctgtgcacagtctttctcgtgcacttggatcgtgtatacagttcttggactatagtaggcacttgagaaatgattcagtgaacaaaagacaaatcccggttcttcctctttcaggtcatttctactctccccatattccacaaaaatgtcttccactacttgatggcgtttttgcgagaactgctgaaaaattcagcaaaaaatcatttggatgagaatattctagctagcatatttggcagcttattgcttcgaaacccagctggtcaccaaaagcttgatatgacagagaagaagaaggctcaagaatttattcaccagttcctctgcaacccactctgagcctctctctcctcctattttacttgaggctgccaattaccagccccacctgtttcagctcaagagatgccttaagataattatgtgaggccacttggtagcaagaatggcagctatttcctgagcctagtaccccaattaagcccaccattggttagcacactcagcgctgtgagtcgtgaagacacgggagaaaatccaccataataaaactgacattcaattttcaactttagttatttaacacagatttttttattttttatttttttttattttgagacggagttttgctctgtcgcgcagggtggagtgcggtggcacgatctcggctcactgcaacctctgcctcctgggtgcaagcaattatcctgcctcagcctcccgagtagctgggactgcaggcacacactgccacgcccagctaattttttgcattttagtagagacggggtttcaccgtgttgcccaggctgttctaaaactcctgaactcaggtaatctgcctgcctcggcctccccaagtgctaggattacagatgtgagccaccacgcccggccttttttttttttttttcttttttgagatggagtttcactcttgttgcccaggctggagtgcgttggcgtggtcttggctcactgcaacctctgcctccttggttcaagcaattctcctgcctcagcctctcgagtagctgggattataggcgtccgccaccatgcctggctaatttttttgtgtgtttttagtatagacacggtttcaccatgttggccaggctggtctcgaatgcctggcctcaggtgatccacctgccttggcctcccaaagtgctgggattacaggcatgaaccaccacgcctggcctaaaatgtttttaaataactgtacttgtactcactcaccctacctccagggcatagtcagtctgggctgagatccccatgatcagatatttgatggaaagtcctgaaaggccaatgagttggatggcaagaatgcaggcagaagctgctggataaaataggctacagccacctcagatgctttcagtgctctgtctgaggatgtgtatatgcatatgcaaactcgacccccgttcctgcccagataatggctcaataactctgaggctggttgctcagcctctgagggcaatacaggcatttaaaaaattaaaatgaccaggcacagtggctcacgcctgtaatctcggcactttgggagactgaggtgggagcatcacttgagaccaggagtttgggaccaggctgggcaacacagggagaccccctctctacaaaaacatttttaaaaaattagctgggtgtggtgatgcatgcctgtggtcccagttacttgggaggctgacgtgggtggctcacttgagcacaggagtttgaggctgcagtgacctatgaccacatcactgtacgccagcccgggtgagagagggagaccccgtctctaaaaataaaatgtaaaatcactgaaaaaatgagtgttcggtgaaacaagtgggattttctgggccagcaagtcttccaaactgtatatgatgcatcctgtctccatgtgtaatatattttaatgataaatgtatttttaacagtg

SEQ ID NO: 6074 - protein, 59 aa, Homo sapiens
MAFLRELLKNSAKNHLDENILASIFGSLLLRNPAGHQKLDMTEKKKAQEFIHQFLCNPL

SEQ ID NO: 6075 - DNA, 3905 bp, Homo sapiens
gcggcgggatgaggagcttgaggaagcaggcagggaaatgtctgccgccgccggctctcgggagcgcaacactgcaggtggttctaactttgatggtttgagaccaaatgggaagggagtgcctatggaccaaagctccaggggtcaagataaaccagaaagcttgcaaccaagacagaataaatccaagtccgaaattactgacatggttcgctcctccactatcacagtgtcggacaaggctcatattttatccatgcagaagtttggactgcgagatacaattgtgaaatcacatctactacagaaagaagaggattacacctatatccagaacttcaggttttttgcgggaacatacaatgtaaatgggcagtcccccaaagaatgcctccggctgtggctgagcaatggtatccaggccccagatgtctattgtgtagggttccaggagcttgatctgagtaaggaagcttttttctttcacgataccccaaaggaggaagagtggttcaaagctgtgtcagagggtcttcatccagatgccaaatatgcaaaggtgaagcttatccgactggttgggattatgctgctgttatatgtcaaacaggagcatgcagcttatatctcagaagtggaagccgagactgtggggacaggaatcatggggaggatgggcaacaagggaggcgtggcgatcaggttccagttccacaacaccagcatctgcgttgtgaattctcacttggcagcccacattgaagagtatgagaggaggaaccaggactataaggacatttgttctcgaatgcagttttgtcagcctgacccaagccttccccctctcaccatcagcaaccatgatgtgatcttgtggctgggggacctcaactacaggatagaagagctggatgtggaaaaagtgaaaaagctcatcgaagagaaggactttcaaatgctgtatgcatatgatcagctgaaaattcaggtggccgcaaagactgtctttgaaggcttcacagagggtgagctcacattccagcctacttacaagtatgatacgggctctgacgactgggataccagtgagaagtgccgtgctcctgcctggtgtgatcggattctctggaaagggaagaacatcactcagctgagttaccagagccacatggccctgaagaccagtgaccacaagcctgtcagctcagtgtttgacatcggggtgagggtcgtaaatgacgagctttaccggaagacactggaggaaattgttcgctccctggataagatggaaaatgccaacattccttctgtgtccctgtccaagcgagagttctgttttcagaatgtgaagtacatgcaattgaaagtagaatcctttacaattcataatggacaagtaccctgtcattttgaattcatcaacaagcctgatgaagagtcttactgtaagcagtggctgaatgccaaccccagcagaggcttcctcctgccagattctgatgttgagattgacttggagctcttcgtaaataagatgacagctacaaagctcaactcgggtgaagacaaaattgaggacattctggttctgcacttggacaggggaaaggattactttttgtctgtgtctgggaactacctgcccagctgttttgggtctcccattcatacactgtgttacatgagagagccaatcttggacctaccacttgaaaccattagtgagctgactctgatgccagtatggactggagatgatgggagccagttggatagccccatggaaatccccaaagagctctggatgatggttgattacctgtaccgaaatgctgtccagcaggaagatctgtttcagcaaccaggcctgaggtcagaatttgaacatatcagggactgcttggatactggaatgattgataacctctctgccagcaatcattctgtagccgaagccctgctgcttttcctggagagccttccagagcctgtcatctgttacagcacctaccataactgcttggagtgttctggcaactacacagcaagcaaacaggtcatttctactctccccatattccacaaaaatgtcttccactacttgatggcgtttttgcgagaactgctgaaaaattcagcaaaaaatcatttggatgagaatattctagctagcatatttggcagcttattgcttcgaaacccagctggtcaccaaaagcttgatatgacagagaagaagaaggctcaagaatttattcaccagttcctctgcaacccactctgagcctctctctcctcctattttacttgaggctgccaattaccagccccacctgtttcagctcaagagatgccttaagataattatgtgaggccacttggtagcaagaatggcagctatttcctgagcctagtaccccaattaagcccaccattggttagcacactcagcgctgtgagtcgtgaagacacgggagaaaatccaccataataaaactgacattcaattttcaactttagttatttaacacagatttttttattttttatttttttttattttgagacggagttttgctctgtcgcgcagggtggagtgcggtggcacgatctcggctcactgcaacctctgcctcctgggtgcaagcaattatcctgcctcagcctcccgagtagctgggactgcaggcacacactgccacgcccagctaattttttgcattttagtagagacggggtttcaccgtgttgcccaggctgttctaaaactcctgaactcaggtaatctgcctgcctcggcctccccaagtgctaggattacagatgtgagccaccacgcccggccttttttttttttttttcttttttgagatggagtttcactcttgttgcccaggctggagtgcgttggcgtggtcttggctcactgcaacctctgcctccttggttcaagcaattctcctgcctcagcctctcgagtagctgggattataggcgtccgccaccatgcctggctaatttttttgtgtgtttttagtatagacacggtttcaccatgttggccaggctggtctcgaatgcctggcctcaggtgatccacctgccttggcctcccaaagtgctgggattacaggcatgaaccaccacgcctggcctaaaatgtttttaaataactgtacttgtactcactcaccctacctccagggcatagtcagtctgggctgagatccccatgatcagatatttgatggaaagtcctgaaaggccaatgagttggatggcaagaatgcaggcagaagctgctggataaaataggctacagccacctcagatgctttcagtgctctgtctgaggatgtgtatatgcatatgcaaactcgacccccgttcctgcccagataatggctcaataactctgaggctggttgctcagcctctgagggcaatacaggcatttaaaaaattaaaatgaccaggcacagtggctcacgcctgtaatctcggcactttgggagactgaggtgggagcatcacttgagaccaggagtttgggaccaggctgggcaacacagggagaccccctctctacaaaaacatttttaaaaaattagctgggtgtggtgatgcatgcctgtggtcccagttacttgggaggctgacgtgggtggctcacttgagcacaggagtttgaggctgcagtgacctatgaccacatcactgtacgccagcccgggtgagagagggagaccccgtctctaaaaataaaatgtaaaatcactgaaaaaatgagtgttcggtgaaacaagtgggattttctgggccagcaagtcttccaaactgtatatgatgcatcctgtctccatgtgtaatatattttaatgataaatgtatttttaacagtg

SEQ ID NO: 6076 - protein, 749 aa, Homo sapiens
MSAAAGSRERNTAGGSNFDGLRPNGKGVPMDQSSRGQDKPESLQPRQNKSKSEITDMVRSSTITVSDKAHILSMQKFGLRDTIVKSHLLQKEEDYTYIQNFRFFAGTYNVNGQSPKECLRLWLSNGIQAPDVYCVGFQELDLSKEAFFFHDTPKEEEWFKAVSEGLHPDAKYAKVKLIRLVGIMLLLYVKQEHAAYISEVEAETVGTGIMGRMGNKGGVAIRFQFHNTSICVVNSHLAAHIEEYERRNQDYKDICSRMQFCQPDPSLPPLTISNHDVILWLGDLNYRIEELDVEKVKKLIEEKDFQMLYAYDQLKIQVAAKTVFEGFTEGELTFQPTYKYDTGSDDWDTSEKCRAPAWCDRILWKGKNITQLSYQSHMALKTSDHKPVSSVFDIGVRVVNDELYRKTLEEIVRSLDKMENANIPSVSLSKREFCFQNVKYMQLKVESFTIHNGQVPCHFEFINKPDEESYCKQWLNANPSRGFLLPDSDVEIDLELFVNKMTATKLNSGEDKIEDILVLHLDRGKDYFLSVSGNYLPSCFGSPIHTLCYMREPILDLPLETISELTLMPVWTGDDGSQLDSPMEIPKELWMMVDYLYRNAVQQEDLFQQPGLRSEFEHIRDCLDTGMIDNLSASNHSVAEALLLFLESLPEPVICYSTYHNCLECSGNYTASKQVISTLPIFHKNVFHYLMAFLRELLKNSAKNHLDENILASIFGSLLLRNPAGHQKLDMTEKKKAQEFIHQFLCNPL

SEQ ID NO: 6077 - DNA, 4000 bp, Homo sapiens
cccggaacctggggcagcggagtcccgtgcgccctgtggtgacagctcaggagggtgtgtgcgctcagcaggggccagcatggaccagtctgtggcaatccaggagacgctggctgagggggaatactgcgtcatcgcggtgcaaggtgtgctgtgtgagggggacagccggcagagccgcctcctgggactcgtgcgctaccgcctggagcacggcggccaggaacacgctctcttcctctatacgcaccggaggatggccattaccggggacgatgtctctctggaccagatagtgccagtctcgcgggattttacgctggaagaagtgtccccagatggtgaactctacatccttggctcagatgtgaccgtccagctggacacagcagagcttagcctcgtattccaactgccctttggttcacaaaccaggatgttcctccacgaagttgccagggcctgtccaggcttcgattctgcgacccgggatcctgaattcctgtggctgtctcggtataggtgcgcagagctggagctggagatgccaacgccgcgcggttgtaactcggccctagttacctggccagggtacgcgacaattggcggaggtggttctaactttgatggtttgagaccaaatgggaagggagtgcctatggaccaaagctccaggggtcaagataaaccagaaagcttgcaaccaagacagaataaatccaagtccgaaattactgacatggttcgctcctccactatcacagtgtcggacaaggctcatattttatccatgcagaagtttggactgcgagatacaattgtgaaatcacatctactacagaaagaagaggattacacctatatccagaacttcaggttttttgcgggaacatacaatgtaaatgggcagtcccccaaagaatgcctccggctgtggctgagcaatggtatccaggccccagatgtctattgtgtagggttccaggagcttgatctgagtaaggaagcttttttctttcacgataccccaaaggaggaagagtggttcaaagctgtgtcagagggtcttcatccagatgccaaatatgcaaaggtgaagcttatccgactggttgggattatgctgctgttatatgtcaaacaggagcatgcagcttatatctcagaagtggaagccgagactgtggggacaggaatcatggggaggatgggcaacaagggaggcgtggcgatcaggttccagttccacaacaccagcatctgcgttgtgaattctcacttggcagcccacattgaagagtatgagaggaggaaccaggactataaggacatttgttctcgaatgcagttttgtcagcctgacccaagccttccccctctcaccatcagcaaccatgatgtgatcttgtggctgggggacctcaactacaggatagaagagctggatgtggaaaaagtgaaaaagctcatcgaagagaaggactttcaaatgctgtatgcatatgatcagctgaaaattcaggtggccgcaaagactgtctttgaaggcttcacagagggtgagctcacattccagcctacttacaagtatgatacgggctctgacgactgggataccagtgagaagtgccgtgctcctgcctggtgtgatcggattctctggaaagggaagaacatcactcagctgagttaccagagccacatggccctgaagaccagtgaccacaagcctgtcagctcagtgtttgacatcggggtgagggtcgtaaatgacgagctttaccggaagacactggaggaaattgttcgctccctggataagatggaaaatgccaacattccttctgtgtccctgtccaagcgagagttctgttttcagaatgtgaagtacatgcaattgaaagtagaatcctttacaattcataatggacaagtaccctgtcattttgaattcatcaacaagcctgatgaagagtcttactgtaagcagtggctgaatgccaaccccagcagaggcttcctcctgccagattctgatgttgagattgacttggagctcttcgtaaataagatgacagctacaaagctcaactcgggtgaagacaaaattgaggacattctggttctgcacttggacaggggaaaggattactttttgtctgtgtctgggaactacctgcccagctgttttgggtctcccattcatacactgtgttacatgagagagccaatcttggacctaccacttgaaaccattagtgagctgctagcatatttggcagcttattgcttcgaaacccagctggtcaccaaaagcttgatatgacagagaagaagaaggctcaagaatttattcaccagttcctctgcaacccactctgagcctctctctcctcctattttacttgaggctgccaattaccagccccacctgtttcagctcaagagatgccttaagataattatgtgaggccacttggtagcaagaatggcagctatttcctgagcctagtaccccaattaagcccaccattggttagcacactcagcgctgtgagtcgtgaagacacgggagaaaatccaccataataaaactgacattcaattttcaactttagttatttaacacagatttttttattttttatttttttttattttgagacggagttttgctctgtcgcgcagggtggagtgcggtggcacgatctcggctcactgcaacctctgcctcctgggtgcaagcaattatcctgcctcagcctcccgagtagctgggactgcaggcacacactgccacgcccagctaattttttgcattttagtagagacggggtttcaccgtgttgcccaggctgttctaaaactcctgaactcaggtaatctgcctgcctcggcctccccaagtgctaggattacagatgtgagccaccacgcccggccttttttttttttttttcttttttgagatggagtttcactcttgttgcccaggctggagtgcgttggcgtggtcttggctcactgcaacctctgcctccttggttcaagcaattctcctgcctcagcctctcgagtagctgggattataggcgtccgccaccatgcctggctaatttttttgtgtgtttttagtatagacacggtttcaccatgttggccaggctggtctcgaatgcctggcctcaggtgatccacctgccttggcctcccaaagtgctgggattacaggcatgaaccaccacgcctggcctaaaatgtttttaaataactgtacttgtactcactcaccctacctccagggcatagtcagtctgggctgagatccccatgatcagatatttgatggaaagtcctgaaaggccaatgagttggatggcaagaatgcaggcagaagctgctggataaaataggctacagccacctcagatgctttcagtgctctgtctgaggatgtgtatatgcatatgcaaactcgacccccgttcctgcccagataatggctcaataactctgaggctggttgctcagcctctgagggcaatacaggcatttaaaaaattaaaatgaccaggcacagtggctcacgcctgtaatctcggcactttgggagactgaggtgggagcatcacttgagaccaggagtttgggaccaggctgggcaacacagggagaccccctctctacaaaaacatttttaaaaaattagctgggtgtggtgatgcatgcctgtggtcccagttacttgggaggctgacgtgggtggctcacttgagcacaggagtttgaggctgcagtgacctatgaccacatcactgtacgccagcccgggtgagagagggagaccccgtctctaaaaataaaatgtaaaatcactgaaaaaatgagtgttcggtgaaacaagtgggattttctgggccagcaagtcttccaaactgtatatgatgcatcctgtctccatgtgtaatatattttaatgataaatgtatttttaacagtg

SEQ ID NO: 6078 - protein, 748 aa, Homo sapiens [sequence omitted]

SEQ ID NO: 6079 - DNA, 882 bp, Homo sapiens
agtactcattgatcagggcctgatcaacccttctaattatgctcctgccaaaattgacttctcataaagtgttctctctacttacttcactatttcccttctcctgccctttttttatactttctttgctctcaccccagttattaacctctgtaagtcccattttgtcttacattcaagacccaactaaaatgtcttatttctttcagtcttataggaacatgtagttaaaagtttgacttctaaattcatgttgcatttgacccgtacctctcttttgatacttatgccaagtggtaagcaaccagttttctgtgcacagtctttctcgtgcacttggatcgtgtatacagttcttggactatagtaggcacttgagaaatgattcagtgaacaaaagacaaatcccggttcttcctctttcaggtcatttctactctccccatattccacaaaaatgtcttccactacttgatggcgtttttgcgagaactgctgaaaaattcagcaaaaaatcatttggatgagaatattctagctagcatatttggcagcttattgcttcgaaacccagctggtcaccaaaagcttgatatgacagagaagaagaaggctcaagaatttattcaccagttcctctgcaacccactctgagcctctctctcctcctattttacttgaggctgccaattaccagccccacctgtttcagctcaagagatgccttaagataattatgtgaggccacttggtagcaagaatggcagctatttcctgagcctagtaccccaattaagcccaccattggttagcacactcagcgctgtgagtcgtgaagacacgggagaaaatccaccataataaaactgacattcaattttc

SEQ ID NO: 6080 - protein, 59 aa, Homo sapiens; identical to SEQ ID NO: 6074

SEQ ID NO: 6081 - DNA, 2515 bp, Homo sapiens
gcggcgggatgaggagcttgaggaagcaggcagggaaatgtctgccgccgccggctctcgggagcgcaacactgcaggtggttctaactttgatggtttgagaccaaatgggaagggagtgcctatggaccaaagctccaggggtcaagataaaccagaaagcttgcaaccaagacagaataaatccaagtccgaaattactgacatggttcgctcctccactatcacagtgtcggacaaggctcatattttatccatgcagaagtttggactgcgagatacaattgtgaaatcacatctactacagaaagaagaggattacacctatatccagaacttcaggttttttgcgggaacatacaatgtaaatgggcagtcccccaaagaatgcctccggctgtggctgagcaatggtatccaggccccagatgtctattgtgtagggttccaggagcttgatctgagtaaggaagcttttttctttcacgataccccaaaggaggaagagtggttcaaagctgtgtcagagggtcttcatccagatgccaaatatgcaaaggtgaagcttatccgactggttgggattatgctgctgttatatgtcaaacaggagcatgcagcttatatctcagaagtggaagccgagactgtggggacaggaatcatggggaggatgggcaacaagggaggcgtggcgatcaggttccagttccacaacaccagcatctgcgttgtgaattctcacttggcagcccacattgaagagtatgagaggaggaaccaggactataaggacatttgttctcgaatgcagttttgtcagcctgacccaagccttccccctctcaccatcagcaaccatgatgtgatcttgtggctgggggacctcaactacaggatagaagagctggatgtggaaaaagtgaaaaagctcatcgaagagaaggactttcaaatgctgtatgcatatgatcagctgaaaattcaggtggccgcaaagactgtctttgaaggcttcacagagggtgagctcacattccagcctacttacaagtatgatacgggctctgacgactgggataccagtgagaagtgccgtgctcctgcctggtgtgatcggattctctggaaagggaagaacatcactcagctgagttaccagagccacatggccctgaagaccagtgaccacaagcctgtcagctcagtgtttgacatcggggtgagggtcgtaaatgacgagctttaccggaagacactggaggaaattgttcgctccctggataagatggaaaatgccaacattccttctgtgtccctgtccaagcgagagttctgttttcagaatgtgaagtacatgcaattgaaagtagaatcctttacaattcataatggacaagtaccctgtcattttgaattcatcaacaagcctgatgaagagtcttactgtaagcagtggctgaatgccaaccccagcagaggcttcctcctgccagattctgatgttgagattgacttggagctcttcgtaaataagatgacagctacaaagctcaactcgggtgaagacaaaattgaggacattctggttctgcacttggacaggggaaaggattactttttgtctgtgtctgggaactacctgcccagctgttttgggtctcccattcatacactgtgttacatgagagagccaatcttggacctaccacttgaaaccattagtgagctgactctgatgccagtatggactggagatgatgggagccagttggatagccccatggaaatccccaaagagctctggatgatggttgattacctgtaccgaaatgctgtccagcaggaagatctgtttcagcaaccaggcctgaggtcagaatttgaacatatcagggactgcttggatactggaatgattgataacctctctgccagcaatcattctgtagccgaagccctgctgcttttcctggagagccttccagagcctgtcatctgttacagcacctaccataactgcttggagtgttctggcaactacacagcaagcaaacaggtcatttctactctccccatattccacaaaaatgtcttccactacttgatggcgtttttgcgagaactgctgaaaaattcagcaaaaaatcatttggatgagaatattctagctagcatatttggcagcttattgcttcgaaacccagctggtcaccaaaagcttgatatgacagagaagaagaaggctcaagaatttattcaccagttcctctgcaacccactctgagcctctctctcctcctattttacttgaggctgccaattaccagccccacctgtttcagctcaagagatgccttaagataattatgtgaggccacttggtagcaagaatggcagctatttcctgagcctagtaccccaattaagcccaccattggttagcacactcagcgctgtgagtcgtgaagacacgggagaaaatccaccataataaaactgacattcaattttc

SEQ ID NO: 6082 - protein, 749 aa, Homo sapiens; identical to SEQ ID NO: 6076

SEQ ID NO: 6083 - DNA, 3058 bp, Homo sapiens
agtcactgtcccggaacctggggcagcggagtcccgtgcgccctgtggtgacagctcaggagggtgtgtgcgctcagcaggggccagcatggaccagtctgtggcaatccaggagacgctggctgagggggaatactgcgtcatcgcggtgcaaggtgtgctgtgtgagggggacagccggcagagccgcctcctgggactcgtgcgctaccgcctggagcacggcggccaggaacacgctctcttcctctatacgcaccggaggatggccattaccggggacgatgtctctctggaccagatagtgccagtctcgcgggattttacgctggaagaagtgtccccagatggtgaactctacatccttggctcagatgtgaccgtccagctggacacagcagagcttagcctcgtattccaactgccctttggttcacaaaccaggatgttcctccacgaagttgccagggcctgtccaggcttcgattctgcgacccgggatcctgaattcctgtggctgtctcggtataggtgcgcagagctggagctggagatgccaacgccgcgcggttgtaactcggccctagttacctggccagggtacgcgacaattggcggaggtggttctaactttgatggtttgagaccaaatgggaagggagtgcctatggaccaaagctccaggggtcaagataaaccagaaagcttgcaaccaagacagaataaatccaagtccgaaattactgacatggttcgctcctccactatcacagtgtcggacaaggctcatattttatccatgcagaagtttggactgcgagatacaattgtgaaatcacatctactacagaaagaagaggattacacctatatccagaacttcaggttttttgcgggaacatacaatgtaaatgggcagtcccccaaagaatgcctccggctgtggctgagcaatggtatccaggccccagatgtctattgtgtagggttccaggagcttgatctgagtaaggaagcttttttctttcacgataccccaaaggaggaagagtggttcaaagctgtgtcagagggtcttcatccagatgccaaatatgcaaaggtgaagcttatccgactggttgggattatgctgctgttatatgtcaaacaggagcatgcagcttatatctcagaagtggaagccgagactgtggggacaggaatcatggggaggatgggcaacaagggaggcgtggcgatcaggttccagttccacaacaccagcatctgcgttgtgaattctcacttggcagcccacattgaagagtatgagaggaggaaccaggactataaggacatttgttctcgaatgcagttttgtcagcctgacccaagccttccccctctcaccatcagcaaccatgatgtgatcttgtggctgggggacctcaactacaggatagaagagctggatgtggaaaaagtgaaaaagctcatcgaagagaaggactttcaaatgctgtatgcatatgatcagctgaaaattcaggtggccgcaaagactgtctttgaaggcttcacagagggtgagctcacattccagcctacttacaagtatgatacgggctctgacgactgggataccagtgagaagtgccgtgctcctgcctggtgtgatcggattctctggaaagggaagaacatcactcagctgagttaccagagccacatggccctgaagaccagtgaccacaagcctgtcagctcagtgtttgacatcggggtgagggtcgtaaatgacgagctttaccggaagacactggaggaaattgttcgctccctggataagatggaaaatgccaacattccttctgtgtccctgtccaagcgagagttctgttttcagaatgtgaagtacatgcaattgaaagtagaatcctttacaattcataatggacaagtaccctgtcattttgaattcatcaacaagcctgatgaagagtcttactgtaagcagtggctgaatgccaaccccagcagaggcttcctcctgccagattctgatgttgagattgacttggagctcttcgtaaataagatgacagctacaaagctcaactcgggtgaagacaaaattgaggacattctggttctgcacttggacaggggaaaggattactttttgtctgtgtctgggaactacctgcccagctgttttgggtctcccattcatacactgtgttacatgagagagccaatcttggacctaccacttgaaaccattagtgagctgactctgatgccagtatggactggagatgatgggagccagttggatagccccatggaaatccccaaagagctctggatgatggttgattacctgtaccgaaatgctgtccagcaggaagatctgtttcagcaaccaggcctgaggtcagaatttgaacatatcagggactgcttggatactggaatgattgataacctctctgccagcaatcattctgtagccgaagccctgctgcttttcctggagagccttccagagcctgtcatctgttacagcacctaccataactgcttggagtgttctggcaactacacagcaagcaaacaggtcatttctactctccccatattccacaaaaatgtcttccactacttgatggcgtttttgcgagaactgctgaaaaattcagcaaaaaatcatttggatgagaatattctagctagcatatttggcagcttattgcttcgaaacccagctggtcaccaaaagcttgatatgacagagaagaagaaggctcaagaatttattcaccagttcctctgcaacccactctgagcctctctctcctcctattttacttgaggctgccaattaccagccccacctgtttcagctcaagagatgccttaagataattatgtgaggccacttggtagcaagaatggcagctatttcctgagcctagtaccccaattaagcccaccattggttagcacactcagcgctgtgagtcgtgaagacacgggagaaaatccaccataataaaactgacattcaattttc

SEQ ID NO: 6084 - protein, 913 aa, Homo sapiens
MDQSVAIQETLAEGEYCVIAVQGVLCEGDSRQSRLLGLVRYRLEHGGQEHALFLYTHRRMAITGDDVSLDQIVPVSRDFTLEEVSPDGELYILGSDVTVQLDTAELSLVFQLPFGSQTRMFLHEVARACPGFDSATRDPEFLWLSRYRCAELELEMPTPRGCNSALVTWPGYATIGGGGSNFDGLRPNGKGVPMDQSSRGQDKPESLQPRQNKSKSEITDMVRSSTITVSDKAHILSMQKFGLRDTIVKSHLLQKEEDYTYIQNFRFFAGTYNVNGQSPKECLRLWLSNGIQAPDVYCVGFQELDLSKEAFFFHDTPKEEEWFKAVSEGLHPDAKYAKVKLIRLVGIMLLLYVKQEHAAYISEVEAETVGTGIMGRMGNKGGVAIRFQFHNTSICVVNSHLAAHIEEYERRNQDYKDICSRMQFCQPDPSLPPLTISNHDVILWLGDLNYRIEELDVEKVKKLIEEKDFQMLYAYDQLKIQVAAKTVFEGFTEGELTFQPTYKYDTGSDDWDTSEKCRAPAWCDRILWKGKNITQLSYQSHMALKTSDHKPVSSVFDIGVRVVNDELYRKTLEEIVRSLDKMENANIPSVSLSKREFCFQNVKYMQLKVESFTIHNGQVPCHFEFINKPDEESYCKQWLNANPSRGFLLPDSDVEIDLELFVNKMTATKLNSGEDKIEDILVLHLDRGKDYFLSVSGNYLPSCFGSPIHTLCYMREPILDLPLETISELTLMPVWTGDDGSQLDSPMEIPKELWMMVDYLYRNAVQQEDLFQQPGLRSEFEHIRDCLDTGMIDNLSASNHSVAEALLLFLESLPEPVICYSTYHNCLECSGNYTASKQVISTLPIFHKNVFHYLMAFLRELLKNSAKNHLDENILASIFGSLLLRNPAGHQKLDMTEKKKAQEFIHQFLCNPL

SEQ ID NO: 6085 - DNA, 747 bp, Homo sapiens
tgaaataaacagccctgttgctcacacaaagcctgttggtggtctcttcacaaggatgcgtgtgacatttggtgccaaaacccaggacaggaggactccttcaggagaccagtcccctgtcttcgccctcactccgtgacctcaggtcctcagaccaaccagcccaaggaacatctcaccaacttcaaattgggaccccactggaaatcagactgtccaactcacccagcagccactcccagagcccctggaactctggcccaaggctctctgactgactccttcccagatcgtctcagcttagcggctgaagactgacactgcccgatcgcctcggaagcctacaggaccatcacagatgctctggataactcttacagtggagggttaagacccaaactggttcaattggcatctgacgccctttgcaaatggctctactctccttcatcaatccatcacccaaagacagcctgatctaaaaggatagattcttcacacatgccatccgcactcctgccttcatatgaagttactcctactttttggccacctctccttcgaagcccagcctcaactcccacctcctccttcatgaagccctccccagccacataagttctcagtagtcatttctctgaattttgagtgtcttcctgtctatataatgtgtctggcactttaagaaacattagactgttttggaaaatgccttgggctttggaataaaatagagctggtgatgtt

SEQ ID NO: 6086 - protein, 38 aa, Homo sapiens
MPSALLPSYEVTPTFWPPLLRSPASTPTSSFMKPSPAT

SEQ ID NO: 6087 - DNA, 3806 bp, Homo sapiens
agggtgtgtgcgctcagcaggggccagcatggaccagtctgtggcaatccaggagacgctggctgagggggaatactgcgtcatcgcggtgcaaggtgtgctgtgtgagggggacagccggcagagccgcctcctgggactcgtgcgctaccgcctggagcacggcggccaggaacacgctctcttcctctatacgcaccggaggatggccattaccggggacgatgtctctctggaccagatagtgccagtctcgcgggattttacgctggaagaagtgtccccagatggtgaactctacatccttggctcagatgtgaccgtccagctggacacagcagagcttagcctcgtattccaactgccctttggttcacaaaccaggatgttcctccacgaagttgccagggcctgtccaggcttcgattctgcgacccgggatcctgaattcctgtggctgtctcggtataggtgcgcagagctggagctggagatgccaacgccgcgcggttgtaactcggccctagttacctggccagggtacgcgacaattggcggaggcaggtatccgtcccggaagaaacggtggggattggaggaggcccggccacagggggcgggctccgttctgttttggggcggagcgatggagaagacaggctttcgattgatggagcgggcacacgggggcgggttcgtctgggggcggagcgcgcgggacgggcggcgggatgaggagcttgaggaagcaggcagggaaatgtctgccgccgccggctctcgggagcgcaacactgcaggttcggcgggcggcgggaagctgggctggggagctgggccgggggcggcggtgcgcccggccctcgggtgggcagggtcggcggtttggccagtggacgctcggggcgaagaccaaagtcctggtggccctctggaggctgggacactggggcagaagttctgtgatgttcttcttaggcgtgcgtgacgagggtaggcgggtgggaatggggtacttgggaatccggaggctggggttttagtaaagctccgttccgaactcgctgtgtgacctcgggccactcgctgcccctctctgggcctgttgctccatctgagcttgctcttcaatcctgatcttccgagtttgtcgcgtggggcgggtgggggagtggtgccctgcctacgatagagtcttcctttgggtgaggtatggtatgtgttggggctctgtcagttctcagcccctgtgatgatagcgcagtgtacagggctggagtcttggggagccctgtctactctgggactagaggccaggatgaagttacaggttataaaaggactaggttttttcccacccagcagttggtggataatggggagcacagaaggccagttgctgagcaggagcttgtcgtttggagatgggaggctcagggctgaaatttgggtgagtccgtgctctgggaggacctgcagacctgtctttttttgtccagctccagggttttctgcaagggcccctggtgcttttttcccctgggtgtgtccgtgaggctccatttatgtgtgagctttggcatgacccctagtacctatttgtgacagtcatttgccagcaatgaagagcctgtcaagtagctgtgtaaagtgtgggccagccctccacttgctcttacaaggcttggaaactatgaggggcagggaggagtggcatgttgcacaagagtttgtaaactgagaggaaacgaggtgagcagaggacttcctcggtgcttgtttctccttcattgcagccatcacaaggtgcgatcgaagcgcctgatggtgctgatagtttgcatcttccttgggcttatctcagagttcactatcactagagtttccatgacattctgggctatggtgctgggacgggtgagagtttaagagcacctcatctccttgccccttcacaagagactgccagaatccagacaattggcggaggacaaggccaatggcagcagaaagaggtgggtgctgtgttctcagccagtacaccagagccaggccatgcaggcacttcattcccttagtcttctatgacaagtcaggccagctagctctgaagccagttagctgccccgactgagaaatgtgcagggatctcaatctttcatttcctttcaaaaaacagagactagccatatgctggtgaggaattattgttacggtttcggttttatttttattttaaaataatttgaaagctgaacatggtggcgcgtacctgtagtcccagccacttgagaggctgaggtggaaggcttgagcccaggagtttgagggtgatgtgcactatgattgatcctgtgaattagttgctgcactccagcctaggcaacatagtgagactgtctctaaaataaataaataaatagttttaaaaattttgtcagccaggcgtggtgactcatgcctgtaatcccagcactgtgggaagctgaggcgggcggatcacctgaggtcaggagttcgagaccagcctggccaacatggcgaaactccgtcactactaaaaatacaaaaattagatgggcgtggtggcaggtgcctgtaatcccatgtactctggaggctgaggtaggagaattgcttgaacccaggaggcagaggttgcagtgagccgagatcgtgccattgcattccagcctgggagacggagcaagactccatctcgaaaaaaaaaaaaatttttctcttaaaatacctacagtaagtggggtgacactattaattgctaagttgctcctgctaaaattggtaagaaatggtatcaagcccctcagttctatttgggtcatctgtttccagagttattatggcctcagaggagagttacatcttctataacaggtaggaagaaccctttgggctgcctttggatgtcgatacaggccccaagggaaacagagtagtagattgttttttcctatatgcatatgatcaaaatacccactttttgatagcctagagaacccaaagcaaacagttgcttaaaaatgctgtttctggctgggcacgatgactcatgcctttaatcccaacactttggaaggctgaggcgggcggatcatgaggtcaggagttcgagaccagcctggccaacatggcgaaaccctgtctctactaaaaatacaaaaattagatgggtgtagtggcacatggctataatcccaggtacttgggaagctgaggtaggagaatcgcttgaacccaggaggcagaggttgcagtgcgctgagatcgtgccactgcactccagcctgggagacagagcgagactccatctcaaaaaaaaaaaaatttttttttatcttatcgtaatacctacagtaagtgactgggtgacactgttaattgctaagttgctgctgctaaaattggtaagaaatggtatcaagctctccagttctgtttgggtcatctctgtttccagagttgttctggcctcagaggagagttacatcttctataacaggtgggaagaaccctttgggctgcctctggatgtcgatacaggccccaagggaaacggagtagtagatttgttttttcctatatgcatatgatcaaaatacccactacttgatagcctagagaaaccaaggcaaatggttgcttaaaaatgctgtttttggctgggcgcggtggctcatgcctgtaatcccagcactttgggaggctgaggcaggcggatcacaaggtcaggagatcaagaccatcctggctaacacggtgaaaccccatctctactaaaaata

SEQ ID NO: 6088 - protein, 319 aa, Homo sapiens
MDQSVAIQETLAEGEYCVIAVQGVLCEGDSRQSRLLGLVRYRLEHGGQEHALFLYTHRRMAITGDDVSLDQIVPVSRDFTLEEVSPDGELYILGSDVTVQLDTAELSLVFQLPFGSQTRMFLHEVARACPGFDSATRDPEFLWLSRYRCAELELEMPTPRGCNSALVTWPGYATIGGGRYPSRKKRWGLEEARPQGAGSVLFWGGAMEKTGFRLMERAHGGGFVWGRSARDGRRDEELEEAGREMSAAAGSRERNTAGSAGGGKLGWGAGPGAAVRPALGWAGSAVWPVDARGEDQSPGGPLEAGTLGQKFCDVLLRRA

SEQ ID NO: 6089 - DNA, 4008 bp, Homo sapiens
gggctgttgggaaatgtagtcactgtcccggaacctggggcagcggagtcccgtgcgccctgtggtgacagctcaggagggtgtgtgcgctcagcaggggccagcatggaccagtctgtggcaatccaggagacgctggctgagggggaatactgcgtcatcgcggtgcaaggtgtgctgtgtgagggggacagccggcagagccgcctcctgggactcgtgcgctaccgcctggagcacggcggccaggaacacgctctcttcctctatacgcaccggaggatggccattaccggggacgatgtctctctggaccagatagtgccagtctcgcgggattttacgctggaagaagtgtccccagatggtgaactctacatccttggctcagatgtgaccgtccagctggacacagcagagcttagcctcgtattccaactgccctttggttcacaaaccaggatgttcctccacgaagttgccagggcctgtccaggcttcgattctgcgacccgggatcctgaattcctgtggctgtctcggtataggtgcgcagagctggagctggagatgccaacgccgcgcggttgtaactcggccctagttacctggccagggtacgcgacaattggcggaggcaggtatccgtcccggaagaaacggtggggattggaggaggcccggccacagggggcgggctccgttctgttttggggcggagcgatggagaagacaggctttcgattgatggagcgggcacacgggggcgggttcgtctgggggcggagcgcgcgggacgggcggcgggatgaggagcttgaggaagcaggcagggaaatgtctgccgccgccggctctcgggagcgcaacactgcaggttcggcgggcggcgggaagctgggctggggagctgggccgggggcggcggtgcgcccggccctcgggtgggcagggtcggcggtttggccagtggacgctcggggcgaagaccaaagtcctggtggccctctggaggctgggacactggggcagaagttctgtgatgttcttcttaggcgtgcgtgacgagggtaggcgggtgggaatggggtacttgggaatccggaggctggggttttagtaaagctccgttccgaactcgctgtgtgacctcgggccactcgctgcccctctctgggcctgttgctccatctgagcttgctcttcaatcctgatcttccgagtttgtcgcgtggggcgggtgggggagtggtgccctgcctacgatagagtcttcctttgggtgaggtatggtatgtgttggggctctgtcagttctcagcccctgtgatgatagcgcagtgtacagggctggagtcttggggagccctgtctactctgggactagaggccaggatgaagttacaggttataaaaggactaggttttttcccacccagcagttggtggataatggggagcacagaaggccagttgctgagcaggagcttgtcgtttggagatgggaggctcagggctgaaatttgggtgagtccgtgctctgggaggacctgcagacctgtctttttttgtccagctccagggttttctgcaagggcccctggtgcttttttcccctgggtgtgtccgtgaggctccatttatgtgtgagctttggcatgacccctagtacctatttgtgacagtcatttgccagcaatgaagagcctgtcaagtagctgtgtaaagtgtgggccagccctccacttgctcttacaaggcttggaaactatgaggggcagggaggagtggcatgttgcacaagagtttgtaaactgagaggaaacgaggtgagcagaggacttcctcggtgcttgtttctccttcattgcagccatcacaaggtgcgatcgaagcgcctgatggtgctgatagtttgcatcttccttgggcttatctcagagttcactatcactagagtttccatgacattctgggctatggtgctgggacgggtgagagtttaagagcacctcatctccttgccccttcacaagagactgccagaatccagacaattggcggaggacaaggccaatggcagcagaaagaggtgggtgctgtgttctcagccagtacaccagagccaggccatgcaggcacttcattcccttagtcttctatgacaagtcaggccagctagctctgaagccagttagctgccccgactgagaaatgtgcagggatctcaatctttcatttcctttcaaaaaacagagactagccatatgctggtgaggaattattgttacggtttcggttttatttttattttaaaataatttgaaagctgaacatggtggcgcgtacctgtagtcccagccacttgagaggctgaggtggaaggcttgagcccaggagtttgagggtgatgtgcactatgattgatcctgtgaattagttgctgcactccagcctaggcaacatagtgagactgtctctaaaataaataaataaatagttttaaaaattttgtcagccaggcgtggtgactcatgcctgtaatcccagcactgtgggaagctgaggcgggcggatcacctgaggtcaggagttcgagaccagcctggccaacatggcgaaactccgtcactactaaaaatacaaaaattagatgggcgtggtggcaggtgcctgtaatcccatgtactctggaggctgaggtaggagaattgcttgaacccaggaggcagaggttgcagtgagccgagatcgtgccattgcattccagcctgggagacggagcaagactccatctcgaaaaaaaaaaaaatttttctcttaaaatacctacagtaagtggggtgacactattaattgctaagttgctcctgctaaaattggtaagaaatggtatcaagcccctcagttctatttgggtcatctgtttccagagttattatggcctcagaggagagttacatcttctataacaggtaggaagaaccctttgggctgcctttggatgtcgatacaggccccaagggaaacagagtagtagattgttttttcctatatgcatatgatcaaaatacccactttttgatagcctagagaacccaaagcaaacagttgcttaaaaatgctgtttctggctgggcacgatgactcatgcctttaatcccaacactttggaaggctgaggcgggcggatcatgaggtcaggagttcgagaccagcctggccaacatggcgaaaccctgtctctactaaaaatacaaaaattagatgggtgtagtggcacatggctataatcccaggtacttgggaagctgaggtaggagaatcgcttgaacccaggaggcagaggttgcagtgcgctgagatcgtgccactgcactccagcctgggagacagagcgagactccatctcaaaaaaaaaaaaatttttttttatcttatcgtaatacctacagtaagtgactgggtgacactgttaattgctaagttgctgctgctaaaattggtaagaaatggtatcaagctctccagttctgtttgggtcatctctgtttccagagttgttctggcctcagaggagagttacatcttctataacaggtgggaagaaccctttgggctgcctctggatgtcgatacaggccccaagggaaacggagtagtagatttgttttttcctatatgcatatgatcaaaatacccactacttgatagcctagagaaaccaaggcaaatggttgcttaaaaatgctgtttttggctgggcgcggtggctcatgcctaatcctagcactttgggaggccgaggtgggcggatcacaagatcaggagttcaagaccaggctgggcaacatgacgaaatcctgtctctactaaaaatataaaaattaggccaggcacagtggcttatgcctgtaatcccagcactttgggaggctgaggcaggcggatcacaaggtcaggagatcaagaccatcctggctaacacggtgaaaccccatctctact

SEQ ID NO: 6090 - protein, 319 aa, Homo sapiens; identical to SEQ ID NO: 6088

SEQ ID NO: 6091 - DNA, 1156 bp, Homo sapiens
aggaagaatatgaagactcaagtgggaatgttgtgaataagaagacatacgaggatctgaaaagacaaggactgctctagtgttcagggatgtagctcagcttttgggctagcccaggcttccctaagatctgctttttctatttctcccaaccaaatcctcttaaagaccctttgctatgtagtctcatggtctagcatgcatcttgtagaaacaaggcatgctggcagattgcagggttgagatgtgttttatctgttttatattttaaaagattctgccagaaaataaaaccagaccttgttctaaagcccagggttatggaccaactcagtgcttcaggtcttaacgcctccatacctcttcctcaccaactttactagtagctgagatttaatgggcacctattatgctacatatcatgttaggtaaatctgacctgacctctttccccaccctcctttgttgctgcttccctgaatgagtattaccccaggatgaggtctgccatcagcttagttagccattgatgcaaatactagggaaagactaggaggatgagccagggttgctactaggtaacatagtgagaccctgtctcattaaaaaaaaaaaaaaggcatggtggcacgcactgtagtcccagctactcaggagactgaggctagaagatcctttgaacctaggagtttgagaccagcctgggcgatatagtgaggccccatctcaaaaaaaaaaaaaggggggggggggggagttgggctgtgttggaatgggcctgcagcccaacaaacaagggaactaggaccgacagtgacttcaccagcttgctaggtcagaatgagagactggtgggtctgtctacctgtttcttctacaagatccctatttgactgtaaaagtagctaatactcacatgttctccaatcccaggtagccatggtagagttgggtagagttgagcagctgccccaggatccaaatgtggtgtctgaaatggaaagaactaaggcaaccaggaaggcactgatctgccttataagcacagtcatctgaaagtcaggcctgctgcaggacaggatcccccagagaccccatttgcctctcaacactcagaccttcaactgttttttaataaatctactttttaaaaaaa

SEQ ID NO: 6092 - protein, 38 aa, Homo sapiens [sequence omitted]

SEQ ID NO: 6093 - DNA, 1135 bp, Homo sapiens
aggaagaatatgaagactcaagtgggaatgttgtgaataagaagacatacgaggatctgaaaagacaaggactgctctagtgttcagggatgtagctcagcttttgggctagcccaggcttccctaagatctgctttttctatttctcccaaccaaatcctcttaaagaccctttgctatgtagtctcatggtctagcatgcatcttgtagaaacaaggcatgctggcagattgcagggttgagatgtgttttatctgttttatattttaaaagattctgccagaaaataaaaccagaccttgttctaaagcccagggttatggaccaactcagtgcttcaggtcttaacgcctccatacctcttcctcaccaactttactagtagctgagatttaatgggcacctattatgctacatatcatgactaagtgtcgcaccaaggtttgccttttgtatttgcataaagaaaggagttggagctgggtgcagtggcttgtgcctgtagtcccagctacttgggaggctgaggcaggagggttgcttgagactagcctaggtaacatagtgagaccctgtctcattaaaaaaaaaaaaaaggcatggtggcacgcactgtagtcccagctactcaggagactgaggctagaagatcctttgaacctaggagtttgagaccagcctgggcgatatagtgaggccccatctcaaaaaaaaaaaaaggggggggggggggagttgggctgtgttggaatgggcctgcagcccaacaaacaagggaactaggaccgacagtgacttcaccagcttgctaggtcagaatgagagactggtgggtctgtctacctgtttcttctacaagatccctatttgactgtaaaagtagctaatactcacatgttctccaatcccaggtagccatggtagagttgggtagagttgagcagctgccccaggatccaaatgtggtgtctgaaatggaaagaactaaggcaaccaggaaggcactgatctgccttataagcacagtcatctgaaagtcaggcctgctgcaggacaggatcccccagagaccccatttgcctctcaacactcagaccttcaactgttttttaataaatctactttttaaaaaaa

SEQ ID NO: 6094 - protein, 69 aa, Homo sapiens [sequence omitted]

SEQ ID NO: 6095 - DNA, 1863 bp, Homo sapiens
gggcgacagagcgagagtccgtctcaaaaaaaaagattcaagttgttctttccctggtttgtatctgtttttttcttgtgtatacttgtctgatcactccttctgaagctacaatgatttttttggatgtctttaccttttctccttcatagagattgttattgaactattagaatttttatattatgagctttaagaaagtaaagtcactttccccattattctcataggttgttccacattaacctccttcaagagtatcagtttctctgttttcggaggtctttggttatatttgatccaacttttatagcaaagcaagatcatgatgaattttgcagtggaaagggttttgtctataggtggtccagaaccaaaactctggtttggggtaggcaagaatctcaaaggcagagtcttctagggagcatcctaatggcagggagagaggattataacactggatacccaacagatgttcagtccatcctgattgctgttcatttctcatcctgcagtgtgggccaaactgaaattgcagaaggcttcagaacgatggcagcctgacactgaggaagaatatgaagactcaagtgggaatgttgtgaataagaagacatacgaggatctgaaaagacaaggactgctctagtgttcagggatgtagctcagcttttgggctagcccaggcttccctaagatctgctttttctatttctcccaaccaaatcctcttaaagaccctttgctatgtagtctcatggtctagcatgcatcttgtagaaacaaggcatgctggcagattgcagggttgagatgtgttttatctgttttatattttaaaagattctgccagaaaataaaaccagaccttgttctaaagcccagggttatggaccaactcagtgcttcaggtcttaacgcctccatacctcttcctcaccaactttactagtagctgagatttaatgggcacctattatgctacatatcatgttaggtaaatctgacctgacctctttccccaccctcctttgttgctgcttccctgaatgagtattaccccaggatgaggtctgccatcagcttagttagccattgatgcaaatactagggaaagactaggaggatgagccagggttgctactaaggactaagtgtcgcaccaaggtttgccttttgtatttgcataaagaaaggagttggagctgggtgcagtggcttgtgcctgtagtcccagctacttgggaggctgaggcaggagggttgcttgagactagcctaggtaacatagtgagaccctgtctcattaaaaaaaaaaaaaaggcatggtggcacgcactgtagtcccagctactcaggagactgaggctagaagatcctttgaacctaggagtttgagaccagcctgggcgatatagtgaggccccatctcaaaaaaaaaaaaaggggggggggggggagttgggctgtgttggaatgggcctgcagcccaacaaacaagggaactaggaccgacagtgacttcaccagcttgctaggtcagaatgagagactggtgggtctgtctacctgtttcttctacaagatccctatttgactgtaaaagtagctaatactcacatgttctccaatcccaggtagccatggtagagttgggtagagttgagcagctgccccaggatccaaatgtggtgtctgaaatggaaagaactaaggcaaccaggaaggcactgatctgccttataagcacagtcatctgaaagtcaggcctgctgcaggacaggatcccccagagaccccatttgcctctcaacactcagaccttcaactgttttttaataaatctactttttaaaaaaa

SEQ ID NO: 6096 - protein, 43 aa, Homo sapiens
MAGREDYNTGYPTDVQSILIAVHFSSCSVGQTEIAEGFRTMAA

SEQ ID NO: 6097 - DNA, 1945 bp, Homo sapiens
tttcctatgccccctggaggcatctgcgaacctctcggcatcgctccaccacacctcccaccagcaggtggcactgttgccatctccataacatggactggccttccttgtggtgctcctgttttcttaagtcccggggcacttccggcactcgcggaactttggtgcagcctgatgcgcaacgtggggactcaggcgcgctgggcggcaggagttgcttccggccgtgttggtggtctgaattgagaagccgcgactaagggaagatggagacaatactggagcagcagcggcgctatcatgaggagaaggaacggctcatggacgtcatggctaaagagatgctcaccaagaagtccacgctccgggaccagatcaattctgatcaccgcactcgggccatgcaagataggtatatggaggtcagtgggaacctgagggatttgtatgatgataaggatggaaactacacctaccgagggcccaaagccttccagcgacactttgctgaatggcgtcatgctcatggcatgaggtgtttgggcatcccaaacactgctcactttgctaatgtgacacagattgaagatgctgtctccttgtgggccaaactgaaattgcagaaggcttcagaacgatggcagcctgacactgaggaagaatatgaagactcaagtgggaatgttgtgaataagaagacatacgaggatctgaaaagacaaggactgctctagtgttcagggatgtagctcagcttttgggctagcccaggcttccctaagatctgctttttctatttctcccaaccaaatcctcttaaagaccctttgctatgtagtctcatggtctagcatgcatcttgtagaaacaaggcatgctggcagattgcagggttgagatgtgttttatctgttttatattttaaaagattctgccagaaaataaaaccagaccttgttctaaagcccagggttatggaccaactcagtgcttcaggtcttaacgcctccatacctcttcctcaccaactttactagtagctgagatttaatgggcacctattatgctacatatcatgttaggtaaatctgacctgacctctttccccaccctcctttgttgctgcttccctgaatgagtattaccccaggatgaggtctgccatcagcttagttagccattgatgcaaatactagggaaagactaggaggatgagccagggttgctactaaggactaagtgtcgcaccaaggtttgccttttgtatttgcataaagaaaggagttggagctgggtgcagtggcttgtgcctgtagtcccagctacttgggaggctgaggcaggagggttgcttgagactagcctaggtaacatagtgagaccctgtctcattaaaaaaaaaaaaaaggcatggtggcacgcactgtagtcccagctactcaggagactgaggctagaagatcctttgaacctaggagtttgagaccagcctgggcgatatagtgaggccccatctcaaaaaaaaaaaaaggggggggggggggagttgggctgtgttggaatgggcctgcagcccaacaaacaagggaactaggaccgacagtgacttcaccagcttgctaggtcagaatgagagactggtgggtctgtctacctgtttcttctacaagatccctatttgactgtaaaagtagctaatactcacatgttctccaatcccaggtagccatggtagagttgggtagagttgagcagctgccccaggatccaaatgtggtgtctgaaatggaaagaactaaggcaaccaggaaggcactgatctgccttataagcacagtcatctgaaagtcaggcctgctgcaggacaggatcccccagagaccccatttgcctctcaacactcagaccttcaactgttttttaataaatctactttttaaaaaaa

SEQ ID NO: 6098 - protein, 155 aa, Homo sapiens
METILEQQRRYHEEKERLMDVMAKEMLTKKSTLRDQINSDHRTRAMQDRYMEVSGNLRDLYDDKDGNYTYRGPKAFQRHFAEWRHAHGMRCLGIPNTAHFANVTQIEDAVSLWAKLKLQKASERWQPDTEEEYEDSSGNVVNKKTYEDLKRQGLL

SEQ ID NO: 6099 - DNA, 3673 bp, Homo sapiens
gcagttttagtagagacggggtttcaccgtgttagacaggatggtctcaatctcctgatctcgttggatgcacagtattttatttaacatattcgctgccgatagacaagtcgtttctacacgtgaatttcttttttttttttttttttgagactgagtctcattctgtcgcccaggctggagtgcagtggcacgatctcagctgacggcaacctctgcttcccgggttcaagcgattctcctgcctcagcctccggagtagctgggactacaggcgcctgccatcacgcccggctaatttttgtttgtttgtttttagtagagacggggtttcaccatgttagccagcctggtcgtctcgaacctctgacctcaagtgatccgcccgcctcggcctcccaaagtgttgggattacaggcgtgagctaccgcgcccggcctcacatgtgaatttttttaaaaacaccaccagcaaaaccccactattcccattttcctgagaaagacgctgaggtccagagaaagagaaaacgttctcataatttatgctgaaagctgcgtcctcaagttccggtttcccaactcccatccgcactccaactgctcgcgcagtccacacaggatacctgcccgccaagccggccccagcaagccgcaggaagccgtccgctgaacctcaggttcttgggttttcctatgccccctggaggcatctgcgaacctctcggcatcgctccaccacacctcccaccagcaggtggcactgttgccatctccataacatggactggccttccttgtggtgctcctgttttcttaagtcccggggcacttccggcactcgcggaactttggtgcagcctgatgcgcaacgtggggactcaggcgcgctgggcggcaggagttgcttccggccgtgttggtggtctgaattgagaagccgcgactaagggaagatggagacaatactggagcagcagcggcgctatcatgaggagaaggaacggctcatggacgtcatggctaaagagatgctcaccaagaagtccacgctccgggaccagatcaattctgatcaccgcactcgggccatgcaagataggtatatggaggtcagtgggaacctgagggatttgtatgatgataaggatggattacgaaaggaggagctcaatgccatttcaggacccaatgagtttgctgaattctataatagactcaagcaaataaaggaattccaccggaagcacccaaatgagatctgtgtgccaatgtcagtggaatttgaggaactcctgaaggctcgagagaatccaagtgaagaggcacaaaacttggtggagttcacagatgaagagggatatggtcgttatctcgatctccatgactgttacctcaagtacattaacctgaaggcatctgagaagctggattatatcacatacctgtccatctttgaccaattatttgacattcctaaagaaaggaagaatgcagagtataagagatacctagagatgctgcttgagtaccttcaggattacacagatagagtgaagcctctccaagatcagaatgaactttttgggaagattcaggctgagtttgagaagaaatgggagaatgggacctttcctggatggccgaaagagacaagcagtgccctgacccatgctggagcccatcttgacctctctgcattctcctcctgggaggagttggcttctctgggtttggacagattgaaatctgctctcttagctttaggcttgaaatgtggcgggaccctagaagagcgagcccagagactattcagtaccaaaggaaagtccctggagtcacttgatacctctttgtttgccaaaaatcccaagtcaaagggcaccaagcgagacactgaaaggaacaaagacattgcttttctagaagcccagatctatgaatatgtagagattctcggggaacagcgacatctcactcatgaaaatgtacagcgcaagcaagccaggacaggagaagagcgagaagaagaggaagaagagcagatcagtgagagtgagagtgaagatgaagagaacgagatcatttacaaccccaaaaacctgccacttggctgggatggcaaacctattccctactggctgtataagcttcatggcctaaatatcaactacaactgtgagatttgtggaaactacacctaccgagggcccaaagccttccagcgacactttgctgaatggcgtcatgctcatggcatgaggtgtttgggcatcccaaacactgctcactttgctaatgtgacacagattgaagatgctgtctccttgtgggccaaactgaaattgcagaaggcttcagaacgatggcagcctgacactgaggaagaatatgaagactcaagtgggaatgttgtgaataagaagacatacgaggatctgaaaagacaaggactgctctagtgttcagggatgtagctcagcttttgggctagcccaggcttccctaagatctgctttttctatttctcccaaccaaatcctcttaaagaccctttgctatgtagtctcatggtctagcatgcatcttgtagaaacaaggcatgctggcagattgcagggttgagatgtgttttatctgttttatattttaaaagattctgccagaaaataaaaccagaccttgttctaaagcccagggttatggaccaactcagtgcttcaggtcttaacgcctccatacctcttcctcaccaactttactagtagctgagatttaatgggcacctattatgctacatatcatgttaggtaaatctgacctgacctctttccccaccctcctttgttgctgcttccctgaatgagtattaccccaggatgaggtctgccatcagcttagttagccattgatgcaaatactagggaaagactaggaggatgagccagggttgctactaaggactaagtgtcgcaccaaggtttgccttttgtatttgcataaagaaaggagttggagctgggtgcagtggcttgtgcctgtagtcccagctacttgggaggctgaggcaggagggttgcttgagactagcctaggtaacatagtgagaccctgtctcattaaaaaaaaaaaaaaggcatggtggcacgcactgtagtcccagctactcaggagactgaggctagaagatcctttgaacctaggagtttgagaccagcctgggcgatatagtgaggccccatctcaaaaaaaaaaaaaggggggggggggggagttgggctgtgttggaatgggcctgcagcccaacaaacaagggaactaggaccgacagtgacttcaccagcttgctaggtcagaatgagagactggtgggtctgtctacctgtttcttctacaagatccctatttgactgtaaaagtagctaatactcacatgttctccaatcccaggtagccatggtagagttgggtagagttgagcagctgccccaggatccaaatgtggtgtctgaaatggaaagaactaaggcaaccaggaaggcactgatctgccttataagcacagtcatctgaaagtcaggcctgctgcaggacaggatcccccagagaccccatttgcctctcaacactcagaccttcaactgttttttaataaatctactttttaaaaaaa

SEQ ID NO: 6100 - protein, 501 aa, Homo sapiens; identical to SEQ ID NO: 172

SEQ ID NO: 6101 - DNA, 303 bp, Homo sapiens
aggaagaatatgaagactcaagtgggaatgttgtgaataagaagacatacgaggatctgaaaagacaaggactgctctagtgttcagggatccatggtagagttgggtagagttgagcagctgccccaggatccaaatgtggtgtctgaaatggaaagaactaaggcaaccaggaaggcactgatctgccttataagcacagtcatctgaaagtcaggcctgctgcaggacaggatcccccagagaccccatttgcctctcaacactcagaccttcaactgttttttaataaatctacttttt

SEQ ID NO: 6102 - protein, 38 aa, Homo sapiens [sequence omitted]

SEQ ID NO: 6103 - DNA, 899 bp, Homo sapiens
gggcgacagagcgagagtccgtctcaaaaaaaaagattcaagttgttctttccctggtttgtatctgtttttttcttgtgtatacttgtctgatcactccttctgaagctacaatgatttttttggatgtctttaccttttctccttcatagagattgttattgaactattagaatttttatattatgagctttaagaaagtaaagtcactttccccattattctcataggttgttccacattaacctccttcaagagtatcagtttctctgttttcggaggtctttggttatatttgatccaacttttatagcaaagcaagatcatgatgaattttgcagtggaaagggttttgtctataggtggtccagaaccaaaactctggtttggggtaggcaagaatctcaaaggcagagtcttctagggagcatcctaatggcagggagagaggattataacactggatacccaacagatgttcagtccatcctgattgctgttcatttctcatcctgcagtgtgggccaaactgaaattgcagaaggcttcagaacgatggcagcctgacactgaggaagaatatgaagactcaagtgggaatgttgtgaataagaagacatacgaggatctgaaaagacaaggactgctctagtgttcagggatgtagctcagcttttgggctagcccaggcttccctaagatctgctttttctatttctcccaaccaaatcctcttaaagaccctttgctatgtagtctcatggtctagcatgcatcttgtagaaacaaggcatgctggcagattgcagggttgagatgtgttttatctgttttatattttaaaagattctgccagaaaataaaaccagaccttgttctaaagcccagggttatggacc

SEQ ID NO: 6104 - protein, 43 aa, Homo sapiens; identical to SEQ ID NO: 6096

SEQ ID NO: 6105 - DNA, 818 bp, Homo sapiens
ctggagagtttagacttactgctagattggctgtgaaatgtgtggtcctgccacagcctcaggaacacccaccctctggcctgcatttggggtttcccaaaaatctgttaatgtaatattgtaatttttctcttctttgtataggagttggcttctctgggtttggacagattgaaatctgctctcttagctttaggcttgaaatgtggcgggtaaggaatagtttttctatcaaaactatcgatttactgtgtgtttgcacagtcttctaagtagctctgattccattttttttgttgctccacactgcaaaaataagccagcctgtgtggtaaagtaaccctaaaatcctttgccgtcctgtctccttaggaccctagaagagcgagcccagagactattcagtaccaaaggaaagtccctggagtcacttgatacctctttgtttgccaaaaatcccaagtcaaagggcaccaagcggtgagtggctggggaagaatatgaagactcaagtgggaatgttgtgaataagaagacatacgaggatctgaaaagacaaggactgctctagtgttcagggatgtagctcagcttttgggctagcccaggcttccctaagatctgctttttctatttctcccaaccaaatcctcttaaagaccctttgctatgtagtctcatggtctagcatgcatcttgtagaaacaaggcatgctggcagattgcagggttgagatgtgttttatctgttttatattttaaaagattctgccagaaaataaaaccagaccttgttctaaagcccagggttatggacc

SEQ ID NO: 6106 - protein, 45 aa, Homo sapiens
NPLPSCLLRTLEERAQRLFSTKGKSLESLDTSLFAKNPKSKGTKR

SEQ ID NO: 6107 - DNA, 2019 bp, Homo sapiens
tttcctatgccccctggaggcatctgcgaacctctcggcatcgctccaccacacctcccaccagcaggtggcactgttgccatctccataacatggactggccttccttgtggtgctcctgttttcttaagtcccggggcacttccggcactcgcggaactttggtgcagcctgatgcgcaacgtggggactcaggcgcgctgggcggcaggagttgcttccggccgtgttggtggtctgaattgagaagccgcgactaagggaagatggagacaatactggagcagcagcggcgctatcatgaggagaaggaacggctcatggacgtcatggctaaagagatgctcaccaagaagtccacgctccgggaccagatcaattctgatcaccgcactcgggccatgcaagataggtatatggaggtcagtgggaacctgagggatttgtatgatgataaggatggattacgaaaggaggagctcaatgccatttcaggacccaatgagtttgctgaattctataatagactcaagcaaataaaggaattccaccggaagcacccaaatgagatctgtgtgccaatgtcagtggaatttgaggaactcctgaaggctcgagagaatccaagtgaagaggcacaaaacttggtggagttcacagatgaagagggatatggtcgttatctcgatctccatgactgttacctcaagtacattaacctgaaggcatctgagaagctggattatatcacatacctgtccatctttgaccaattatttgacattcctaaagaaaggaagaatgcagagtataagagatacctagagatgctgcttgagtaccttcaggattacacagatagagtgaagcctctccaagatcagaatgaactttttgggaagattcaggctgagtttgagaagaaatgggagaatgggacctttcctggatggccgaaagagacaagcagtgccctgacccatgctggagcccatcttgacctctctgcattctcctcctgggaggagttggcttctctgggtttggacagattgaaatctgctctcttagctttaggcttgaaatgtggcgggaccctagaagagcgagcccagagactattcagtaccaaaggaaagtccctggagtcacttgatacctctttgtttgccaaaaatcccaagtcaaagggcaccaagcgagacactgaaaggaacaaagacattgcttttctagaagcccagatctatgaatatgtagagattctcggggaacagcgacatctcactcatgaaaatgtacagcgcaagcaagccaggacaggagaagagcgagaagaagaggaagaagagcagatcagtgagagtgagagtgaagatgaagagaacgagatcatttacaaccccaaaaacctgccacttggctgggatggcaaacctattccctactggctgtataagcttcatggcctaaatatcaactacaactgtgagatttgtggaaactacacctaccgagggcccaaagccttccagcgacactttgctgaatggcgtcatgctcatggcatgaggtgtttgggcatcccaaacactgctcactttgctaatgtgacacagattgaagatgctgtctccttgtgggccaaactgaaattgcagaaggcttcagaacgatggcagcctgacactgaggaagaatatgaagactcaagtgggaatgttgtgaataagaagacatacgaggatctgaaaagacaaggactgctctagtgttcagggatgtagctcagcttttgggctagcccaggcttccctaagatctgctttttctatttctcccaaccaaatcctcttaaagaccctttgctatgtagtctcatggtctagcatgcatcttgtagaaacaaggcatgctggcagattgcagggttgagatgtgttttatctgttttatattttaaaagattctgccagaaaataaaaccagaccttgttctaaagcccagggttatggacc

SEQ ID NO: 6108 - protein, 501 aa, Homo sapiens; identical to SEQ ID NO: 172

SEQ ID NO: 6109 - DNA, 981 bp, Homo sapiens
tttcctatgccccctggaggcatctgcgaacctctcggcatcgctccaccacacctcccaccagcaggtggcactgttgccatctccataacatggactggccttccttgtggtgctcctgttttcttaagtcccggggcacttccggcactcgcggaactttggtgcagcctgatgcgcaacgtggggactcaggcgcgctgggcggcaggagttgcttccggccgtgttggtggtctgaattgagaagccgcgactaagggaagatggagacaatactggagcagcagcggcgctatcatgaggagaaggaacggctcatggacgtcatggctaaagagatgctcaccaagaagtccacgctccgggaccagatcaattctgatcaccgcactcgggccatgcaagataggtatatggaggtcagtgggaacctgagggatttgtatgatgataaggatggaaactacacctaccgagggcccaaagccttccagcgacactttgctgaatggcgtcatgctcatggcatgaggtgtttgggcatcccaaacactgctcactttgctaatgtgacacagattgaagatgctgtctccttgtgggccaaactgaaattgcagaaggcttcagaacgatggcagcctgacactgaggaagaatatgaagactcaagtgggaatgttgtgaataagaagacatacgaggatctgaaaagacaaggactgctctagtgttcagggatgtagctcagcttttgggctagcccaggcttccctaagatctgctttttctatttctcccaaccaaatcctcttaaagaccctttgctatgtagtctcatggtctagcatgcatcttgtagaaacaaggcatgctggcagattgcagggttgagatgtgttttatctgttttatattttaaaagattctgccagaaaataaaaccagaccttgttctaaagcccagggttatggacc

SEQ ID NO: 6110 - protein, 155 aa, Homo sapiens; identical to SEQ ID NO: 6098

SEQ ID NO: 6111 - DNA, 513 bp, Homo sapiens
ggcgcggtgtctcacgcctgtaatcccagcactttgggaggctgaggtgggcgggcagatcacctgaggttgggagttcgagaccagcctgaccaacatggagaaaccccatctctactacaaatacaaaattagccaggtgtggtggtgcatgcctgtaatccctgctactcaggaggctgaggcaggagaatcacttgaacccaggaggtggaggttgggtgagccgagatcgcaccgctgcatccatctcaaaaaaaaaaaaaaaaaaaaagaatattaataaagtgcgaccaatcacctaaatggcgatttccggtggcaatttcagagggctctttcttagcttttgtacagttaaaaaaaaatcataaatctaaaccaatggaataactaacataataaatttataagtaaaaccctctaagttaaaaaaaaaaaaaaaatcactgcggccgggtgcggtggctcacgccaatgatattcttaaaaaaaaaaaaaaaaaaaaaaatt

SEQ ID NO: 6112 - protein, 61 aa, Homo sapiens [sequence omitted]

SEQ ID NO: 6113 - DNA, 710 bp, Homo sapiens
tggtggtctgaattgagaagccgcgactaagggaagatggagacaatactggagcagcagcggcgctatcatgaggagaaggaacggctcatggacgtcatggctaaagagatgctcaccaagaagtccacgctccgggaccagatcaattctgatcaccgcactcgggccatgcaagatatctgtgtgccaatgtcagtggaatttgaggaactcctgaaggctcgagagaatccaagtgaagaggcacaaaacttggtggagttcacagatgaagagggatatggtcgttatctcgatctccatgactgttacctcaagtacattaacctgaaggcatctgagaagctggattatatcacatacctgtccatctttgaccaattatttgacattcctaaagaaaggaagaatgcagagtataagagatacctagagatgctgcttgagtaccttcaggattacacagatagagtgaagcctctccaagatcagaatgaactttttgggaagattcaggctgagtttgagaagaaatgggagaatgggacctttcctggatggccgaaagagacaagcagtgccctgacccatgctggagcccatcttgacctctctgcattctcctcctgggaggtatgtttccttcagcagtagtagtgttctctctgtctatttttctgtctttaaagactgctctcctgtcttta

SEQ ID NO: 6114 - protein, 206 aa, Homo sapiens
METILEQQRRYHEEKERLMDVMAKEMLTKKSTLRDQINSDHRTRAMQDICVPMSVEFEELLKARENPSEEAQNLVEFTDEEGYGRYLDLHDCYLKYINLKASEKLDYITYLSIFDQLFDIPKERKNAEYKRYLEMLLEYLQDYTDRVKPLQDQNELFGKIQAEFEKKWENGTFPGWPKETSSALTHAGAHLDLSAFSSWEVCFLQQ

SEQ ID NO: 6115 - DNA, 372 bp, Homo sapiens
acatcttgcagcaggtagcagctcgagtggaaaaggcaagacttgctgcctggagtggggatgaagaaacatttaggggcaggaaggcatcaggtttgagacacagtgactggaggatggtggtggtaaggcggtccacccacctaacaggaagtgagagatgtgcagctacaaaattgtttgatttatttcaatacaaacatttttcagacttaacataaaagaaacccagacatataatcaaaggtgtgtcattgtttaattgacaattttttctctcttccttagtaaagcataaaataatactgagttttacatttgatggcatctcgtattcaagaaatacagtagctctccaagtttatacccccc

SEQ ID NO: 6116 - protein, 34 aa, Homo sapiens
MVVVRRSTHLTGSERCAATKLFDLFQYKHFSDLT

SEQ ID NO: 6117 - DNA, 668 bp, Homo sapiens
tgcgcccgctgctctacctccctggtgggccagggcttcgtaccggatggagaccaagtgctctgccagggctgtagccaggcagggccctaagccagggctcctggacccaggctttcccataccacgggcccaggactgtggctccttttctaaaccacctctgggactcagctccccccgccaaaaaaaatggggccccaaacctgggctcttacagagcctccatgagtcaagccccctccccacacctggactccagaattcaccctctcccctgcagtctgggttcccagactgagtcctctccccaaatcagggctctagacccgagccctccaaacctggactctgggacttaggcccccttaaatctagacttctctttataggtttcaggtctcctatgggtgcctgggaagtccttgaaagtggactgttctcaggcttgacctgccccaccccatccccgcggttgaggctgtgggggcagcagatcaggagcccactgataaggggccctagggtacagggtgctgcccagcaggtcgccaccgagtgtcttctcattttatttcagctccattttgcccatagatgggcagaggggtgagattggctcatcccccttccagattctgcaataaagcggtgtgaggaagcagggg

SEQ ID NO: 6118 - protein, 84 aa, Homo sapiens
METKCSARAVARQGPKPGLLDPGFPIPRAQDCGSFSKPPLGLSSPRQKKWGPKPGLLQSLHESSPLPTPGLQNSPSPLQSGFPD

SEQ ID NO: 6119 - DNA, 845 bp, Homo sapiens
gagaactctttgcacctaagtgcagcagctgcaagcgccccatcgtaggactcggtggaggcaagtatgtgtcctttgaagaccgacactggcaccacaactgcttctcctgcgcccgctgctctacctccctggtgggccagggcttcgtaccggatggagaccaagtgctctgccagggctgtagccaggcagggccctaagccagggctcctggacccaggctttcccataccacgggcccaggactgtggctccttttctaaaccacctctgggactcagctccccccgccaaaaaaaatgggtctccttctgggctccaggattgtctccccactccagcatccccaaactggtactccctgacccagggccccaaacctgggctcttacagagcctccatgagtcaagccccctccccacacctggactccagaattcaccctctcccctgcagtctgggttcccagactgagtcctctccccaaatcagggctctagacccgagccctccaaacctggactctgggacttaggcccccttaaatctagacttctctttataggtttcaggtctcctatgggtgcctgggaagtccttgaaagtggactgttctcaggcttgacctgccccaccccatccccgcggttgaggctgtgggggcagcagatcaggagcccactgataaggggccctagggtacagggtgctgcccagcaggtcgccaccgagtgtcttctcattttatttcagctccattttgcccatagatgggcagaggggtgagattggctcatcccccttccagattctgcaataaagcggtgtgaggaagcagggg

SEQ ID NO: 6120 - protein, 113 aa, Homo sapiens
MCPLKTDTGTTTASPAPAALPPWWARASYRMETKCSARAVARQGPKPGLLDPGFPIPRAQDCGSFSKPPLGLSSPRQKKWVSFWAPGLSPHSSIPKLVLPDPGPQTWALTEPP

SEQ ID NO: 6121 - DNA, 1475 bp, Homo sapiens
ggtccgtctgcagtcggcagcctcgccggcagctcgctcggcccccgcttggcccggcccgcaggtaggagccgccgagggacgcggcgcccggttcccggccccgcctgcgccgcgcgctccccgctcccgccgcccgcttcgaggagctgttctatgaagaccgccatttccacgagggctgcttccgctgctgccgctgccagcgctcactagccgatgaacccttcacctgccaggacagtgagctgctctgcaatgactgctactgcagtgcgttttcctcgcagtgctccgcttgtggggagactgtcatgcctgggtcccggaagctggaatatggaggccagacatggcatgagcactgcttcctgtgcagtggctgtgaacagccactgggctcccgttcttttgtgcccgacaagggtgctcactactgcgtgccctgctatgagaacaagtttgctcctcgctgcgcccgctgcagcaagacgctgacacagggtggagtgacataccgtgatcagccgtggcatcgagaatgtctggtctgtaccggatgccagacgcccctggcagggcagcagttcacctcccgggatgaagatccctactgtgtggcctgttttggagaactctttgcacctaagtgcagcagctgcaagcgccccatcgtaggactcggtggaggcaagtatgtgtcctttgaagaccgacactggcaccacaactgcttctcctgcgcccgctgctctacctccctggtgggccagggcttcgtaccggatggagaccaagtgctctgccagggctgtagccaggcagggccctaagccagggctcctggacccaggctttcccataccacgggcccaggactgtggctccttttctaaaccacctctgggactcagctccccccgccaaaaaaaatgggtctccttctgggctccaggattgtctccccactccagcatccccaaactggtactccctgacccagggccccaaacctgggctcttacagagcctccatgagtcaagccccctccccacacctggactccagaattcaccctctcccctgcagtctgggttcccagactgagtcctctccccaaatcagggctctagacccgagccctccaaacctggactctgggacttaggcccccttaaatctagacttctctttataggtttcaggtctcctatgggtgcctgggaagtccttgaaagtggactgttctcaggcttgacctgccccaccccatccccgcggttgaggctgtgggggcagcagatcaggagcccactgataaggggccctagggtacagggtgctgcccagcaggtcgccaccgagtgtcttctcattttatttcagctccattttgcccatagatgggcagaggggtgagattggctcatcccccttccagattctgcaataaagcggtgtgaggaagcagggg

SEQ ID NO: 6122 - protein, 172 aa, Homo sapiens
MPGSRKLEYGGQTWHEHCFLCSGCEQPLGSRSFVPDKGAHYCVPCYENKFAPRCARCSKTLTQGGVTYRDQPWHRECLVCTGCQTPLAGQQFTSRDEDPYCVACFGELFAPKCSSCKRPIVGLGGGKYVSFEDRHWHHNCFSCARCSTSLVGQGFVPDGDQVLCQGCSQAGP

SEQ ID NO: 6123 - DNA, 1393 bp, Homo sapiens
ggtccgtctgcagtcggcagcctcgccggcagctcgctcggcccccgcttggcccggcccgcaggagctgttctatgaagaccgccatttccacgagggctgcttccgctgctgccgctgccagcgctcactagccgatgaacccttcacctgccaggacagtgagctgctctgcaatgactgctactgcagtgcgttttcctcgcagtgctccgcttgtggggagactgtcatgcctgggtcccggaagctggaatatggaggccagacatggcatgagcactgcttcctgtgcagtggctgtgaacagccactgggctcccgttcttttgtgcccgacaagggtgctcactactgcgtgccctgctatgagaacaagtttgctcctcgctgcgcccgctgcagcaagacgctgacacagggtggagtgacataccgtgatcagccgtggcatcgagaatgtctggtctgtaccggatgccagacgcccctggcagggcagcagttcacctcccgggatgaagatccctactgtgtggcctgttttggagaactctttgcacctaagtgcagcagctgcaagcgccccatcgtaggactcggtggaggcaagtatgtgtcctttgaagaccgacactggcaccacaactgcttctcctgcgcccgctgctctacctccctggtgggccagggcttcgtaccggatggagaccaagtgctctgccagggctgtagccaggcagggccctaagccagggctcctggacccaggctttcccataccacgggcccaggactgtggctccttttctaaaccacctctgggactcagctccccccgccaaaaaaaatgggtctccttctgggctccaggattgtctccccactccagcatccccaaactggtactccctgacccagggccccaaacctgggctcttacagagcctccatgagtcaagccccctccccacacctggactccagaattcaccctctcccctgcagtctgggttcccagactgagtcctctccccaaatcagggctctagacccgagccctccaaacctggactctgggacttaggcccccttaaatctagacttctctttataggtttcaggtctcctatgggtgcctgggaagtccttgaaagtggactgttctcaggcttgacctgccccaccccatccccgcggttgaggctgtgggggcagcagatcaggagcccactgataaggggccctagggtacagggtgctgcccagcaggtcgccaccgagtgtcttctcattttatttcagctccattttgcccatagatgggcagaggggtgagattggctcatcccccttccagattctgcaataaagcggtgtgaggaagcagggg

SEQ ID NO: 6124 - protein, 172 aa, Homo sapiens; identical to SEQ ID NO: 6122

SEQ ID NO: 6125 - DNA, 1673 bp, Homo sapiens
ggcccccgcggcgggctggggggccgggggcggggtccgggcggggcgggcccgcgctcacttcctcggggaggggttggggccgcgctcccactcgcccacacggtccgtctgcagtcggcagcctcgccggcagctcgctcggcccccgcttggcccggcccgcagggttctctccccttgccaccatgagcgagtcatttgactgtgcaaaatgcaacgagtccctgtatggacgcaagtacatccagacagacagcggcccctactgtgtgccctgctatgacaatacctttgccaacacctgtgctgagtgccagcagcttatcgggcatgactcgagggagctgttctatgaagaccgccatttccacgagggctgcttccgctgctgccgctgccagcgctcactagccgatgaacccttcacctgccaggacagtgagctgctctgcaatgactgctactgcagtgcgttttcctcgcagtgctccgcttgtggggagactgtcatgcctgggtcccggaagctggaatatggaggccagacatggcatgagcactgcttcctgtgcagtggctgtgaacagccactgggctcccgttcttttgtgcccgacaagggtgctcactactgcgtgccctgctatgagaacaagtttgctcctcgctgcgcccgctgcagcaagacgctgacacagggtggagtgacataccgtgatcagccgtggcatcgagaatgtctggtctgtaccggatgccagacgcccctggcagggcagcagttcacctcccgggatgaagatccctactgtgtggcctgttttggagaactctttgcacctaagtgcagcagctgcaagcgccccatcgtaggactcggtggaggcaagtatgtgtcctttgaagaccgacactggcaccacaactgcttctcctgcgcccgctgctctacctccctggtgggccagggcttcgtaccggatggagaccaagtgctctgccagggctgtagccaggcagggccctaagccagggctcctggacccaggctttcccataccacgggcccaggactgtggctccttttctaaaccacctctgggactcagctccccccgccaaaaaaaatgggtctccttctgggctccaggattgtctccccactccagcatccccaaactggtactccctgacccagggccccaaacctgggctcttacagagcctccatgagtcaagccccctccccacacctggactccagaattcaccctctcccctgcagtctgggttcccagactgagtcctctccccaaatcagggctctagacccgagccctccaaacctggactctgggacttaggcccccttaaatctagacttctctttataggtttcaggtctcctatgggtgcctgggaagtccttgaaagtggactgttctcaggcttgacctgccccaccccatccccgcggttgaggctgtgggggcagcagatcaggagcccactgataaggggccctagggtacagggtgctgcccagcaggtcgccaccgagtgtcttctcattttatttcagctccattttgcccatagatgggcagaggggtgagattggctcatcccccttccagattctgcaataaagcggtgtgaggaagcagggg

SEQ ID NO: 6126 - protein, 280 aa, Homo sapiens; identical to SEQ ID NO: 174

SEQ ID NO: 6127 - DNA, 1809 bp, Homo sapiens
gggaggagggggccgggccgactggcggccgaaagggaggtgggggcggggtctggcccccgcggcgggctggggggccgggggcggggtccgggcggggcgggcccgcgctcacttcctcggggaggggttggggccgcgctcccactcgcccacacggtccgtctgcagtcggcagcctcgccggcagctcgctcggcccccgcttggcccggcccgcaggtaggagccgccgagggacgcggcgcccggttcccggccccgcctgcgccgcgcgctccccgctcccgccgcccgcttcgagggttctctccccttgccaccatgagcgagtcatttgactgtgcaaaatgcaacgagtccctgtatggacgcaagtacatccagacagacagcggcccctactgtgtgccctgctatgacaatacctttgccaacacctgtgctgagtgccagcagcttatcgggcatgactcgagggagctgttctatgaagaccgccatttccacgagggctgcttccgctgctgccgctgccagcgctcactagccgatgaacccttcacctgccaggacagtgagctgctctgcaatgactgctactgcagtgcgttttcctcgcagtgctccgcttgtggggagactgtcatgcctgggtcccggaagctggaatatggaggccagacatggcatgagcactgcttcctgtgcagtggctgtgaacagccactgggctcccgttcttttgtgcccgacaagggtgctcactactgcgtgccctgctatgagaacaagtttgctcctcgctgcgcccgctgcagcaagacgctgacacagggtggagtgacataccgtgatcagccgtggcatcgagaatgtctggtctgtaccggatgccagacgcccctggcagggcagcagttcacctcccgggatgaagatccctactgtgtggcctgttttggagaactctttgcacctaagtgcagcagctgcaagcgccccatcgtaggactcggtggaggcaagtatgtgtcctttgaagaccgacactggcaccacaactgcttctcctgcgcccgctgctctacctccctggtgggccagggcttcgtaccggatggagaccaagtgctctgccagggctgtagccaggcagggccctaagccagggctcctggacccaggctttcccataccacgggcccaggactgtggctccttttctaaaccacctctgggactcagctccccccgccaaaaaaaatgggtctccttctgggctccaggattgtctccccactccagcatccccaaactggtactccctgacccagggccccaaacctgggctcttacagagcctccatgagtcaagccccctccccacacctggactccagaattcaccctctcccctgcagtctgggttcccagactgagtcctctccccaaatcagggctctagacccgagccctccaaacctggactctgggacttaggcccccttaaatctagacttctctttataggtttcaggtctcctatgggtgcctgggaagtccttgaaagtggactgttctcaggcttgacctgccccaccccatccccgcggttgaggctgtgggggcagcagatcaggagcccactgataaggggccctagggtacagggtgctgcccagcaggtcgccaccgagtgtcttctcattttatttcagctccattttgcccatagatgggcagaggggtgagattggctcatcccccttccagattctgcaataaagcggtgtgaggaagcagggg

SEQ ID NO: 6128 - protein, 280 aa, Homo sapiens; identical to SEQ ID NO: 174

SEQ ID NO: 6129 - DNA, 2138 bp, Homo sapiens
gttccctatctgtcctcctccctccctgggaaacaggtgtgtctgaactggggctggaagcagagcctgagagctggatgactggccttgggcctatttccggtaggaatcagtggacttggcggcagaggcagtgcggatccggcgttctccactgatcttttccaaggctgtacagacatggcggcggcttttcggaaggcggctaagtcccggcagcgggaacacagagagcgaagccagcctggctttcgaaaacatctgggcctgctggagaaaaagaaagattacaaacttcgtgcagatgactaccgtaaaaaacaagaatacctcaaagctcttcggaagaaggctcttgaaaaaaatccagatgaattctactacaaaatgactcgggttaaactccaggatggagtacatattattaaggagactaaggaagaagtaaccccagaacaactaaagctgatgagaactcaggacgtcaaatatatagaaatgaagagggttgcagaagctaagaaaatcgaaagactaaaatcagagctccatctgctggatttccaggggaagcaacagaacaagcatgtgttcttttttgacaccaaaaaggaagttgaacagtttgatgtcgcaactcacctgcaaacagccccggagctagtcgacagagtctttaataggcccaggatagagaccttgcagaaagaaaaagtgaaaggagttaccaatcagactggacttaagcgaatagctaaagaaaggcaaaagcagtataactgcctgacacagcggattgaacgagagaagaaattgttcgttattgctcagaaaattcaaacacgcaaagatcttatggataaaactcagaaagtgaaggtgaagaaagaaacggtgaactccccagctatttataaatttcagagtcgtcgaaaacgttgacgtgttatagataagccttgtcattctgtatcaaaaatctgttgtcgttttctagtaacttcaaattccattactccaaatggcatggttttccggtttgtaaccataactaaattgtcagtctgacatttaatgtctttctatggacaacattaaatctccctcccttctgtaattgtttttggattgtgaaattagtcttatttttatatacttaattttttttttctttgagatagggtctttgttgccaggctggaagtgcagtgtgtgattatggctcactgcaactttgaactcctgggctcaagtgatcttcctgcatcagcctcttgagtagctgggaccacagacatgtgccaccatgtctgagtaatgtttaaattttctgtagagaccaggttttgccatgttggccaggctggttttgaactcgtggcctcaagcgatcctcccaccttggcctcccaaagggctgggattacagggatgagccactatgcccagcccataattttttttgttatgaaacataggatctcattacagcagatttggaaagtagattaattcattcctaatcccagtgcttattcaataataacaaatatttattgcatgcttaactgtgctaggagctagagctgtggaggtggacaattactgtgagtagtctagttgatttcctccattttgtaaaacgaggcatcactttttgtccatgtttttgtgttttatagttacagtaaacaatttgatgtcctactttttttttttttttttttgagacggagtctcgctctgtcgcccaggccggactgcggactgcagtggcgcaatctcggctcactgcaagctccgcttcccgggttcacgccattctcctgcctcagcctcccgagtagctgggactacaggcgcccgccaccgcgcctggctaatttttttttgtatttttttagtagagacggggtttcaccttgttagccaggatggtctcgatctcctgacctcatgatccacccgcctcggcctcccaaagtgctgggattacaggcgtgagccaccgcgcccggccgatgtcctactttttaattaaatcattagctctttcccagtttgttacatcacaaaagttttttacagtaatatatgctagagtaaacgttaaaataaatattatttttaatgattgc

SEQ ID NO: 6130 - protein, 253 aa, Homo sapiens
MAAAFRKAAKSRQREHRERSQPGFRKHLGLLEKKKDYKLRADDYRKKQEYLKALRKKALEKNPDEFYYKMTRVKLQDGVHIIKETKEEVTPEQLKLMRTQDVKYIEMKRVAEAKKIERLKSELHLLDFQGKQQNKHVFFFDTKKEVEQFDVATHLQTAPELVDRVFNRPRIETLQKEKVKGVTNQTGLKRIAKERQKQYNCLTQRIEREKKLFVIAQKIQTRKDLMDKTQKVKVKKETVNSPAIYKFQSRRKR

SEQ ID NO: 6131 - DNA, 1056 bp, Homo sapiens
agtggacttggcggcagaggcagtgcggatccggcgttctccactgatcttttccaaggctgtacagacatggcggcggcttttcggaaggcggctaagtcccggcagcgggaacacagagagcgaagccagcctggctttcgaaaacatctgggcctgctggagaaaaagaaagattacaaacttcgtgcagagtgagttcagtctttctggtagaggcgctgccaagaaagcttacaacctccttgcactgcagctgaattgcctgagtgtccaacaggggataatttcctgccattgataaaatggccaaagctctggcagcctgtcagataattttttctgtgatcctaaatttctctctttgtttaggcagatcattatttatttaactgtagttgcattgtgaattatttgtattatgttgttccagatcattttctcatagtggctttgatttggctctgccttggtgtttgagcccaaagttgaatctttttctctttgttttcttgaagtgcaggatataatctgaaattccatttgttgagtctcttacatcaccatgtgtgtgatgtggaatgaagagatgtgaaagatggattcatgagaccaagcgtgggtgataatgaactctgaaaacattttataaaacaattatccccattcttgttctctgttagcactttgtttgcaaaatacttcttaattatttgttagcgatacatgtcagctgaggtcctttttatgcccctggtctagatggtggtgatggattaaatgggtttctgtaggtcccagagattttaaggctaatgataattaagtattgttattgggccaggcagtgttctaggatatttaccgtttttacactgatttgtccctcccaacaaccttctgggatgggttactattaccgtattcattttacaaatgaaattgggattcaggatggttaaataacttatccaaggttacttagccagaagttgtcaagtccagatttgaacccatgctgtctggctccagagtccatgattctagtcattgcgc

SEQ ID NO: 6132 - protein, 42 aa, Homo sapiens
MAAAFRKAAKSRQREHRERSQPGFRKHLGLLEKKKDYKLRAE

SEQ ID NO: 6133 - DNA, 723 bp, Homo sapiens
tggcggcagaggcagtgcggatccggcgttctccactgatcttttccaaggctgtacagacatggcggcggcttttcggaaggcggctaagtcccggcagcgggaacacagagagcgaagccagcctggctttcgaaaacatctgggcctgctggagaaaaagaaagattacaaacttcgtgcagatgactaccgtaaaaaacaagaatacctcaaagctcttcggaagaaggctcttgaaaaaaatccagatgaattctactacaaaatgactcgggttaaactccaggatggagtacatattattaaggagactaaggaagaattaccaatcagactggacttaagcgaatagctaaagaaaggcaaaagcagtataactgcctgacacagcggattgaacgagagaagaaattgttcgttattgctcagaaaattcaaacacgcaaagatcttatggataaaactcagaaagtgaaggtgaagaaagaaacggtgaactccccagctatttataaatttcagagtcgtcgaaaacgttgacgtgttatagataagccttgtcattctgtatcaaaaatctgttgtcgttttctagtaacttcaaattccattactccaaatggcatggttttccggtttgtaaccataactaaattgtcagtctgacatttaatgtctttctatggacaacattaaatctccctcccttctgtaattgtt

SEQ ID NO: 6134 - protein, 97 aa, Homo sapiens
MAAAFRKAAKSRQREHRERSQPGFRKHLGLLEKKKDYKLRADDYRKKQEYLKALRKKALEKNPDEFYYKMTRVKLQDGVHIIKETKEELPIRLDLSE

SEQ ID NO: 6135 - DNA, 1913 bp, Homo sapiens
ttctctctttgtttaggcagatcattatttatttaactgtagttgcattgtgaattatttgtattatgttgttccagatcattttctcatagtggctttgatttggctctgccttggtgtttgagcccaaagttgaatctttttctctttgttttcttgaagtgcaggatataatctgaaattccatttgttgagtctcttacatcaccatgtgtgtgatgtggaatgaagagatgtgaaagatggattcatgagaccaagcgtgggtgataatgaactctgaaaacattttataaaacaattatccccattcttgttctctgttagcactttgtttgcaaaatacttcttaattatttgttagcgatacatgtcagctgaggtcctttttatgcccctggtctagatggtggtgatggattaaatgggtttctgtaggtcccagagattttaaggctaatgataattaagtattgttattgggccaggcagtgttctaggatatttaccgtttttacactgatttgtccctcccaacaaccttctgggatgggttactattaccgtattcattttacaaatgaaattgggattcaggatggttaaataacttatccaaggttacttagccagaagttgtcaagtccagatttgaacccatgctgtctggctccagagtccatgattctagtcattgcgctatactgtactgtgtagtttctgaattacatatggtcatttggtgcccaagcttgcaccatatcctaaggagttttaatttgtactttgtttggtgtctccctgtaatgatataaatggcactgaaacatatataggctggggacagttaatttcaggttccactggaataggaactgttgattagactgtggaccctgcgaagacatgagctcagctcagtgacagtggagtgtccagatccagtcagtgcttttggcttttttgagtttcactctgtgtgaccttttagatgcttgtaaagtttgcttattgtgggtttttggttttttaaaattatctatttttttttttttgctatgaacctcatttaacctgtcttttagtgactaccgtaaaaaacaagaatacctcaaagctcttcggaagaaggctcttgaaaaaaatccagatgaattctactacaaaatgactcgggttaaactccaggatggagtacatattattaaggagactaaggaagaagtaaccccagaacaactaaagctgatgagaactcaggacgtcaaatatatagaaatgaagagggttgcagaagctaagaaaatcgaaagactaaaatcagagctccatctgctggatttccaggggaagcaacagaacaagcatgtgttcttttttgacaccaaaaaggaagttgaacagtttgatgtcgcaactcacctgcaaacagccccggagctagtcgacagagtctttaataggcccaggatagagaccttgcagaaagaaaaagtgaaaggagttaccaatcagactggacttaagcgaatagctaaagaaaggcaaaagcagtataactgcctgacacagcggattgaacgagagaagaaattgttcgttattgctcagaaaattcaaacacgcaaagatcttatggataaaactcagaaagtgaaggtgaagaaagaaacggtgaactccccagctatttataaatttcagagtcgtcgaaaacgttgacgtgttatagataagccttgtcattctgtatcaaaaatctgttgtcgttttctagtaacttcaaattccattactccaaatggcatggttttccggtttgtaaccataactaaattgtcagtctgacatttaatgtctttctatggacaacattaaatctccctcccttctgtaattgtttttggattgtg

SEQ ID NO: 6136 - protein, 184 aa, Homo sapiens
MTRVKLQDGVHIIKETKEEVTPEQLKLMRTQDVKYIEMKRVAEAKKIERLKSELHLLDFQGKQQNKHVFFFDTKKEVEQFDVATHLQTAPELVDRVFNRPRIETLQKEKVKGVTNQTGLKRIAKERQKQYNCLTQRIEREKKLFVIAQKIQTRKDLMDKTQKVKVKKETVNSPAIYKFQSRRKR

SEQ ID NO: 6137 - DNA, 2918 bp, Homo sapiens
ttctctctttgtttaggcagatcattatttatttaactgtagttgcattgtgaattatttgtattatgttgttccagatcattttctcatagtggctttgatttggctctgccttggtgtttgagcccaaagttgaatctttttctctttgttttcttgaagtgcaggatataatctgaaattccatttgttgagtctcttacatcaccatgtgtgtgatgtggaatgaagagatgtgaaagatggattcatgagaccaagcgtgggtgataatgaactctgaaaacattttataaaacaattatccccattcttgttctctgttagcactttgtttgcaaaatacttcttaattatttgttagcgatacatgtcagctgaggtcctttttatgcccctggtctagatggtggtgatggattaaatgggtttctgtaggtcccagagattttaaggctaatgataattaagtattgttattgggccaggcagtgttctaggatatttaccgtttttacactgatttgtccctcccaacaaccttctgggatgggttactattaccgtattcattttacaaatgaaattgggattcaggatggttaaataacttatccaaggttacttagccagaagttgtcaagtccagatttgaacccatgctgtctggctccagagtccatgattctagtcattgcgctatactgtactgtgtagtttctgaattacatatggtcatttggtgcccaagcttgcaccatatcctaaggagttttaatttgtactttgtttggtgtctccctgtaatgatataaatggcactgaaacatatataggctggggacagttaatttcaggttccactggaataggaactgttgattagactgtggaccctgcgaagacatgagctcagctcagtgacagtggagtgtccagatccagtcagtgcttttggcttttttgagtttcactctgtgtgaccttttagatgcttgtaaagtttgcttattgtgggtttttggttttttaaaattatctatttttttttttttgctatgaacctcatttaacctgtcttttagtgactaccgtaaaaaacaagaatacctcaaagctcttcggaagaaggctcttgaaaaaaatccagatgaattctactacaaaatgactcgggttaaactccaggatggagtacatattattaaggagactaaggaagaagtaaccccagaacaactaaagctgatgagaactcaggacgtcaaatatatagaaatgaagagggttgcagaagctaagaaaatcgaaagactaaaatcagagctccatctgctggatttccaggggaagcaacagaacaagcatgtgttcttttttgacaccaaaaaggaagttgaacagtttgatgtcgcaactcacctgcaaacagccccggagctagtcgacagagtctttaataggcccaggatagagaccttgcagaaagaaaaagtgaaaggagttaccaatcagactggacttaagcgaatagctaaagaaaggcaaaagcagtataactgcctgacacagcggattgaacgagagaagaaattgttcgttattgctcagaaaattcaaacacgcaaagatcttatggataaaactcagaaagtgaaggtgaagaaagaaacggtgaactccccagctatttataaatttcagagtcgtcgaaaacgttgacgtgttatagataagccttgtcattctgtatcaaaaatctgttgtcgttttctagtaacttcaaattccattactccaaatggcatggttttccggtttgtaaccataactaaattgtcagtctgacatttaatgtctttctatggacaacattaaatctccctcccttctgtaattgtttttggattgtgaaattagtcttatttttatatacttaattttttttttctttgagatagggtctttgttgccaggctggaagtgcagtgtgtgattatggctcactgcaactttgaactcctgggctcaagtgatcttcctgcatcagcctcttgagtagctgggaccacagacatgtgccaccatgtctgagtaatgtttaaattttctgtagagaccaggttttgccatgttggccaggctggttttgaactcgtggcctcaagcgatcctcccaccttggcctcccaaagggctgggattacagggatgagccactatgcccagcccataattttttttgttatgaaacataggatctcattacagcagatttggaaagtagattaattcattcctaatcccagtgcttattcaataataacaaatatttattgcatgcttaactgtgctaggagctagagctgtggaggtggacaattactgtgagtagtctagttgatttcctccattttgtaaaacgaggcatcactttttgtccatgtttttgtgttttatagttacagtaaacaatttgatgtcctactttttttttttttttttttgagacggagtctcgctctgtcgcccaggccggactgcggactgcagtggcgcaatctcggctcactgcaagctccgcttcccgggttcacgccattctcctgcctcagcctcccgagtagctgggactacaggcgcccgccaccgcgcctggctaatttttttttgtatttttttagtagagacggggtttcaccttgttagccaggatggtctcgatctcctgacctcatgatccacccgcctcggcctcccaaagtgctgggattacaggcgtgagccaccgcgcccggccgatgtcctactttttaattaaatcattagctctttcccagtttgttacatcacaaaagttttttacagtaatatatgctagagtaaacgttaaaataaatattatttttaatgattgc

SEQ ID NO: 6138 - protein, 184 aa, Homo sapiens; identical to SEQ ID NO: 6136

SEQ ID NO: 6139 - DNA, 790 bp, Homo sapiens
gcttttgccgcctgtacccttcctggagcaacccgtgcttttgaaaaatgaccatgccgaaggggaactaacactcccagcctggtgcgggtcttgtcaatctgatttttaaatgatggaggaggaggtttgaggacaaagctcatggtggcattaccactatcagggacgctgcaaagatcaagtgaaaaggggaaaaggctcttctcaatgtgagcacattcacaggctctgagaacagagaggtatttaaagtgaactggaacaaacctgcaacatccggtgcgttctgccttcaaaaatagctgccagttagaaagggttatttacatattgatttcatgctaactttgtaatggaatgtgctgcctgcctgcctgcctgagacctaacaactgtcatcataattttttctaaaaatacagtcagagaaaaacactcattgaaccctccactggaaagtagctgcaaaagaccccctgatcccaaacctgcttgacagaccacagccaagggcagggacactcaacaactgtaaacgaggaacatttcacagcggcagctggcccctctcttcttccaaccagccaatattttttgtctttctagaaaacctgtcttgttcaaaggcctgatggagctgattcggttgtgatcctgggcatatggatggcatatttgctgcgagctagccggcccccgctgctgcggacaaatctttcattcatgaacaggagcttgttaggccaactccggactctaaagccacttaattaaattgtggaaagtc

SEQ ID NO: 6140 - protein, 35 aa, Homo sapiens
MAYLLRASRPPLLRTNLSFMNRSLLGQLRTLKPLN

SEQ ID NO: 6141 - DNA, 3643 bp, Homo sapiens
tttaatgaacttcagttcctaccttttttttttttttttttgagatagggtctctgttgcccaagctggagtgcagtagtgaacacagctcactgcagcctcgacctcctgggctcaagctgtcctccttcagcctcctgtgtagccaggagcacaggcgtgtgccactgcacctggctaacttttggatatttttgtagagatggagtctcactttgttgcccagactggttttgaactccagggctaaagtgatcctccttggcctcccaaagtgttgggattacaggtgtatgccatgtgcctggcctctgtatcttttcaatgggcatagtcctcttgtatttatgtagtttactttcgcttgttgcagaaaggacataatgtggttaaatagggctatagtaataattcgtgtcctcagggttgttgtgaggatcaaagaaatgtatgagaaggtaaactgcaaggttcagaatagtaaaaataagcccccacttcatgaaaaaaaaaatacacggaaaatatagagaaatgaaaataggagtaaagagccactactcaagtcaaccactaacaactgttttagtgttatttctgtcaccttaaaattgtgtgtgtgtgtgtgtgtgtgtgtgtgtgttcttgtgttgcctaggctggtcttgaattccaaagctcaagcattcctcccacctcagccttccaaagtgctgggattacaggcatgggccaccatgccagaccccaaattttttttgacattatgcttatgctaccatatgagaacacaaattgtaaggcttggaatagtttaaaaagtaaacctcacccctattcattaaaaactgcatggaaaatatagaaaagtgaaaataggagaaaaaagatacattgttttactgccaaagaaaattaccagttactcctgacattttcttttcctttttttcttttttttccctgagacagagtcttgctctgtcactcaggctggagtgcagtggcacagtctcagttcactgcaacctctgcctcttgggttcaagcgattctcctgccttagcctcccgagtagctgggactacaggtgtgagccaccatgcccggctactttttattttttattttttagtagagatggggcttcaccatgtcggccaggctggtctcgaactcctgacctcaagacaggtggcccgcctcaacctcccaaagtgctgggattacaagtgtgagccattgcacccagccgacattttctttttagtatatttccctcaccttttctgtttttgaaggcaaatacttttaaaaaagcatttttaataactcttaattcgtaacaatagctagataacctttagatttttataggcaagtacatcagaaaagactcttgagtccgtatctctttttaaaagttgttgatttcaacatagtccctgctagtctctagctgagactgttcttgtttagtctaagtattttcttgcttttgtgaggaagcaaaaaatatgttttctgtgaaaatgtgattgacctggcaaatagaatatgcctcgaaggagctcatctaagtgaggcggcaggtcccagaggtccctgttaccttagggcagtaaagagaggagacacctcagctgggtttacagaacacagtctagggggtgagtagccccacctggtgagatgttggtaacgttgtcatttccctggttaagatatacatatgtttgcacctttttctccaaatgtctgattatctatattaaaggatgtgtatggagttgttgtttttaataggtatccctgaaattctgtgtttaggaacactataccttaacaacactctctcccaatatgtttaagccagtattctttcccagagacatttgggaaactgggtggatgtcattgtgcagattaaatgtggcagatgcctagatgggaaacctgtaatgaatagtactttcttttaaaataggttaaaggaagatggaagtggaagtgcttatgacaaagaatctatggcaattatcaagctgaataatacaactgtcctttatttaaaggaggtgactaaatttttggcactggtctgcattctaagggaagaaagctttgaaagaaaaggtttaatagactacaacttccactgtttccgaaaagctattcatgaggtttttgaggtgggtgtgacttctcacaggagctgtggtcaccagactagtgcctccagtctgaaagcgctgacacacaatggcacgccacgaaacgccatctagtctgaatcccagcgtcggggctctgtgccagcttactcttcactccagggtcggatgccacgtgctacaggacatgggagctgctgcttgtgggaatctggtgcctgttccactagagacaaggggtagagtttctcatttggatgaaaaccccttcaactggtggtgtacaactgaagctactatatcttttttgaaaatggcaaaaaaaaaaaaaaaaaattctggagaccacagaactcaagtgtgtgtttctcctcttttgggtcccctttaagtagttgggatattttggacctggagataacaccagttacccatccttaccagggaatgttgccatcaattccagttgaaaataatagaaaagactgaatttttatatgcttcacttaggctttcatttgagtagactctaaaaattctgccttgcttaagttctaacactgcctctcagatttcagttttggacattgcacaactaagaccttttaaatgcatttgcttgctaactcggaagacacatagtctgcagcaagacattcctatattgaagaaatgagagaaaattttatgctgcatcaggtggagagcaaggctcaacggtggttgcattagttccctcggaagtattgaaaaaactttgaaatggaagaaaatttttgcacctatgttctgagtaccagatgtctgggttctttcttctgcattagataaatgatcatgctcagtgtaacaaagggaattaaaagttttcccacagtccccttctaggggagaaactcattgtgtcactgaaatgtttagcttactttaatcttgatatcagcctctacagaccttttattctaagctatcgagcttcttgattgcatttggttgaccacgagtgaccctaaggcattgggggactgtccactgggagttggagtgagcacgtggtgctgcaacaggcattgttttacatactttgtctctagtattctgacaccaagtgtcaactgtggtactttctttgcctaggatatgaattcataattgttgcttttgttgatggttgataccctttccattgatttaaacctaacacattatttctattccacatgcccagtagacatatattccaaagccactggaccacttgagtacataagtgccactgtttaatgcaatatgtatattcaggtctgtaaagctaacagtgtgacttggagtgcttcctgcaggtgattctgacttgagtatttacatggaccatggtgatatccaaaagaaaaatgctttttatatttatagattatttcattgaactatatatgaaatgggtatcaataaatgtatttactccaaaa

SEQ ID NO: 6142 - protein, 85 aa, Homo sapiens [sequence omitted]

SEQ ID NO: 6143 - DNA, 2728 bp, Homo sapiens
gggcttcggctcggggcctatgagagccgggctccggggggcgggccggactgtggcggctgccgggggcggtggcggtggtggcggcggcggcggaggcggactggggaggcggcggcctggctcggcctggcctggcctgtcagggcgcgggcggcggcggctccagcaccatgtccctgcagtacggggcggaggagacgcccctcgccggcagttacggcgcggccgattcgtttccaaaggacttcggctacggcgtggaggaggaggaagaggaggcggcggcggcgggcggaggggttggggcaggggcaggcggtggctgtggtccggggggcgctgacagctccaagccgaggattctgctcatgggactccggcgcagcggcaagtcctccatccagaaggtggtgtttcataagatgtcacccaacgagaccctctttttggaaagtaccaacaagatttataaggatgacatttccaatagctcctttgtgaatttccagatatgggattttcctgggcaaatggacttttttgacccaacctttgactatgagatgatcttcaggggaacaggagcattgatatacgtcattgacgcacaggatgactacatggaggctttaacaagacttcacattactgtttctaaagcctacaaagttaacccagacatgaattttgaggtttttattcacaaagttgatggtctgtctgatgatcacaaaatagaaacacagagggacattcatcaaagggccaatgatgaccttgcagatgctgggctagaaaaactccatcttagcttttatctgactagtatctatgaccattcaatatttgaagcctttagtaaggtggtgcagaaactcattccacaactgccgaccttggaaaacctattaaatatctttatatcaaattcaggtattgaaaaagcttttctctttgatgttgtcagcaaaatctacattgcaacagacagttcccctgtggatatgcaatcttatgaactttgctgtgacatgatcgatgttgtaattgatgtgtcttgtatatatgggttaaaggaagatggaagtggaagtgcttatgacaaagaatctatggcaattatcaagctgaataatacaactgtcctttatttaaaggaggtgactaaatttttggcactggtctgcattctaagggaagaaagctttgaaagaaaaggtttaatagactacaacttccactgtttccgaaaagctattcatgaggtttttgaggtgggtgtgacttctcacaggagctgtggtcaccagactagtgcctccagtctgaaagcgctgacacacaatggcacgccacgaaacgccatctagtctgaatcccagcgtcggggctctgtgccagcttactcttcactccagggtcggatgccacgtgctacaggacatgggagctgctgcttgtgggaatctggtgcctgttccactagagacaaggggtagagtttctcatttggatgaaaaccccttcaactggtggtgtacaactgaagctactatatcttttttgaaaatggcaaaaaaaaaaaaaaaaaattctggagaccacagaactcaagtgtgtgtttctcctcttttgggtcccctttaagtagttgggatattttggacctggagataacaccagttacccatccttaccagggaatgttgccatcaattccagttgaaaataatagaaaagactgaatttttatatgcttcacttaggctttcatttgagtagactctaaaaattctgccttgcttaagttctaacactgcctctcagatttcagttttggacattgcacaactaagaccttttaaatgcatttgcttgctaactcggaagacacatagtctgcagcaagacattcctatattgaagaaatgagagaaaattttatgctgcatcaggtggagagcaaggctcaacggtggttgcattagttccctcggaagtattgaaaaaactttgaaatggaagaaaatttttgcacctatgttctgagtaccagatgtctgggttctttcttctgcattagataaatgatcatgctcagtgtaacaaagggaattaaaagttttcccacagtccccttctaggggagaaactcattgtgtcactgaaatgtttagcttactttaatcttgatatcagcctctacagaccttttattctaagctatcgagcttcttgattgcatttggttgaccacgagtgaccctaaggcattgggggactgtccactgggagttggagtgagcacgtggtgctgcaacaggcattgttttacatactttgtctctagtattctgacaccaagtgtcaactgtggtactttctttgcctaggatatgaattcataattgttgcttttgttgatggttgataccctttccattgatttaaacctaacacattatttctattccacatgcccagtagacatatattccaaagccactggaccacttgagtacataagtgccactgtttaatgcaatatgtatattcaggtctgtaaagctaacagtgtgacttggagtgcttcctgcaggtgattctgacttgagtatttacatggaccatggtgatatccaaaagaaaaatgctttttatatttatagattatttcattgaactatatatgaaatgggtatcaataaatgtatttactccaaaa

SEQ ID NO: 6144 - protein, 399 aa, Homo sapiens; identical to SEQ ID NO: 178

SEQ ID NO: 6145 - DNA, 1226 bp, Homo sapiens
ccccctgtgtaaatgcagtaaagagatgaagccaggtgggaaagtgtatttgtcatcttgagtgatgggtatggtagacaagataaagaggctttattgaactcactgaaatcaaatgttaagaaacttaaaattttatgtattataatagttgtcatagaacataaggtatttttcaaattaatcaagctatgttgtgtttttcagcttttatctgactagtatctatgaccattcaatatttgaagcctttagtaaggtggtgcagaaactcattccacaactgccgaccttggaaaacctattaaatatctttatatcaaattcaggtattgaaaaagcttttctctttgatgttgtcagcaaaatctacattgcaacagacagttcccctgtggatatgcaatcttatgaactttgctgtgacatgatcgatgttgtaattgatgtgtcttgtatatatgggtaagttatgtatatattcctgcaatatctcagacaggcggaaaactattaacttgatttgttcagaagactaatttctgaggcccctggcaagtggtactacatgaactgggattgttctgaccatagtgctttaacttggagcatgatttctctggaagttggctgctgggtcttactccttcggagaatggctaagaaaagttggaaagcatgactagaactggacttgtttatcactgcaagtttctcccactgttgtggggatgggggagggttgcactgtgtcttctcactactggaacttagttagattgaaaaactagattaatttaaaatggtctgaataacaaagtaagttctggttcctgatttaacctcaggctttgtggaattagggattcttaatctttcagagagcaaagaaagtaattagaattttggatgttggaagaacttataaaaatctgacccatatatacaagtttccaaaataaatctctaaaatttgagctcctcctttatgtaaatttgccaaactcgctatagaaatttatgaaagccagccagcaagtgattttgtagaataggccagaggactggtgaaaactttggagaattactggcttttcaaaagctgataatggccaggtgtggtggcttgtgcccataatcccagatgtttggaagcctggggtgagaggatcgcttggggccaggagttggagaccagtctgggcaacatagacctcagctttacc

SEQ ID NO: 6146 - protein, 37 aa, Homo sapiens
MNWDCSDHSALTWSMISLEVGCWVLLLRRMAKKSWKA

SEQ ID NO: 6147 - DNA, 630 bp, Homo sapiens
aacgctgtctgcaccgctcccctgccttcttccgggctcccagagcaccgctatggagatgctctcccggcatttgaggaagaattgattgtcctcatcctgcaactgtacttgcccaaccgatatttattgatgcctgcagtgtcctgggtgcctaccaaggggcacagaactggatccgacgcagaccctgcctgccttcaggttgcttgaagatgaacagagagatcggacctctgcatgaagccagactgctcatcattccagacatcttcagctgctacacccagaacaagcattcgaaatatgaacaggatgagcactctctatgttgcccaggctggtctcagactcctggactcaaagcgatcctccttcgtcagcctcccaagtagctgggactgcagattcatgctctccatctccagatcatgaacagcagccattgtcctgggtcctccctcctccccagaaggacatgaatcccagggaacagcaggtggccctaggtcctcaggctgccgctcttccctgggctgtctggcgcaacgactgctttccaaggcctttcctgtatgtgaagagaagacagctgaagatgatcaaaatgatctaaacctcctaaatggc

SEQ ID NO: 6148 - protein, 95 aa, Homo sapiens
MLPRLVSDSWTQSDPPSSASQVAGTADSCSPSPDHEQQPLSWVLPPPQKDMNPREQQVALGPQAAALPWAVWRNDCFPRPFLYVKRRQLKMIKMI

SEQ ID NO: 6149 - DNA, 441 bp, Homo sapiens
attgattgtcctcatcctgcaactgtacttgcccaaccgatatttattgatgcctgcagtgtcctgggtgcctaccaaggggcacagaactggatccgacgcagaccctgcctgccttcaggttgcttgaagatgaacagagagatcggacctctgcatgaagccagactgctcatcattccagacatcttcagctgctacacccagaacaagcattcgaaatatgaacaggatggtgagccagatctttccaatcatggtggagtggatgtgaacttcctccagagtatctccaaggagattccagtcccccatgtttatttagtcagccatcttagctctgatccacatcaaataagaggcagataaattcttccattctgaagggagcactatttcttaaagcaaacctatggtgaaaatataacaatatgtcacttc

SEQ ID NO: 6150 - protein, 78 aa, Homo sapiens
MNREIGPLHEARLLIIPDIFSCYTQNKHSKYEQDGEPDLSNHGGVDVNFLQSISKEIPVPHVYLVSHLSSDPHQIRGR

SEQ ID NO: 6151 - DNA, 1965 bp, Homo sapiens
ctatgaagtagctgagtgagcctaatccccaaatgttggtagccttatatgaagaaccagagaaacctaacagtgctttggattttttaaagcatcacttaggagctgctactccagaaaatccagaaatagagctgcttcgcctagaactggccgaaatgaaagagaagtatgaagctattgtagaagaaaataaaaaactgaaagcaaagcttgctcagtatgaaccacctcaggaggagaagcgtgctgaataggattcttctcagtttgaaagacaatgaaaaatggttttgtatgacttgaatagtttgtatagtatataatcttttctgaacagatgctatagaactcttttaatatgtttaattcacctatcacactctgttaaaaacacatagaatcatcaataaaaactcaatataactttctttgggtcttaaagcaggagaatccaaagtaaatcctgaacaaaacctaaacacagccatctaactcattaccttaaaagacattctgtttattagtctgattaggaatgatggcactggttgtattttagccaagacagtttagcatggagctattccttggtgcagttcaggatatgaacacaggtacagtcattctttgaaggtgacactgttctgtatattccctataggcagctggagagatctgtgtgacacaagatgcttttgtacgggttcccatgaatcttctgctcttgtttgtgtgacatggaacaaataacttctttgccaccactttgccttagataactgtgtgtgtgtgtgccagtttgaactctgacaccacattttccttctatgcaatcatgcctgtctgataatcttgcattgctttcctctgagctttagtgggtcctagttgcacactggcctttctgtgctgtttttcaatttgcctaataatagcagttaccctgattgtaatttatgtaactttaaacaggatcacactgtaccccctgcctgccttatttgcttactgagcacaggacagaggcaatatacaactctgggttcacacacaagctgagatgagaagaggaatgagccatatattggggaaaatcatagtttgtaggtataattatatagtgcttttctccctcaaagtatttttctagccttgaattcattttatcttcattatccctgtgaagtaggtgggacaagtataaggggaagaggggtgctgaatttttaggccaaagactgatattaatacaaatcactcactaactgtagagccttgggcattatcagtgaactactctgagatttactgtcttcatctgtttaatgagtagaatgtccgtgatgcctacctcacagggttgttgtgagggtcaaatgagaatgtatgtgaaagatttgtaaatggtaaagcactatattcttgtttgttagtcctttttcctttctttgggtagacctacagtcagatgttttgttttatggatcacttattttccttactggtagactgtcgttttatagacatattcctatttcatatattctctccctgttgttagagaacctatctttgtttttggtcaaaacacacatagaaaacaaaatgatccaatgaaaactggtttaactagcaaaagccttggcacctgttggagactatgaccaagccaataaaaagggcatttaaatcagccctgttagtaggaatgtggctatggctggtgcctcttctagtcacaagtttgtttttggagggggtccagaagatcattcccttgcatagatttctcttttaccaatttgagtgcctcctacatgggcagcagtggactaagtgctgggtgtgataaagaggaatgacttaattatgagactgtatataatcaaatacagtgtgggttaggacctgtggcagaccattataataaagcatggccccgtgagggttttgaaagagaga

SEQ ID NO: 6152 - protein, 74 aa, Homo sapiens
MLVALYEEPEKPNSALDFLKHHLGAATPENPEIELLRLELAEMKEKYEAIVEENKKLKAKLAQYEPPQEEKRAE

SEQ ID NO: 6153 - DNA, 1988 bp, Homo sapiens
cactgacccccggtgtctcttcaggccgccgactcgaagcgtgagcagttccggagtgttggtagccttatatgaagaaccagagaaacctaacagtgctttggattttttaaagcatcacttaggagctgctactccagaaaatccagaaatagagctgcttcgcctagaactggccgaaatgaaagagaagtatgaagctattgtagaagaaaataaaaaactgaaagcaaagcttgctcagtatgaaccacctcaggaggagaagcgtgctgaataggattcttctcagtttgaaagacaatgaaaaatggttttgtatgacttgaatagtttgtatagtatataatcttttctgaacagatgctatagaactcttttaatatgtttaattcacctatcacactctgttaaaaacacatagaatcatcaataaaaactcaatataactttctttgggtcttaaagcaggagaatccaaagtaaatcctgaacaaaacctaaacacagccatctaactcattaccttaaaagacattctgtttattagtctgattaggaatgatggcactggttgtattttagccaagacagtttagcatggagctattccttggtgcagttcaggatatgaacacaggtacagtcattctttgaaggtgacactgttctgtatattccctataggcagctggagagatctgtgtgacacaagatgcttttgtacgggttcccatgaatcttctgctcttgtttgtgtgacatggaacaaataacttctttgccaccactttgccttagataactgtgtgtgtgtgtgccagtttgaactctgacaccacattttccttctatgcaatcatgcctgtctgataatcttgcattgctttcctctgagctttagtgggtcctagttgcacactggcctttctgtgctgtttttcaatttgcctaataatagcagttaccctgattgtaatttatgtaactttaaacaggatcacactgtaccccctgcctgccttatttgcttactgagcacaggacagaggcaatatacaactctgggttcacacacaagctgagatgagaagaggaatgagccatatattggggaaaatcatagtttgtaggtataattatatagtgcttttctccctcaaagtatttttctagccttgaattcattttatcttcattatccctgtgaagtaggtgggacaagtataaggggaagaggggtgctgaatttttaggccaaagactgatattaatacaaatcactcactaactgtagagccttgggcattatcagtgaactactctgagatttactgtcttcatctgtttaatgagtagaatgtccgtgatgcctacctcacagggttgttgtgagggtcaaatgagaatgtatgtgaaagatttgtaaatggtaaagcactatattcttgtttgttagtcctttttcctttctttgggtagacctacagtcagatgttttgttttatggatcacttattttccttactggtagactgtcgttttatagacatattcctatttcatatattctctccctgttgttagagaacctatctttgtttttggtcaaaacacacatagaaaacaaaatgatccaatgaaaactggtttaactagcaaaagccttggcacctgttggagactatgaccaagccaataaaaagggcatttaaatcagccctgttagtaggaatgtggctatggctggtgcctcttctagtcacaagtttgtttttggagggggtccagaagatcattcccttgcatagatttctcttttaccaatttgagtgcctcctacatgggcagcagtggactaagtgctgggtgtgataaagaggaatgacttaattatgagactgtatataatcaaatacagtgtgggttaggacctgtggcagaccattataataaagcatggccccgtgagggttttgaaagagaga

SEQ ID NO: 6154 - protein, 32 aa, Homo sapiens
MKEKYEAIVEENKKLKAKLAQYEPPQEEKRAE

SEQ ID NO: 6155 - DNA, 2193 bp, Homo sapiens
cggcgtggctgggggcatgcgggcggtagcaagccgctggtcggctctgggtgggagtggggtcgcgcgcgcaggtttgggcgggagggccccgaggtagtgaggcggaggcggggttgccggactcccagcgccttcttcctgctcggctcccgggctctggccactgacccccggtgtctcttcaggccgccgactcgaagcgtgagcagttccggaggtacttggagaagtcgggggtgctggacacgctgaccaaggtgttggtagccttatatgaagaaccagagaaacctaacagtgctttggattttttaaagcatcacttaggagctgctactccagaaaatccagaaatagagctgcttcgcctagaactggccgaaatgaaagagaagtatgaagctattgtagaagaaaataaaaaactgaaagcaaagcttgctcagtatgaaccacctcaggaggagaagcgtgctgaataggattcttctcagtttgaaagacaatgaaaaatggttttgtatgacttgaatagtttgtatagtatataatcttttctgaacagatgctatagaactcttttaatatgtttaattcacctatcacactctgttaaaaacacatagaatcatcaataaaaactcaatataactttctttgggtcttaaagcaggagaatccaaagtaaatcctgaacaaaacctaaacacagccatctaactcattaccttaaaagacattctgtttattagtctgattaggaatgatggcactggttgtattttagccaagacagtttagcatggagctattccttggtgcagttcaggatatgaacacaggtacagtcattctttgaaggtgacactgttctgtatattccctataggcagctggagagatctgtgtgacacaagatgcttttgtacgggttcccatgaatcttctgctcttgtttgtgtgacatggaacaaataacttctttgccaccactttgccttagataactgtgtgtgtgtgtgccagtttgaactctgacaccacattttccttctatgcaatcatgcctgtctgataatcttgcattgctttcctctgagctttagtgggtcctagttgcacactggcctttctgtgctgtttttcaatttgcctaataatagcagttaccctgattgtaatttatgtaactttaaacaggatcacactgtaccccctgcctgccttatttgcttactgagcacaggacagaggcaatatacaactctgggttcacacacaagctgagatgagaagaggaatgagccatatattggggaaaatcatagtttgtaggtataattatatagtgcttttctccctcaaagtatttttctagccttgaattcattttatcttcattatccctgtgaagtaggtgggacaagtataaggggaagaggggtgctgaatttttaggccaaagactgatattaatacaaatcactcactaactgtagagccttgggcattatcagtgaactactctgagatttactgtcttcatctgtttaatgagtagaatgtccgtgatgcctacctcacagggttgttgtgagggtcaaatgagaatgtatgtgaaagatttgtaaatggtaaagcactatattcttgtttgttagtcctttttcctttctttgggtagacctacagtcagatgttttgttttatggatcacttattttccttactggtagactgtcgttttatagacatattcctatttcatatattctctccctgttgttagagaacctatctttgtttttggtcaaaacacacatagaaaacaaaatgatccaatgaaaactggtttaactagcaaaagccttggcacctgttggagactatgaccaagccaataaaaagggcatttaaatcagccctgttagtaggaatgtggctatggctggtgcctcttctagtcacaagtttgtttttggagggggtccagaagatcattcccttgcatagatttctcttttaccaatttgagtgcctcctacatgggcagcagtggactaagtgctgggtgtgataaagaggaatgacttaattatgagactgtatataatcaaatacagtgtgggttaggacctgtggcagaccattataataaagcatggccccgtgagggttttgaaagagaga

SEQ ID NO: 6156 - protein, 32 aa, Homo sapiens; identical to SEQ ID NO: 6154

SEQ ID NO: 6157 - DNA, 3478 bp, Homo sapiens
cagttcagaaagggcacagtcagaacccttcctccttcacaaggagattctcaatcacttgacattccaaacactgctgattctttgggagggctgtcctttgagccagggttggtcagaacctgtaataatcctgtttgtcctccaaatcacgtagtgtccctaacgaacaatctcattggtaggcgggttcccacagatcttcagatctaaacagcggttggcttttagacattatatatattatcagagaagtagcctagtggtcgtggggcacagaaaaaatagataggggcagctctaaagaccagctgttaagacagacaactgcaaactcatttaagcaagagaaaaacagctctaattcgagattgtgaagcaacacttctaaattcaaagacatagagttgtcaaatcaggatttttttttttttaaatgatatcctttcgaatgtaactgattttgggaaaatcacatgttcagaattgaggctaaatggtttgatcaggttttctctttgaagagaccacagccttaggaaatggttcttgatctatacaattccaccttggacactgggttaattctgtttgcccctggaacacaatcacgtaagtttccttctagactggcatcctgatgtgtcttgagtataatcacatgttgctacctagtaaataaaatcttaagaagatccgtggctttccttcaccagttcatagcatcgtgattcattgcccggattggactcgactctactcactggacatctaaccactccacttaattaacaatacccaccctacaggggtgttgtaaggattaaaatttaaaatacccgtgttttctacagtgcctggctcaaaagctactgcaagctcgttactgctcatcctccagaggcccacatcaagtcagccacgactcaaggagactccaaagataaaagctgaagccaaaatatatgattctaaacaccctcctcggctactgcaaagcactgtgagcactttctcaggacgagagccaagaagcccagcacctatgggtcaccacagtttccgaggtcccagatgaaaaagatgcgctcgctaccaccgtgcggcggtcctttctctcgcaatagtctcaatgctcccgggccctgcctccggacgccaggacagaggtaccaaaatctcacctcctgcaaagaaacctaattgctacgggggccggaagaggaagaggtgcggctccgacagccagaggggcgggcatacgcagcctccctcggctcagcctgctactggggatgcagagcgtcctggtcgccatgaaaacaggccacacctcggcgatcccggccggtggtttgcaagtgcgcaggcgcgcgcccccttccgcgcatgagcagtgctgctcccaacccgccagtcgcggtctccggcgccagctacgccgctgccgctgtcactatggcccattacaaagccgccgactcgaagcgtgagcagttccggaggtacttggagaagtcgggggtgctggacacgctgaccaaggtgttggtagccttatatgaagaaccagagaaacctaacagtgctttggattttttaaagcatcacttaggagctgctactccagaaaatccagaaatagagctgcttcgcctagaactggccgaaatgaaagagaagtatgaagctattgtagaagaaaataaaaaactgaaagcaaagcttgctcagtatgaaccacctcaggaggagaagcgtgctgaataggattcttctcagtttgaaagacaatgaaaaatggttttgtatgacttgaatagtttgtatagtatataatcttttctgaacagatgctatagaactcttttaatatgtttaattcacctatcacactctgttaaaaacacatagaatcatcaataaaaactcaatataactttctttgggtcttaaagcaggagaatccaaagtaaatcctgaacaaaacctaaacacagccatctaactcattaccttaaaagacattctgtttattagtctgattaggaatgatggcactggttgtattttagccaagacagtttagcatggagctattccttggtgcagttcaggatatgaacacaggtacagtcattctttgaaggtgacactgttctgtatattccctataggcagctggagagatctgtgtgacacaagatgcttttgtacgggttcccatgaatcttctgctcttgtttgtgtgacatggaacaaataacttctttgccaccactttgccttagataactgtgtgtgtgtgtgccagtttgaactctgacaccacattttccttctatgcaatcatgcctgtctgataatcttgcattgctttcctctgagctttagtgggtcctagttgcacactggcctttctgtgctgtttttcaatttgcctaataatagcagttaccctgattgtaatttatgtaactttaaacaggatcacactgtaccccctgcctgccttatttgcttactgagcacaggacagaggcaatatacaactctgggttcacacacaagctgagatgagaagaggaatgagccatatattggggaaaatcatagtttgtaggtataattatatagtgcttttctccctcaaagtatttttctagccttgaattcattttatcttcattatccctgtgaagtaggtgggacaagtataaggggaagaggggtgctgaatttttaggccaaagactgatattaatacaaatcactcactaactgtagagccttgggcattatcagtgaactactctgagatttactgtcttcatctgtttaatgagtagaatgtccgtgatgcctacctcacagggttgttgtgagggtcaaatgagaatgtatgtgaaagatttgtaaatggtaaagcactatattcttgtttgttagtcctttttcctttctttgggtagacctacagtcagatgttttgttttatggatcacttattttccttactggtagactgtcgttttatagacatattcctatttcatatattctctccctgttgttagagaacctatctttgtttttggtcaaaacacacatagaaaacaaaatgatccaatgaaaactggtttaactagcaaaagccttggcacctgttggagactatgaccaagccaataaaaagggcatttaaatcagccctgttagtaggaatgtggctatggctggtgcctcttctagtcacaagtttgtttttggagggggtccagaagatcattcccttgcatagatttctcttttaccaatttgagtgcctcctacatgggcagcagtggactaagtgctgggtgtgataaagaggaatgacttaattatgagactgtatataatcaaatacagtgtgggttaggacctgtggcagaccattataataaagcatggccccgtgagggttttgaaagagaga

SEQ ID NO: 6158 - protein, 126 aa, Homo sapiens
MSSAAPNPPVAVSGASYAAAAVTMAHYKAADSKREQFRRYLEKSGVLDTLTKVLVALYEEPEKPNSALDFLKHHLGAATPENPEIELLRLELAEMKEKYEAIVEENKKLKAKLAQYEPPQEEKRAE

SEQ ID NO: 6159 - DNA, 3419 bp, Homo sapiens
cagttcagaaagggcacagtcagaacccttcctccttcacaaggagattctcaatcacttgacattccaaacactgctgattctttgggagggctgtcctttgagccagggttggtcagaacctgtaataatcctgtttgtcctccaaatcacgtagtgtccctaacgaacaatctcattggtaggcgggttcccacagatcttcagatctaaacagcggttggcttttagacattatatatattatcagagaagtagcctagtggtcgtggggcacagaaaaaatagataggggcagctctaaagaccagctgttaagacagacaactgcaaactcatttaagcaagagaaaaacagctctaattcgagattgtgaagcaacacttctaaattcaaagacatagagttgtcaaatcaggatttttttttttttaaatgatatcctttcgaatgtaactgattttgggaaaatcacatgttcagaattgaggctaaatggtttgatcaggttttctctttgaagagaccacagccttaggaaatggttcttgatctatacaattccaccttggacactgggttaattctgtttgcccctggaacacaatcacgtaagtttccttctagactggcatcctgatgtgtcttgagtataatcacatgttgctacctagtaaataaaatcttaagaagatccgtggctttccttcaccagttcatagcatcgtgattcattgcccggattggactcgactctactcactggacatctaaccactccacttaattaacaatacccaccctacaggggtgttgtaaggattaaaatttaaaatacccgtgttttctacagtgcctggctcaaaagctactgcaagctcgttactgctcatcctccagaggcccacatcaagtcagccacgactcaaggagactccaaagataaaagctgaagccaaaatatatgattctaaacaccctcctcggctactgcaaagcactgtgagcactttctcaggacgagagccaagaagcccagcacctatgggtcaccacagtttccgaggtcccagatgaaaaagatgcgctcgctaccaccgtgcggcggtcctttctctcgcaatagtctcaatgctcccgggccctgcctccggacgccaggacagaggtaccaaaatctcacctcctgcaaagaaacctaattgctacgggggccggaagaggaagaggtgcggctccgacagccagaggggcgggcatacgcagcctccctcggctcagcctgctactggggatgcagagcgtcctggtcgccatgaaaacaggccacacctcggcgatcccggccggtggtttgcaagtgcgcaggcgcgcgcccccttccgcgcatgagcagtgctgctcccaacccgccagtcgcggtctccggcgccagctacgccgctgccgctgtcactatggcccattacaaagccgccgactcgaagcgtgagcagttccggaggtacttggagaagtcgggggtgctggacacgctgaccaaggcatcacttaggagctgctactccagaaaatccagaaatagagctgcttcgcctagaactggccgaaatgaaagagaagtatgaagctattgtagaagaaaataaaaaactgaaagcaaagcttgctcagtatgaaccacctcaggaggagaagcgtgctgaataggattcttctcagtttgaaagacaatgaaaaatggttttgtatgacttgaatagtttgtatagtatataatcttttctgaacagatgctatagaactcttttaatatgtttaattcacctatcacactctgttaaaaacacatagaatcatcaataaaaactcaatataactttctttgggtcttaaagcaggagaatccaaagtaaatcctgaacaaaacctaaacacagccatctaactcattaccttaaaagacattctgtttattagtctgattaggaatgatggcactggttgtattttagccaagacagtttagcatggagctattccttggtgcagttcaggatatgaacacaggtacagtcattctttgaaggtgacactgttctgtatattccctataggcagctggagagatctgtgtgacacaagatgcttttgtacgggttcccatgaatcttctgctcttgtttgtgtgacatggaacaaataacttctttgccaccactttgccttagataactgtgtgtgtgtgtgccagtttgaactctgacaccacattttccttctatgcaatcatgcctgtctgataatcttgcattgctttcctctgagctttagtgggtcctagttgcacactggcctttctgtgctgtttttcaatttgcctaataatagcagttaccctgattgtaatttatgtaactttaaacaggatcacactgtaccccctgcctgccttatttgcttactgagcacaggacagaggcaatatacaactctgggttcacacacaagctgagatgagaagaggaatgagccatatattggggaaaatcatagtttgtaggtataattatatagtgcttttctccctcaaagtatttttctagccttgaattcattttatcttcattatccctgtgaagtaggtgggacaagtataaggggaagaggggtgctgaatttttaggccaaagactgatattaatacaaatcactcactaactgtagagccttgggcattatcagtgaactactctgagatttactgtcttcatctgtttaatgagtagaatgtccgtgatgcctacctcacagggttgttgtgagggtcaaatgagaatgtatgtgaaagatttgtaaatggtaaagcactatattcttgtttgttagtcctttttcctttctttgggtagacctacagtcagatgttttgttttatggatcacttattttccttactggtagactgtcgttttatagacatattcctatttcatatattctctccctgttgttagagaacctatctttgtttttggtcaaaacacacatagaaaacaaaatgatccaatgaaaactggtttaactagcaaaagccttggcacctgttggagactatgaccaagccaataaaaagggcatttaaatcagccctgttagtaggaatgtggctatggctggtgcctcttctagtcacaagtttgtttttggagggggtccagaagatcattcccttgcatagatttctcttttaccaatttgagtgcctcctacatgggcagcagtggactaagtgctgggtgtgataaagaggaatgacttaattatgagactgtatataatcaaatacagtgtgggttaggacctgtggcagaccattataataaagcatggccccgtgagggttttgaaagagaga

SEQ ID NO: 6160 - protein, 79 aa, Homo sapiens
MSSAAPNPPVAVSGASYAAAAVTMAHYKAADSKREQFRRYLEKSGVLDTLTKASLRSCYSRKSRNRAASPRTGRNEREV

SEQ ID NO: 6161 - DNA, 3931 bp, Homo sapiens
atggtgctgttttaaaagcaaggataagcagaaagggacatggattttagttgatggatgactcactcactacattcaactgaactgaatctgctctataccagcaaagggacaaattcagaaaataaattgaagatggccatgctgtaacttctaaacatggtttgcttctcagatttacctaaactaagaaaggtttgctttaagaaatagtgctcccttcagaatggaagaatttatctgcctcttatttgatgtggatcagagctaagatggctgactaaataaacatgggggactggaatctccttggagatactctggaggaagttcacatccactccaccatgattggaaagatctggctcaccatcctgttcatatttcgaatgcttgttctgggtgtagcagctgaagatgtctggaatgatgagcagtctggcttcatctgcaatacagaacaaccaggctgcagaaatgtatgctacgaccaggcctttcctatctccctcattagatactgggttctgcaggtgatatttgtgtcttcaccatccctggtctacatgggccatgcattgtaccgactgagagttcttgaggaagagaggcaaaggatgaaagctcagttaagagtagaactggaggaggtagagtttgaaatgcctagggatcggaggagattggagcaagagctttgtcagctggagaaaaggaaactaaataaagctccactcagaggaaccttgctttgcacttatgtgatacacattttcactcgctctgtggttgaagttggattcatgattggacagtaccttttatatggatttcacttagagccgctatttaagtgccatggccacccgtgtccaaatataatcgactgttttgtctcaagaccaacagaaaagacaatattcctattatttatgcaatctatagccactatttcacttttcttaaacattcttgaaattttccacctaggttttaaaaagattaaaagagggctttggggaaaatacaagttgaagaaggaacataatgaattccatgcaaacaaggcaaaacaaaatgtagccaaataccagagcacatctgcaaattcactgaagcgactcccttctgcccctgattataatctgttagtggaaaagcaaacacacactgcagtgtaccctagtttaaattcatcttctgtattccagccaaatcctgacaatcatagtgtaaatgatgagaaatgcattttggatgaacaggaaactgtactttctaatgagatttccacacttagtactagttgtagtcattttcaacacatcagttcaaacaataacaaagacactcataaaatatttggaaaagaacttaatggtaaccagttaatggaaaaaagagaaactgaaggcaaagacagcaaaaggaactactactctagaggtcaccgttctattccaggtgttgctatagatggagagaacaacatgaggcagtcaccccaaacagttttctccttgccagctaactgcgattggaaaccgcggtggcttagagctacatggggttcctctacagaacatgaaaaccgggggtcacctcctaaagtgcctggctcaaaagctactgcaagctcgttactgctcatcctccagaggcccacatcaagtcagccacgactcaaggagactccaaagataaaagctgaagccaaaatatatgattctaaacaccctcctcggctactgcaaagcactgtgagcactttctcaggacgagagccaagaagcccagcacctatgggtcaccacagtttccgaggtcccagatgaaaaagatgcgctcgctaccaccgtgcggcggtcctttctctcgcaatagtctcaatgctcccgggccctgcctccggacgccaggacagaggccgccgactcgaagcgtgagcagttccggaggtacttggagaagtcgggggtgctggacacgctgaccaaggtgttggtagccttatatgaagaaccagagaaacctaacagtgctttggattttttaaagcatcacttaggagctgctactccagaaaatccagaaatagagctgcttcgcctagaactggccgaaatgaaagagaagtatgaagctattgtagaagaaaataaaaaactgaaagcaaagcttgctcagtatgaaccacctcaggaggagaagcgtgctgaataggattcttctcagtttgaaagacaatgaaaaatggttttgtatgacttgaatagtttgtatagtatataatcttttctgaacagatgctatagaactcttttaatatgtttaattcacctatcacactctgttaaaaacacatagaatcatcaataaaaactcaatataactttctttgggtcttaaagcaggagaatccaaagtaaatcctgaacaaaacctaaacacagccatctaactcattaccttaaaagacattctgtttattagtctgattaggaatgatggcactggttgtattttagccaagacagtttagcatggagctattccttggtgcagttcaggatatgaacacaggtacagtcattctttgaaggtgacactgttctgtatattccctataggcagctggagagatctgtgtgacacaagatgcttttgtacgggttcccatgaatcttctgctcttgtttgtgtgacatggaacaaataacttctttgccaccactttgccttagataactgtgtgtgtgtgtgccagtttgaactctgacaccacattttccttctatgcaatcatgcctgtctgataatcttgcattgctttcctctgagctttagtgggtcctagttgcacactggcctttctgtgctgtttttcaatttgcctaataatagcagttaccctgattgtaatttatgtaactttaaacaggatcacactgtaccccctgcctgccttatttgcttactgagcacaggacagaggcaatatacaactctgggttcacacacaagctgagatgagaagaggaatgagccatatattggggaaaatcatagtttgtaggtataattatatagtgcttttctccctcaaagtatttttctagccttgaattcattttatcttcattatccctgtgaagtaggtgggacaagtataaggggaagaggggtgctgaatttttaggccaaagactgatattaatacaaatcactcactaactgtagagccttgggcattatcagtgaactactctgagatttactgtcttcatctgtttaatgagtagaatgtccgtgatgcctacctcacagggttgttgtgagggtcaaatgagaatgtatgtgaaagatttgtaaatggtaaagcactatattcttgtttgttagtcctttttcctttctttgggtagacctacagtcagatgttttgttttatggatcacttattttccttactggtagactgtcgttttatagacatattcctatttcatatattctctccctgttgttagagaacctatctttgtttttggtcaaaacacacatagaaaacaaaatgatccaatgaaaactggtttaactagcaaaagccttggcacctgttggagactatgaccaagccaataaaaagggcatttaaatcagccctgttagtaggaatgtggctatggctggtgcctcttctagtcacaagtttgtttttggagggggtccagaagatcattcccttgcatagatttctcttttaccaatttgagtgcctcctacatgggcagcagtggactaagtgctgggtgtgataaagaggaatgacttaattatgagactgtatataatcaaatacagtgtgggttaggacctgtggcagaccattataataaagcatggccccgtgagggttttgaaagagaga

SEQ ID NO: 6162 - protein, 514 aa, Homo sapiens
MGDWNLLGDTLEEVHIHSTMIGKIWLTILFIFRMLVLGVAAEDVWNDEQSGFICNTEQPGCRNVCYDQAFPISLIRYWVLQVIFVSSPSLVYMGHALYRLRVLEEERQRMKAQLRVELEEVEFEMPRDRRRLEQELCQLEKRKLNKAPLRGTLLCTYVIHIFTRSVVEVGFMIGQYLLYGFHLEPLFKCHGHPCPNIIDCFVSRPTEKTIFLLFMQSIATISLFLNILEIFHLGFKKIKRGLWGKYKLKKEHNEFHANKAKQNVAKYQSTSANSLKRLPSAPDYNLLVEKQTHTAVYPSLNSSSVFQPNPDNHSVNDEKCILDEQETVLSNEISTLSTSCSHFQHISSNNNKDTHKIFGKELNGNQLMEKRETEGKDSKRNYYSRGHRSIPGVAIDGENNMRQSPQTVFSLPANCDWKPRWLRATWGSSTEHENRGSPPKVPGSKATASSLLLILQRPTSSQPRLKETPKIKAEAKIYDSKHPPRLLQSTVSTFSGREPRSPAPMGHHSFRGPR

SEQ ID NO: 6163 - DNA, 1434 bp, Homo sapiens
ctatgaagtagctgagtgagcctaatccccaaatgttggtagccttatatgaagaaccagagaaacctaacagtgctttggattttttaaagcatcacttaggagctgctactccagaaaatccagaaatagagctgcttcgcctagaactggccgaaatgaaagagaagtatgaagctattgtagaagaaaataaaaaactgaaagcaaagcttgctcagtatgaaccacctcaggaggagaagcgtgctgaataggattcttctcagtttgaaagacaatgaaaaatggttttgtatgacttgaatagtttgtatagtatataatcttttctgaacagatgctatagaactcttttaatatgtttaattcacctatcacactctgttaaaaacacatagaatcatcaataaaaactcaatataactttctttgggtcttaaagcaggagaatccaaagtaaatcctgaacaaaacctaaacacagccatctaactcattaccttaaaagacattctgtttattagtctgattaggaatgatggcactggttgtattttagccaagacagtttagcatggagctattccttggtgcagttcaggatatgaacacaggtacagtcattctttgaaggtgacactgttctgtatattccctataggcagctggagagatctgtgtgacacaagatgcttttgtacgggttcccatgaatcttctgctcttgtttgtgtgacatggaacaaataacttctttgccaccactttgccttagataactgtgtgtgtgtgtgccagtttgaactctgacaccacattttccttctatgcaatcatgcctgtctgataatcttgcattgctttcctctgagctttagtgggtcctagttgcacactggcctttctgtgctgtttttcaatttgcctaataatagcagttaccctgattgtaatttatgtaactttaaacaggatcacactgtaccccctgcctgccttatttgcttactgagcacaggacagaggcaatatacaactctgggttcacacacaagctgagatgagaagaggaatgagccatatattggggaaaatcatagtttgtaggtataattatatagtgcttttctccctcaaagtatttttctagccttgaattcattttatcttcattatccctgtgaagtaggtgggacaagtataaggggaagaggggtgctgaatttttaggccaaagactgatattaatacaaatcactcactaactgtagagccttgggcattatcagtgaactactctgagatttactgtcttcatctgtttaatgagtagaatgtccgtgatgcctacctcacagggttgttgtgagggtcaaatgagaatgtatgtgaaagatttgtaaatggtaaagcactatattcttgtttgtt

SEQ ID NO: 6164 - protein, 74 aa, Homo sapiens; identical to SEQ ID NO: 6152

SEQ ID NO: 6165 - DNA, 1457 bp, Homo sapiens
cactgacccccggtgtctcttcaggccgccgactcgaagcgtgagcagttccggagtgttggtagccttatatgaagaaccagagaaacctaacagtgctttggattttttaaagcatcacttaggagctgctactccagaaaatccagaaatagagctgcttcgcctagaactggccgaaatgaaagagaagtatgaagctattgtagaagaaaataaaaaactgaaagcaaagcttgctcagtatgaaccacctcaggaggagaagcgtgctgaataggattcttctcagtttgaaagacaatgaaaaatggttttgtatgacttgaatagtttgtatagtatataatcttttctgaacagatgctatagaactcttttaatatgtttaattcacctatcacactctgttaaaaacacatagaatcatcaataaaaactcaatataactttctttgggtcttaaagcaggagaatccaaagtaaatcctgaacaaaacctaaacacagccatctaactcattaccttaaaagacattctgtttattagtctgattaggaatgatggcactggttgtattttagccaagacagtttagcatggagctattccttggtgcagttcaggatatgaacacaggtacagtcattctttgaaggtgacactgttctgtatattccctataggcagctggagagatctgtgtgacacaagatgcttttgtacgggttcccatgaatcttctgctcttgtttgtgtgacatggaacaaataacttctttgccaccactttgccttagataactgtgtgtgtgtgtgccagtttgaactctgacaccacattttccttctatgcaatcatgcctgtctgataatcttgcattgctttcctctgagctttagtgggtcctagttgcacactggcctttctgtgctgtttttcaatttgcctaataatagcagttaccctgattgtaatttatgtaactttaaacaggatcacactgtaccccctgcctgccttatttgcttactgagcacaggacagaggcaatatacaactctgggttcacacacaagctgagatgagaagaggaatgagccatatattggggaaaatcatagtttgtaggtataattatatagtgcttttctccctcaaagtatttttctagccttgaattcattttatcttcattatccctgtgaagtaggtgggacaagtataaggggaagaggggtgctgaatttttaggccaaagactgatattaatacaaatcactcactaactgtagagccttgggcattatcagtgaactactctgagatttactgtcttcatctgtttaatgagtagaatgtccgtgatgcctacctcacagggttgttgtgagggtcaaatgagaatgtatgtgaaagatttgtaaatggtaaagcactatattcttgtttgtt

SEQ ID NO: 6166 - protein, 32 aa, Homo sapiens; identical to SEQ ID NO: 6154

SEQ ID NO: 6167 - DNA, 1662 bp, Homo sapiens
cggcgtggctgggggcatgcgggcggtagcaagccgctggtcggctctgggtgggagtggggtcgcgcgcgcaggtttgggcgggagggccccgaggtagtgaggcggaggcggggttgccggactcccagcgccttcttcctgctcggctcccgggctctggccactgacccccggtgtctcttcaggccgccgactcgaagcgtgagcagttccggaggtacttggagaagtcgggggtgctggacacgctgaccaaggtgttggtagccttatatgaagaaccagagaaacctaacagtgctttggattttttaaagcatcacttaggagctgctactccagaaaatccagaaatagagctgcttcgcctagaactggccgaaatgaaagagaagtatgaagctattgtagaagaaaataaaaaactgaaagcaaagcttgctcagtatgaaccacctcaggaggagaagcgtgctgaataggattcttctcagtttgaaagacaatgaaaaatggttttgtatgacttgaatagtttgtatagtatataatcttttctgaacagatgctatagaactcttttaatatgtttaattcacctatcacactctgttaaaaacacatagaatcatcaataaaaactcaatataactttctttgggtcttaaagcaggagaatccaaagtaaatcctgaacaaaacctaaacacagccatctaactcattaccttaaaagacattctgtttattagtctgattaggaatgatggcactggttgtattttagccaagacagtttagcatggagctattccttggtgcagttcaggatatgaacacaggtacagtcattctttgaaggtgacactgttctgtatattccctataggcagctggagagatctgtgtgacacaagatgcttttgtacgggttcccatgaatcttctgctcttgtttgtgtgacatggaacaaataacttctttgccaccactttgccttagataactgtgtgtgtgtgtgccagtttgaactctgacaccacattttccttctatgcaatcatgcctgtctgataatcttgcattgctttcctctgagctttagtgggtcctagttgcacactggcctttctgtgctgtttttcaatttgcctaataatagcagttaccctgattgtaatttatgtaactttaaacaggatcacactgtaccccctgcctgccttatttgcttactgagcacaggacagaggcaatatacaactctgggttcacacacaagctgagatgagaagaggaatgagccatatattggggaaaatcatagtttgtaggtataattatatagtgcttttctccctcaaagtatttttctagccttgaattcattttatcttcattatccctgtgaagtaggtgggacaagtataaggggaagaggggtgctgaatttttaggccaaagactgatattaatacaaatcactcactaactgtagagccttgggcattatcagtgaactactctgagatttactgtcttcatctgtttaatgagtagaatgtccgtgatgcctacctcacagggttgttgtgagggtcaaatgagaatgtatgtgaaagatttgtaaatggtaaagcactatattcttgtttgtt

SEQ ID NO: 6168 - protein, 32 aa, Homo sapiens; identical to SEQ ID NO: 6154

SEQ ID NO: 6169 - DNA, 2947 bp, Homo sapiens
cagttcagaaagggcacagtcagaacccttcctccttcacaaggagattctcaatcacttgacattccaaacactgctgattctttgggagggctgtcctttgagccagggttggtcagaacctgtaataatcctgtttgtcctccaaatcacgtagtgtccctaacgaacaatctcattggtaggcgggttcccacagatcttcagatctaaacagcggttggcttttagacattatatatattatcagagaagtagcctagtggtcgtggggcacagaaaaaatagataggggcagctctaaagaccagctgttaagacagacaactgcaaactcatttaagcaagagaaaaacagctctaattcgagattgtgaagcaacacttctaaattcaaagacatagagttgtcaaatcaggatttttttttttttaaatgatatcctttcgaatgtaactgattttgggaaaatcacatgttcagaattgaggctaaatggtttgatcaggttttctctttgaagagaccacagccttaggaaatggttcttgatctatacaattccaccttggacactgggttaattctgtttgcccctggaacacaatcacgtaagtttccttctagactggcatcctgatgtgtcttgagtataatcacatgttgctacctagtaaataaaatcttaagaagatccgtggctttccttcaccagttcatagcatcgtgattcattgcccggattggactcgactctactcactggacatctaaccactccacttaattaacaatacccaccctacaggggtgttgtaaggattaaaatttaaaatacccgtgttttctacagtgcctggctcaaaagctactgcaagctcgttactgctcatcctccagaggcccacatcaagtcagccacgactcaaggagactccaaagataaaagctgaagccaaaatatatgattctaaacaccctcctcggctactgcaaagcactgtgagcactttctcaggacgagagccaagaagcccagcacctatgggtcaccacagtttccgaggtcccagatgaaaaagatgcgctcgctaccaccgtgcggcggtcctttctctcgcaatagtctcaatgctcccgggccctgcctccggacgccaggacagaggtaccaaaatctcacctcctgcaaagaaacctaattgctacgggggccggaagaggaagaggtgcggctccgacagccagaggggcgggcatacgcagcctccctcggctcagcctgctactggggatgcagagcgtcctggtcgccatgaaaacaggccacacctcggcgatcccggccggtggtttgcaagtgcgcaggcgcgcgcccccttccgcgcatgagcagtgctgctcccaacccgccagtcgcggtctccggcgccagctacgccgctgccgctgtcactatggcccattacaaagccgccgactcgaagcgtgagcagttccggaggtacttggagaagtcgggggtgctggacacgctgaccaaggtgttggtagccttatatgaagaaccagagaaacctaacagtgctttggattttttaaagcatcacttaggagctgctactccagaaaatccagaaatagagctgcttcgcctagaactggccgaaatgaaagagaagtatgaagctattgtagaagaaaataaaaaactgaaagcaaagcttgctcagtatgaaccacctcaggaggagaagcgtgctgaataggattcttctcagtttgaaagacaatgaaaaatggttttgtatgacttgaatagtttgtatagtatataatcttttctgaacagatgctatagaactcttttaatatgtttaattcacctatcacactctgttaaaaacacatagaatcatcaataaaaactcaatataactttctttgggtcttaaagcaggagaatccaaagtaaatcctgaacaaaacctaaacacagccatctaactcattaccttaaaagacattctgtttattagtctgattaggaatgatggcactggttgtattttagccaagacagtttagcatggagctattccttggtgcagttcaggatatgaacacaggtacagtcattctttgaaggtgacactgttctgtatattccctataggcagctggagagatctgtgtgacacaagatgcttttgtacgggttcccatgaatcttctgctcttgtttgtgtgacatggaacaaataacttctttgccaccactttgccttagataactgtgtgtgtgtgtgccagtttgaactctgacaccacattttccttctatgcaatcatgcctgtctgataatcttgcattgctttcctctgagctttagtgggtcctagttgcacactggcctttctgtgctgtttttcaatttgcctaataatagcagttaccctgattgtaatttatgtaactttaaacaggatcacactgtaccccctgcctgccttatttgcttactgagcacaggacagaggcaatatacaactctgggttcacacacaagctgagatgagaagaggaatgagccatatattggggaaaatcatagtttgtaggtataattatatagtgcttttctccctcaaagtatttttctagccttgaattcattttatcttcattatccctgtgaagtaggtgggacaagtataaggggaagaggggtgctgaatttttaggccaaagactgatattaatacaaatcactcactaactgtagagccttgggcattatcagtgaactactctgagatttactgtcttcatctgtttaatgagtagaatgtccgtgatgcctacctcacagggttgttgtgagggtcaaatgagaatgtatgtgaaagatttgtaaatggtaaagcactatattcttgtttgtt

SEQ ID NO: 6170 - protein, 126 aa, Homo sapiens; identical to SEQ ID NO: 6158

SEQ ID NO: 6171 - DNA, 2888 bp, Homo sapiens
cagttcagaaagggcacagtcagaacccttcctccttcacaaggagattctcaatcacttgacattccaaacactgctgattctttgggagggctgtcctttgagccagggttggtcagaacctgtaataatcctgtttgtcctccaaatcacgtagtgtccctaacgaacaatctcattggtaggcgggttcccacagatcttcagatctaaacagcggttggcttttagacattatatatattatcagagaagtagcctagtggtcgtggggcacagaaaaaatagataggggcagctctaaagaccagctgttaagacagacaactgcaaactcatttaagcaagagaaaaacagctctaattcgagattgtgaagcaacacttctaaattcaaagacatagagttgtcaaatcaggatttttttttttttaaatgatatcctttcgaatgtaactgattttgggaaaatcacatgttcagaattgaggctaaatggtttgatcaggttttctctttgaagagaccacagccttaggaaatggttcttgatctatacaattccaccttggacactgggttaattctgtttgcccctggaacacaatcacgtaagtttccttctagactggcatcctgatgtgtcttgagtataatcacatgttgctacctagtaaataaaatcttaagaagatccgtggctttccttcaccagttcatagcatcgtgattcattgcccggattggactcgactctactcactggacatctaaccactccacttaattaacaatacccaccctacaggggtgttgtaaggattaaaatttaaaatacccgtgttttctacagtgcctggctcaaaagctactgcaagctcgttactgctcatcctccagaggcccacatcaagtcagccacgactcaaggagactccaaagataaaagctgaagccaaaatatatgattctaaacaccctcctcggctactgcaaagcactgtgagcactttctcaggacgagagccaagaagcccagcacctatgggtcaccacagtttccgaggtcccagatgaaaaagatgcgctcgctaccaccgtgcggcggtcctttctctcgcaatagtctcaatgctcccgggccctgcctccggacgccaggacagaggtaccaaaatctcacctcctgcaaagaaacctaattgctacgggggccggaagaggaagaggtgcggctccgacagccagaggggcgggcatacgcagcctccctcggctcagcctgctactggggatgcagagcgtcctggtcgccatgaaaacaggccacacctcggcgatcccggccggtggtttgcaagtgcgcaggcgcgcgcccccttccgcgcatgagcagtgctgctcccaacccgccagtcgcggtctccggcgccagctacgccgctgccgctgtcactatggcccattacaaagccgccgactcgaagcgtgagcagttccggaggtacttggagaagtcgggggtgctggacacgctgaccaaggcatcacttaggagctgctactccagaaaatccagaaatagagctgcttcgcctagaactggccgaaatgaaagagaagtatgaagctattgtagaagaaaataaaaaactgaaagcaaagcttgctcagtatgaaccacctcaggaggagaagcgtgctgaataggattcttctcagtttgaaagacaatgaaaaatggttttgtatgacttgaatagtttgtatagtatataatcttttctgaacagatgctatagaactcttttaatatgtttaattcacctatcacactctgttaaaaacacatagaatcatcaataaaaactcaatataactttctttgggtcttaaagcaggagaatccaaagtaaatcctgaacaaaacctaaacacagccatctaactcattaccttaaaagacattctgtttattagtctgattaggaatgatggcactggttgtattttagccaagacagtttagcatggagctattccttggtgcagttcaggatatgaacacaggtacagtcattctttgaaggtgacactgttctgtatattccctataggcagctggagagatctgtgtgacacaagatgcttttgtacgggttcccatgaatcttctgctcttgtttgtgtgacatggaacaaataacttctttgccaccactttgccttagataactgtgtgtgtgtgtgccagtttgaactctgacaccacattttccttctatgcaatcatgcctgtctgataatcttgcattgctttcctctgagctttagtgggtcctagttgcacactggcctttctgtgctgtttttcaatttgcctaataatagcagttaccctgattgtaatttatgtaactttaaacaggatcacactgtaccccctgcctgccttatttgcttactgagcacaggacagaggcaatatacaactctgggttcacacacaagctgagatgagaagaggaatgagccatatattggggaaaatcatagtttgtaggtataattatatagtgcttttctccctcaaagtatttttctagccttgaattcattttatcttcattatccctgtgaagtaggtgggacaagtataaggggaagaggggtgctgaatttttaggccaaagactgatattaatacaaatcactcactaactgtagagccttgggcattatcagtgaactactctgagatttactgtcttcatctgtttaatgagtagaatgtccgtgatgcctacctcacagggttgttgtgagggtcaaatgagaatgtatgtgaaagatttgtaaatggtaaagcactatattcttgtttgtt

SEQ ID NO: 6172 - protein, 79 aa, Homo sapiens; identical to SEQ ID NO: 6160

SEQ ID NO: 6173 - DNA, 3400 bp, Homo sapiens
atggtgctgttttaaaagcaaggataagcagaaagggacatggattttagttgatggatgactcactcactacattcaactgaactgaatctgctctataccagcaaagggacaaattcagaaaataaattgaagatggccatgctgtaacttctaaacatggtttgcttctcagatttacctaaactaagaaaggtttgctttaagaaatagtgctcccttcagaatggaagaatttatctgcctcttatttgatgtggatcagagctaagatggctgactaaataaacatgggggactggaatctccttggagatactctggaggaagttcacatccactccaccatgattggaaagatctggctcaccatcctgttcatatttcgaatgcttgttctgggtgtagcagctgaagatgtctggaatgatgagcagtctggcttcatctgcaatacagaacaaccaggctgcagaaatgtatgctacgaccaggcctttcctatctccctcattagatactgggttctgcaggtgatatttgtgtcttcaccatccctggtctacatgggccatgcattgtaccgactgagagttcttgaggaagagaggcaaaggatgaaagctcagttaagagtagaactggaggaggtagagtttgaaatgcctagggatcggaggagattggagcaagagctttgtcagctggagaaaaggaaactaaataaagctccactcagaggaaccttgctttgcacttatgtgatacacattttcactcgctctgtggttgaagttggattcatgattggacagtaccttttatatggatttcacttagagccgctatttaagtgccatggccacccgtgtccaaatataatcgactgttttgtctcaagaccaacagaaaagacaatattcctattatttatgcaatctatagccactatttcacttttcttaaacattcttgaaattttccacctaggttttaaaaagattaaaagagggctttggggaaaatacaagttgaagaaggaacataatgaattccatgcaaacaaggcaaaacaaaatgtagccaaataccagagcacatctgcaaattcactgaagcgactcccttctgcccctgattataatctgttagtggaaaagcaaacacacactgcagtgtaccctagtttaaattcatcttctgtattccagccaaatcctgacaatcatagtgtaaatgatgagaaatgcattttggatgaacaggaaactgtactttctaatgagatttccacacttagtactagttgtagtcattttcaacacatcagttcaaacaataacaaagacactcataaaatatttggaaaagaacttaatggtaaccagttaatggaaaaaagagaaactgaaggcaaagacagcaaaaggaactactactctagaggtcaccgttctattccaggtgttgctatagatggagagaacaacatgaggcagtcaccccaaacagttttctccttgccagctaactgcgattggaaaccgcggtggcttagagctacatggggttcctctacagaacatgaaaaccgggggtcacctcctaaagtgcctggctcaaaagctactgcaagctcgttactgctcatcctccagaggcccacatcaagtcagccacgactcaaggagactccaaagataaaagctgaagccaaaatatatgattctaaacaccctcctcggctactgcaaagcactgtgagcactttctcaggacgagagccaagaagcccagcacctatgggtcaccacagtttccgaggtcccagatgaaaaagatgcgctcgctaccaccgtgcggcggtcctttctctcgcaatagtctcaatgctcccgggccctgcctccggacgccaggacagaggccgccgactcgaagcgtgagcagttccggaggtacttggagaagtcgggggtgctggacacgctgaccaaggtgttggtagccttatatgaagaaccagagaaacctaacagtgctttggattttttaaagcatcacttaggagctgctactccagaaaatccagaaatagagctgcttcgcctagaactggccgaaatgaaagagaagtatgaagctattgtagaagaaaataaaaaactgaaagcaaagcttgctcagtatgaaccacctcaggaggagaagcgtgctgaataggattcttctcagtttgaaagacaatgaaaaatggttttgtatgacttgaatagtttgtatagtatataatcttttctgaacagatgctatagaactcttttaatatgtttaattcacctatcacactctgttaaaaacacatagaatcatcaataaaaactcaatataactttctttgggtcttaaagcaggagaatccaaagtaaatcctgaacaaaacctaaacacagccatctaactcattaccttaaaagacattctgtttattagtctgattaggaatgatggcactggttgtattttagccaagacagtttagcatggagctattccttggtgcagttcaggatatgaacacaggtacagtcattctttgaaggtgacactgttctgtatattccctataggcagctggagagatctgtgtgacacaagatgcttttgtacgggttcccatgaatcttctgctcttgtttgtgtgacatggaacaaataacttctttgccaccactttgccttagataactgtgtgtgtgtgtgccagtttgaactctgacaccacattttccttctatgcaatcatgcctgtctgataatcttgcattgctttcctctgagctttagtgggtcctagttgcacactggcctttctgtgctgtttttcaatttgcctaataatagcagttaccctgattgtaatttatgtaactttaaacaggatcacactgtaccccctgcctgccttatttgcttactgagcacaggacagaggcaatatacaactctgggttcacacacaagctgagatgagaagaggaatgagccatatattggggaaaatcatagtttgtaggtataattatatagtgcttttctccctcaaagtatttttctagccttgaattcattttatcttcattatccctgtgaagtaggtgggacaagtataaggggaagaggggtgctgaatttttaggccaaagactgatattaatacaaatcactcactaactgtagagccttgggcattatcagtgaactactctgagatttactgtcttcatctgtttaatgagtagaatgtccgtgatgcctacctcacagggttgttgtgagggtcaaatgagaatgtatgtgaaagatttgtaaatggtaaagcactatattcttgtttgtt

SEQ ID NO: 6174 - protein, 514 aa, Homo sapiens; identical to SEQ ID NO: 6162

SEQ ID NO: 6175 - DNA, 1944 bp, Homo sapiens
cagttcagaaagggcacagtcagaacccttcctccttcacaaggagattctcaatcacttgacattccaaacactgctgattctttgggagggctgtcctttgagccagggttggtcagaacctgtaataatcctgtttgtcctccaaatcacgtagtgtccctaacgaacaatctcattggtaggcgggttcccacagatcttcagatctaaacagcggttggcttttagacattatatatattatcagagaagtagcctagtggtcgtggggcacagaaaaaatagataggggcagctctaaagaccagctgttaagacagacaactgcaaactcatttaagcaagagaaaaacagctctaattcgagattgtgaagcaacacttctaaattcaaagacatagagttgtcaaatcaggatttttttttttttaaatgatatcctttcgaatgtaactgattttgggaaaatcacatgttcagaattgaggctaaatggtttgatcaggttttctctttgaagagaccacagccttaggaaatggttcttgatctatacaattccaccttggacactgggttaattctgtttgcccctggaacacaatcacgtaagtttccttctagactggcatcctgatgtgtcttgagtataatcacatgttgctacctagtaaataaaatcttaagaagatccgtggctttccttcaccagttcatagcatcgtgattcattgcccggattggactcgactctactcactggacatctaaccactccacttaattaacaatacccaccctacaggggtgttgtaaggattaaaatttaaaatacccgtgttttctacagtgcctggctcaaaagctactgcaagctcgttactgctcatcctccagaggcccacatcaagtcagccacgactcaaggagactccaaagataaaagctgaagccaaaatatatgattctaaacaccctcctcggctactgcaaagcactgtgagcactttctcaggacgagagccaagaagcccagcacctatgggtcaccacagtttccgaggtcccagatgaaaaagatgcgctcgctaccaccgtgcggcggtcctttctctcgcaatagtctcaatgctcccgggccctgcctccggacgccaggacagaggtaccaaaatctcacctcctgcaaagaaacctaattgctacgggggccggaagaggaagaggtgcggctccgacagccagaggggcgggcatacgcagcctccctcggctcagcctgctactggggatgcagagcgtcctggtcgccatgaaaacaggccacacctcggcgatcccggccggtggtttgcaagtgcgcaggcgcgcgcccccttccgcgcatgagcagtgctgctcccaacccgccagtcgcggtctccggcgccagctacgccgctgccgctgtcactatggcccattacaaagccgccgactcgaagcgtgagcagttccggaggtacttggagaagtcgggggtgctggacacgctgaccaaggtgttggtagccttatatgaagaaccagagaaacctaacagtgctttggattttttaaagcatcacttaggagctgctactccagaaaatccagaaatagagctgcttcgcctagaactggccgaaatgaaagagaagtatgaagctattgtagaagaaaataaaaaactgaaagcaaagcttgctcagtatgaaccacctcaggaggagaagcgtgctgaataggattcttctcagtttgaaagacaatgaaaaatggttttgtatgacttgaatagtttgtatagtatataatcttttctgaacagatgctatagaactcttttaatatgtttaattcacctatcacactctgttaaaaacacatagaatcatcaataaaaactcaatataactttc

SEQ ID NO: 6176 - protein, 126 aa, Homo sapiens; identical to SEQ ID NO: 6158

SEQ ID NO: 6177 - DNA, 1885 bp, Homo sapiens
cagttcagaaagggcacagtcagaacccttcctccttcacaaggagattctcaatcacttgacattccaaacactgctgattctttgggagggctgtcctttgagccagggttggtcagaacctgtaataatcctgtttgtcctccaaatcacgtagtgtccctaacgaacaatctcattggtaggcgggttcccacagatcttcagatctaaacagcggttggcttttagacattatatatattatcagagaagtagcctagtggtcgtggggcacagaaaaaatagataggggcagctctaaagaccagctgttaagacagacaactgcaaactcatttaagcaagagaaaaacagctctaattcgagattgtgaagcaacacttctaaattcaaagacatagagttgtcaaatcaggatttttttttttttaaatgatatcctttcgaatgtaactgattttgggaaaatcacatgttcagaattgaggctaaatggtttgatcaggttttctctttgaagagaccacagccttaggaaatggttcttgatctatacaattccaccttggacactgggttaattctgtttgcccctggaacacaatcacgtaagtttccttctagactggcatcctgatgtgtcttgagtataatcacatgttgctacctagtaaataaaatcttaagaagatccgtggctttccttcaccagttcatagcatcgtgattcattgcccggattggactcgactctactcactggacatctaaccactccacttaattaacaatacccaccctacaggggtgttgtaaggattaaaatttaaaatacccgtgttttctacagtgcctggctcaaaagctactgcaagctcgttactgctcatcctccagaggcccacatcaagtcagccacgactcaaggagactccaaagataaaagctgaagccaaaatatatgattctaaacaccctcctcggctactgcaaagcactgtgagcactttctcaggacgagagccaagaagcccagcacctatgggtcaccacagtttccgaggtcccagatgaaaaagatgcgctcgctaccaccgtgcggcggtcctttctctcgcaatagtctcaatgctcccgggccctgcctccggacgccaggacagaggtaccaaaatctcacctcctgcaaagaaacctaattgctacgggggccggaagaggaagaggtgcggctccgacagccagaggggcgggcatacgcagcctccctcggctcagcctgctactggggatgcagagcgtcctggtcgccatgaaaacaggccacacctcggcgatcccggccggtggtttgcaagtgcgcaggcgcgcgcccccttccgcgcatgagcagtgctgctcccaacccgccagtcgcggtctccggcgccagctacgccgctgccgctgtcactatggcccattacaaagccgccgactcgaagcgtgagcagttccggaggtacttggagaagtcgggggtgctggacacgctgaccaaggcatcacttaggagctgctactccagaaaatccagaaatagagctgcttcgcctagaactggccgaaatgaaagagaagtatgaagctattgtagaagaaaataaaaaactgaaagcaaagcttgctcagtatgaaccacctcaggaggagaagcgtgctgaataggattcttctcagtttgaaagacaatgaaaaatggttttgtatgacttgaatagtttgtatagtatataatcttttctgaacagatgctatagaactcttttaatatgtttaattcacctatcacactctgttaaaaacacatagaatcatcaataaaaactcaatataactttc

SEQ ID NO: 6178 - protein, 79 aa, Homo sapiens; identical to SEQ ID NO: 6160

SEQ ID NO: 6179 - DNA, 421 bp, Homo sapiens
cagatttacctaaactaagaaagtgttggtagccttatatgaagaaccagagaaacctaacagtgctttggattttttaaagcatcacttaggagctgctactccagaaaatccagaaatagagctgcttcgcctagaactggccgaaatgaaagagaagtatgaagctattgtagaagaaaataaaaaactgaaagcaaagcttgctcagtatgaaccacctcaggaggagaagcgtgctgaataggattcttctcagtttgaaagacaatgaaaaatggttttgtatgacttgaatagtttgtatagtatataatcttttctgaacagatgctatagaactcttttaatatgtttaattcacctatcacactctgttaaaaacacatagaatcatcaataaaaactcaatataactttc

SEQ ID NO: 6180 - protein, 32 aa, Homo sapiens; identical to SEQ ID NO: 6154

SEQ ID NO: 6181 - DNA, 3236 bp, Homo sapiens
agaaagggacatggattttagttgatggatgactcactcactacattcaactgaactgaatctgctctataccagcaaagggacaaattcagaaaataaattgaagatggccatgctgtaacttctaaacatggtttgcttctcagatttacctaaactaagaaaggtttgctttaagaaatagtgctcccttcagaatggaagaatttatctgcctcttatttgatgtggatcagagctaagatggctgactaaataaacatgggggactggaatctccttggagatactctggaggaagttcacatccactccaccatgattggaaagatctggctcaccatcctgttcatatttcgaatgcttgttctgggtgtagcagctgaagatgtctggaatgatgagcagtctggcttcatctgcaatacagaacaaccaggctgcagaaatgtatgctacgaccaggcctttcctatctccctcattagatactgggttctgcaggtgatatttgtgtcttcaccatccctggtctacatgggccatgcattgtaccgactgagagttcttgaggaagagaggcaaaggatgaaagctcagttaagagtagaactggaggaggtagagtttgaaatgcctagggatcggaggagattggagcaagagctttgtcagctggagaaaaggaaactaaataaagctccactcagaggaaccttgctttgcacttatgtgatacacattttcactcgctctgtggttgaagttggattcatgattggacagtaccttttatatggatttcacttagagccgctatttaagtgccatggccacccgtgtccaaatataatcgactgttttgtctcaagaccaacagaaaagacaatattcctattatttatgcaatctatagccactatttcacttttcttaaacattcttgaaattttccacctaggttttaaaaagattaaaagagggctttggggaaaatacaagttgaagaaggaacataatgaattccatgcaaacaaggcaaaacaaaatgtagccaaataccagagcacatctgcaaattcactgaagcgactcccttctgcccctgattataatctgttagtggaaaagcaaacacacactgcagtgtaccctagtttaaattcatcttctgtattccagccaaatcctgacaatcatagtgtaaatgatgagaaatgcattttggatgaacaggaaactgtactttctaatgagatttccacacttagtactagttgtagtcattttcaacacatcagttcaaacaataacaaagacactcataaaatatttggaaaagaacttaatggtaaccagttaatggaaaaaagagaaactgaaggcaaagacagcaaaaggaactactactctagaggtcaccgttctattccaggtgttgctatagatggagagaacaacatgaggcagtcaccccaaacagttttctccttgccagctaactgcgattggaaaccgcggtggcttagagctacatggggttcctctacagaacatgaaaaccgggggtcacctcctaaaggtaacctcaagggccagttcagaaagggcacagtcagaacccttcctccttcacaaggagattctcaatcacttgacattccaaacactgctgattctttgggagggctgtcctttgagccagggttggtcagaacctgtaataatcctgtttgtcctccaaatcacgtagtgtccctaacgaacaatctcattggtaggcgggttcccacagatcttcagatctaaacagcggttggcttttagacattatatatattatcagagaagtagcctagtggtcgtggggcacagaaaaaatagataggggcagctctaaagaccagctgttaagacagacaactgcaaactcatttaagcaagagaaaaacagctctaattcgagattgtgaagcaacacttctaaattcaaagacatagagttgtcaaatcaggatttttttttttttaaatgatatcctttcgaatgtaactgattttgggaaaatcacatgttcagaattgaggctaaatggtttgatcaggttttctctttgaagagaccacagccttaggaaatggttcttgatctatacaattccaccttggacactgggttaattctgtttgcccctggaacacaatcacgtaagtttccttctagactggcatcctgatgtgtcttgagtataatcacatgttgctacctagtaaataaaatcttaagaagatccgtggctttccttcaccagttcatagcatcgtgattcattgcccggattggactcgactctactcactggacatctaaccactccacttaattaacaatacccaccctacaggggtgttgtaaggattaaaatttaaaatacccgtgttttctacagtgcctggctcaaaagctactgcaagctcgttactgctcatcctccagaggcccacatcaagtcagccacgactcaaggagactccaaagataaaagctgaagccaaaatatatgattctaaacaccctcctcggctactgcaaagcactgtgagcactttctcaggacgagagccaagaagcccagcacctatgggtcaccacagtttccgaggtcccagatgaaaaagatgcgctcgctaccaccgtgcggcggtcctttctctcgcaatagtctcaatgctcccgggccctgcctccggacgccaggacagaggccgccgactcgaagcgtgagcagttccggaggtacttggagaagtcgggggtgctggacacgctgaccaaggtgttggtagccttatatgaagaaccagagaaacctaacagtgctttggattttttaaagcatcacttaggagctgctactccagaaaatccagaaatagagctgcttcgcctagaactggccgaaatgaaagagaagtatgaagctattgtagaagaaaataaaaaactgaaagcaaagcttgctcagtatgaaccacctcaggaggagaagcgtgctgaataggattcttctcagtttgaaagacaatgaaaaatggttttgtatgacttgaatagtttgtatagtatataatcttttctgaacagatgctatagaactcttttaatatgtttaattcacctatcacactctgttaaaaacacatagaatcatcaataaaaactcaatataactttc

SEQ ID NO: 6182 - protein, 53 aa, Homo sapiens
MKKMRSLPPCGGPFSRNSLNAPGPCLRTPGQRPPTRSVSSSGGTWRSRGCWTR

SEQ ID NO: 6183 - DNA, 2397 bp, Homo sapiens
atggtgctgttttaaaagcaaggataagcagaaagggacatggattttagttgatggatgactcactcactacattcaactgaactgaatctgctctataccagcaaagggacaaattcagaaaataaattgaagatggccatgctgtaacttctaaacatggtttgcttctcagatttacctaaactaagaaaggtttgctttaagaaatagtgctcccttcagaatggaagaatttatctgcctcttatttgatgtggatcagagctaagatggctgactaaataaacatgggggactggaatctccttggagatactctggaggaagttcacatccactccaccatgattggaaagatctggctcaccatcctgttcatatttcgaatgcttgttctgggtgtagcagctgaagatgtctggaatgatgagcagtctggcttcatctgcaatacagaacaaccaggctgcagaaatgtatgctacgaccaggcctttcctatctccctcattagatactgggttctgcaggtgatatttgtgtcttcaccatccctggtctacatgggccatgcattgtaccgactgagagttcttgaggaagagaggcaaaggatgaaagctcagttaagagtagaactggaggaggtagagtttgaaatgcctagggatcggaggagattggagcaagagctttgtcagctggagaaaaggaaactaaataaagctccactcagaggaaccttgctttgcacttatgtgatacacattttcactcgctctgtggttgaagttggattcatgattggacagtaccttttatatggatttcacttagagccgctatttaagtgccatggccacccgtgtccaaatataatcgactgttttgtctcaagaccaacagaaaagacaatattcctattatttatgcaatctatagccactatttcacttttcttaaacattcttgaaattttccacctaggttttaaaaagattaaaagagggctttggggaaaatacaagttgaagaaggaacataatgaattccatgcaaacaaggcaaaacaaaatgtagccaaataccagagcacatctgcaaattcactgaagcgactcccttctgcccctgattataatctgttagtggaaaagcaaacacacactgcagtgtaccctagtttaaattcatcttctgtattccagccaaatcctgacaatcatagtgtaaatgatgagaaatgcattttggatgaacaggaaactgtactttctaatgagatttccacacttagtactagttgtagtcattttcaacacatcagttcaaacaataacaaagacactcataaaatatttggaaaagaacttaatggtaaccagttaatggaaaaaagagaaactgaaggcaaagacagcaaaaggaactactactctagaggtcaccgttctattccaggtgttgctatagatggagagaacaacatgaggcagtcaccccaaacagttttctccttgccagctaactgcgattggaaaccgcggtggcttagagctacatggggttcctctacagaacatgaaaaccgggggtcacctcctaaagtgcctggctcaaaagctactgcaagctcgttactgctcatcctccagaggcccacatcaagtcagccacgactcaaggagactccaaagataaaagctgaagccaaaatatatgattctaaacaccctcctcggctactgcaaagcactgtgagcactttctcaggacgagagccaagaagcccagcacctatgggtcaccacagtttccgaggtcccagatgaaaaagatgcgctcgctaccaccgtgcggcggtcctttctctcgcaatagtctcaatgctcccgggccctgcctccggacgccaggacagaggccgccgactcgaagcgtgagcagttccggaggtacttggagaagtcgggggtgctggacacgctgaccaaggtgttggtagccttatatgaagaaccagagaaacctaacagtgctttggattttttaaagcatcacttaggagctgctactccagaaaatccagaaatagagctgcttcgcctagaactggccgaaatgaaagagaagtatgaagctattgtagaagaaaataaaaaactgaaagcaaagcttgctcagtatgaaccacctcaggaggagaagcgtgctgaataggattcttctcagtttgaaagacaatgaaaaatggttttgtatgacttgaatagtttgtatagtatataatcttttctgaacagatgctatagaactcttttaatatgtttaattcacctatcacactctgttaaaaacacatagaatcatcaataaaaactcaatataactttc

SEQ ID NO: 6184 - protein, 514 aa, Homo sapiens; identical to SEQ ID NO: 6162

SEQ ID NO: 6185 - DNA, 430 bp, Homo sapiens
ctatgaagtagctgagtgagcctaatccccaaatgttggtagccttatatgaagaaccagagaaacctaacagtgctttggattttttaaagcatcacttaggagctgctactccagaaaatccagaaatagagctgcttcgcctagaactggccgaaatgaaagagaagtatgaagctattgtagaagaaaataaaaaactgaaagcaaagcttgctcagtatgaaccacctcaggaggagaagcgtgctgaataggattcttctcagtttgaaagacaatgaaaaatggttttgtatgacttgaatagtttgtatagtatataatcttttctgaacagatgctatagaactcttttaatatgtttaattcacctatcacactctgttaaaaacacatagaatcatcaataaaaactcaatataacttt

SEQ ID NO: 6186 - protein, 74 aa, Homo sapiens; identical to SEQ ID NO: 6152

SEQ ID NO: 6187 - DNA, 453 bp, Homo sapiens
cactgacccccggtgtctcttcaggccgccgactcgaagcgtgagcagttccggagtgttggtagccttatatgaagaaccagagaaacctaacagtgctttggattttttaaagcatcacttaggagctgctactccagaaaatccagaaatagagctgcttcgcctagaactggccgaaatgaaagagaagtatgaagctattgtagaagaaaataaaaaactgaaagcaaagcttgctcagtatgaaccacctcaggaggagaagcgtgctgaataggattcttctcagtttgaaagacaatgaaaaatggttttgtatgacttgaatagtttgtatagtatataatcttttctgaacagatgctatagaactcttttaatatgtttaattcacctatcacactctgttaaaaacacatagaatcatcaataaaaactcaatataacttt

SEQ ID NO: 6188 - protein, 32 aa, Homo sapiens; identical to SEQ ID NO: 6154

SEQ ID NO: 6189 - DNA, 558 bp, Homo sapiens
tgaggcggaggcggggttgccggactcccagcgccttcttcctgctcggctcccgggctctggccactgacccccggtgtctcttcaggccgccgactcgaagcgtgagcagttccggaggtacttggagaagtcgggggtgctggacacgctgaccaaggtgttggtagccttatatgaagaaccagagaaacctaacagtgctttggattttttaaagcatcacttaggagctgctactccagaaaatccagaaatagagctgcttcgcctagaactggccgaaatgaaagagaagtatgaagctattgtagaagaaaataaaaaactgaaagcaaagcttgctcagtatgaaccacctcaggaggagaagcgtgctgaataggattcttctcagtttgaaagacaatgaaaaatggttttgtatgacttgaatagtttgtatagtatataatcttttctgaacagatgctatagaactcttttaatatgtttaattcacctatcacactctgttaaaaacacatagaatcatcaataaaaactcaatataacttt

SEQ ID NO: 6190 - protein, 32 aa, Homo sapiens; identical to SEQ ID NO: 6154

SEQ ID NO: 6191 - DNA, 418 bp, Homo sapiens
cgaccaggacgctctgcatccccagtagcaggctgagccgagggaggctgcgtatgcccgcccctctggctgtcggagccgcacctcttcctcttccggcccccgtagcaattaggtttctttgcaggagatgaagccagactgctcatcattccagacatcttcagctgctacacccagaacaagcattcgaaatatgaacaggatggtgagccagatctttccaatcatggtggagtggatgtgaacttcctccagagtatctccaaggagattccagtcccccatgtttatttagtcagccatcttagctctgatccacatcaaataagaggcagataaattcttccattctgaagggagcactatttcttaaagcaaacctatggtgaaaatataacaatatgtcacttctata

SEQ ID NO: 6192 - protein, 38 aa, Homo sapiens
MKPDCSSFQTSSAATPRTSIRNMNRMVSQIFPIMVEWM

SEQ ID NO: 6193 - DNA, 1901 bp, Homo sapiens
cagggagttgtggttgcaacactgtactccagcctgggcaacagagggagactctgtctcaacaaacaaacaaacaaagaaaaaaccccacagctatctagggaaaaagtaaagcaaccagcatatagaagtgacatattgttatattttcaccataggtttgctttaagaaatagtgctcccttcagaatggaagaatttatctgcctcttatttgatgtggatcagagctaagatggctgactaaataaacatgggggactggaatctccttggagatactctggaggaagttcacatccactccaccatgattggaaagatctggctcaccatcctgttcatatttcgaatgcttgttctgggtgtagcagctgaagatgtctggaatgatgagcagtctggcttcatctgcaatacagaacaaccaggctgcagaaatgtatgctacgaccaggcctttcctatctccctcattagatactgggttctgcaggtgatatttgtgtcttcaccatccctggtctacatgggccatgcattgtaccgactgagagttcttgaggaagagaggcaaaggatgaaagctcagttaagagtagaactggaggaggtagagtttgaaatgcctagggatcggaggagattggagcaagagctttgtcagctggagaaaaggaaactaaataaagctccactcagaggaaccttgctttgcacttatgtgatacacattttcactcgctctgtggttgaagttggattcatgattggacagtaccttttatatggatttcacttagagccgctatttaagtgccatggccacccgtgtccaaatataatcgactgttttgtctcaagaccaacagaaaagacaatattcctattatttatgcaatctatagccactatttcacttttcttaaacattcttgaaattttccacctaggttttaaaaagattaaaagagggctttggggaaaatacaagttgaagaaggaacataatgaattccatgcaaacaaggcaaaacaaaatgtagccaaataccagagcacatctgcaaattcactgaagcgactcccttctgcccctgattataatctgttagtggaaaagcaaacacacactgcagtgtaccctagtttaaattcatcttctgtattccagccaaatcctgacaatcatagtgtaaatgatgagaaatgcattttggatgaacaggaaactgtactttctaatgagatttccacacttagtactagttgtagtcattttcaacacatcagttcaaacaataacaaagacactcataaaatatttggaaaagaacttaatggtaaccagttaatggaaaaaagagaaactgaaggcaaagacagcaaaaggaactactactctagaggtcaccgttctattccaggtgttgctatagatggagagaacaacatgaggcagtcaccccaaacagttttctccttgccagctaactgcgattggaaaccgcggtggcttagagctacatggggttcctctacagaacatgaaaaccgggggtcacctcctaaaggtaacctcaagggccagttcagaaagggcacagtcagaacccttcctccttcacaaggagattctcaatcacttgacattccaaacactgctgattctttgggagggctgtcctttgagccagggttggtcagaacctgtaataatcctgtttgtcctccaaatcacgtagtgtccctaacgaacaatctcattggtaggcgggttcccacagatcttcagatctaaacagcggttggcttttagacattatatatattatcagagaagtagcctagtggtcgtggggcacagaaaaaatagataggggcagctctaaagaccagct

SEQ ID NO: 6194 - protein, 515 aa, Homo sapiens; identical to SEQ ID NO: 182

SEQ ID NO: 6195 - DNA, 2301 bp, Homo sapiens
tttgaactcctgacctcaagtgatctacctgccttggccttccaaagtgctgagattacaggcctgaaccactgctccaggccataaatactttttagatttgttctgtaactcagttatgttacttgaaagcagtttgattctttttggtaagatggtaattattcccaccactggacccttttgtgtactctgagcattgccccattaattatggcattttccagtacacatccccacactgcttgcaggaaaggacctagagaaaagtcgcagggcagaaaagcagaggaggacggccctggatttggcttatcagtccttggggccctcctgccccaggaagggcagcgaggaccatggtgttgctgccatcattatcaccctggccatgagattgcaggactggggcagacccagaggaggactggaagggccagagtcagccaggaacacagcagctcagctctcggctgttggcaggtggccttgatggcttttcaaaggcaatcactccacccaggacaaagctcacttttctctggggcaaaacacattggttcatttgttcagttcattaattcaaccagtctgtttctaagggaaacctggctgtggccagtcctgctcccacatccctaggtgcccagtgttcccaagggacctgaattccaaccccagttaggagttcaggggtcagcatccccatgccccacatgcctgttagggaggacagtgaaggctgagcactcttgggctcaccaaacaccagcattgagaaactgccccccatcttccctaggtaaggtgaccttgtaggacagttcatgctattgggatggtctgggtaaggtggccacgagggcaggggaccaaggtctgccccacctttgaccttagcgacatgcccctgattgcctggcccccctctggttgtcgtctgagtcccttctctgggggtacctgggccttgctgcacttcctttgtatgctaacttcatcctgatcaaacttgattttcctactgtgatttctttccaatttcttcatcaagttaaaaattctgtattgagagcagtttcctacattacctcaaatcctgttcaaacaaggattatccctagaagtcagaaaggagggaaaacaagcttagtcacagaagactactctatacttgagcttctgtttcaagggaagtgagtaactggtggtggagccctgcccctctgcagtgtgtggttttgtcctgatatattttaagattgagatgtaactcacctgtcataaaatgcccagacttatgatgtgtggaaacaaaagagttttccagtacagaaagttacttagcctctctggtgctgtgtaagcaacaggtagtcttcccacttcatttttggtggttctttccttggcttgggtaatttccttgcatgctcctttctggagttttctgtatgcagctttctgctctctggtaccctgtcttgtaaactctagcagtccagatctatctggactctaaacttcatctcatcaacttaaagtttgctgagatctgcctgggttcctgcttcatgcgctgtattctgtaatctccctcaaggtagtacctgggcaatcagataactcatctattaataactgattccctgtctctaagggtttactggttttgttttctgatgtctagtatcttgaagaccattctttcctatatgttgtccagtgcttttggctttttcaagtgagacagcaaatcctattcttgtgaccttatcatggtcagaagtagacatttgtatctattttaaaaataaatttctcatatgattatgatataatcaccccagccctagtctataggttagcatttgagaatcattgctctaagttgctctggactacttctttgttttttgagacagagtctcattctgtcaccaggctggagtgcagtggtgcgatctcagctccctgcaacctctgcctcccaggttcaagtgatcctcgtgcctcagactccccagtagttggaattataggcatgtgccaccacagccagctaattttattttttttcaatttttttgagacagagtctcacttccagcctgggtgacagagcgacactcggtctcaaaaaacaaaacaaaacaaaacaaaattagagattgggtctttcccaggcatatggtattctataaaacagacttactctccttggaggatatattttggagaatgcttcataaaatctatgaatactgtacaatgctgataataaaaactttttatacctgt

SEQ ID NO: 6196 - protein, 142 aa, Homo sapiens
MAFSSTHPHTACRKGPREKSQGRKAEEDGPGFGLSVLGALLPQEGQRGPWCCCHHYHPGHEIAGLGQTQRRTGRARVSQEHSSSALGCWQVALMAFQRQSLHPGQSSLFSGAKHIGSFVQFINSTSLFLRETWLWPVLLPHP

SEQ ID NO: 6197 - DNA, 2619 bp, Homo sapiens
gatagggtctcgctttatcactcaggatggagtgtagtgccacgatcttggctcactgcaacctccacctcccgggttcaagcgattctcctgcctcagcatccccagtagctgggattaaaggcatctgccacctcacctggctaattttttgggtacttttcgtagagatggggttttaccatgttggtcaggctggtctcgaatgcccgacctcaggtgatccgcccgcctctgcctcccaaagtgctgggattataggcgtgagccaccgcgccctgcccgagtcaggtttttttattgcaaaagatgggaactgattctggctaattaaatcaggaaatgaattttattgaaagcacattgagtaagttacagaatcacttgaaggctgtagaaacaaggcttgggaaaaaagcagaaacagagaccaggtacctagaattacaccaaattccatcacagagccagataggtgaggacagcctcagtgctgctgctgctgaacgcccagtgctgctgcctttgtcacagccacagctggcgttggatgctggatgccatgctgaccccagtggcaaggcgtctggacactggatactgctgccactgctgcaaccactgtaaagaattttttccatcctcacctccagcctcagaaatcctaagcaaatgcagctgattggtcaagctgccctagctgcctagggacatgcaaaagtgaatattgggcatggttaatgtctgtagtgggatccgtttcctgctgcccaccaggagaagataaattccccaagaaaactgacaaatgacgactacgtacatgttgtcaaagaatccactggaagtctttgacatttgcagattcaacacttgcaattttggaaaggccttggaaagcagtcgttgcgccagacagcccagggaagagcggcagcctgaggacctagggccacctgctgttccctgggattcatgtccttctggggaggagggaggacccaggacaatggctgctgttcatgatctggagatggagagcatgaatctgaatatggggagagagatgaaagaagagctggaggaagaggagaaaatgagagaggatgggggaggtaaagatcgggccaagagtaaaaaggtccacaggattgtctcaaaatggatgctgcccgaaaagtcccgaggaacatacttggagagagctaactgcttcccgcctcccgtgttcatcatctccatcagcctggccgagctggcagtgtttatttactatgctgtgtggaagcctcagaaacagtggatcacgttggacacaggcatcttggagagtccctttatctacagtcctgagaagagggaggaagcctggaggtttatctcatacatgctggtacatgctggagttcagcacatcttggggaatctttgtatgcagcttgttttgggtattcccttggaaatggtccacaaaggcctccgtgtggggctggtgtacctggcaggagtgattgcagggtcccttgccagctccatctttgacccactcagatatcttgtgggagcttcaggaggagtctatgctctgatgggaggctattttatgaatgttctggtgaattttcaagaaatgattcctgcctttggaattttcagactgctgatcatcatcctgataattgtgttggacatgggatttgctctctatagaaggttctttgttcctgaagatgggtctccggtgtcttttgcagctcacattgcaggtggatttgctggaatgtccattggctacacggtgtttagctgctttgataaagcactgctgaaagatccaaggttttggatagcaattgctgcatatttagcttgtgtcttatttgctgtgtttttcaacattttcctatctccagcaaactgacctgcccctattgtaagtcaattaataaaaagagccatctggaggaaataaaaaaaaaaggaagactctatgaagaaacagagaagtctcagaaaaggctaacaattttatatagaggacaaaacagcattaaactcatcagttgcaaagattgcctataaaaggaccttaggatttaaggaaggggcttcttaatgtagaaagggaagaagaagagagaaaagaagggtagtaaaaactagagattggggccaggcgcagtggctcacgcctgtaatcccagcactttgggaggctgaggcgggtgaaatcacctgaggtcatgagttcaagaccagcctgaccaatatggtgaaaccctgtctctactaaagaaaatacaaaaattagccgggcgtggtggcgtgtgcctgtagtcccagctacttgcgaggctgaggcaggagaattgcttgaacctgggaggcgaaggttgcagtgagccgagattgcgccactgcactccagcctgggtgacagagcgacactcggtctcaaaaaacaaaacaaaacaaaacaaaattagagattgggtctttcccaggcatatggtattctataaaacagacttactctccttggaggatatattttggagaatgcttcataaaatctatgaatactgtacaatgctgataataaaaactttttatacctgt

SEQ ID NO: 6198 - protein, 370 aa, Homo sapiens
MTTTYMLSKNPLEVFDICRFNTCNFGKALESSRCARQPREERQPEDLGPPAVPWDSCPSGEEGGPRTMAAVHDLEMESMNLNMGREMKEELEEEEKMREDGGGKDRAKSKKVHRIVSKWMLPEKSRGTYLERANCFPPPVFIISISLAELAVFIYYAVWKPQKQWITLDTGILESPFIYSPEKREEAWRFISYMLVHAGVQHILGNLCMQLVLGIPLEMVHKGLRVGLVYLAGVIAGSLASSIFDPLRYLVGASGGVYALMGGYFMNVLVNFQEMIPAFGIFRLLIIILIIVLDMGFALYRRFFVPEDGSPVSFAAHIAGGFAGMSIGYTVFSCFDKALLKDPRFWIAIAAYLACVLFAVFFNIFLSPAN

SEQ ID NO: 6199 - DNA, 1842 bp, Homo sapiens
aggcaagcggcacaagctcacaactaaaagtgtctgccatggaaaaggagttgtcataagggtgttggccttgccagggccttcctgggtgaggcgaagaagggaaggaaaggccttggaaagcagtcgttgcgccagacagcccagggaagagcggcagcctgaggacctagggccacctgctgttccctgggattcatgtccttctggggaggagggaggacccaggacaatggctgctgttcatgatctggagatggagagcatgaatctgaatatggggagagagatgaaagaagagctggaggaagaggagaaaatgagagaggatgggggaggtaaagatcgggccaagagtaaaaaggtccacaggattgtctcaaaatggatgctgcccgaaaagtcccgaggaacatacttggagagagctaactgcttcccgcctcccgtgttcatcatctccatcagcctggccgagctggcagtgtttatttactatgctgtgtggaagcctcagaaacagtggatcacgttggacacaggcatcttggagagtccctttatctacagtcctgagaagagggaggaagcctggaggtttatctcatacatgctggtacatgctggagttcagcacatcttggggaatctttgtatgcagcttgttttgggtattcccttggaaatggtccacaaaggcctccgtgtggggctggtgtacctggcaggagtgattgcagggtcccttgccagctccatctttgacccactcagatatcttgtgggagcttcaggaggagtctatgctctgatgggaggctattttatgaatgttctggtgaattttcaagaaatgattcctgcctttggaattttcagactgctgatcatcatcctgataattgtgttggacatgggatttgctctctatagaaggttctttgttcctgaagatgggtctccggtgtcttttgcagctcacattgcaggtggatttgctggaatgtccattggctacacggtgtttagctgctttgataaagcactgctgaaagatccaaggttttggatagcaattgctgcatatttagcttgtgtcttatttgctgtgtttttcaacattttcctatctccagcaaactgacctgcccctattgtaagtcaattaataaaaagagccatctggaggaaataaaaaaaaaaggaagactctatgaagaaacagagaagtctcagaaaaggctaacaattttatatagaggacaaaacagcattaaactcatcagttgcaaagattgcctataaaaggaccttaggatttaaggaaggggcttcttaatgtagaaagggaagaagaagagagaaaagaagggtagtaaaaactagagattggggccaggcgcagtggctcacgcctgtaatcccagcactttgggaggctgaggcgggtgaaatcacctgaggtcatgagttcaagaccagcctgaccaatatggtgaaaccctgtctctactaaagaaaatacaaaaattagccgggcgtggtggcgtgtgcctgtagtcccagctacttgcgaggctgaggcaggagaattgcttgaacctgggaggcgaaggttgcagtgagccgagattgcgccactgcactccagcctgggtgacagagcgacactcggtctcaaaaaacaaaacaaaacaaaacaaaattagagattgggtctttcccaggcatatggtattctataaaacagacttactctccttggaggatatattttggagaatgcttcataaaatctatgaatactgtacaatgctgataataaaaactttttatacctgt

SEQ ID NO: 6200 - protein, 303 aa, Homo sapiens; identical to SEQ ID NO: 184

SEQ ID NO: 6201 - DNA, 1830 bp, Homo sapiens
atcttcagggcagcgggcaaccccttggcccaggaagcctggaacgcaaggaccggagggcgtgggctgggacgcccctaccttggtctttcagggaaaggccttggaaagcagtcgttgcgccagacagcccagggaagagcggcagcctgaggacctagggccacctgctgttccctgggattcatgtccttctggggaggagggaggacccaggacaatggctgctgttcatgatctggagatggagagcatgaatctgaatatggggagagagatgaaagaagagctggaggaagaggagaaaatgagagaggatgggggaggtaaagatcgggccaagagtaaaaaggtccacaggattgtctcaaaatggatgctgcccgaaaagtcccgaggaacatacttggagagagctaactgcttcccgcctcccgtgttcatcatctccatcagcctggccgagctggcagtgtttatttactatgctgtgtggaagcctcagaaacagtggatcacgttggacacaggcatcttggagagtccctttatctacagtcctgagaagagggaggaagcctggaggtttatctcatacatgctggtacatgctggagttcagcacatcttggggaatctttgtatgcagcttgttttgggtattcccttggaaatggtccacaaaggcctccgtgtggggctggtgtacctggcaggagtgattgcagggtcccttgccagctccatctttgacccactcagatatcttgtgggagcttcaggaggagtctatgctctgatgggaggctattttatgaatgttctggtgaattttcaagaaatgattcctgcctttggaattttcagactgctgatcatcatcctgataattgtgttggacatgggatttgctctctatagaaggttctttgttcctgaagatgggtctccggtgtcttttgcagctcacattgcaggtggatttgctggaatgtccattggctacacggtgtttagctgctttgataaagcactgctgaaagatccaaggttttggatagcaattgctgcatatttagcttgtgtcttatttgctgtgtttttcaacattttcctatctccagcaaactgacctgcccctattgtaagtcaattaataaaaagagccatctggaggaaataaaaaaaaaaggaagactctatgaagaaacagagaagtctcagaaaaggctaacaattttatatagaggacaaaacagcattaaactcatcagttgcaaagattgcctataaaaggaccttaggatttaaggaaggggcttcttaatgtagaaagggaagaagaagagagaaaagaagggtagtaaaaactagagattggggccaggcgcagtggctcacgcctgtaatcccagcactttgggaggctgaggcgggtgaaatcacctgaggtcatgagttcaagaccagcctgaccaatatggtgaaaccctgtctctactaaagaaaatacaaaaattagccgggcgtggtggcgtgtgcctgtagtcccagctacttgcgaggctgaggcaggagaattgcttgaacctgggaggcgaaggttgcagtgagccgagattgcgccactgcactccagcctgggtgacagagcgacactcggtctcaaaaaacaaaacaaaacaaaacaaaattagagattgggtctttcccaggcatatggtattctataaaacagacttactctccttggaggatatattttggagaatgcttcataaaatctatgaatactgtacaatgctgataataaaaactttttatacctgt

SEQ ID NO: 6202 - protein, 303 aa, Homo sapiens; identical to SEQ ID NO: 184

SEQ ID NO: 6203 - DNA, 938 bp, Homo sapiens
accaaaacaaggctttgcaaaccaccttatgcaaagactaaaatattctctctatactgcttagttctattacttggtctattcctttcaaggtcttctttcatttccttagtgtatgatacaaaacaatacagtacctattttgtgcaagaaaaagtgtctgtcctcagtaattttacaaagagatgagcaaacaactattataaagtacagaatataacaactactatgacaaaaataaatttattgtagaagcacttaggaaggagtgattttctcagcagaagggtggagtccttgctactctgaggaggaggagatagcattttcattaaactttgaagaatctttttttttttttttgagatggagtcccacttgcaccccagcctgggcaacaagagtgagactctgtctcaaaaaaattgaaaaaaaataaaattagctggctgtggtggcacatgcctataattccaactactggggagtctgaggcacgaggatcacttgaacctgggaggcagaggttgcagggagctgagatcgcaccactgcactccagcctggtgacagaatgagactctgtctcaaaaaacaaagaagtagtccagagcaacttagagcaatgattctcaaatgctaacctatagactagggctggggtgattatatcataatcatatgagaaatttatttttaaaatagatacaaatgtctacttctgaccatgataaggtcacaagaataggatttgctgtctcacttgaaaaagccaaaagcactggacaacatataggaaagaatggtcttcaagatactagacatcagaaaacaaaaccagtaaacccttagagacagggaatcagttattaatagatgagttatctgattgcccaggtactaccttgagggagattacagaatacagcgcatgaagc

SEQ ID NO: 6204 - protein, 46 aa, Homo sapiens [sequence omitted]

SEQ ID NO: 6205 - DNA, 697 bp, Homo sapiens
acggaggagcgcctggcagagcgggatcttcagggcagcgggcaaccccttggcccaggaagcctggaacgcaaggaccggagggcgtgggctgggacgcccctaccttggtctttcagggaaaggccttggaaagcagtcgttgcgccagacagcccagggaagagcggcagcctgaggacctagggccacctgctgttccctgggattcatgtccttctggggaggagggaggacccaggacaatggctgctgttcatgatctggagatggagagcatgaatctgaatatggggagagagatgaaagaagagctggaggaagaggagaaaatgagagaggatgggggaggtaaagatcgggccaagagtaaaaaggtccacaggattgtctcaaaatggatgctgcccgaaaagtcccgaggaacatacttggagagagctaactgcttcccgcctcccgtgttcatcatctccatcagcctggccgagctggcagtgtttatttactatgctgtgtggaagcctcagaaacagtggatcacgttggacacaggcatcttggagagtccctttatctacagtcctgagaagagggaggaagcctggaggtttatctcatacatgctggtacatgctgggtaagcaatgatagttaagcccctggtatcagaggtgattatatcattgtaacctct

SEQ ID NO: 6206 - protein, 132 aa, Homo sapiens
MAAVHDLEMESMNLNMGREMKEELEEEEKMREDGGGKDRAKSKKVHRIVSKWMLPEKSRGTYLERANCFPPPVFIISISLAELAVFIYYAVWKPQKQWITLDTGILESPFIYSPEKREEAWRFISYMLVHAG

SEQ ID NO: 6207 - DNA, 662 bp, Homo sapiens
agagcgggatcttcagggcagcgggcaaccccttggcccaggaagcctggaacgcaaggaccggagggcgtgggctgggacgcccctaccttggtctttcagggaaaggccttggaaagcagtcgttgcgccagacagcccagggaagagcggcagcctgaggacctagggccacctgctgttccctgggattcatgtccttctggggaggagggaggacccaggacaatggctgctgttcatgatctggagatggagagcatgaatctgaatatggggagagagatgaaagaagagctggaggaagaggagaaaatgagagaggatgggggaggtaaagatcgggccaagagtaaaaaggtccacaggattgtctcaaaatggatgctgcccgaaaagtcccgaggaacatacttggagagagctaactgcttcccgcctcccgtgttcatcatctccatcagcctggccgaggtgaatggggagcggggtgggcaccggggtaagtggcatggggaagctgggaacaaactaggggtcagatctagatctagagaagagactgggaacatgggagagagcttcgtggggatggggacagcacacacctcacctctgcctctgctctccccacagctgcctttgaggctttccctatactc

SEQ ID NO: 6208 - protein, 143 aa, Homo sapiens
MAAVHDLEMESMNLNMGREMKEELEEEEKMREDGGGKDRAKSKKVHRIVSKWMLPEKSRGTYLERANCFPPPVFIISISLAEVNGERGGHRGKWHGEAGNKLGVRSRSREETGNMGESFVGMGTAHTSPLPLLSPQLPLRLSL

SEQ ID NO: 6209 - DNA, 499 bp, Homo sapiens
gtgttaaatagagcttctctcagggaaagatttcattctgattggtgttcaccttcaaactgcgatgagatccatgaccgggtaaaaaatgtcttgaaatcacatcaggctcatcaaagacatttatatgatgagagagacctagagaaagatgatgaactggaactgaaaagaagtcttttatgtagagactctgcctatgacagtgaccccgagtataggaatgcaccatatgtcctcatctgaaagtctctgcaggatggtctgactcacgcgagtggttttgagataagttgtgttatacctcaagttaggtaaagtcgagagatgaactaacttaaaaagtagtgatgtttacatagaatctaaattggaaaagacaataatatcagcattagaaagtttgcctttaagtaaaaaaaattattagccataataggttttacattcttcgtaatagaatatcctaaagcaataaaacctccactatgtgaactct

SEQ ID NO: 6210 - protein, 81 aa, Homo sapiens
VLNRASLRERFHSDWCSPSNCDEIHDRVKNVLKSHQAHQRHLYDERDLEKDDELELKRSLLCRDSAYDSDPEYRNAPYVLI

SEQ ID NO: 6211 - DNA, 4971 bp, Homo sapiens
gcttctccggcggaacccaggctggaccgcgggccccggcctgggggccactgctgccaccgccgccgccacctcgtctcctccccgtccccgcccagccccaggtctccccgcctcactcgggcccgtggccggggtcactccccgccgcccctccccgcacggatgccgaaggtgaaggcgctgcagtgcgccctggcgctggagatcagctcagtaacttgcccaggagtcgtgcttaaagacaaagaggacatctatcttagcatctgtgtgtttggccaatacaaaaagacacaatgtgtcccagccacttttcccctggtcttcaatgccagaatggtgtttgaaaaggtgttcccggacgcagtagatcctggagatgtggttacacagcttgaatatgatacagcagtgttcgagttgatacagctagttccaccagtgggtgaaacactgtctacgtatgacgaaaatacacgagatttcatgtttccgggtccaaaccaaatgtctggacaccatgattcaaaccgccaggttaccatgaggaggatttctggccttcgaggaaatgctccaaggctggaattttctacgacttcagtgattactgaatgtctgataagttcaaggaaatgccacactcaggataaatttatttaccatttggctccagttgaaaaatcacatggcagactgcaaaacagaacatcaagatcacaaaagaaaaaatccaagtcacctgagagaagtaaatactgtataaatgcaaaaaactacgaacagcctacaatttcttcaaaatcacactctccatctccctacacaaaaagacgcatgtgtgagctatctgaagacaccaggcggcggctggcccatttaaatctgggaccctatgagttcaaaaaagaaacagataaacctccatttgtgattagacatgttgatcccccaagtcccagggctgatactttattgggatcttctggaagagactgtgaaagagatggatggtcaagggtgcacaatgatcattctcatcttggctgctgccgacccaaggattataaggttatcaggacaccccatgggagagacttcgatgactctttagaaaaatgtgaagagtatttgagcccaaggtcgtgtagtaagccccggcattcagcgaggaccttgctagtccattcagcaccctcaacaatgccaaagcattctccaagccctgtgttaaatagagcttctctcagggaaagatttcattctgattggtgttcaccttcaaactgcgatgagatccatgaccgggtaaaaaatgtcttgaaatcacatcaggctcatcaaagacatttatatgatgagagagacctagagaaagatgatgaactggaactgaaaagaagtcttttatgtagagactctgcctatgacagtgaccccgagtatagctcatgtcagcagccacgtggcactttccatttggatgacggtgaatactggtccaacagggcagcctcttataagggaaaatcccaccgacccatctttgagaacagcatggacaagatgtacaggaacttatacaaaaaggcctgtagttctgcttcacatacacaggaaagcttctgagaccatccatgataaacctcattagtgtccgtgtcaatttctcaatgaaaatgtttgatgtgatcaatatctgtattcctttttttaaaaaaaatgggattataactaagtacaatagttatacttgaataagttcattacttcaaatggtaaattatcataggcaagccttttaaaataattattacagaagagtctgctgtgttacaaacattagagctctgtcacacaatcacaacttccaatatgtgacaaggatattctgttacatgtacacctcatattccatctgcaaatccaagaatagttcctttctagaaatgttttttttgccttactcaccttgcaattttcttctcatctacttaactggttatcttgcctgtgtaagatttaattaatattgactaccttttcttggtgatgaacaaaatgatatcctatacagaaatgaatttcctaagggtttaaaccctgttttcactaacattttctactttttcctttttcagaacaggctattctatttcttagctcataggctttctttttaaagactatatgatcattcactcctttttctctggaagaactgtgtaagttgcttaaaatgcatagcagttagctagaaatatcagtgccatggatgatcaaaaatttgaataactaatttttaaagataaaattctttgcatgattttttttctagggccataccttttggtgcaaccagaatcagaaaatggcctctgttagtaagcttatagaaacctaaaaataataatggaattatattgtaatttgactgcttggaatttgtgtaagtaccatatggcccaaggcactattatagtatcctcactttaaaaaaaaaaacacttggaaccacaatgtgagtaaaatattatagcagaacgctttgtggtagacactgaaaatgttgttgattgatggatagaattaacttctcctcccccaccccagcacacacctgtgaagccaatgatactataaagacataaagaaatcagctactttatatttaatagagagtgaggggagggaaaggagagtgtaggaataagtgaactgggcttatagtcttgaagagttgcctaaaagataatattttctcattgactctgtttttgattaattttacagttatgattgaaaaagaacaaaatgaacttcctttaaaatgaaattaaaatgtgaaacttgctgacttatttttgtagtagaacttgttaacatcatgttaagggtgctttagtatcacagtctgtgatatatcagaaagggcattagagctatctctatgagccaggagtcctaggctttagtatcccatgtctgccgttttctagctgagtctatttaattctcagatcctttgtttcctcagctatcaaatgataagaatgtagtagaccccaaactatgttctgtggaccaagatcactgttttaggagataatcgtaggaatgtaggtataagtatgtaattggccatctaagtttaggaaaatctgtttgctacacacatacacacacacacacacacacacacacacacacacacacctcttagagagtcatatgtaggattatagaggtaaaaagagatgatattaatgctggaatagcgcctgtaaactggggctgtctacagcaaattaggatatatggtcactgtgctcattgtgaacagtagcttgttcgaggctttaagaaaattctggtataaatctgtcttactctgcatctagtagacagcctggcatgtaattgatgttccttaaatatttatcgaattaacccagaattttctaaactaaatttagcatgtaccactatttgttattcttgccaccaccccccattcccctagctcctcacactacctgccaatgtcatcctaaggtacatgtggatacctaggttgtagaaatgctggactacacaattgctgagttactctctggctgtagattatatgatgaggtattttacaatcagcttttgaaggtcaacattgaataatgctcttttaaaaaaattatatcctcagtgtttttccatggaaaaataagtgaaaattcttttaagagttgctgtttggtgaaaagaacaaacatgactttcaaagaaaatgttttactatcaccaaaatctcccaagtgaataagtaccacagaaattacttattgcacctgtatctgccattggctgtgaaaaaggctgcaaaaagtagggctgaaagggaaactttagaaactaatactctgaaagatgttttcctatggattaaatttagtgtctttctgaaagttgggggcaaattcccagatactaatagcatctttgctaagtgtctgattatcttctatcccctaggaggaaagagtggtccatgttgctgtaactactactatgagtgcttatgctgtattgtttttaaagagtaaaacctttaagtactaatagttgtcttttctcattcacaggagcagaaaggtgcagttgtttattctcttagccttttttttttcctgtatttcccacaaatctagaaataattattggagttaatatgaaagataaataggcttttctttttactttttaatttttttctttaaatcataaaaaaccttgggatttagaaaaatgtcaaaatcgacaaataaagatgaatcattggaatgagactcttccttggttctactagctagttatataaccttatttaagtcatttatgcttcttggagctcagttttctcaccaacaaggtgataaaagggttaatttagaatgatcctttgacatttcataattgtacaattaatatgtacgatcaggaagtcctaggcaggcagagttgttttctgatttccaaagattaagcccctgatgaaaaatctggaacaaatagagaattttcattattgtgttcatttgctaataatagctttattgagatataattcactctgaaaaagtatacaattaagtggtttttactatattcacagagttgtgcaacaataaccactcactaattacagaatattttataactcccaaaagaaatcctgtaaccattagtgatcacttcccactacctcctccccacaactcctggaaaccactatatgctttttgtctccatgcctattctggacatttcatataaatggaaccatacaacatgtgacctattgtatgtggcttctttcacttagcaaaatattttgagagttcatgcatgttgtaacacgtatgaatacttcattcctttttattactaaataataatccatcatatgaatat

SEQ ID NO: 6212 - protein, 488 aa, Homo sapiens; identical to SEQ ID NO: 186

SEQ ID NO: 6213 - DNA, 4117 bp, Homo sapiens
gcttctccggcggaacccaggctggaccgcgggccccggcctgggggccactgctgccaccgccgccgccacctcgtctcctccccgtccccgcccagccccaggtctccccgcctcactcgggcccgtggccggggtcactccccgccgcccctccccgcacggatgccgaaggtgaaggcgctgcagtgcgccctggcgctggagatcagctcagtaacttgcccaggagtcgtgcttaaagacaaagaggacatctatcttagcatctgtgtgtttggccaatacaaaaagacacaatgtgtcccagccacttttcccctggtcttcaatgccagaatggtgtttgaaaaggtgttcccggacgcagtagatcctggagatgtggttacacagcttgaatatgatacagcagtgttcgagttgatacagctagttccaccagtgggtgaaacactgtctacgtatgacgaaaatacacgagatttcatgtttccgggtccaaaccaaatgtctggacaccatgattcaaaccgccaggttaccatgaggaggatttctggccttcgaggaaatgctccaaggctggaattttctacgacttcagtgattactgaatgtctgataagttcaaggaaatgccacactcaggataaatttatttaccatttggctccagttgaaaaatcacatggcagactgcaaaacagaacatcaagatcacaaaagaaaaaatccaagtcacctgagagaagtaaatactgtataaatgcaaaaaactacgaacagcctacaatttcttcaaaatcacactctccatctccctacacaaaaagacgcatgtgtgagctatctgaagacaccaggcggcggctggcccatttaaatctgggaccctatgagttcaaaaaagaaacagataaacctccatttgtgattagacatgttgatcccccaagtcccagggctgatactttattgggatcttctggaagagactgtgaaagagatggatggtcaagggtgcacaatgatcattctcatcttggctgctgccgacccaaggattataaggttatcaggacaccccatgggagagacttcgatgactctttagaaaaatgtgaagagtatttgagcccaaggtcgtgtagtaagccccggcattcagcgaggaccttgctagtccattcagcaccctcaacaatgccaaagcattctccaagccctgtgttaaatagagcttctctcagggaaagatttcattctgattggtgttcaccttcaaactgcgatgagatccatgaccgggtaaaaaatgtcttgaaatcacatcaggctcatcaaagacatttatatgatgagagagacctagagaaagatgatgaactggaactgaaaagaagtcttttatgtagagactctgcctatgacagtgaccccgagtatagctcatgtcagcagccacgtggcactttccatttggatgacggtgaatactggtccaacagggcagcctcttataagggaaaatcccaccgacccatctttgagaacagcatggacaagatgtacaggaacttatacaaaaaggcctgtagttctgcttcacatacacaggaaagcttctgagaccatccatgataaacctcattagtgtccgtgtcaatttctcaatgaaaatgtttgatgtgatcaatatctgtattcctttttttaaaaaaaatgggattataactaagtacaatagttatacttgaataagttcattacttcaaatggtaaattatcataggcaagccttttaaaataattattacagaagagtctgctgtgttacaaacattagagctctgtcacacaatcacaacttccaatatgtgacaaggatattctgttacatgtacacctcatattccatctgcaaatccaagaatagttcctttctagaaatgttttttttgccttactcaccttgcaattttcttctcatctacttaactggttatcttgcctgtgtaagatttaattaatattgactaccttttcttggtgatgaacaaaatgatatcctatacagaaatgaatttcctaagggtttaaaccctgttttcactaacattttctactttttcctttttcagaacaggctattctatttcttagctcataggctttctttttaaagactatatgatcattcactcctttttctctggaagaactgtgtaagttgcttaaaatgcatagcagttagctagaaatatcagtgccatggatgatcaaaaatttgaataactaatttttaaagataaaattctttgcatgattttttttctagggccataccttttggtgcaaccagaatcagaaaatggcctctgttagtaagcttatagaaacctaaaaataataatggaattatattgtaatttgactgcttggaatttgtgtaagtaccatatggcccaaggcactattatagtatcctcactttaaaaaaaaaaacacttggaaccacaatgtgagtaaaatattatagcagaacgctttgtggtagacactgaaaatgttgttgattgatggatagaattaacttctcctcccccaccccagcacacacctgtgaagccaatgatactataaagacataaagaaatcagctactttatatttaatagagagtgaggggagggaaaggagagtgtaggaataagtgaactgggcttatagtcttgaagagttgcctaaaagataatattttctcattgactctgtttttgattaattttacagttatgattgaaaaagaacaaaatgaacttcctttaaaatgaaattaaaatgtgaaacttgctgacttatttttgtagtagaacttgttaacatcatgttaagggtgctttagtatcacagtctgtgatatatcagaaagggcattagagctatctctatgagccaggagtcctaggctttagtatcccatgtctgccgttttctagctgagtctatttaattctcagatcctttgtttcctcagctatcaaatgataagaatgtagtagaccccaaactatgttctgtggaccaagatcactgttttaggagataatcgtaggaatgtaggtataagtatgtaattggccatctaagtttaggaaaatctgtttgctacacacatacacacacacacacacacacacacacacacacacacacctcttagagagtcatatgtaggattatagaggtaaaaagagatgatattaatgctggaatagcgcctgtaaactggggctgtctacagcaaattaggatatatggtcactgtgctcattgtgaacagtagcttgttcgaggctttaagaaaattctggtataaatctgtcttactctgcatctagtagacagcctggcatgtaattgatgttccttaaatatttatcgaattaacccagaattttctaaactaaatttagcatgtaccactatttgttattcttgccaccaccccccattcccctagctcctcacactacctgccaatgtcatcctaaggtacatgtggatacctaggttgtagaaatgctggactacacaattgctgagttactctctggctgtagattatatgatgaggtattttacaatcagcttttgaaggtcaacattgaataatgctcttttaaaaaaattatatcctcagtgtttttccatggaaaaataagtgaaaattcttttaagagttgctgtttggtgaaaagaacaaacatgactttcaaagaaaatgttttactatcaccaaaatctcccaagtgaataagtaccacagaaattacttattgcacctgtatctgccattggctgtgaaaaaggctgcaaaaagtagggctgaaagggaaactttagaaactaatactctgaaagatgttttcctatggattaaatttagtgtctttctgaaagttgggggcaaattcccagatactaatagcatctttgctaagtgtctgattatcttctatcccctaggaggaaagagtggtccatgttgctgtaactactactatgagtgcttatgctgtattgtttttaaagagtaaaacctttaagtact

SEQ ID NO: 6214 - protein, 488 aa, Homo sapiens; identical to SEQ ID NO: 186

SEQ ID NO: 6215 - DNA, 2283 bp, Homo sapiens
ggatgccgaaggtgaaggcgctgcagtgcgccctggcgctggagatcagctcagtaacttgcccaggagtcgtgcttaaagacaaagaggacatctatcttagcatctgtgtgtttggccaatacaaaaagacacaatgtgtcccagccacttttcccctggtcttcaatgccagaatggtgtttgaaaaggtgttcccggacgcagtagatcctggagatgtggttacacagcttgaatatgatacagcagtgttcgagttgatacagctagttccaccagtgggtgaaacactgtctacgtatgacgaaaatacacgagatttcatgtttccgggtccaaaccaaatgtctggacaccatgattcaaaccgccaggttaccatgaggaggatttctggccttcgaggaaatgctccaaggctggaattttctacgacttcagtgattactgaatgtctgataagttcaaggaaatgccacactcaggataaatttatttaccatttggctccagttgaaaaatcacatggcagactgcaaaacagaacatcaagatcacaaaagaaaaaatccaagtcacctgagagaagtaaatactgtataaatgcaaaaaactacgaacagcctacaatttcttcaaaatcacactctccatctccctacacaaaaagacgcatgtgtgagctatctgaagacaccaggcggcggctggcccatttaaatctgggaccctatgagttcaaaaaagaaacagataaacctccatttgtgattagacatgttgatcccccaagtcccagggctgatactttattgggatcttctggaagagactgtgaaagagatggatggtcaagggtgcacaatgatcattctcatcttggctgctgccgacccaaggattataaggttatcaggacaccccatgggagagacttcgatgactctttagaaaaatgtgaagagtatttgagcccaaggtcgtgtagtaagccccggcattcagcgaggaccttgctagtccattcagcaccctcaacaatgccaaagcattctccaagccctgtgttaaatagagcttctctcagggaaagatttcattctgattggtgttcaccttcaaactgcgatgagatccatgaccgggatgagagagacctagagaaagatgatgaactggaactgaaaagaagtcttttatgtagagactctgcctatgacagtgaccccgagtatagctcatgtcagcagccacgtggcactttccatttggatgacggtgaatactggtccaacagggcagcctcttataagggaaaatcccaccgacccatctttgagaacagcatggacaagatgtacaggaacttatacaaaaaggcctgtagttctgcttcacatacacaggaaagcttctgagaccatccatgataaacctcattagtgtccgtgtcaatttctcaatgaaaatgtttgatgtgatcaatatctgtattcctttttttaaaaaaaatgggattataactaagtacaatagttatacttgaataagttcattacttcaaatggtaaattatcataggcaagccttttaaaataattattacagaagagtctgctgtgttacaaacattagagctctgtcacacaatcacaacttccaatatgtgacaaggatattctgttacatgtacacctcatattccatctgcaaatccaagaatagttcctttctagaaatgttttttttgccttactcaccttgcaattttcttctcatctacttaactggttatcttgcctgtgtaagatttaattaatattgactaccttttcttggtgatgaacaaaatgatatcctatacagaaatgaatttcctaagggtttaaaccctgttttcactaacattttctactttttcctttttcagaacaggctattctatttcttagctcataggctttctttttaaagactatatgatcattcactcctttttctctggaagaactgtgtaagttgcttaaaatgcatagcagttagctagaaatatcagtgccatggatgatcaaaaatttgaataactaatttttaaagataaaattctttgcatgattttttttctagggccataccttttggtgcaaccagaatcagaaaatggcctctgttagtaagcttatagaaacctaaaaataataatggaattatattgtaatttgactgcttggaatttgtgtaagtaccatatggcccaaggcactattatagtatcctcac

SEQ ID NO: 6216 - protein, 472 aa, Homo sapiens
MPKVKALQCALALEISSVTCPGVVLKDKEDIYLSICVFGQYKKTQCVPATFPLVFNARMVFEKVFPDAVDPGDVVTQLEYDTAVFELIQLVPPVGETLSTYDENTRDFMFPGPNQMSGHHDSNRQVTMRRISGLRGNAPRLEFSTTSVITECLISSRKCHTQDKFIYHLAPVEKSHGRLQNRTSRSQKKKSKSPERSKYCINAKNYEQPTISSKSHSPSPYTKRRMCELSEDTRRRLAHLNLGPYEFKKETDKPPFVIRHVDPPSPRADTLLGSSGRDCERDGWSRVHNDHSHLGCCRPKDYKVIRTPHGRDFDDSLEKCEEYLSPRSCSKPRHSARTLLVHSAPSTMPKHSPSPVLNRASLRERFHSDWCSPSNCDEIHDRDERDLEKDDELELKRSLLCRDSAYDSDPEYSSCQQPRGTFHLDDGEYWSNRAASYKGKSHRPIFENSMDKMYRNLYKKACSSASHTQESF

SEQ ID NO: 6217 - DNA, 2314 bp, Homo sapiens
taacttgcccaggagtcgtgcttaaagacaaagaggacatctatcttagcatctgtgtgtttggccaatacaaaaagacacaatgtgtcccagccacttttcccctggtcttcaatgccagaatggtgtttgaaaattcttgtagtgggtgaaacactgtctacgtatgacgaaaatacacgagatttcatgtttccgggtccaaaccaaatgtctggacaccatgattcaaaccgccaggttaccatgaggaggatttctggccttcgaggaaatgctccaaggctggaattttctacgacttcagtgattactgaatgtctgataagttcaaggaaatgccacactcaggataaatttatttaccatttggctccagttgaaaaatcacatggcagactgcaaaacagaacatcaagatcacaaaagaaaaaatccaagtcacctgagagaagtaaatactgtataaatgcaaaaaactacgaacagcctacaatttcttcaaaatcacactctccatctccctacacaaaaagacgcatgtgtgagctatctgaagacaccaggcggcggctggcccatttaaatctgggaccctatgagttcaaaaaagaaacagataaacctccatttgtgattagacatgtatgtgttctcttaagcatttctatttgaaactgatcagcttttttcccaaaaaaactgttattctgaaatatctttcaacttctagcttatattaataatacttttctcttctgactgctaccctagcagtctaagatgggaaattaatttagaatgaaagaacttgctttttttcagtcttcagacctgacagagatcaagctgtgttatgaatgccatgttaaatcctctcagtaccggtttcctttcttatacaatagatagcataataacgctaccaattgaacttggttgtaattgacattagtactaaaatggcagagtagggctttaaaagagaaccaaatattctttatgaaaaggaagaccctccttttttaaattataaaaattaaaatggaaagtaagtttccttttaaattacatcccttgggtaaactttgtatgatggatcttcaaagcaaattattgtttgatggttatgggaaggcctttgaaaatgaaaaaagttcatttaagggtaacctagttctagtctctgtactgaactgtgcttttgatatagttgaaatttagagtcttgtgtttatatgattatcaagtagactttggctaaatttaagggtttataatcagaatgtttaggaaaggactccctcagaatcttcatagtttcctgaatttctatgaagtatttttaccttaaaagcaattctttactgaaagctttcagactaataaaaatatggattaatgttatatgtacatatataataatactaaacctcaagatttaagtgctgatagaagcaaaataactttttgggatatctataaaaatatttctgactaatgtctttaattcattttttctaaattgtaaaatgaattcatccaacatgtaaatatgcccctttggtggtctaataactttttgaacatacacaatctgaaagttcagattttctttatgatacctttttaaaacaatttaaatattgtcttaagcaacatttcattccacctgtattttgactatgagtcgttttttttaactcttaagtaacagattgttttatcataaaagaaaatttatagtataatggatacttttaagtggcaacattttattgaagttattgtgactacttttctcatttctacagaatttgattttaacttttggtcacttttttgttgttgtttgaccaatattcagataatattttagttgcatatttggtgacagttttagaatgcctttaattttaagtcttcccacaattacaaattaaattgaaaagaaaggatatactatattttcatctgaaggaatagtaacattttaattaaaatgctatgtacaaaaataaactgaaatattttaggggtaagccacattaaaattctttggaaaaataactgcttttctttaaatgtttgttttattattactttttatgtcagtgtttagaatggaataattctaatattgcttgatacaaactttgaagtttgtatttaaatggtttccctccctagcttttcaataaacagaaatgcctactcctaagtctatacttagattgcttacattattaaataggaaagtggattttccgattgtgtttgtaaacatagagattttttttcctccatagccatt

SEQ ID NO: 6218 - protein, 186 aa, Homo sapiens
MPEWCLKILVVGETLSTYDENTRDFMFPGPNQMSGHHDSNRQVTMRRISGLRGNAPRLEFSTTSVITECLISSRKCHTQDKFIYHLAPVEKSHGRLQNRTSRSQKKKSKSPERSKYCINAKNYEQPTISSKSHSPSPYTKRRMCELSEDTRRRLAHLNLGPYEFKKETDKPPFVIRHVCVLLSISI

SEQ ID NO: 6219 - DNA, 1240 bp, Homo sapiens
agagttccaagcccacggccccggtcgcggcctcgccgccctcccgcgccccgcaccgggagcgggcctagagcactcgcctcgcccctccgcgagcagggctctggcgcccgcccctgtccgcaccgctggcagcctgaagagagtcgctggccatggtcgctgctaggtaggatatatctgcatcttgaaaggaagataaaacaaaagccttctttggaatagatggatttttgtcactttctgtgtgaactaaagtgattcaatgtctcttttggattgcttctgcacttcaagaacacaagatgaatcactcagacctgaaaaacagtctgaaaccagtatccatcaatacttggttgatgagccaaccctttcctggtcacctccatccactagagccagtgaagtactatgttccaccaacgtttctcactacgagctccaagtagaaacaggaagaggatttgacaacttgacttctgtccatcttgcatggcatactcccacgggaacactggtaactataaaaattacaaatctggaaaactgcaatgaagaacgcctgaaagctttacagaaagccgtgattctatcccactttttccggcatcccaatattacaacttactggacagttttcactgttggcagctggctttgggttatttctccatttatggcctatggttcagcaagtcaactcttgaggacctgttttcctgaaggaatgagtgaaactttaataagaaacattatctttggagctgtgagagggttgaactatctgtaccaaaatggctgtattcacaggagtattaaagccagccatatcctcatttctggtgatggcctagtgaccctctctggcctgtcccatctgcatagtttggttaagcatggacagaggcatagggctgtgtatgatttcccacagttcagcacatcagtgcagccgtggctgagtccagaactactgagacaggatttacatgggtataatgtgaagtcagatatttacagtgttgggattacagcatgtgaattagccagtgggcaggtgcctttccaggacatgcatagaactcagatcttggtacagctctgtttgcaacaagatcctgagaaaaggccatcagcaagcagtttattgtcccatgttttcttcaaacagatgaaagaagaaagccaggattcaatactttcacggttgcctcctgcttataacaagccatcaata

SEQ ID NO: 6220 - protein, 324 aa, Homo sapiens
MSLLDCFCTSRTQDESLRPEKQSETSIHQYLVDEPTLSWSPPSTRASEVLCSTNVSHYELQVETGRGFDNLTSVHLAWHTPTGTLVTIKITNLENCNEERLKALQKAVILSHFFRHPNITTYWTVFTVGSWLWVISPFMAYGSASQLLRTCFPEGMSETLIRNIIFGAVRGLNYLYQNGCIHRSIKASHILISGDGLVTLSGLSHLHSLVKHGQRHRAVYDFPQFSTSVQPWLSPELLRQDLHGYNVKSDIYSVGITACELASGQVPFQDMHRTQILVQLCLQQDPEKRPSASSLLSHVFFKQMKEESQDSILSRLPPAYNKPS

SEQ ID NO: 6221 - DNA, 1719 bp, Homo sapiens
agagttccaagcccacggccccggtcgcggcctcgccgccctcccgcgccccgcaccgggagcgggcctagagcactcgcctcgcccctccgcgagcagggctctggcgcccgcccctgtccgcaccgctggcagcctgaagagagtcgctggccatggtcgctgctaggtaggatatatctgcatcttgaaaggaagataaaacaaaagccttctttggaatagatggatttttgtcactttctgtgtgaactaaagtgattcaatgtctcttttggattgcttctgcacttcaagaacacaagatgaatcactcagacctgaaaaacagtctgaaaccagtatccatcaatacttggttgatgagccaaccctttcctggtcacctccatccactagagccagtgaagtactatgttccaccaacgtttctcactacgagctccaagtagaaacaggaagaggatttgacaacttgacttctgtccatcttgcatggcatactcccacgggaacactggtaactataaaaattacaaatctggaaaactgcaatgaagaacgcctgaaagctttactatggttcagcaagtcaactcttgaggacctgttttcctgaaggaatgagtgaaactttaataagaaacattatctttggagctgtgagagggttgaactatctgtaccaaaatggctgtattcacaggagtattaaagccagccatatcctcatttctggtgatggcctagtgaccctctctggcctgtcccatctgcatagtttggttaagcatggacagaggcatagggctgtgtatgatttcccacagttcagcacatcagtgcagccgtggctgagtccagaactactgagacaggatttacatgggtataatgtgaagtcagatatttacagtgttgggattacagcatgtgaattagccagtgggcaggtgcctttccaggacatgcatagaactcagatgctgttacagaaactgaaaggtcctccttatagcccattggatatcagtattttccctcaatcagaatccagaatgaaaaattcccggtcaggtgtagactctggaattggagaaagtgtgcttgtctccagtggaactcacacagtaaatagtgaccgattacacacaccatcctcaaaaactttctctcctgccttctttagcttggtacagctctgtttgcaacaagatcctgagaaaaggccatcagcaagcagtttattgtcccatgttttcttcaaacagatgaaagaagaaagccaggattcaatactttcacggttgcctcctgcttataacaagccatcaataccattgcctccagtgttaccttggactgagccagaatgtgattttcctgatgaaaaagactcatacttggaattctagggctgccaaatcatttcatgtcctatatacttgacactttctccttgctgctttttcttctgtatttctaggtacaaatacgagaattatacttgaaaatacagttggtgcactggagaatctattatttaaaaccactctgttcaaaggggcaccagtttgtagtccctctgttttgcacagagtactatgacaaggaaacatcagaattaccaatctagctagtgtcatttattctggaatttttttctaagctgtgactaactctttttatctctcaatataatttttgagccagttaatt

SEQ ID NO: 6222 - protein, 117 aa, Homo sapiens
MSLLDCFCTSRTQDESLRPEKQSETSIHQYLVDEPTLSWSPPSTRASEVLCSTNVSHYELQVETGRGFDNLTSVHLAWHTPTGTLVTIKITNLENCNEERLKALLWFSKSTLEDLFS

SEQ ID NO: 6223 - DNA, 2947 bp, Homo sapiens
aggcaaccgtcgtgccgcgtcttcctgaggtagctcctgtcagcccactgatcccaccacccgctccctactgccccgcggtcttcgcgtgagctcggagactgagggacaacaaaaatggcggaggggagccagtcggcgcctgaggcaggcaatgatatgggaaatgatgatgccattggagggaatgtgagcaaatatatagtgcttccaactggctattgtggacagcccaagaaaggacatcttatctttgatgcttgctttgaaagtggtaacctgggccgggtggaccaggtctctgagtttgagtatgatctgttcattaggccggacacctgtaatccacgcttccgagtctggttcaactttactgttgaaaatgtgaaagaatcacagagggtcattttcaacattgttaacttcagtaaaaccaagagtctctatagagatgggatggcccctatggtgaaatctaccagcagaccaaaatggcaaaggctgccacccaaaaatgtttactactaccgctgcccggaccataggaagaactatgtgatgtcctttgccttttgttttgaccgagaagaagatatttaccagtttgcttactgctacccatatacatacactcgcttccaacattaccttgacagcctgcaaaagagaaacatggattacttctttcgggagcagctgggccagagtgtgcaacaacgaaagcttgacctcctgacgataaccagccctgacaatctccgggaaggggcagagcagaaggtggtattcatcacaggacgagtccacccaggggaaacaccctcatcatttgtgtgccaagggatcattgacttccttgtaagccagcaccctattgcctgtgtcctccgggaatacctggtcttcaagatcgcaccaatgctcaatcctgatggagtctacctgggcaattacaggtgttctctgatgggatttgatctgaatcgtcactggctggatccctctccatgggtccatcctaccctgcatggagtgaaacaactcatcgtccagatgtacaacgacccaaaaacaagcctggagttttatattgacatccatgcccactccaccatgatgaatggcttcatgtatggcaacatctttgaggatgaggaacggttccagaggcaggccatttttcccaagctcctctgccagaatgctgaggacttctcctattccagcacatcctttaaccgggacgctgtgaaagcaggaactggccgtcgcttcctcggtggactcctggaccacacttcctattgctacaccctagaggtctccttctacagctacatcatcagtggcaccacggctgctgtgccctacactgaagaagcctatatgaagctggggcggaatgtggcaagaacctttttggactattatcggctgaaccccgtggttgaaaaggtggcaattcccatgccgagactgcgaaataaagaaatagaagtccagagaaggaaagaaaaatcccctccttacaagcacccactcctgcggggcccagccagcaactaccccaacagcaaaggggacaagaagagctcagtgaaccacaaagacccttcaacccctttttaaagacacggagtcctgggaggtcttatggggacaggagcatgcattttctgctggggaatgaaattaatcactcttctctagcttccaaggatttgtggattaatgcataggctagtgaaagggaagggatacaatgagaaacttcatcactgattttccctttttccaatggaaaatcaattgtaagccttcagctcaaaaagctcaggaacaaaataggagatcggaaccaggtgagcacagatgctattttctacaacatagagatcttccaagatgaggaaaacctacacatcccttttaagagatttgacacatatcaggtcagttctttcaaagccactttacatttttaagttttatagttactgcagatggttaccttttaaataggcttggttgtttacagctttagaaatgcagtgtttgtattttctgatccaaaacaacagcaacaacacatgcaaccaaagggcaaatgcatcctagggaacaatgggacagaatttttgaaatcaacggtggacttaaatatatggtcactgtatctaagctgcatgcttgctgattccctcaaaccccagcatgcagatttagaaaactgttttgagagctgtttcccaatttcctcggtagtttaattaaaattttagctctaaagacaaaaagcactggtcactcattttaaaaggtttattatggttaaggtctccagatcccaggtgacagggattaagcctggcccctgaagatgtaggcattgctaatctgcaatgaggaaagggtgattgccaggcaaggaagatgcaaaagacagaaggatgcaccctgaggcagggaggaatgataaaataaaacagtagtagcaattcccaaggtgtggcaagctaaatattggcatttttgtgaagagtaaagtgcctttgtatgatgaatgggtccaggggggtctgctcccttcctgtctgtggaaacagcaggctgagtcaccatgacagcctgctaattaaaatgacctcccggaaatgaggattagaacacagggagaggaagggaggctccagggaggaaaatcccttagcacagagctccactaaagcattttttgtttgtttgtttgtttgtttgtttgtttgagttggagattattgaagtttgctacaaaaatcaaaaagaaaacttgttctcctttgcatgctagttttcagaaatgatgacaaagagccatatgttgattggctacaaatgtcatgttgtatatacagcttctcccctgggttcgttttgcccagaggaacacaaataaagtgttttgtgc

SEQ ID NO: 6224 - protein, 503 aa, Homo sapiens
MAEGSQSAPEAGNDMGNDDAIGGNVSKYIVLPTGYCGQPKKGHLIFDACFESGNLGRVDQVSEFEYDLFIRPDTCNPRFRVWFNFTVENVKESQRVIFNIVNFSKTKSLYRDGMAPMVKSTSRPKWQRLPPKNVYYYRCPDHRKNYVMSFAFCFDREEDIYQFAYCYPYTYTRFQHYLDSLQKRNMDYFFREQLGQSVQQRKLDLLTITSPDNLREGAEQKVVFITGRVHPGETPSSFVCQGIIDFLVSQHPIACVLREYLVFKIAPMLNPDGVYLGNYRCSLMGFDLNRHWLDPSPWVHPTLHGVKQLIVQMYNDPKTSLEFYIDIHAHSTMMNGFMYGNIFEDEERFQRQAIFPKLLCQNAEDFSYSSTSFNRDAVKAGTGRRFLGGLLDHTSYCYTLEVSFYSYIISGTTAAVPYTEEAYMKLGRNVARTFLDYYRLNPVVEKVAIPMPRLRNKEIEVQRRKEKSPPYKHPLLRGPASNYPNSKGDKKSSVNHKDPSTPF

SEQ ID NO: 6225 - DNA, 3938 bp, Homo sapiens
accgagaagaagatatttaccagtttgcttactgctacccatatacatacactcgcttccaacattaccttgacagcctgcaaaagagaaacatggattacttctttcgggagcagctgggccagagtgtgcaacaacgaaagcttgacctcctgacgataaccagccctgacaatctccgggaaggggcagagcagaaggtggtattcatcacaggacgagtccacccaggggaaacaccctcatcatttgtgtgccaagggatcattgacttccttgtaagccagcaccctattgcctgtgtcctccgggaatacctggtcttcaagatcgcaccaatgctcaatcctgatggagtctacctgggcaattacaggtgttctctgatgggatttgatctgaatcgtcactggctggatccctctccatgggtccatcctaccctgcatggagtgaaacaactcatcgtccagatgtacaacgacccaaaaacaagcctggagttttatattgacatccatgcccactccaccatgatgaatggcttcatgtatggcaacatctttgaggatgaggaacggttccagaggcaggccatttttcccaagctcctctgccagaatgctgaggacttctcctattccagcacatcctttaaccgggacgctgtgaaagcaggaactggccgtcgcttcctcggtggactcctggaccacacttcctattgctacaccctagaggtctccttctacagctacatcatcagtggcaccacggctgctgtgccctacactgaagaagcctgtatccttagtccccacccagccttgggccagccctcatccagccgagagtatccaagtctgacaggtcaggaattaggcccccagctcaggtaagggctgagactctcaggtgaggatggaggtgcttcttcttctggtggcgtctttggattgtccagtttgcctcagcccttagtatgatactcctaccccaattgccatgctccaaatctttcccaggccagccggacccatggcctgcccatatcttactctgcttccatctctctcccctctcttctctcatgatgcagtgagtctcctgccatctaagctatgcaagtccacaggctggatgaccatccccagggttgctgaggaagagcttgatgatcttgactccttctaaccctgaacatacaaaaacatatgttctcttttcatcttttgtctaacctatcctctcccactttctcttccctctactcactatttccccttctacttacttttctcacccttgttccctctccttctatgccctcctcctccctcctcacctgtcctgtgcttctctttccttacttctttttccccctcctcccctcctttctgtcctctctctcatcccatcctccttttctttctctcctctttgcctgtcttctgtcttccttgtctttcccctctcatcctctgtgcatctttctctctgcctttgcatttcctttgacaaattccttttcctcttagtttcttcataaaatttctctgaaaactccaaagccttccatgatgaaattagaagttattttctagtttgcctaattttttaaggattaggtagtaactctagtttcccgagtgttgattttaatatcaaggtcactgcatcagagctgtaacagatcgtggcagattctgctttccttgatcctttgttttcgggttgatctatgtctcctttcctaacacttagttttctcagagaagtggagggaggaggaaggaactttagatgaaatgaactctgtatttctgcaaattccccctccctggaggtagaagtgctcttttagcattttttcaacccttggtgagtgtttatggaattcctctgtgcaggaaaacatcttttctgaacgtggcatgacttagggctagtcccaccagccaactgcaacttagtggctctgtttgtatgtgtgtttgggagggttgggggtatggtgtccaggtaccttgccaggaacatcggaagtagggcaatggccctagaaggaggggctgtcagggggtaggccaggtgttagagcaatgttccacatcctgttggacacagagatattatgattggaactgagagttccctatgtacagtcatcaagactgagggtcatcttgcagtctgctttaatacccacctgactcagcaaggccaagggagtaggctctgctctgaggaagagggtctgtgggttccaaagtcctggccacctgttatgtgccacattgcccctcttcatgccccatacacaccttagatgatgcatatggcctatgccttctccagaatctgctaactcctataacacatgcatatgcttcattccacattgtacttgctttgctctcccataatattatggcaaagggacagagagctgcctggaataagagtttgagcttgtgcactaaaggggattctgcaacccttattcatagtgagatgagggtccctccagaggaggcctgcccttagtttgttgttttttgctgtccaatctgacaggctctcctaccttttcttagcacttctgacatgcttctgtcttagaagaaaatgtgtttcttagtagaaagcccacccttggttcaggcccaaggtttccacccctcaacagccaacactcatttatcaaaagtaaacacagcattagtacataccaggaatcataaaaggcacctagggtaaaatactgaataaaaaggcatgattcctgactcacagaactttcagtctacttggggagacagaaaagggaagagataattacaatgtatgtgataaattctggtggaggaattccagaaggctctgggacattttcatttgacaagtatatattgagtgcctgtcataggtcaggtaaagttctaggcacagggaatgtaacagagaacatactaaagacaagaatgtctttacatgggggaaagagggaactcacacgcagtcctaggagtcagggaagatttcccaggaaaagagacatctaaactgagattttttgtttgtttgtttttgagatggagtctcactctgttacccaggctagagtgtagtggcatgatctcagctcactgcaacttctgcctcctgggttcaagcgattcccctgcctcagcctcctgagtagctgggattacaggtgtgcgccaccatgtccggctaatttttgtatttttagcagagatggggttttaccatgttggtcaggctggtctcaaacttctgacctcgtgatccacctgcttcggcctcccaaagtgctgagattacaggtgtaagccactgagcccggcctaaactgagtttttaatatgaactagtcaaactgggtgagggtgttgttgaagggaggatgtggtagacagagaggggagtacagaaggtatgggcagaagctgtaagtggtcccttagggctgaaggacttcagactcaatgataagtctgaagtggaaagatgtaagaagtttgatcttgaatgtagacaatggaaggacagattcgagggggccagtattgtagacagggacatgcattaggaggctgttataaaaatccaggtgagaaataatccaggccaagaccagagtggtggctgtagaatacttagaatgtggaactgagaagacttggtaattgactatttgggagtggcgacagggaatgggagctcgtgattggaaggggttaaggtgagtagagaggctatgcacaagctgagcaggtcgtgatactgatggacctaccctgccttgttctgtcctctagaggatgagaagaggaaacaaactgcaccagggaagctcaggccgattcaatgcatgcaagggtgatttaacctgggttctgtttgaaatactt

SEQ ID NO: 6226 - protein, 268 aa, Homo sapiens
MDYFFREQLGQSVQQRKLDLLTITSPDNLREGAEQKVVFITGRVHPGETPSSFVCQGIIDFLVSQHPIACVLREYLVFKIAPMLNPDGVYLGNYRCSLMGFDLNRHWLDPSPWVHPTLHGVKQLIVQMYNDPKTSLEFYIDIHAHSTMMNGFMYGNIFEDEERFQRQAIFPKLLCQNAEDFSYSSTSFNRDAVKAGTGRRFLGGLLDHTSYCYTLEVSFYSYIISGTTAAVPYTEEACILSPHPALGQPSSSREYPSLTGQELGPQLR

SEQ ID NO: 6227 - DNA, 2119 bp, Homo sapiens
caggggcggaggcggcggccagggaggaagcggaggaggcggaggcggccgcggcgttcgcccgcccgctcgctcgctcggtttccccgcccccgccgggcttaacgccgctgaaggtatccgggtgcgcgctgtcgcaacctgccctcatcctggcccgcgactgtaagaccggacccacatccagaccaatcttcctgtccgggctgctgcgacgcgggctccgcaggttgcaggcgggcggccggggcgcctgaaggttaccgagtgcatgagcgcctagcgcttcccgcgctgccccgcccgctggcccgccgacccgcccgccggctcgcccgccagcccctcggcgcccggcggcggcggcggcggtggcggcgacggtcgcaggaggtgccgtctgcctcccaggtgcgcgcttcgctcccggagccgcggaactcggcggccgccatggcgtccaacatggaccgggagatgatcctggcggattttcaggcatgtactggcattgaaaacattgacgaagctattacattgcttgaacaaaataattgggacttagtggcagctatcaatggtgtaataccacaggaaaatggcattctacaaagtgaatatggaggtgagaccataccaggacctgcatttaatccagcaagtcatccagcttcagctcctacttcctcttcttcttcagcgtttcgacctgtaatgccatccaggcagattgtagaaaggcaacctcggatgctggacttcagggttgaatacagagacagaaatgttgatgtggtacttgaagacacctgtactgttggagagattaaacagattctagaaaatgaacttcagatacctgtgtccaaaatgctgttaaaaggctggaagacgggagatgtggaagacagtacggtcctaaaatctctacacttgccaaaaaacaacagtctttatgtccttacaccagatttgccaccaccttcatcatctagtcatgctgggtaatttttcctatagatatggtgattgccatcctgtattttttattggctcattagaagctgcttttcaagaggccttctatgtgaaagcccgagatagaaagcttcttgctatctacctccaccatgatgaaagtgtgttaaccaacgtgttctgctcacaaatgctttgtgctgaatccattgtttcttatctgagtcaaaattttataacctgggcttgggatctgacaaaggactccaacagagcaagatttctcactatgtgcaatagacactttggcagtgttgtggcacaaaccattcggactcaaaaaacggatcagtttccgcttttcctgattattatgggaaagcgatcatctaatgaagtgttgaatgtgatacaagggaacacaacagtagatgagttaatgatgagactcatggctgcaatggagatcttcacagcccaacaacaggaagatataaaggacgaggatgaacgtgaagccagagaaaatgtgaagagagagcaagatgaggcctatcgcctttcacttgaggctgacagagcaaagagggaagctcacgagagagagatggcagaacagtttcgtttggagcagattcgcaaagaacaagaagaggaacgtgaggccatccggctgtccttagagcaagccctgcctcctgagccaaaggaagaaaatgctgagcctgtgagcaaactgcggatccggacccccagtggcgagttcttggagcggcgtttcctggccagcaacaagctccagattgtctttgattttgtagcttccaaaggatttccatgggatgagtacaagttactgagcacctttcctaggagagacgtaactcaactggacccaaataaatcattattggaggtaaagttgttccctcaagaaacccttttccttgaagcaaaagagtaaacacggcccagcggtggaaccagccattccttgacaagccagcagcctgcgtcaggagaagggctcctcgccaacccacccacacgctcgtctcactcaattcaatgtcacacttctgcctcttgcaaaattgctggaaaaagtaataataaatatagctacttaagatttcccatc

SEQ ID NO: 6228 - protein, 328 aa, Homo sapiens
MSLHQICHHLHHLVMLGNFSYRYGDCHPVFFIGSLEAAFQEAFYVKARDRKLLAIYLHHDESVLTNVFCSQMLCAESIVSYLSQNFITWAWDLTKDSNRARFLTMCNRHFGSVVAQTIRTQKTDQFPLFLIIMGKRSSNEVLNVIQGNTTVDELMMRLMAAMEIFTAQQQEDIKDEDEREARENVKREQDEAYRLSLEADRAKREAHEREMAEQFRLEQIRKEQEEEREAIRLSLEQALPPEPKEENAEPVSKLRIRTPSGEFLERRFLASNKLQIVFDFVASKGFPWDEYKLLSTFPRRDVTQLDPNKSLLEVKLFPQETLFLEAKE

SEQ ID NO: 6229 - DNA, 2583 bp, Homo sapiens
caggggcggaggcggcggccagggaggaagcggaggaggcggaggcggccgcggcgttcgcccgcccgctcgctcgctcggtttccccgcccccgccgggcttaacgccgctgaaggtatccgggtgcgcgctgtcgcaacctgccctcatcctggcccgcgactgtaagaccggacccacatccagaccaatcttcctgtccgggctgctgcgacgcgggctccgcaggttgcaggcgggcggccggggcgcctgaaggttaccgagtgcatgagcgcctagcgcttcccgcgctgccccgcccgctggcccgccgacccgcccgccggctcgcccgccagcccctcggcgcccggcggcggcggcggcggtggcggcgacggtcgcaggaggtgccgtctgcctcccaggtgcgcgcttcgctcccggagccgcggaactcggcggccgccatggcgtccaacatggaccgggagatgatcctggcggattttcaggcatgtactggcattgaaaacattgacgaagctattacattgcttgaacaaaataattgggacttagtggcagctatcaatggtgtaataccacaggaaaatggcattctacaaagtgaatatggaggtgagaccataccaggacctgcatttaatccagcaagtcatccagcttcagctcctacttcctcttcttcttcagcgtttcgacctgtaatgccatccaggcagattgtagaaaggcaacctcggatgctggacttcagggttgaatacagagacagaaatgttgatgtggtacttgaagacacctgtactgttggagagattaaacagattctagaaaatgaacttcagatacctgtgtccaaaatgctgttaaaaggctggaagacgggagatgtggaagacagtacggtcctaaaatctctacacttgccaaaaaacaacagtctttatgtccttacaccagatttgccaccaccttcatcatctagtcatgctggtgccctgcaggagtcattaaatcaaaacttcatgctgatcatcacccaccgagaagtccagcgggagtacaacctgaacttctcaggaagcagtactattcaagaggtaaagagaaatgtgtatgaccttacaagtatccccgttcgccaccaattatgggagggctggccaacttctgctacagacgactcaatgtgtcttgctgaatcagggctctcttatccctgccatcgacttacagtgggaagaagatcttcacctgcacagacccgggaacagtcggaagaacaaatcaccgatgttcatatggttagtgatagcgatggagatgactttgaagatgctacagaatttggggtggatgatggagaagtatttggcatggcgtcatctgccttgagaaaatctccaatgatgccagaaaacgcagaaaatgaaggagatgccttattacaatttacagcagagttttcttcaagatatggtgattgccatcctgtattttttattggctcattagaagctgcttttcaagaggccttctatgtgaaagcccgagatagaaagcttcttgctatctacctccaccatgatgaaagtgtgttaaccaacgtgttctgctcacaaatgctttgtgctgaatccattgtttcttatctgagtcaaaattttataacctgggcttgggatctgacaaaggactccaacagagcaagatttctcactatgtgcaatagacactttggcagtgttgtggcacaaaccattcggactcaaaaaacggatcagtttccgcttttcctgattattatgggaaagcgatcatctaatgaagtgttgaatgtgatacaagggaacacaacagtagatgagttaatgatgagactcatggctgcaatggagatcttcacagcccaacaacaggaagatataaaggacgaggatgaacgtgaagccagagaaaatgtgaagagagagcaagatgaggcctatcgcctttcacttgaggctgacagagcaaagagggaagctcacgagagagagatggcagaacagtttcgtttggagcagattcgcaaagaacaagaagaggaacgtgaggccatccggctgtccttagagcaagccctgcctcctgagccaaaggaagaaaatgctgagcctgtgagcaaactgcggatccggacccccagtggcgagttcttggagcggcgtttcctggccagcaacaagctccagattgtctttgattttgtagcttccaaaggatttccatgggatgagtacaagttactgagcacctttcctaggagagacgtaactcaactggacccaaataaatcattattggaggtaaagttgttccctcaagaaacccttttccttgaagcaaaagagtaaacacggcccagcggtggaaccagccattccttgacaagccagcagcctgcgtcaggagaagggctcctcgccaacccacccacacgctcgtctcactcaattcaatgtcacacttctgcctcttgcaaaattgctggaaaaagtaataataaatatagctacttaagatttcccatc

SEQ ID NO: 6230 - protein, 650 aa, Homo sapiens; identical to SEQ ID NO: 190

SEQ ID NO: 6231 - DNA, 895 bp, Homo sapiens
cattttgaggccacttttgaaatagaaccaatatttttgccatttcagaaaaattgtcgtctgtgtgccaaagacagagagcatgcagtaaaagtgcaccatagcatggatgttggactcaagcagggctcacttactaggcaggtgacttgttcctgaaaaccagtctggctgtgaacatcatccagatcctcacctcagcaaaatcacagtctgtcattaactgaagcaaatgaaaattctaaactttatgagggcataatactcagcaaagaacacaaatcctaacagtatagtttgaatttgcacaacatgaacacatccatataaacaactctttggttaaaagaacagaatatgtaacgagtagaaaaaagaaaaagaggagattagggcacatagagacacaaggaagaacaatgtgaacacagggaggagacagccatcaacaagccaagaagagaggccccagaagacacgcaaactgctgacaccttgatattggatttctagtctcagaattgcatgtactggcattgaaaacattgacgaagctattacattgcttgaacaaaataattgggacttagtggcagctatcaatggtgtaataccacaggaaaatggcattctacaaagtgaatatggaggtgagaccataccaggacctgcatttaatccagcaagtcatccagcttcagctcctacttcctcttcttcttcagcgtttcgacctgtaatgccatccaggcagattgtagaaaggcaacctcggatgctggacttcagggttgaatacagagacagaaatgttgatgtggtacttgaagacacctgtactgttggtaaggtttttcctgccataaagccttcacaaataaataattaggtaaac

SEQ ID NO: 6232 - protein, 38 aa, Homo sapiens
MAFYKVNMEVRPYQDLHLIQQVIQLQLLLPLLLQRFDL

SEQ ID NO: 6233 - DNA, 2906 bp, Homo sapiens
aacacagaagtaaccagactgccatggtagacatgggagagacgaggaagctgagaaaggactatttcgcagtttccagtccttgattaattaaggcttcagagttcgttcttacatatgccatgtcttaagttttcataaaattcagtctacacaagacttgctttttgtgagcactgtgcttagtggcagtccggatttttccctccacccccgcggccacccctgcccaccgcgccgtcgggcatggatctggcaggtgcgaggccgaggccagggctcagcgaaggacgccgagtttacagagcgcgcgcgcctagaggaggcagcagcagccgcagcctggccgcccgaactttgcgagcctggcgggggagcacagaggcgggccgacctgccccgctagcgctgaggaacgactccctttatgccagctcgctgtccgccttcccgcagcgtacgctgcggagcctcaaagaccctgcggccctccacaaccgtcttaaataacaaacccctgtcctcgcccccgtaggaattggggcagctgggggttcgcgtcacagactcaagcccgccagcagaagggcaggccggacttcgcggggccgaaccccgctccagctggggacaggccgcctagccggcaggagggagccggcgcgagagacttgacgggaggaggtggagagcgggaggcgggaatgagggcgcgggaccgggcgggcggagcgtgcgagactgcgagcgcgagcgccagcagggcggagggcggggcgtgggcggcgcccggccttcccgctcccgcggcgctgcaactctgccgagcctccttaaaactctgccgttaaaatgggggcgggtttttcaactcaaaaagcgctcaatttttttcttttcaaaaaaagctgatgaggtcggaaaaaagggagaagaaaccggcaccctctctgagaggcaacagaagcagcaattgtttcagcgaaaaaagcagcaagggagggagtgaaggaaaaaagcaaaaaagggggcgacacgcaagtgcctgtaggggtgaaaggagcagggaccggcgatctagggggggatcagctacaaaagaaactgtcactgggagcggtgcggccaaggaggaagcagtgctgccaggctctgctccagggcacagctggctggcggctgccctgtccgcagcaaaggggcacaggccggggaccgcgagaggtggcaaagtggcaccgggcgccgaggctgctgagcgctcgccgagacggcgaccggactggctgccccggaactgcggcgactctccctactcagaacttggcctacgtttcccaggactctccccatctccagaggcccccacaaaaccgggaaaggaaggaaaggacagcggcggcagcagctcaatgagtgcctacagcagaaagcctgaacgagctcggtcgtaggcgggaagttcccgggggggctgcccagtgcagccgcaatgctgccgcgagctgccccagcagtccgggctccgtagacgctttccgcatcactctccttcctcgggctgccgggagtcccgggacctggcggggccggcatgacgggcttctcgggggcccgccgcacgcccggcagcctccggagacgcgcgccgagcccggctcccacggcctctgaggctcggcggggctgcggctgcctggcgggcgggctccggagctttcctgagcggcattagcccacggcttggcccggacgcgaccaaaggctcttctggagaagcccagagcactgggcaatcgttacgacctgtaacttgagggccaccgaactgctactcccgttcgcctttggcgatcatcttttaaccctccggagcacgtcagcatccagccaccgcggcgctctcccagcagcggaggacccaggactatcccttcggcgagacggatggaaaccgagccccctggaggacctgcccctgcagttctgcctcacacggctcaagtcaccaccgtgaacaagggaccctaaagaatggccgagccttgggggaacgagttggcgtccgcagctgccaggggggacctagagcaacttactagtttgttgcaaaataatgtaaacgtcaatgcacaaaatggatttggaaggactgcgctgcaggttatgaaacttggaaatcccgagattgccaggagactgctacttagaggtgctaatcccgatttgaaagaccgaactggtttcgctgtcattcatgatgcggccagagcaggtttcctggacactttacagactttgctggagtttcaagctgatgttaacatcgaggataatgaagggaacctgcccttgcacttggctgccaaagaaggccacctccgggtggtggagttcctggtgaagcacacggccagcaatgtggggcatcggaaccataagggggacaccgcctgtgatttggccaggctctatgggaggaatgaggttgttagcctgatgcaggcaaacggggctgggggagccacaaatcttcaataaacgtggggagggctcccccacgttgcctctactttatcaattaactgagtagctctcctgacttttaatgtcatttgttaaaatacagttctgtcatatgttaagcagctaaattttctgaaactgcataagtgaaaatcttacaacaggcttatgaatatatttaagcaacatctttttaacctgcaaaatctgttctaacatgtaattgcagataactttgactttcttctgaatattttatctttccttggcttttcccttgcttccccttttgccaatctcaacacccaagttgaagactttgtttttaaaatggtttgtcctgatgcttttgtctaattaaaacactttcaaaacaggac

SEQ ID NO: 6234 - protein, 168 aa, Homo sapiens; identical to SEQ ID NO: 194

SEQ ID NO: 6235 - DNA, 3142 bp, Homo sapiens
aacacagaagtaaccagactgccatggtagacatgggagagacgaggaagctgagaaaggactatttcgcagtttccagtccttgattaattaaggcttcagagttcgttcttacatatgccatgtcttaagttttcataaaattcagtctacacaagacttgctttttgtgagcactgtgcttagtggcagtccggatttttccctccacccccgcggccacccctgcccaccgcgccgtcgggcatggatctggcaggtgcgaggccgaggccagggctcagcgaaggacgccgagtttacagagcgcgcgcgcctagaggaggcagcagcagccgcagcctggccgcccgaactttgcgagcctggcgggggagcacagaggcgggccgacctgccccgctagcgctgaggaacgactccctttatgccagctcgctgtccgccttcccgcagcgtacgctgcggagcctcaaagaccctgcggccctccacaaccgtcttaaataacaaacccctgtcctcgcccccgtaggaattggggcagctgggggttcgcgtcacagactcaagcccgccagcagaagggcaggccggacttcgcggggccgaaccccgctccagctggggacaggccgcctagccggcaggagggagccggcgcgagagacttgacgggaggaggtggagagcgggaggcgggaatgagggcgcgggaccgggcgggcggagcgtgcgagactgcgagcgcgagcgccagcagggcggagggcggggcgtgggcggcgcccggccttcccgctcccgcggcgctgcaactctgccgagcctccttaaaactctgccgttaaaatgggggcgggtttttcaactcaaaaagcgctcaatttttttcttttcaaaaaaagctgatgaggtcggaaaaaagggagaagaaaccggcaccctctctgagaggcaacagaagcagcaattgtttcagcgaaaaaagcagcaagggagggagtgaaggaaaaaagcaaaaaagggggcgacacgcaagtgcctgtaggggtgaaaggagcagggaccggcgatctagggggggatcagctacaaaagaaactgtcactgggagcggtgcggccaaggaggaagcagtgctgccaggctctgctccagggcacagctggctggcggctgccctgtccgcagcaaaggggcacaggccggggaccgcgagaggtggcaaagtggcaccgggcgccgaggctgctgagcgctcgccgagacggcgaccggactggctgccccggaactgcggcgactctccctactcagaacttggcctacgtttcccaggactctccccatctccagaggcccccacaaaaccgggaaaggaaggaaaggacagcggcggcagcagctcaatgagtgcctacagcagaaagcctgaacgagctcggtcgtaggcgggaagttcccgggggggctgcccagtgcagccgcaatgctgccgcgagctgccccagcagtccgggctccgtagacgctttccgcatcactctccttcctcgggctgccgggagtcccgggacctggcggggccggcatgacgggcttctcgggggcccgccgcacgcccggcagcctccggagacgcgcgccgagcccggctcccacggcctctgaggctcggcggggctgcggctgcctggcgggcgggctccggagctttcctgagcggcattagcccacggcttggcccggacgcgaccaaaggctcttctggagaagcccagagcactgggcaatcgttacgacctgtaacttgagggccaccgaactgctactcccgttcgcctttggcgatcatcttttaaccctccggagcacgtcagcatccagccaccgcggcgctctcccagcagcggaggacccaggactatcccttcggcgagacggatggaaaccgagccccctggaggacctgcccctgcagttctgcctcacacggctcaagtcaccaccgtgaacaagggaccctaaagaatggccgagccttgggggaacgagttggcgtccgcagctgccaggggggacctagagcaacttactagtttgttgcaaaataatgtaaacgtcaatgcacaaaatggatttggaaggactgcgctgcaggttatgaaacttggaaatcccgagattgccaggagactgctacttagaggtgctaatcccgatttgaaagaccgaactggtttcgctgtcattcatgatgcggccagagcaggtttcctggacactttacagactttgctggagtttcaagctgatgttaacatcgaggataatgaagggaacctgcccttgcacttggctgccaaagaaggccacctccgggtggtggagttcctggtgaagcacacggccagcaatgtggggcatcggaaccataagggggacaccgcctgtgatttggccaggctctatgggaggaatgaggttgttagcctgatgcaggcaaacggggctgggggagccacaaatcttcaataaacgtggggagggctcccccacgttgcctctactttatcaattaactgagtagctctcctgacttttaatgtcatttgttaaaatacagttctgtcatatgttaagcagctaaattttctgaaactgcataagtgaaaatcttacaacaggcttatgaatatatttaagcaacatctttttaacctgcaaaatctgttctaacatgtaattgcagataactttgactttcttctgaatattttatctttccttggcttttcccttgcttccccttttgccaatctcaacacccaagttgaagactttgtttttaaaatggtttgtcctgatgcttttgtctaattaaaacactttcaaaacaggacaacatttttctgtgattttccctcctttagaacccatacacaacttatcacttgctaaggagaactgtactaaaagttattgaatgtcttaagtctttacactagaaaaggtagaccaactggaaaactagacatactctcttgatgattcagttgttttcatcctttacccatgtcccgtccaccttggtgcctagtatttctgctttaaaacaaaataaggacaactttttttt

SEQ ID NO: 6236 - protein, 168 aa, Homo sapiens; identical to SEQ ID NO: 194

SEQ ID NO: 6237 - DNA, 1224 bp, Homo sapiens
gaggccagggctcagcgaaggacgccgagtttacagagcgcgcgcgcctagaggaggcagcagcagccgcagcctggccgcccgaactttgcgagcctggcgggggagcacagaggcgggccgacctgccccgctagcgctgaggaacgactccctttatgccagctcgctgtccgccttcccgcagcgtacgctgcggagcctcaaagaccctgcggccctccacaaccgtcttaaataacaaacccctgtcctcgcccccgtaggaattggggcagctgggggttcgcgtcacagactcaagcccgccagcagaagggcaggccggacttcgcggggccgaaccccgctccagctggggacaggccgcctagccggcaggagggagccggcgcgagagacttgacgggaggaggtggagagcgggaggcgggaatgagggcgcgggaccgggcgggcggagcgtgcgagactgcgagcgcgagcgccagcagggcggagggcggggcgtgggcggcgcccggccttcccgctcccgcggcgctgcaactctgccgagcctccttaaaactctgccgttaaaatgggggcgggtttttcaactcaaaaagcgctcaatttttttcttttcaaaaaaagctgatgaggtcggaaaaaagggagaagaaaccggcaccctctctgagaggcaacagaagcagcaattgtttcagcgaaaaaagcagcaagggagggagtgaaggaaaaaagcaaaaaagggggcgacacgcaagtgcctgtaggggtgaaaggagcagggaccggcgatctaggggggggcccgccgcacgcccggcagcctccggagacgcgcgccgagcccggctcccacggcctctgaggctcggcggggctgcggctgcctggcgggcgggctccggagctttcctgagcggcattagcccacggcttggcccggacgcgaccaaaggctcttctggagaagcccagagcactgggcaatcgttacgacctgtaacttgagggccaccgaactgctactcccgttcgcctttggcgatcatcttttaaccctccggagcacgtcagcatccagccaccgcggcgctctcccagcagcggaggacccaggactatcccttcggcgagacggatggaaaccgagccccctggaggacctgcccctgcagttctgcctcacacggctcaagtcaccaccgtgaa

SEQ ID NO: 6238 - protein, 126 aa, Homo sapiens
MRSEKREKKPAPSLRGNRSSNCFSEKSSKGGSEGKKQKRGRHASACRGERSRDRRSRGGPAARPAASGDARRARLPRPLRLGGAAAAWRAGSGAFLSGISPRLGPDATKGSSGEAQSTGQSLRPVT

SEQ ID NO: 6239 - DNA, 1621 bp, Homo sapiens
gaggccagggctcagcgaaggacgccgagtttacagagcgcgcgcgcctagaggaggcagcagcagccgcagcctggccgcccgaactttgcgagcctggcgggggagcacagaggcgggccgacctgccccgctagcgctgaggaacgactccctttatgccagctcgctgtccgccttcccgcagcgtacgctgcggagcctcaaagaccctgcggccctccacaaccgtcttaaataacaaacccctgtcctcgcccccgtaggaattggggcagctgggggttcgcgtcacagactcaagcccgccagcagaagggcaggccggacttcgcggggccgaaccccgctccagctggggacaggccgcctagccggcaggagggagccggcgcgagagacttgacgggaggaggtggagagcgggaggcgggaatgagggcgcgggaccgggcgggcggagcgtgcgagactgcgagcgcgagcgccagcagggcggagggcggggcgtgggcggcgcccggccttcccgctcccgcggcgctgcaactctgccgagcctccttaaaactctgccgttaaaatgggggcgggtttttcaactcaaaaagcgctcaatttttttcttttcaaaaaaagctgatgaggtcggaaaaaagggagaagaaaccggcaccctctctgagaggcaacagaagcagcaattgtttcagcgaaaaaagcagcaagggagggagtgaaggaaaaaagcaaaaaagggggcgacacgcaagtgcctgtaggggtgaaaggagcagggaccggcgatctagggggggatcagctacaaaagaaactgtcactgggagcggtgcggccaaggaggaagcagtgctgccaggctctgctccagggcacagctggctggcggctgccctgtccgcagcaaaggggcacaggccggggaccgcgagaggtggcaaagtggcaccgggcgccgaggctgctgagcgctcgccgagacggcgaccggactggctgccccggaactgcggcgactctccctactcagaacttggcctacgtttcccaggactctccccatctccagaggcccccacaaaaccgggaaaggaaggaaaggacagcggcggcagcagctcaatgagtgcctacagcagaaagccgcctgtgatttggccaggctctatgggaggaatgaggttgttagcctgatgcaggcaaacggggctgggggagccacaaatcttcaataaacgtggggagggctcccccacgttgcctctactttatcaattaactgagtagctctcctgacttttaatgtcatttgttaaaatacagttctgtcatatgttaagcagctaaattttctgaaactgcataagtgaaaatcttacaacaggcttatgaatatatttaagcaacatctttttaacctgcaaaatctgttctaacatgtaattgcagataactttgactttcttctgaatattttatctttccttggcttttcccttgcttccccttttgccaatctcaacacccaagttgaagactttgtttttaaaatggtttgtcctgatgcttttgtctaattaaaacactttcaaaacaggac

SEQ ID NO: 6240 - protein, 190 aa, Homo sapiens
MRSEKREKKPAPSLRGNRSSNCFSEKSSKGGSEGKKQKRGRHASACRGERSRDRRSRGGSATKETVTGSGAAKEEAVLPGSAPGHSWLAAALSAAKGHRPGTARGGKVAPGAEAAERSPRRRPDWLPRNCGDSPYSELGLRFPGLSPSPEAPTKPGKEGKDSGGSSSMSAYSRKPPVIWPGSMGGMRLLA

SEQ ID NO: 6241 - DNA, 1857 bp, Homo sapiens
gaggccagggctcagcgaaggacgccgagtttacagagcgcgcgcgcctagaggaggcagcagcagccgcagcctggccgcccgaactttgcgagcctggcgggggagcacagaggcgggccgacctgccccgctagcgctgaggaacgactccctttatgccagctcgctgtccgccttcccgcagcgtacgctgcggagcctcaaagaccctgcggccctccacaaccgtcttaaataacaaacccctgtcctcgcccccgtaggaattggggcagctgggggttcgcgtcacagactcaagcccgccagcagaagggcaggccggacttcgcggggccgaaccccgctccagctggggacaggccgcctagccggcaggagggagccggcgcgagagacttgacgggaggaggtggagagcgggaggcgggaatgagggcgcgggaccgggcgggcggagcgtgcgagactgcgagcgcgagcgccagcagggcggagggcggggcgtgggcggcgcccggccttcccgctcccgcggcgctgcaactctgccgagcctccttaaaactctgccgttaaaatgggggcgggtttttcaactcaaaaagcgctcaatttttttcttttcaaaaaaagctgatgaggtcggaaaaaagggagaagaaaccggcaccctctctgagaggcaacagaagcagcaattgtttcagcgaaaaaagcagcaagggagggagtgaaggaaaaaagcaaaaaagggggcgacacgcaagtgcctgtaggggtgaaaggagcagggaccggcgatctagggggggatcagctacaaaagaaactgtcactgggagcggtgcggccaaggaggaagcagtgctgccaggctctgctccagggcacagctggctggcggctgccctgtccgcagcaaaggggcacaggccggggaccgcgagaggtggcaaagtggcaccgggcgccgaggctgctgagcgctcgccgagacggcgaccggactggctgccccggaactgcggcgactctccctactcagaacttggcctacgtttcccaggactctccccatctccagaggcccccacaaaaccgggaaaggaaggaaaggacagcggcggcagcagctcaatgagtgcctacagcagaaagccgcctgtgatttggccaggctctatgggaggaatgaggttgttagcctgatgcaggcaaacggggctgggggagccacaaatcttcaataaacgtggggagggctcccccacgttgcctctactttatcaattaactgagtagctctcctgacttttaatgtcatttgttaaaatacagttctgtcatatgttaagcagctaaattttctgaaactgcataagtgaaaatcttacaacaggcttatgaatatatttaagcaacatctttttaacctgcaaaatctgttctaacatgtaattgcagataactttgactttcttctgaatattttatctttccttggcttttcccttgcttccccttttgccaatctcaacacccaagttgaagactttgtttttaaaatggtttgtcctgatgcttttgtctaattaaaacactttcaaaacaggacaacatttttctgtgattttccctcctttagaacccatacacaacttatcacttgctaaggagaactgtactaaaagttattgaatgtcttaagtctttacactagaaaaggtagaccaactggaaaactagacatactctcttgatgattcagttgttttcatcctttacccatgtcccgtccaccttggtgcctagtatttctgctttaaaacaaaataaggacaactttttttt

SEQ ID NO: 6242 - protein, 190 aa, Homo sapiens; identical to SEQ ID NO: 6240

SEQ ID NO: 6243 - DNA, 1122 bp, Homo sapiens
ccttcccgctcccgcggcgctgcaactctgccgagcctccttaaaactctgccgttaaaatgggggcgggtttttcaactcaaaaagcgctcaatttttttcttttcaaaaaaagctgatgaggtcggaaaaaagggagaagaaaccggcaccctctctgagaggcaacagaagcagcaattgtttcagcgaaaaaagcagcaagggagggagtgaaggaaaaaagcaaaaaagggggcgacacgcaagtgcctgtaggggtgaaaggagcagggaccggcgatctagggggggatcagctacaaaagaaactgtcactgggagcggtgcggccaaggaggaagcagtgctgctgagcgctcgccgagacggcgaccggactggctgccccggaactgcggcgactctccctactcagaacttggcctacgtttcccaggactctccccatctccagaggcccccacaaaaccgggaaaggaaggaaaggacagcggcggcagcagctcaatgagtgcctacagcagaaagcctgaacgagctcggtcgtaggcgggaagttcccgggggggctgcccagtgcagccgcaatgctgccgcgagctgccccagcagtccgggctccgtagacgctttccgcatcactctccttcctcgggctgccgggagtcccgggacctggcggggccggcatgacgggcttctcgggggcccgccgcacgcccggcagcctccggagacgcgcgccgagcccggctcccacggcctctgaggctcggcggggctgcggctgcctggcgggcgggctccggagctttcctgagcggcattagcccacggcttggcccggacgcgaccaaaggctcttctggagaagcccagagcactgggcaatcgttacgacctgtaacttgagggccaccgaactgctactcccgttcgcctttggcgatcatcttttaaccctccggagcacgtcagcatccagccaccgcggcgctctcccagcagcggaggacccaggactatcccttcggcgagacggatggaaaccgagccccctggaggacctgcccctgcagttctgcctcacacggctcaagtcaccaccgtgaacaaggg

SEQ ID NO: 6244 - protein, 131 aa, Homo sapiens
MRSEKREKKPAPSLRGNRSSNCFSEKSSKGGSEGKKQKRGRHASACRGERSRDRRSRGGSATKETVTGSGAAKEEAVLLSARRDGDRTGCPGTAATLPTQNLAYVSQDSPHLQRPPQNRERKERTAAAAAQ

SEQ ID NO: 6245 - DNA, 1294 bp, Homo sapiens
attttctgccccgatctatagtcccttgagtctccacacacactcctcacagagatctgtagcgtaggtacgtgacagctctgcctacatctgacgtccggagtcattaaccaggaatgtatgtgtgtctgtgtgtctctctgtggagtcgtcagaattcttcataggggttaagctaaaaaagcgaggcgaggagcccctctccaatggctcagttttgctgaataatcacgtgtgaatcgaggggcgggcttttggcaggcagatcttactagtatttactaccaagctctactccagattaaccatcccagtccttctgtcagtctccgatgccatcatgcagcctggttaggagcaaaggaaaggggaaaaagaaaaacgactaattcatcttttcctgatcgtcaggaccctaaagaatggccgagccttgggggaacgagttggcgtccgcagctgccaggggggacctagagcaacttactagtttgttgcaaaataatgtaaacgtcaatgcacaaaatggatttggaaggactgcgctgcaggttatgaaacttggaaatcccgagattgccaggagactgctacttagaggtgctaatcccgatttgaaagaccgaactggtttcgctgtcattcatgatgcggccagagcaggtttcctggacactttacagactttgctggagtttcaagctgatgttaacatcgaggataatgaagggaacctgcccttgcacttggctgccaaagaaggccacctccgggtggtggagttcctggtgaagcacacggccagcaatgtggggcatcggaaccataagggggacaccgcctgtgatttggccaggctctatgggaggaatgaggttgttagcctgatgcaggcaaacggggctgggggagccacaaatcttcaataaacgtggggagggctcccccacgttgcctctactttatcaattaactgagtagctctcctgacttttaatgtcatttgttaaaatacagttctgtcatatgttaagcagctaaattttctgaaactgcataagtgaaaatcttacaacaggcttatgaatatatttaagcaacatctttttaacctgcaaaatctgttctaacatgtaattgcagataactttgactttcttctgaatattttatctttccttggcttttcccttgcttccccttttgccaatctcaacacccaagttgaagactttgtttttaaaatggtttgtcctgatgcttttgtctaattaaaacactttcaaaacaggac

SEQ ID NO: 6246 - protein, 168 aa, Homo sapiens; identical to SEQ ID NO: 194

SEQ ID NO: 6247 - DNA, 1530 bp, Homo sapiens
attttctgccccgatctatagtcccttgagtctccacacacactcctcacagagatctgtagcgtaggtacgtgacagctctgcctacatctgacgtccggagtcattaaccaggaatgtatgtgtgtctgtgtgtctctctgtggagtcgtcagaattcttcataggggttaagctaaaaaagcgaggcgaggagcccctctccaatggctcagttttgctgaataatcacgtgtgaatcgaggggcgggcttttggcaggcagatcttactagtatttactaccaagctctactccagattaaccatcccagtccttctgtcagtctccgatgccatcatgcagcctggttaggagcaaaggaaaggggaaaaagaaaaacgactaattcatcttttcctgatcgtcaggaccctaaagaatggccgagccttgggggaacgagttggcgtccgcagctgccaggggggacctagagcaacttactagtttgttgcaaaataatgtaaacgtcaatgcacaaaatggatttggaaggactgcgctgcaggttatgaaacttggaaatcccgagattgccaggagactgctacttagaggtgctaatcccgatttgaaagaccgaactggtttcgctgtcattcatgatgcggccagagcaggtttcctggacactttacagactttgctggagtttcaagctgatgttaacatcgaggataatgaagggaacctgcccttgcacttggctgccaaagaaggccacctccgggtggtggagttcctggtgaagcacacggccagcaatgtggggcatcggaaccataagggggacaccgcctgtgatttggccaggctctatgggaggaatgaggttgttagcctgatgcaggcaaacggggctgggggagccacaaatcttcaataaacgtggggagggctcccccacgttgcctctactttatcaattaactgagtagctctcctgacttttaatgtcatttgttaaaatacagttctgtcatatgttaagcagctaaattttctgaaactgcataagtgaaaatcttacaacaggcttatgaatatatttaagcaacatctttttaacctgcaaaatctgttctaacatgtaattgcagataactttgactttcttctgaatattttatctttccttggcttttcccttgcttccccttttgccaatctcaacacccaagttgaagactttgtttttaaaatggtttgtcctgatgcttttgtctaattaaaacactttcaaaacaggacaacatttttctgtgattttccctcctttagaacccatacacaacttatcacttgctaaggagaactgtactaaaagttattgaatgtcttaagtctttacactagaaaaggtagaccaactggaaaactagacatactctcttgatgattcagttgttttcatcctttacccatgtcccgtccaccttggtgcctagtatttctgctttaaaacaaaataaggacaactttttttt

SEQ ID NO: 6248 - protein, 168 aa, Homo sapiens; identical to SEQ ID NO: 194

SEQ ID NO: 6249 - DNA, 682 bp, Homo sapiens
agtcatatggcttcacctaaaggtttttttaattacttgacctattttcttgctgctggtgctgtcactttgggaattggtttctttgctttggcatcagctttgtggttcctgatttgcaaacgaagagaaatatttcaaaattccaaatttaaagcaattgatgagagatgcaggcaaagaccatcaatggcgaagattaaatctcattctcagtgtgtttttatttctcgaaattttcatactgggagattccaattacaggaggagcaaagaaaaaaggaagcagcacatataaaagcaattaaagatcattctaaagatgaaccccaacttgcaacaaaaaatatcatttgtgatccctcagagaccagctccacaacaaatcgcagcagtgttacattaagcttatcaacattaccatctgattcttattacagccaaagtatagaagcagctgatgactggttttctgatgattctctagtgaaaaggaactctccaatgccttctctcggggaacctctaatggaaaaagtattttcatacctgtcaaccatttcattagaagagggtactgaaagtgtactgaatgacactttatgaccatcaaaaagatgactacattaagggaaaatgttcatgaagaaacacagaggttgaaatataaaaccttcaacat

SEQ ID NO: 6250 - protein, 199 aa, Homo sapiens; identical to SEQ ID NO: 198

SEQ ID NO: 6251 - DNA, 915 bp, Homo sapiens
agtcatatggcttcacctaaaggtttttttaattacttgacctattttcttgctgctggtgctgtcactttgggaattggtttctttgctttggcatcagctttgtggttcctgatttgcaaacgaagagaaatatttcaaaattccaaatttaaagcaattgatgagagatgcaggcaaagaccatcaatggcgaagattaaatctcattctcagtgtgtttttatttctcgaaattttcatactgggagattccaattacaggaggagcaaagaaaaaaggaagcagcacatataaaagcaattaaagatcattctaaagatgaaccccaacttgcaacaaaaaatatcatttgtgatccctcagagaccagctccacaacaaatcgcagcagtgttacattaagcttatcaacattaccatctgattcttattacagccaaagtatagaagcagctgatgactggttttctgatgattctctagtgaaaaggaactctccaatgccttctctcggggaacctctaatggaaaaagtattttcatacctgtcaaccatttcattagaagagggtactgaaagtgtactgaatgacactttatgaccatcaaaaagatgactacattaagggaaaatgttcatgaagaaacacagaggttgaaatataaaaccttcaacataatactgaatgacttttttcttttgaaaccttgtatacaatcagcttctgagtctcttaacatgtccatgctaatattgctttttttgttctttaccatagagcggctctacttcccttgctggttcttatttctagaaacaaaattaggaagaactagagtgatgtcatgaacattaagcttaacttattgtatctcatccaaagacatattaaataaaatgagtgtatgtc

SEQ ID NO: 6252 - protein, 199 aa, Homo sapiens; identical to SEQ ID NO: 198

SEQ ID NO: 6253 - DNA, 509 bp, Homo sapiens
ctgggaagaagaggaaaatatatttagacgaacaaccagaaatctatttctattctctggaagagcttgtataagataagaaatacttgaatcatgggtttttttaattacttgacctattttcttgctgctggtgctgtcactttgggaattggtttctttgctttggcatcagctttgtggttcctgatttgcaaacgaagagaaatatttcaaaattccaaatttaaagcaattgatgagagatgcaggcaaagaccatcaatggcgaagattaaatctcattctcagtgtgtttttatttctcgaaattttcatactgggagattccaattacagttttgaaggctgagaagtccaagatcaagatgctgaaagatccggttctggtgaaggccctcttcctgatttggagatggcctttttcttgctgtgttttcagatggcagggagcagagagagcaagagcgcactttcacatctcttcttataaaggcactaattccatt

SEQ ID NO: 6254 - protein, 83 aa, Homo sapiens; identical to SEQ ID NO: 200

SEQ ID NO: 6255 - DNA, 2366 bp, Homo sapiens
tcattcaccatttactgaagttgtgtgtgcgtgtgtataccagaccccacgctaaggactggggaaaaggatgatcatacctggcttgttcctgatagagcccagagaccacctgggaagacaagtaatcaggtccagcttcggtgtgaggccctcaatccagaacatcatggctctgactcaccagccttcagctgctgcactctgctctcctcagtggctgccttgcacctggaactcaatttttttttatttttatttttttgagatggagtcttgctctgtaacccaggctggagtgcaatggcgcaatctcggctcactgcaacttccacctcccgggttcaagtgcttctcctgcctcagcctcctgagctgggattacagttgtccaccaccatgcccagctaatttttgtgtgttttttttttagtagagacagggtttcaccatgttggccagactggtcttgaactcctgacctcaggtgatccgcctgccttggcctcccaaagtgctgggattacaggcataagccaccacacccagccaattttttaattttttaaattttttgtagagacagggtcttgctatgttgcccaggctgatcctcaaactcctggcatcaagagacactcctgactccacctcctaaatgctgggattagagatgtgagccattgttcctggcccctattgaattttttagtccactgttgagacctattgatcagaaaaaaggttgctttcaaaaggttattactaaaaaaaaaaaaaaagaagaagaagaagaaagaaaaaagattacaaagattactgctcatactcattcacaatgcatttagtcacccaagagctctaatggagatgtacaaggagatgaatgttgttttcatgcctgctaatacacatcctttctgcagcccatggatcaaggagtaatttaaacctgcaagtcttattatttaaaattacatttcataaggctatagctgccatagatagtgattctgctgatggatttgggcaaagtacattgaaaaccttctggaaaggattcaccattctagatgccattaagaatatttgtggttccagggaggaagccaaaaaccaacatttacaggagtttggaagaaagtgactctataactcatggatgactttcagaggggctcaagacttcactagaggaagtaactgcaggtatgatagaagtagcaagggaactagaattagaaatggaacctgaagatgtgactgaattgctgcaatctcatgataaaatttaaatggatgcagagttgtttcttatggatgagcaaataagtgatttcttcttcttttctttttttttttttgaggtggagtctcgctctgtcacccaggcttgagtgcagtgatgtgatctctgctcactgcaaccttaacctcccaagctcaagcgattctcctgcctcagcctcccaagtagctgggattacaggtgtccaccaccatgactggctaatttttgtatttttagtggagacagggtttcaccatgctgaccaggctggtctcggactcctgacctcaagtgatcctcctggcttgacctcccaaagtgctgggattacaggtgtgagccaccatgcccagcctctttttttttttttttttaaatagagacagagtctcactgtgttgcccaggctggcaatcatggctcactgcaaccttgacctcctagactcaagccatcctcctggttcaaccttccaagtaactagtactacatgtgtgcaccaccctgctcagctaattaaaaataatttttgtgaggagatgggggtctcactatgttgccaaggctggtttagaatgcccaagctcacgtgattctctcactctggactcccaaagttctgggattacaggtgtgtgccatcgtgcctagccagaaagtggtttcttgagatggaatctactcctgatgaagatactgtgaaatgtagaatggtagaaatgacaacaaaggatttagaatatgacataaacttagttgataaagcagcagcagggtttgagaggactgagtccaattttggaagatattctactatgagtaaaatgctatcaaatagtactgcatactacagataaatctttcatgaaaggaagtgtcaattcatgcggcaaatgctacattgtcttattttaagaaattgtcacagctggcatggtggcacacacctgtaatcccagctacttgggaggctgaggcaggagaatcgcttgaacccaggaggcggaggttgcagtgagacgagatcgtgtcattgtactccagcctgggcaacaagagggagactcggtctcag

SEQ ID NO: 6256 - protein, 120 aa, Homo sapiens
MIIPGLFLIEPRDHLGRQVIRSSFGVRPSIQNIMALTHQPSAAALCSPQWLPCTWNSIFFYFYFFEMESCSVTQAGVQWRNLGSLQLPPPGFKCFSCLSLLSWDYSCPPPCPANFCVFFF

SEQ ID NO: 6257 - DNA, 2547 bp, Homo sapiens
ggctgccgccgtctcgctgaggcggagtaggatgaggcccgcggccgtggctccggcgtcggcgggggcagcagcagctgaggcagcagctgaggcagccgcgacggccgcgcccccccccgctgacctggattaggcccagcagctccgtggccgccgccgccccgcgggggggcggggtggggaagtgcttcgtctccccgcccccccccccccatcgctgcctcgcaggaggcgaacgccgcgaccccagcggagcccgcggcccagccttgatcccccaaccccgggggctggcatgagcggcccctcggcggcaccgtggggcggtggagtcgcctccgcctgatccccggcctgtcgcccgaccccacctcgccaaccgaggcggaccgcggagtgtgcgaacgaccccaccgctgctttctcctcccccagatcacgcaccccagctccggaagatggggaactgcctcaaatcccccacctcggatgacatctccctgcttcacgagtctcagtccgaccgggctagctttggcgaggggacggagccggatcaggagccgccgccgccatatcaggtgtgtgatctgtatgatggactttgtttatggggacccaattcgatttctgccgtgcatgcacatctatcacctggactgtatagatgactggttgatgagatccttcacgtgcccctcctgcatggagccagttgatgcagcactgctttcatcctatgagactaattgagccagggtctcttatctgacttcaagtgaaccaccattttggtggttttgatcttttgtcactgagcccaaagagccagggattaggaattaagatcgtgcacaaaagtttccttaaaattcctggatggctgcagatgttgggggaaaaagtacgtgatattttagaaacttagtgggaaaagtaggatggtatttttatgtaaagccttgacccaatgtttaaaaatataattgtatttagatcttgttattgctccagtacataggaattgtgtaaagtgttaacagcagctgtatttgtttaaattgtgtgtattgaagattaggaaaaagatagtagttatttttcctaaatgaaataactttcttctcttccccttccccacccgaattcttttctgaagttgctggcatttgggtcaaggttttattaaaagctacattttataacactggcacacacaaaaaagtagttttaagcttgtttgcacagttctttttttccattggaaatggaattcattgccttaggtctttttaaatagtgtattattatcgttggggctggctctatgcttgaaaaccagtttatttataacctgttataagtgctatattctgtttgcagttaggaaatgcagaattcaaagtgatctcctagcttgtaagcaaactgagatgcactatcccttttctataaaaaataagttaatgtgtcaagaaaccaactctattaaggtggggtttaatattaccctttcctatgtgttttatctaattattttggttgttaatatggtgataatggaaagtcaagttaaattttaaatattaagaattctgatttattgagattgaattatgccaccacgtttatgtaaaaatgaaggtggcaccgtggtgagacctaatgagaaatagttactcagttgtaaaaattttgatttattctctttcttctgacctccttgcctcttgtcttgaaccatagcaaaaggatactgcatctctcattactgtagtgctgaggttattgaagttatacaaaacacatctcagtctctgtttcttggaaaggtatctattacatcctgctagctgactgacaaaactaagcagggagaataaagataattgtattttatgttttgcacacaaacgcagaatttgtataaccatatgacttcatagttgtgatctcaaaaaagaaggaatttctcctttgtttcttgcagttaatgtaagaatactttaaatctctaagcttctgaagtgttagaggtagagatggtctagtaaagatgtagtagtaatgttttatccatttagcatgtgtttattttttcatatgtactcaaaggtgacttattggttcacctcagtgatattacagctaaaaaaatcattcattagcaaaaggaaaagtggtctcaacctaacatcagaagtgtttcttattattattttatattgagttgaatattgaactctaacagttttctacatacaaaacacagtgtcatgaaggttattcataattgcattatagaggaatgtagtatgtcataagtactttgtaaagatttgacattcaactgtagtatccatatgttgcttaaatttccttatgagccccatgatggaaagacttaaagatgaatttgagaaaaattgaaagaaattagattatcaggttctgttaaattgttacatgtatcttgcttaaatttctgtttattaatttatatccacccaagtacataaagcaaatttggaggaaacaactgaa

SEQ ID NO: 6258 - protein, 87 aa, Homo sapiens
MTSPCFTSLSPTGLALARGRSRIRSRRRHIRCVICMMDFVYGDPIRFLPCMHIYHLDCIDDWLMRSFTCPSCMEPVDAALLSSYETN

SEQ ID NO: 6259 - DNA, 2724 bp, Homo sapiens
ggctgccgccgtctcgctgaggcggagtaggatgaggcccgcggccgtggctccggcgtcggcgggggcagcagcagctgaggcagcagctgaggcagccgcgacggccgcgcccccccccgctgacctggattaggcccagcagctccgtggccgccgccgccccgcgggggggcggggtggggaagtgcttcgtctccccgcccccccccccccatcgctgcctcgcaggaggcgaacgccgcgaccccagcggagcccgcggcccagccttgatcccccaaccccgggggctggcatgagcggcccctcggcggcaccgtggggcggtggagtcgcctccgcctgatccccggcctgtcgcccgaccccacctcgccaaccgaggcggaccgcggagtgtgcgaacgaccccaccgctgctttctcctcccccagatcacgcaccccagctccggaagatggggaactgcctcaaatcccccacctcggatgacatctccctgcttcacgagtctcagtccgaccgggctagctttggcgaggggacggagccggatcaggagccgccgccgccatatcaggaacaagttccagttccagtctaccacccaacacctagccagactcggctagcaactcagctgactgaagaggaacaaattaggatagctcaaagaataggtcttatacaacatctgcctaaaggagtttatgaccctggaagagatggatcagaaaaaaagatccgggagtgtgtgatctgtatgatggactttgtttatggggacccaattcgatttctgccgtgcatgcacatctatcacctggactgtatagatgactggttgatgagatccttcacgtgcccctcctgcatggagccagttgatgcagcactgctttcatcctatgagactaattgagccagggtctcttatctgacttcaagtgaaccaccattttggtggttttgatcttttgtcactgagcccaaagagccagggattaggaattaagatcgtgcacaaaagtttccttaaaattcctggatggctgcagatgttgggggaaaaagtacgtgatattttagaaacttagtgggaaaagtaggatggtatttttatgtaaagccttgacccaatgtttaaaaatataattgtatttagatcttgttattgctccagtacataggaattgtgtaaagtgttaacagcagctgtatttgtttaaattgtgtgtattgaagattaggaaaaagatagtagttatttttcctaaatgaaataactttcttctcttccccttccccacccgaattcttttctgaagttgctggcatttgggtcaaggttttattaaaagctacattttataacactggcacacacaaaaaagtagttttaagcttgtttgcacagttctttttttccattggaaatggaattcattgccttaggtctttttaaatagtgtattattatcgttggggctggctctatgcttgaaaaccagtttatttataacctgttataagtgctatattctgtttgcagttaggaaatgcagaattcaaagtgatctcctagcttgtaagcaaactgagatgcactatcccttttctataaaaaataagttaatgtgtcaagaaaccaactctattaaggtggggtttaatattaccctttcctatgtgttttatctaattattttggttgttaatatggtgataatggaaagtcaagttaaattttaaatattaagaattctgatttattgagattgaattatgccaccacgtttatgtaaaaatgaaggtggcaccgtggtgagacctaatgagaaatagttactcagttgtaaaaattttgatttattctctttcttctgacctccttgcctcttgtcttgaaccatagcaaaaggatactgcatctctcattactgtagtgctgaggttattgaagttatacaaaacacatctcagtctctgtttcttggaaaggtatctattacatcctgctagctgactgacaaaactaagcagggagaataaagataattgtattttatgttttgcacacaaacgcagaatttgtataaccatatgacttcatagttgtgatctcaaaaaagaaggaatttctcctttgtttcttgcagttaatgtaagaatactttaaatctctaagcttctgaagtgttagaggtagagatggtctagtaaagatgtagtagtaatgttttatccatttagcatgtgtttattttttcatatgtactcaaaggtgacttattggttcacctcagtgatattacagctaaaaaaatcattcattagcaaaaggaaaagtggtctcaacctaacatcagaagtgtttcttattattattttatattgagttgaatattgaactctaacagttttctacatacaaaacacagtgtcatgaaggttattcataattgcattatagaggaatgtagtatgtcataagtactttgtaaagatttgacattcaactgtagtatccatatgttgcttaaatttccttatgagccccatgatggaaagacttaaagatgaatttgagaaaaattgaaagaaattagattatcaggttctgttaaattgttacatgtatcttgcttaaatttctgtttattaatttatatccacccaagtacataaagcaaatttggaggaaacaactgaagttgtgc

SEQ ID NO: 6260 - protein, 154 aa, Homo sapiens; identical to SEQ ID NO: 202

SEQ ID NO: 6261 - DNA, 2689 bp, Homo sapiens
ggctgccgccgtctcgctgaggcggagtaggatgaggcccgcggccgtggctccggcgtcggcgggggcagcagcagctgaggcagcagctgaggcagccgcgacggccgcgcccccccccgctgacctggattaggcccagcagctccgtggccgccgccgccccgcgggggggcggggtggggaagtgcttcgtctccccgcccccccccccccatcgctgcctcgcaggaggcgaacgccgcgaccccagcggagcccgcggcccagccttgatcccccaaccccgggggctggcatgagcggcccctcggcggcaccgtggggcggtggagtcgcctccgcctgatccccggcctgtcgcccgaccccacctcgccaaccgaggcggaccgcggagtgtgcgaacgaccccaccgctgctttctcctcccccagatcacgcaccccagctccggaagatggggaactgcctcaaatcccccacctcggatgacatctccctgcttcacgagtctcagtccgaccgggctagctttggcgaggggacggagccggatcaggagccgccgccgccatatcaggtgtgtgatctgtatgatggactttgtttatggggacccaattcgatttctgccgtgcatgcacatctatcacctggactgtatagatgactggttgatgagatccttcacgtgcccctcctgcatggagccagttgatgcagcactgctttcatcctatgagactaattgagccagggtctcttatctgacttcaagtgaaccaccattttggtggttttgatcttttgtcactgagcccaaagagccagggattaggaattaagatcgtgcacaaaagtttccttaaaattcctggatggctgcagatgttgggggaaaaagtacgtgatattttagaaacttagtgggaaaagtaggatggtatttttatgtaaagccttgacccaatgtttaaaaatataattgtatttagatcttgttattgctccagtacataggaattgtgtaaagtgttaacagcagctgtatttgtttaaattgtgtgtattgaagattaggaaaaagatagtagttatttttcctaaatgaaataactttcttctcttccccttccccacccgaattcttttctgaagttgctggcatttgggtcaaggttttattaaaagctacattttataacactggcacacacaaaaaagtagttttaagcttgtttgcacagttctttttttccattggaaatggaattcattgccttaggtctttttaaatagtgtattattatcgttggggctggctctatgcttgaaaaccagtttatttataacctgttataagtgctatattctgtttgcagttaggaaatgcagaattcaaagtgatctcctagcttgtaagcaaactgagatgcactatcccttttctataaaaaataagttaatgtgtcaagaaaccaactctattaaggtggggtttaatattaccctttcctatgtgttttatctaattattttggttgttaatatggtgataatggaaagtcaagttaaattttaaatattaagaattctgatttattgagattgaattatgccaccacgtttatgtaaaaatgaaggtggcaccgtggtgagacctaatgagaaatagttactcagttgtaaaaattttgatttattctctttcttctgacctccttgcctcttgtcttgaaccatagcaaaaggatactgcatctctcattactgtagtgctgaggttattgaagttatacaaaacacatctcagtctctgtttcttggaaaggtatctattacatcctgctagctgactgacaaaactaagcagggagaataaagataattgtattttatgttttgcacacaaacgcagaatttgtataaccatatgacttcatagttgtgatctcaaaaaagaaggaatttctcctttgtttcttgcagttaatgtaagaatactttaaatctctaagcttctgaagtgttagaggtagagatggtctagtaaagatgtagtagtaatgttttatccatttagcatgtgtttattttttcatatgtactcaaaggtgacttattggttcacctcagtgatattacagctaaaaaaatcattcattagcaaaaggaaaagtggtctcaacctaacatcagaagtgtttcttattattattttatattgagttgaatattgaactctaacagttttctacatacaaaacacagtgtcatgaaggttattcataattgcattatagaggaatgtagtatgtcataagtactttgtaaagatttgacattcaactgtagtatccatatgttgcttaaatttccttatgagccccatgatggaaagacttaaagatgaatttgagaaaaattgaaagaaattagattatcaggttctgttaaattgttacatgtatcttgcttaaatttctgtttattaatttatatccacccaagtacataaagcaaatttggaggaaacaactgaagttgtgcaatattttctgataattgctttttttattcttgtgttttctacttaaacataatgtctgtgtcatcaagtattatagtcagacttttctttttttctagattgttaaaattggcaaatgaacttttttaaaaatc

SEQ ID NO: 6262 - protein, 87 aa, Homo sapiens; identical to SEQ ID NO: 6258

SEQ ID NO: 6263 - DNA, 2885 bp, Homo sapiens
ggctgccgccgtctcgctgaggcggagtaggatgaggcccgcggccgtggctccggcgtcggcgggggcagcagcagctgaggcagcagctgaggcagccgcgacggccgcgcccccccccgctgacctggattaggcccagcagctccgtggccgccgccgccccgcgggggggcggggtggggaagtgcttcgtctccccgcccccccccccccatcgctgcctcgcaggaggcgaacgccgcgaccccagcggagcccgcggcccagccttgatcccccaaccccgggggctggcatgagcggcccctcggcggcaccgtggggcggtggagtcgcctccgcctgatccccggcctgtcgcccgaccccacctcgccaaccgaggcggaccgcggagtgtgcgaacgaccccaccgctgctttctcctcccccagatcacgcaccccagctccggaagatggggaactgcctcaaatcccccacctcggatgacatctccctgcttcacgagtctcagtccgaccgggctagctttggcgaggggacggagccggatcaggagccgccgccgccatatcaggtgtgtgatctgtatgatggactttgtttatggggacccaattcgatttctgccgtgcatgcacatctatcacctggactgtatagatgactggttgatgagatccttcacgtgcccctcctgcatggagccagttgatgcagcactgctttcatcctatgagactaattgagccagggtctcttatctgacttcaagtgaaccaccattttggtggttttgatcttttgtcactgagcccaaagagccagggattaggaattaagatcgtgcacaaaagtttccttaaaattcctggatggctgcagatgttgggggaaaaagtacgtgatattttagaaacttagtgggaaaagtaggatggtatttttatgtaaagccttgacccaatgtttaaaaatataattgtatttagatcttgttattgctccagtacataggaattgtgtaaagtgttaacagcagctgtatttgtttaaattgtgtgtattgaagattaggaaaaagatagtagttatttttcctaaatgaaataactttcttctcttccccttccccacccgaattcttttctgaagttgctggcatttgggtcaaggttttattaaaagctacattttataacactggcacacacaaaaaagtagttttaagcttgtttgcacagttctttttttccattggaaatggaattcattgccttaggtctttttaaatagtgtattattatcgttggggctggctctatgcttgaaaaccagtttatttataacctgttataagtgctatattctgtttgcagttaggaaatgcagaattcaaagtgatctcctagcttgtaagcaaactgagatgcactatcccttttctataaaaaataagttaatgtgtcaagaaaccaactctattaaggtggggtttaatattaccctttcctatgtgttttatctaattattttggttgttaatatggtgataatggaaagtcaagttaaattttaaatattaagaattctgatttattgagattgaattatgccaccacgtttatgtaaaaatgaaggtggcaccgtggtgagacctaatgagaaatagttactcagttgtaaaaattttgatttattctctttcttctgacctccttgcctcttgtcttgaaccatagcaaaaggatactgcatctctcattactgtagtgctgaggttattgaagttatacaaaacacatctcagtctctgtttcttggaaaggtatctattacatcctgctagctgactgacaaaactaagcagggagaataaagataattgtattttatgttttgcacacaaacgcagaatttgtataaccatatgacttcatagttgtgatctcaaaaaagaaggaatttctcctttgtttcttgcagttaatgtaagaatactttaaatctctaagcttctgaagtgttagaggtagagatggtctagtaaagatgtagtagtaatgttttatccatttagcatgtgtttattttttcatatgtactcaaaggtgacttattggttcacctcagtgatattacagctaaaaaaatcattcattagcaaaaggaaaagtggtctcaacctaacatcagaagtgtttcttattattattttatattgagttgaatattgaactctaacagttttctacatacaaaacacagtgtcatgaaggttattcataattgcattatagaggaatgtagtatgtcataagtactttgtaaagatttgacattcaactgtagtatccatatgttgcttaaatttccttatgagccccatgatggaaagacttaaagatgaatttgagaaaaattgaaagaaattagattatcaggttctgttaaattgttacatgtatcttgcttaaatttctgtttattaatttatatccacccaagtacataaagcaaatttggaggaaacaactgaagttgtgcaatattttctgataattgctttttttattcttgtgttttctacttaaacataatgtctgtgtcatcaagtattatagtcagacttttctttttttctagattgttaaaattggcaaatgaacttttttaaaaatcatcttccatgttgcagttagtctttcttttcattacaagtctttcacagaagtttggtggtaatattgaaagaactagcattgggcagaatgtgtcttttttaggcactttatattctcaacatacaatgttaagaaccatcaattttgacttttactaagttgttaaataaagttataatacagctgtgaagggc

SEQ ID NO: 6264 - protein, 87 aa, Homo sapiens; identical to SEQ ID NO: 6258

SEQ ID NO: 6265 - DNA, 2973 bp, Homo sapiens
ggctgccgccgtctcgctgaggcggagtaggatgaggcccgcggccgtggctccggcgtcggcgggggcagcagcagctgaggcagcagctgaggcagccgcgacggccgcgcccccccccgctgacctggattaggcccagcagctccgtggccgccgccgccccgcgggggggcggggtggggaagtgcttcgtctccccgcccccccccccccatcgctgcctcgcaggaggcgaacgccgcgaccccagcggagcccgcggcccagccttgatcccccaaccccgggggctggcatgagcggcccctcggcggcaccgtggggcggtggagtcgcctccgcctgatccccggcctgtcgcccgaccccacctcgccaaccgaggcggaccgcggagtgtgcgaacgaccccaccgctgctttctcctcccccagatcacgcaccccagctccggaagatggggaactgcctcaaatcccccacctcggatgacatctccctgcttcacgagtctcagtccgaccgggctagctttggcgaggggacggagccggatcaggagccgccgccgccatatcaggtgtgtgatctgtatgatggactttgtttatggggacccaattcgatttctgccgtgcatgcacatctatcacctggactgtatagatgactggttgatgagatccttcacgtgcccctcctgcatggagccagttgatgcagcactgctttcatcctatgagactaattgagccagggtctcttatctgacttcaagtgaaccaccattttggtggttttgatcttttgtcactgagcccaaagagccagggattaggaattaagatcgtgcacaaaagtttccttaaaattcctggatggctgcagatgttgggggaaaaagtacgtgatattttagaaacttagtgggaaaagtaggatggtatttttatgtaaagccttgacccaatgtttaaaaatataattgtatttagatcttgttattgctccagtacataggaattgtgtaaagtgttaacagcagctgtatttgtttaaattgtgtgtattgaagattaggaaaaagatagtagttatttttcctaaatgaaataactttcttctcttccccttccccacccgaattcttttctgaagttgctggcatttgggtcaaggttttattaaaagctacattttataacactggcacacacaaaaaagtagttttaagcttgtttgcacagttctttttttccattggaaatggaattcattgccttaggtctttttaaatagtgtattattatcgttggggctggctctatgcttgaaaaccagtttatttataacctgttataagtgctatattctgtttgcagttaggaaatgcagaattcaaagtgatctcctagcttgtaagcaaactgagatgcactatcccttttctataaaaaataagttaatgtgtcaagaaaccaactctattaaggtggggtttaatattaccctttcctatgtgttttatctaattattttggttgttaatatggtgataatggaaagtcaagttaaattttaaatattaagaattctgatttattgagattgaattatgccaccacgtttatgtaaaaatgaaggtggcaccgtggtgagacctaatgagaaatagttactcagttgtaaaaattttgatttattctctttcttctgacctccttgcctcttgtcttgaaccatagcaaaaggatactgcatctctcattactgtagtgctgaggttattgaagttatacaaaacacatctcagtctctgtttcttggaaaggtatctattacatcctgctagctgactgacaaaactaagcagggagaataaagataattgtattttatgttttgcacacaaacgcagaatttgtataaccatatgacttcatagttgtgatctcaaaaaagaaggaatttctcctttgtttcttgcagttaatgtaagaatactttaaatctctaagcttctgaagtgttagaggtagagatggtctagtaaagatgtagtagtaatgttttatccatttagcatgtgtttattttttcatatgtactcaaaggtgacttattggttcacctcagtgatattacagctaaaaaaatcattcattagcaaaaggaaaagtggtctcaacctaacatcagaagtgtttcttattattattttatattgagttgaatattgaactctaacagttttctacatacaaaacacagtgtcatgaaggttattcataattgcattatagaggaatgtagtatgtcataagtactttgtaaagatttgacattcaactgtagtatccatatgttgcttaaatttccttatgagccccatgatggaaagacttaaagatgaatttgagaaaaattgaaagaaattagattatcaggttctgttaaattgttacatgtatcttgcttaaatttctgtttattaatttatatccacccaagtacataaagcaaatttggaggaaacaactgaagttgtgcaatattttctgataattgctttttttattcttgtgttttctacttaaacataatgtctgtgtcatcaagtattatagtcagacttttctttttttctagattgttaaaattggcaaatgaacttttttaaaaatcatcttccatgttgcagttagtctttcttttcattacaagtctttcacagaagtttggtggtaatattgaaagaactagcattgggcagaatgtgtcttttttaggcactttatattctcaacatacaatgttaagaaccatcaattttgacttttactaagttgttaaataaagttataatacagctgtgaagggctaaagttagagttgattacataagtaagtattccccatataatcttttaaaaagttgtgtatgattattttaaaatctctctctctat

SEQ ID NO: 6266 - protein, 87 aa, Homo sapiens; identical to SEQ ID NO: 6258

SEQ ID NO: 6267 - DNA, 3143 bp, Homo sapiens
ggctgccgccgtctcgctgaggcggagtaggatgaggcccgcggccgtggctccggcgtcggcgggggcagcagcagctgaggcagcagctgaggcagccgcgacggccgcgcccccccccgctgacctggattaggcccagcagctccgtggccgccgccgccccgcgggggggcggggtggggaagtgcttcgtctccccgcccccccccccccatcgctgcctcgcaggaggcgaacgccgcgaccccagcggagcccgcggcccagccttgatcccccaaccccgggggctggcatgagcggcccctcggcggcaccgtggggcggtggagtcgcctccgcctgatccccggcctgtcgcccgaccccacctcgccaaccgaggcggaccgcggagtgtgcgaacgaccccaccgctgctttctcctcccccagatcacgcaccccagctccggaagatggggaactgcctcaaatcccccacctcggatgacatctccctgcttcacgagtctcagtccgaccgggctagctttggcgaggggacggagccggatcaggagccgccgccgccatatcaggaacaagttccagttccagtctaccacccaacacctagccagactcggctagcaactcagctgactgaagaggaacaaattaggatagctcaaagaataggtcttatacaacatctgcctaaaggagtttatgaccctggaagagatggatcagaaaaaaagatccgggagtgtgtgatctgtatgatggactttgtttatggggacccaattcgatttctgccgtgcatgcacatctatcacctggactgtatagatgactggttgatgagatccttcacgtgcccctcctgcatggagccagttgatgcagcactgctttcatcctatgagactaattgagccagggtctcttatctgacttcaagtgaaccaccattttggtggttttgatcttttgtcactgagcccaaagagccagggattaggaattaagatcgtgcacaaaagtttccttaaaattcctggatggctgcagatgttgggggaaaaagtacgtgatattttagaaacttagtgggaaaagtaggatggtatttttatgtaaagccttgacccaatgtttaaaaatataattgtatttagatcttgttattgctccagtacataggaattgtgtaaagtgttaacagcagctgtatttgtttaaattgtgtgtattgaagattaggaaaaagatagtagttatttttcctaaatgaaataactttcttctcttccccttccccacccgaattcttttctgaagttgctggcatttgggtcaaggttttattaaaagctacattttataacactggcacacacaaaaaagtagttttaagcttgtttgcacagttctttttttccattggaaatggaattcattgccttaggtctttttaaatagtgtattattatcgttggggctggctctatgcttgaaaaccagtttatttataacctgttataagtgctatattctgtttgcagttaggaaatgcagaattcaaagtgatctcctagcttgtaagcaaactgagatgcactatcccttttctataaaaaataagttaatgtgtcaagaaaccaactctattaaggtggggtttaatattaccctttcctatgtgttttatctaattattttggttgttaatatggtgataatggaaagtcaagttaaattttaaatattaagaattctgatttattgagattgaattatgccaccacgtttatgtaaaaatgaaggtggcaccgtggtgagacctaatgagaaatagttactcagttgtaaaaattttgatttattctctttcttctgacctccttgcctcttgtcttgaaccatagcaaaaggatactgcatctctcattactgtagtgctgaggttattgaagttatacaaaacacatctcagtctctgtttcttggaaaggtatctattacatcctgctagctgactgacaaaactaagcagggagaataaagataattgtattttatgttttgcacacaaacgcagaatttgtataaccatatgacttcatagttgtgatctcaaaaaagaaggaatttctcctttgtttcttgcagttaatgtaagaatactttaaatctctaagcttctgaagtgttagaggtagagatggtctagtaaagatgtagtagtaatgttttatccatttagcatgtgtttattttttcatatgtactcaaaggtgacttattggttcacctcagtgatattacagctaaaaaaatcattcattagcaaaaggaaaagtggtctcaacctaacatcagaagtgtttcttattattattttatattgagttgaatattgaactctaacagttttctacatacaaaacacagtgtcatgaaggttattcataattgcattatagaggaatgtagtatgtcataagtactttgtaaagatttgacattcaactgtagtatccatatgttgcttaaatttccttatgagccccatgatggaaagacttaaagatgaatttgagaaaaattgaaagaaattagattatcaggttctgttaaattgttacatgtatcttgcttaaatttctgtttattaatttatatccacccaagtacataaagcaaatttggaggaaacaactgaagttgtgcaatattttctgataattgctttttttattcttgtgttttctacttaaacataatgtctgtgtcatcaagtattatagtcagacttttctttttttctagattgttaaaattggcaaatgaacttttttaaaaatcatcttccatgttgcagttagtctttcttttcattacaagtctttcacagaagtttggtggtaatattgaaagaactagcattgggcagaatgtgtcttttttaggcactttatattctcaacatacaatgttaagaaccatcaattttgacttttactaagttgttaaataaagttataatacagctgtgaagggctaaagttagagttgattacataagtaagtattccccatataatcttttaaaaagttgtgtatgattattttaaaatctctctctctat

SEQ ID NO: 6268 - protein, 154 aa, Homo sapiens; identical to SEQ ID NO: 202

SEQ ID NO: 6269 - DNA, 2591 bp, Homo sapiens
gtcggcgggggcagcagcagctgaggcagcagctgaggcagccgcgacggccgcgcccccccccgctgacctggattaggcccagcagctcccgctgcctcgcaggaggcgaacgccgcgaccccagcggagcccgcggcccagccttgatcccccaaccccgggggctggcatgagcggcccctcggcggcaccgtggggcggtggagtcgcctccgcctgatccccggcctgtcgcccgaccccacctcgccaaccgaggcggaccgcggagtgtgcgaacgaccccaccgctgctttctcctcccccagatcacgcaccccagctccggaagatggggaactgcctcaaatcccccacctcggatgacatctccctgcttcacgagtctcagtccgaccgggctagctttggcgaggggacggagccggatcaggagccgccgccgccatatcaggaacaagttccagttccagtctaccacccaacacctagccagactcggctagcaactcagctgactgaagaggaacaaattaggatagctcaaagaataggtcttatacaacatctgcctaaaggagtttatgaccctggaagagatggatcagaaaaaaagatccgggagtgtgtgatctgtatgatggactttgtttatggggacccaattcgatttctgccgtgcatgcacatctatcacctggactgtatagatgactggttgatgagatccttcacgtgcccctcctgcatggagccagttgatgcagcactgctttcatcctatgagactaattgagccagggtctcttatctgacttcaagtgaaccaccattttggtggttttgatcttttgtcactgagcccaaagagccagggattaggaattaagatcgtgcacaaaagtttccttaaaattcctggatggctgcagatgttgggggaaaaagtacgtgatattttagaaacttagtgggaaaagtaggatggtatttttatgtaaagccttgacccaatgtttaaaaatataattgtatttagatcttgttattgctccagtacataggaattgtgtaaagtgttaacagcagctgtatttgtttaaattgtgtgtattgaagattaggaaaaagatagtagttatttttcctaaatgaaataactttcttctcttccccttccccacccgaattcttttctgaagttgctggcatttgggtcaaggttttattaaaagctacattttataacactggcacacacaaaaaagtagttttaagcttgtttgcacagttctttttttccattggaaatggaattcattgccttaggtctttttaaatagtgtattattatcgttggggctggctctatgcttgaaaaccagtttatttataacctgttataagtgctatattctgtttgcagttaggaaatgcagaattcaaagtgatctcctagcttgtaagcaaactgagatgcactatcccttttctataaaaaataagttaatgtgtcaagaaaccaactctattaaggtggggtttaatattaccctttcctatgtgttttatctaattattttggttgttaatatggtgataatggaaagtcaagttaaattttaaatattaagaattctgatttattgagattgaattatgccaccacgtttatgtaaaaatgaaggtggcaccgtggtgagacctaatgagaaatagttactcagttgtaaaaattttgatttattctctttcttctgacctccttgcctcttgtcttgaaccatagcaaaaggatactgcatctctcattactgtagtgctgaggttattgaagttatacaaaacacatctcagtctctgtttcttggaaaggtatctattacatcctgctagctgactgacaaaactaagcagggagaataaagataattgtattttatgttttgcacacaaacgcagaatttgtataaccatatgacttcatagttgtgatctcaaaaaagaaggaatttctcctttgtttcttgcagttaatgtaagaatactttaaatctctaagcttctgaagtgttagaggtagagatggtctagtaaagatgtagtagtaatgttttatccatttagcatgtgtttattttttcatatgtactcaaaggtgacttattggttcacctcagtgatattacagctaaaaaaatcattcattagcaaaaggaaaagtggtctcaacctaacatcagaagtgtttcttattattattttatattgagttgaatattgaactctaacagttttctacatacaaaacacagtgtcatgaaggttattcataattgcattatagaggaatgtagtatgtcataagtactttgtaaagatttgacattcaactgtagtatccatatgttgcttaaatttccttatgagccccatgatggaaagacttaaagatgaatttgagaaaaattgaaagaaattagattatcaggttctgttaaattgttacatgtatcttgcttaaatttctgtttattaatttatatccacccaagtacataaagcaaatttggaggaaacaactgaa

SEQ ID NO: 6270 - protein, 154 aa, Homo sapiens; identical to SEQ ID NO: 202

SEQ ID NO: 6271 - DNA, 2733 bp, Homo sapiens
gtcggcgggggcagcagcagctgaggcagcagctgaggcagccgcgacggccgcgcccccccccgctgacctggattaggcccagcagctcccgctgcctcgcaggaggcgaacgccgcgaccccagcggagcccgcggcccagccttgatcccccaaccccgggggctggcatgagcggcccctcggcggcaccgtggggcggtggagtcgcctccgcctgatccccggcctgtcgcccgaccccacctcgccaaccgaggcggaccgcggagtgtgcgaacgaccccaccgctgctttctcctcccccagatcacgcaccccagctccggaagatggggaactgcctcaaatcccccacctcggatgacatctccctgcttcacgagtctcagtccgaccgggctagctttggcgaggggacggagccggatcaggagccgccgccgccatatcaggaacaagttccagttccagtctaccacccaacacctagccagactcggctagcaactcagctgactgaagaggaacaaattaggatagctcaaagaataggtcttatacaacatctgcctaaaggagtttatgaccctggaagagatggatcagaaaaaaagatccgggagtgtgtgatctgtatgatggactttgtttatggggacccaattcgatttctgccgtgcatgcacatctatcacctggactgtatagatgactggttgatgagatccttcacgtgcccctcctgcatggagccagttgatgcagcactgctttcatcctatgagactaattgagccagggtctcttatctgacttcaagtgaaccaccattttggtggttttgatcttttgtcactgagcccaaagagccagggattaggaattaagatcgtgcacaaaagtttccttaaaattcctggatggctgcagatgttgggggaaaaagtacgtgatattttagaaacttagtgggaaaagtaggatggtatttttatgtaaagccttgacccaatgtttaaaaatataattgtatttagatcttgttattgctccagtacataggaattgtgtaaagtgttaacagcagctgtatttgtttaaattgtgtgtattgaagattaggaaaaagatagtagttatttttcctaaatgaaataactttcttctcttccccttccccacccgaattcttttctgaagttgctggcatttgggtcaaggttttattaaaagctacattttataacactggcacacacaaaaaagtagttttaagcttgtttgcacagttctttttttccattggaaatggaattcattgccttaggtctttttaaatagtgtattattatcgttggggctggctctatgcttgaaaaccagtttatttataacctgttataagtgctatattctgtttgcagttaggaaatgcagaattcaaagtgatctcctagcttgtaagcaaactgagatgcactatcccttttctataaaaaataagttaatgtgtcaagaaaccaactctattaaggtggggtttaatattaccctttcctatgtgttttatctaattattttggttgttaatatggtgataatggaaagtcaagttaaattttaaatattaagaattctgatttattgagattgaattatgccaccacgtttatgtaaaaatgaaggtggcaccgtggtgagacctaatgagaaatagttactcagttgtaaaaattttgatttattctctttcttctgacctccttgcctcttgtcttgaaccatagcaaaaggatactgcatctctcattactgtagtgctgaggttattgaagttatacaaaacacatctcagtctctgtttcttggaaaggtatctattacatcctgctagctgactgacaaaactaagcagggagaataaagataattgtattttatgttttgcacacaaacgcagaatttgtataaccatatgacttcatagttgtgatctcaaaaaagaaggaatttctcctttgtttcttgcagttaatgtaagaatactttaaatctctaagcttctgaagtgttagaggtagagatggtctagtaaagatgtagtagtaatgttttatccatttagcatgtgtttattttttcatatgtactcaaaggtgacttattggttcacctcagtgatattacagctaaaaaaatcattcattagcaaaaggaaaagtggtctcaacctaacatcagaagtgtttcttattattattttatattgagttgaatattgaactctaacagttttctacatacaaaacacagtgtcatgaaggttattcataattgcattatagaggaatgtagtatgtcataagtactttgtaaagatttgacattcaactgtagtatccatatgttgcttaaatttccttatgagccccatgatggaaagacttaaagatgaatttgagaaaaattgaaagaaattagattatcaggttctgttaaattgttacatgtatcttgcttaaatttctgtttattaatttatatccacccaagtacataaagcaaatttggaggaaacaactgaagttgtgcaatattttctgataattgctttttttattcttgtgttttctacttaaacataatgtctgtgtcatcaagtattatagtcagacttttctttttttctagattgttaaaattggcaaatgaacttttttaaaaatc

SEQ ID NO: 6272 - protein, 154 aa, Homo sapiens; identical to SEQ ID NO: 202

SEQ ID NO: 6273 - DNA, 2929 bp, Homo sapiens
gtcggcgggggcagcagcagctgaggcagcagctgaggcagccgcgacggccgcgcccccccccgctgacctggattaggcccagcagctcccgctgcctcgcaggaggcgaacgccgcgaccccagcggagcccgcggcccagccttgatcccccaaccccgggggctggcatgagcggcccctcggcggcaccgtggggcggtggagtcgcctccgcctgatccccggcctgtcgcccgaccccacctcgccaaccgaggcggaccgcggagtgtgcgaacgaccccaccgctgctttctcctcccccagatcacgcaccccagctccggaagatggggaactgcctcaaatcccccacctcggatgacatctccctgcttcacgagtctcagtccgaccgggctagctttggcgaggggacggagccggatcaggagccgccgccgccatatcaggaacaagttccagttccagtctaccacccaacacctagccagactcggctagcaactcagctgactgaagaggaacaaattaggatagctcaaagaataggtcttatacaacatctgcctaaaggagtttatgaccctggaagagatggatcagaaaaaaagatccgggagtgtgtgatctgtatgatggactttgtttatggggacccaattcgatttctgccgtgcatgcacatctatcacctggactgtatagatgactggttgatgagatccttcacgtgcccctcctgcatggagccagttgatgcagcactgctttcatcctatgagactaattgagccagggtctcttatctgacttcaagtgaaccaccattttggtggttttgatcttttgtcactgagcccaaagagccagggattaggaattaagatcgtgcacaaaagtttccttaaaattcctggatggctgcagatgttgggggaaaaagtacgtgatattttagaaacttagtgggaaaagtaggatggtatttttatgtaaagccttgacccaatgtttaaaaatataattgtatttagatcttgttattgctccagtacataggaattgtgtaaagtgttaacagcagctgtatttgtttaaattgtgtgtattgaagattaggaaaaagatagtagttatttttcctaaatgaaataactttcttctcttccccttccccacccgaattcttttctgaagttgctggcatttgggtcaaggttttattaaaagctacattttataacactggcacacacaaaaaagtagttttaagcttgtttgcacagttctttttttccattggaaatggaattcattgccttaggtctttttaaatagtgtattattatcgttggggctggctctatgcttgaaaaccagtttatttataacctgttataagtgctatattctgtttgcagttaggaaatgcagaattcaaagtgatctcctagcttgtaagcaaactgagatgcactatcccttttctataaaaaataagttaatgtgtcaagaaaccaactctattaaggtggggtttaatattaccctttcctatgtgttttatctaattattttggttgttaatatggtgataatggaaagtcaagttaaattttaaatattaagaattctgatttattgagattgaattatgccaccacgtttatgtaaaaatgaaggtggcaccgtggtgagacctaatgagaaatagttactcagttgtaaaaattttgatttattctctttcttctgacctccttgcctcttgtcttgaaccatagcaaaaggatactgcatctctcattactgtagtgctgaggttattgaagttatacaaaacacatctcagtctctgtttcttggaaaggtatctattacatcctgctagctgactgacaaaactaagcagggagaataaagataattgtattttatgttttgcacacaaacgcagaatttgtataaccatatgacttcatagttgtgatctcaaaaaagaaggaatttctcctttgtttcttgcagttaatgtaagaatactttaaatctctaagcttctgaagtgttagaggtagagatggtctagtaaagatgtagtagtaatgttttatccatttagcatgtgtttattttttcatatgtactcaaaggtgacttattggttcacctcagtgatattacagctaaaaaaatcattcattagcaaaaggaaaagtggtctcaacctaacatcagaagtgtttcttattattattttatattgagttgaatattgaactctaacagttttctacatacaaaacacagtgtcatgaaggttattcataattgcattatagaggaatgtagtatgtcataagtactttgtaaagatttgacattcaactgtagtatccatatgttgcttaaatttccttatgagccccatgatggaaagacttaaagatgaatttgagaaaaattgaaagaaattagattatcaggttctgttaaattgttacatgtatcttgcttaaatttctgtttattaatttatatccacccaagtacataaagcaaatttggaggaaacaactgaagttgtgcaatattttctgataattgctttttttattcttgtgttttctacttaaacataatgtctgtgtcatcaagtattatagtcagacttttctttttttctagattgttaaaattggcaaatgaacttttttaaaaatcatcttccatgttgcagttagtctttcttttcattacaagtctttcacagaagtttggtggtaatattgaaagaactagcattgggcagaatgtgtcttttttaggcactttatattctcaacatacaatgttaagaaccatcaattttgacttttactaagttgttaaataaagttataatacagctgtgaagggc

SEQ ID NO: 6274 - protein, 154 aa, Homo sapiens; identical to SEQ ID NO: 202

SEQ ID NO: 6275 - DNA, 3017 bp, Homo sapiens
gtcggcgggggcagcagcagctgaggcagcagctgaggcagccgcgacggccgcgcccccccccgctgacctggattaggcccagcagctcccgctgcctcgcaggaggcgaacgccgcgaccccagcggagcccgcggcccagccttgatcccccaaccccgggggctggcatgagcggcccctcggcggcaccgtggggcggtggagtcgcctccgcctgatccccggcctgtcgcccgaccccacctcgccaaccgaggcggaccgcggagtgtgcgaacgaccccaccgctgctttctcctcccccagatcacgcaccccagctccggaagatggggaactgcctcaaatcccccacctcggatgacatctccctgcttcacgagtctcagtccgaccgggctagctttggcgaggggacggagccggatcaggagccgccgccgccatatcaggaacaagttccagttccagtctaccacccaacacctagccagactcggctagcaactcagctgactgaagaggaacaaattaggatagctcaaagaataggtcttatacaacatctgcctaaaggagtttatgaccctggaagagatggatcagaaaaaaagatccgggagtgtgtgatctgtatgatggactttgtttatggggacccaattcgatttctgccgtgcatgcacatctatcacctggactgtatagatgactggttgatgagatccttcacgtgcccctcctgcatggagccagttgatgcagcactgctttcatcctatgagactaattgagccagggtctcttatctgacttcaagtgaaccaccattttggtggttttgatcttttgtcactgagcccaaagagccagggattaggaattaagatcgtgcacaaaagtttccttaaaattcctggatggctgcagatgttgggggaaaaagtacgtgatattttagaaacttagtgggaaaagtaggatggtatttttatgtaaagccttgacccaatgtttaaaaatataattgtatttagatcttgttattgctccagtacataggaattgtgtaaagtgttaacagcagctgtatttgtttaaattgtgtgtattgaagattaggaaaaagatagtagttatttttcctaaatgaaataactttcttctcttccccttccccacccgaattcttttctgaagttgctggcatttgggtcaaggttttattaaaagctacattttataacactggcacacacaaaaaagtagttttaagcttgtttgcacagttctttttttccattggaaatggaattcattgccttaggtctttttaaatagtgtattattatcgttggggctggctctatgcttgaaaaccagtttatttataacctgttataagtgctatattctgtttgcagttaggaaatgcagaattcaaagtgatctcctagcttgtaagcaaactgagatgcactatcccttttctataaaaaataagttaatgtgtcaagaaaccaactctattaaggtggggtttaatattaccctttcctatgtgttttatctaattattttggttgttaatatggtgataatggaaagtcaagttaaattttaaatattaagaattctgatttattgagattgaattatgccaccacgtttatgtaaaaatgaaggtggcaccgtggtgagacctaatgagaaatagttactcagttgtaaaaattttgatttattctctttcttctgacctccttgcctcttgtcttgaaccatagcaaaaggatactgcatctctcattactgtagtgctgaggttattgaagttatacaaaacacatctcagtctctgtttcttggaaaggtatctattacatcctgctagctgactgacaaaactaagcagggagaataaagataattgtattttatgttttgcacacaaacgcagaatttgtataaccatatgacttcatagttgtgatctcaaaaaagaaggaatttctcctttgtttcttgcagttaatgtaagaatactttaaatctctaagcttctgaagtgttagaggtagagatggtctagtaaagatgtagtagtaatgttttatccatttagcatgtgtttattttttcatatgtactcaaaggtgacttattggttcacctcagtgatattacagctaaaaaaatcattcattagcaaaaggaaaagtggtctcaacctaacatcagaagtgtttcttattattattttatattgagttgaatattgaactctaacagttttctacatacaaaacacagtgtcatgaaggttattcataattgcattatagaggaatgtagtatgtcataagtactttgtaaagatttgacattcaactgtagtatccatatgttgcttaaatttccttatgagccccatgatggaaagacttaaagatgaatttgagaaaaattgaaagaaattagattatcaggttctgttaaattgttacatgtatcttgcttaaatttctgtttattaatttatatccacccaagtacataaagcaaatttggaggaaacaactgaagttgtgcaatattttctgataattgctttttttattcttgtgttttctacttaaacataatgtctgtgtcatcaagtattatagtcagacttttctttttttctagattgttaaaattggcaaatgaacttttttaaaaatcatcttccatgttgcagttagtctttcttttcattacaagtctttcacagaagtttggtggtaatattgaaagaactagcattgggcagaatgtgtcttttttaggcactttatattctcaacatacaatgttaagaaccatcaattttgacttttactaagttgttaaataaagttataatacagctgtgaagggctaaagttagagttgattacataagtaagtattccccatataatcttttaaaaagttgtgtatgattattttaaaatctctctctctat

SEQ ID NO: 6276 - protein, 154 aa, Homo sapiens; identical to SEQ ID NO: 202

SEQ ID NO: 6277 - DNA, 643 bp, Homo sapiens
gacaacatccatcattttataggtgcttcatttatatattaacaaacaaccggaatgcttcagagatttttcgcatcagatcagaccttgctgtttttgatgtttgaccctatcttctggccgggtgcagtggctcacacctgtatcacacctgtaatcccaacactttgggaggccaaggcaggtggatcacttgaggccaggattcgagaccagcctggccaacatggtgaaaccctgtctctactaaaaataaaaaaattagctgggcgtggtggcgcgtgcctgtactcccagctactcccaggttcaagcaattctcatgtcgcagcctccagagtagctgggataacagagctaaatgactgcatctggcctccaaccctttattaagataggtattttgtctgttatgctgatgaggaaccttaatgctcagagatattaagaagcttgcgtaaggccacatacataattaaataccagagcagaaattccagggaatgcctgtactctttccattatgtatttttgttcattaacctaggtagggggcatagaaattctgagtttgagaggcatgtggaaggaagtatatttggtttggttttggacctattgaagttcctgtgggatgggtagg

SEQ ID NO: 6278 - protein, 112 aa, Homo sapiens
MLQRFFASDQTLLFLMFDPIFWPGAVAHTCITPVIPTLWEAKAGGSLEARIRDQPGQHGETLSLLKIKKLAGRGGACLYSQLLPGSSNSHVAASRVAGITELNDCIWPPTLY

SEQ ID NO: 6279 - DNA, 2171 bp, Homo sapiens
aaaaaataatctttttcctctatattttaatattttaggaacaagttccagttccagtctaccacccaacacctagccagactcggctagcaactcagctgactgaagaggaacaaattaggatagctcaaagaataggtcttatacaacatctgcctaaaggagtttatgaccctggaagagatggatcagaaaaaaagatccgggagtgtgtgatctgtatgatggactttgtttatggggacccaattcgatttctgccgtgcatgcacatctatcacctggactgtatagatgactggttgatgagatccttcacgtgcccctcctgcatggagccagttgatgcagcactgctttcatcctatgagactaattgagccagggtctcttatctgacttcaagtgaaccaccattttggtggttttgatcttttgtcactgagcccaaagagccagggattaggaattaagatcgtgcacaaaagtttccttaaaattcctggatggctgcagatgttgggggaaaaagtacgtgatattttagaaacttagtgggaaaagtaggatggtatttttatgtaaagccttgacccaatgtttaaaaatataattgtatttagatcttgttattgctccagtacataggaattgtgtaaagtgttaacagcagctgtatttgtttaaattgtgtgtattgaagattaggaaaaagatagtagttatttttcctaaatgaaataactttcttctcttccccttccccacccgaattcttttctgaagttgctggcatttgggtcaaggttttattaaaagctacattttataacactggcacacacaaaaaagtagttttaagcttgtttgcacagttctttttttccattggaaatggaattcattgccttaggtctttttaaatagtgtattattatcgttggggctggctctatgcttgaaaaccagtttatttataacctgttataagtgctatattctgtttgcagttaggaaatgcagaattcaaagtgatctcctagcttgtaagcaaactgagatgcactatcccttttctataaaaaataagttaatgtgtcaagaaaccaactctattaaggtggggtttaatattaccctttcctatgtgttttatctaattattttggttgttaatatggtgataatggaaagtcaagttaaattttaaatattaagaattctgatttattgagattgaattatgccaccacgtttatgtaaaaatgaaggtggcaccgtggtgagacctaatgagaaatagttactcagttgtaaaaattttgatttattctctttcttctgacctccttgcctcttgtcttgaaccatagcaaaaggatactgcatctctcattactgtagtgctgaggttattgaagttatacaaaacacatctcagtctctgtttcttggaaaggtatctattacatcctgctagctgactgacaaaactaagcagggagaataaagataattgtattttatgttttgcacacaaacgcagaatttgtataaccatatgacttcatagttgtgatctcaaaaaagaaggaatttctcctttgtttcttgcagttaatgtaagaatactttaaatctctaagcttctgaagtgttagaggtagagatggtctagtaaagatgtagtagtaatgttttatccatttagcatgtgtttattttttcatatgtactcaaaggtgacttattggttcacctcagtgatattacagctaaaaaaatcattcattagcaaaaggaaaagtggtctcaacctaacatcagaagtgtttcttattattattttatattgagttgaatattgaactctaacagttttctacatacaaaacacagtgtcatgaaggttattcataattgcattatagaggaatgtagtatgtcataagtactttgtaaagatttgacattcaactgtagtatccatatgttgcttaaatttccttatgagccccatgatggaaagacttaaagatgaatttgagaaaaattgaaagaaattagattatcaggttctgttaaattgttacatgtatcttgcttaaatttctgtttattaatttatatccacccaagtacataaagcaaatttggaggaaacaactgaa

SEQ ID NO: 6280 - protein, 53 aa, Homo sapiens
MFYPFSMCLFFHMYSKVTYWFTSVILQLKKSFISKRKSGLNLTSEVFLIIILY

SEQ ID NO: 6281 - DNA, 2313 bp, Homo sapiens
aaaaaataatctttttcctctatattttaatattttaggaacaagttccagttccagtctaccacccaacacctagccagactcggctagcaactcagctgactgaagaggaacaaattaggatagctcaaagaataggtcttatacaacatctgcctaaaggagtttatgaccctggaagagatggatcagaaaaaaagatccgggagtgtgtgatctgtatgatggactttgtttatggggacccaattcgatttctgccgtgcatgcacatctatcacctggactgtatagatgactggttgatgagatccttcacgtgcccctcctgcatggagccagttgatgcagcactgctttcatcctatgagactaattgagccagggtctcttatctgacttcaagtgaaccaccattttggtggttttgatcttttgtcactgagcccaaagagccagggattaggaattaagatcgtgcacaaaagtttccttaaaattcctggatggctgcagatgttgggggaaaaagtacgtgatattttagaaacttagtgggaaaagtaggatggtatttttatgtaaagccttgacccaatgtttaaaaatataattgtatttagatcttgttattgctccagtacataggaattgtgtaaagtgttaacagcagctgtatttgtttaaattgtgtgtattgaagattaggaaaaagatagtagttatttttcctaaatgaaataactttcttctcttccccttccccacccgaattcttttctgaagttgctggcatttgggtcaaggttttattaaaagctacattttataacactggcacacacaaaaaagtagttttaagcttgtttgcacagttctttttttccattggaaatggaattcattgccttaggtctttttaaatagtgtattattatcgttggggctggctctatgcttgaaaaccagtttatttataacctgttataagtgctatattctgtttgcagttaggaaatgcagaattcaaagtgatctcctagcttgtaagcaaactgagatgcactatcccttttctataaaaaataagttaatgtgtcaagaaaccaactctattaaggtggggtttaatattaccctttcctatgtgttttatctaattattttggttgttaatatggtgataatggaaagtcaagttaaattttaaatattaagaattctgatttattgagattgaattatgccaccacgtttatgtaaaaatgaaggtggcaccgtggtgagacctaatgagaaatagttactcagttgtaaaaattttgatttattctctttcttctgacctccttgcctcttgtcttgaaccatagcaaaaggatactgcatctctcattactgtagtgctgaggttattgaagttatacaaaacacatctcagtctctgtttcttggaaaggtatctattacatcctgctagctgactgacaaaactaagcagggagaataaagataattgtattttatgttttgcacacaaacgcagaatttgtataaccatatgacttcatagttgtgatctcaaaaaagaaggaatttctcctttgtttcttgcagttaatgtaagaatactttaaatctctaagcttctgaagtgttagaggtagagatggtctagtaaagatgtagtagtaatgttttatccatttagcatgtgtttattttttcatatgtactcaaaggtgacttattggttcacctcagtgatattacagctaaaaaaatcattcattagcaaaaggaaaagtggtctcaacctaacatcagaagtgtttcttattattattttatattgagttgaatattgaactctaacagttttctacatacaaaacacagtgtcatgaaggttattcataattgcattatagaggaatgtagtatgtcataagtactttgtaaagatttgacattcaactgtagtatccatatgttgcttaaatttccttatgagccccatgatggaaagacttaaagatgaatttgagaaaaattgaaagaaattagattatcaggttctgttaaattgttacatgtatcttgcttaaatttctgtttattaatttatatccacccaagtacataaagcaaatttggaggaaacaactgaagttgtgcaatattttctgataattgctttttttattcttgtgttttctacttaaacataatgtctgtgtcatcaagtattatagtcagacttttctttttttctagattgttaaaattggcaaatgaacttttttaaaaatc

SEQ ID NO: 6282 - protein, 53 aa, Homo sapiens; identical to SEQ ID NO: 6280

SEQ ID NO: 6283 - DNA, 2509 bp, Homo sapiens
aaaaaataatctttttcctctatattttaatattttaggaacaagttccagttccagtctaccacccaacacctagccagactcggctagcaactcagctgactgaagaggaacaaattaggatagctcaaagaataggtcttatacaacatctgcctaaaggagtttatgaccctggaagagatggatcagaaaaaaagatccgggagtgtgtgatctgtatgatggactttgtttatggggacccaattcgatttctgccgtgcatgcacatctatcacctggactgtatagatgactggttgatgagatccttcacgtgcccctcctgcatggagccagttgatgcagcactgctttcatcctatgagactaattgagccagggtctcttatctgacttcaagtgaaccaccattttggtggttttgatcttttgtcactgagcccaaagagccagggattaggaattaagatcgtgcacaaaagtttccttaaaattcctggatggctgcagatgttgggggaaaaagtacgtgatattttagaaacttagtgggaaaagtaggatggtatttttatgtaaagccttgacccaatgtttaaaaatataattgtatttagatcttgttattgctccagtacataggaattgtgtaaagtgttaacagcagctgtatttgtttaaattgtgtgtattgaagattaggaaaaagatagtagttatttttcctaaatgaaataactttcttctcttccccttccccacccgaattcttttctgaagttgctggcatttgggtcaaggttttattaaaagctacattttataacactggcacacacaaaaaagtagttttaagcttgtttgcacagttctttttttccattggaaatggaattcattgccttaggtctttttaaatagtgtattattatcgttggggctggctctatgcttgaaaaccagtttatttataacctgttataagtgctatattctgtttgcagttaggaaatgcagaattcaaagtgatctcctagcttgtaagcaaactgagatgcactatcccttttctataaaaaataagttaatgtgtcaagaaaccaactctattaaggtggggtttaatattaccctttcctatgtgttttatctaattattttggttgttaatatggtgataatggaaagtcaagttaaattttaaatattaagaattctgatttattgagattgaattatgccaccacgtttatgtaaaaatgaaggtggcaccgtggtgagacctaatgagaaatagttactcagttgtaaaaattttgatttattctctttcttctgacctccttgcctcttgtcttgaaccatagcaaaaggatactgcatctctcattactgtagtgctgaggttattgaagttatacaaaacacatctcagtctctgtttcttggaaaggtatctattacatcctgctagctgactgacaaaactaagcagggagaataaagataattgtattttatgttttgcacacaaacgcagaatttgtataaccatatgacttcatagttgtgatctcaaaaaagaaggaatttctcctttgtttcttgcagttaatgtaagaatactttaaatctctaagcttctgaagtgttagaggtagagatggtctagtaaagatgtagtagtaatgttttatccatttagcatgtgtttattttttcatatgtactcaaaggtgacttattggttcacctcagtgatattacagctaaaaaaatcattcattagcaaaaggaaaagtggtctcaacctaacatcagaagtgtttcttattattattttatattgagttgaatattgaactctaacagttttctacatacaaaacacagtgtcatgaaggttattcataattgcattatagaggaatgtagtatgtcataagtactttgtaaagatttgacattcaactgtagtatccatatgttgcttaaatttccttatgagccccatgatggaaagacttaaagatgaatttgagaaaaattgaaagaaattagattatcaggttctgttaaattgttacatgtatcttgcttaaatttctgtttattaatttatatccacccaagtacataaagcaaatttggaggaaacaactgaagttgtgcaatattttctgataattgctttttttattcttgtgttttctacttaaacataatgtctgtgtcatcaagtattatagtcagacttttctttttttctagattgttaaaattggcaaatgaacttttttaaaaatcatcttccatgttgcagttagtctttcttttcattacaagtctttcacagaagtttggtggtaatattgaaagaactagcattgggcagaatgtgtcttttttaggcactttatattctcaacatacaatgttaagaaccatcaattttgacttttactaagttgttaaataaagttataatacagctgtgaagggc

SEQ ID NO: 6284 - protein, 53 aa, Homo sapiens; identical to SEQ ID NO: 6280

SEQ ID NO: 6285 - DNA, 2597 bp, Homo sapiens
aaaaaataatctttttcctctatattttaatattttaggaacaagttccagttccagtctaccacccaacacctagccagactcggctagcaactcagctgactgaagaggaacaaattaggatagctcaaagaataggtcttatacaacatctgcctaaaggagtttatgaccctggaagagatggatcagaaaaaaagatccgggagtgtgtgatctgtatgatggactttgtttatggggacccaattcgatttctgccgtgcatgcacatctatcacctggactgtatagatgactggttgatgagatccttcacgtgcccctcctgcatggagccagttgatgcagcactgctttcatcctatgagactaattgagccagggtctcttatctgacttcaagtgaaccaccattttggtggttttgatcttttgtcactgagcccaaagagccagggattaggaattaagatcgtgcacaaaagtttccttaaaattcctggatggctgcagatgttgggggaaaaagtacgtgatattttagaaacttagtgggaaaagtaggatggtatttttatgtaaagccttgacccaatgtttaaaaatataattgtatttagatcttgttattgctccagtacataggaattgtgtaaagtgttaacagcagctgtatttgtttaaattgtgtgtattgaagattaggaaaaagatagtagttatttttcctaaatgaaataactttcttctcttccccttccccacccgaattcttttctgaagttgctggcatttgggtcaaggttttattaaaagctacattttataacactggcacacacaaaaaagtagttttaagcttgtttgcacagttctttttttccattggaaatggaattcattgccttaggtctttttaaatagtgtattattatcgttggggctggctctatgcttgaaaaccagtttatttataacctgttataagtgctatattctgtttgcagttaggaaatgcagaattcaaagtgatctcctagcttgtaagcaaactgagatgcactatcccttttctataaaaaataagttaatgtgtcaagaaaccaactctattaaggtggggtttaatattaccctttcctatgtgttttatctaattattttggttgttaatatggtgataatggaaagtcaagttaaattttaaatattaagaattctgatttattgagattgaattatgccaccacgtttatgtaaaaatgaaggtggcaccgtggtgagacctaatgagaaatagttactcagttgtaaaaattttgatttattctctttcttctgacctccttgcctcttgtcttgaaccatagcaaaaggatactgcatctctcattactgtagtgctgaggttattgaagttatacaaaacacatctcagtctctgtttcttggaaaggtatctattacatcctgctagctgactgacaaaactaagcagggagaataaagataattgtattttatgttttgcacacaaacgcagaatttgtataaccatatgacttcatagttgtgatctcaaaaaagaaggaatttctcctttgtttcttgcagttaatgtaagaatactttaaatctctaagcttctgaagtgttagaggtagagatggtctagtaaagatgtagtagtaatgttttatccatttagcatgtgtttattttttcatatgtactcaaaggtgacttattggttcacctcagtgatattacagctaaaaaaatcattcattagcaaaaggaaaagtggtctcaacctaacatcagaagtgtttcttattattattttatattgagttgaatattgaactctaacagttttctacatacaaaacacagtgtcatgaaggttattcataattgcattatagaggaatgtagtatgtcataagtactttgtaaagatttgacattcaactgtagtatccatatgttgcttaaatttccttatgagccccatgatggaaagacttaaagatgaatttgagaaaaattgaaagaaattagattatcaggttctgttaaattgttacatgtatcttgcttaaatttctgtttattaatttatatccacccaagtacataaagcaaatttggaggaaacaactgaagttgtgcaatattttctgataattgctttttttattcttgtgttttctacttaaacataatgtctgtgtcatcaagtattatagtcagacttttctttttttctagattgttaaaattggcaaatgaacttttttaaaaatcatcttccatgttgcagttagtctttcttttcattacaagtctttcacagaagtttggtggtaatattgaaagaactagcattgggcagaatgtgtcttttttaggcactttatattctcaacatacaatgttaagaaccatcaattttgacttttactaagttgttaaataaagttataatacagctgtgaagggctaaagttagagttgattacataagtaagtattccccatataatcttttaaaaagttgtgtatgattattttaaaatctctctctctat

SEQ ID NO: 6286 - protein, 53 aa, Homo sapiens; identical to SEQ ID NO: 6280

SEQ ID NO: 6287 - DNA, 1715 bp, Homo sapiens
agccaggattaggaattaagatcgtgcacaaaagtttccttaaaattcctggatggctgcagatgttgggggaaaaagtacgtgatattttagaaacttagtgggaaaagtaggatggtatttttatgtaaagccttgacccaatgtttaaaaatataattgtatttagatcttgttattgctccagtacataggaattgtgtaaagtgttaacagcagctgtatttgtttaaattgtgtgtattgaagattaggaaaaagatagtagttatttttcctaaatgaaataactttcttctcttccccttccccacccgaattcttttctgaagttgctggcatttgggtcaaggttttattaaaagctacattttataacactggcacacacaaaaaagtagttttaagcttgtttgcacagttctttttttccattggaaatggaattcattgccttaggtctttttaaatagtgtattattatcgttggggctggctctatgcttgaaaaccagtttatttataacctgttataagtgctatattctgtttgcagttaggaaatgcagaattcaaagtgatctcctagcttgtaagcaaactgagatgcactatcccttttctataaaaaataagttaatgtgtcaagaaaccaactctattaaggtggggtttaatattaccctttcctatgtgttttatctaattattttggttgttaatatggtgataatggaaagtcaagttaaattttaaatattaagaattctgatttattgagattgaattatgccaccacgtttatgtaaaaatgaaggtggcaccgtggtgagacctaatgagaaatagttactcagttgtaaaaattttgatttattctctttcttctgacctccttgcctcttgtcttgaaccatagcaaaaggatactgcatctctcattactgtagtgctgaggttattgaagttatacaaaacacatctcagtctctgtttcttggaaaggtatctattacatcctgctagctgactgacaaaactaagcagggagaataaagataattgtattttatgttttgcacacaaacgcagaatttgtataaccatatgacttcatagttgtgatctcaaaaaagaaggaatttctcctttgtttcttgcagttaatgtaagaatactttaaatctctaagcttctgaagtgttagaggtagagatggtctagtaaagatgtagtagtaatgttttatccatttagcatgtgtttattttttcatatgtactcaaaggtgacttattggttcacctcagtgatattacagctaaaaaaatcattcattagcaaaaggaaaagtggtctcaacctaacatcagaagtgtttcttattattattttatattgagttgaatattgaactctaacagttttctacatacaaaacacagtgtcatgaaggttattcataattgcattatagaggaatgtagtatgtcataagtactttgtaaagatttgacattcaactgtagtatccatatgttgcttaaatttccttatgagccccatgatggaaagacttaaagatgaatttgagaaaaattgaaagaaattagattatcaggttctgttaaattgttacatgtatcttgcttaaatttctgtttattaatttatatccacccaagtacataaagcaaatttggaggaaacaactg

SEQ ID NO: 6288 - protein, 53 aa, Homo sapiens; identical to SEQ ID NO: 6280

SEQ ID NO: 6289 - DNA, 1789 bp, Homo sapiens
agccaggtctcttatctgacttcaagtgaaccaccattttggtggttttgatcttttgtcactgagcccaaagagccagggattaggaattaagatcgtgcacaaaagtttccttaaaattcctggatggctgcagatgttgggggaaaaagtacgtgatattttagaaacttagtgggaaaagtaggatggtatttttatgtaaagccttgacccaatgtttaaaaatataattgtatttagatcttgttattgctccagtacataggaattgtgtaaagtgttaacagcagctgtatttgtttaaattgtgtgtattgaagattaggaaaaagatagtagttatttttcctaaatgaaataactttcttctcttccccttccccacccgaattcttttctgaagttgctggcatttgggtcaaggttttattaaaagctacattttataacactggcacacacaaaaaagtagttttaagcttgtttgcacagttctttttttccattggaaatggaattcattgccttaggtctttttaaatagtgtattattatcgttggggctggctctatgcttgaaaaccagtttatttataacctgttataagtgctatattctgtttgcagttaggaaatgcagaattcaaagtgatctcctagcttgtaagcaaactgagatgcactatcccttttctataaaaaataagttaatgtgtcaagaaaccaactctattaaggtggggtttaatattaccctttcctatgtgttttatctaattattttggttgttaatatggtgataatggaaagtcaagttaaattttaaatattaagaattctgatttattgagattgaattatgccaccacgtttatgtaaaaatgaaggtggcaccgtggtgagacctaatgagaaatagttactcagttgtaaaaattttgatttattctctttcttctgacctccttgcctcttgtcttgaaccatagcaaaaggatactgcatctctcattactgtagtgctgaggttattgaagttatacaaaacacatctcagtctctgtttcttggaaaggtatctattacatcctgctagctgactgacaaaactaagcagggagaataaagataattgtattttatgttttgcacacaaacgcagaatttgtataaccatatgacttcatagttgtgatctcaaaaaagaaggaatttctcctttgtttcttgcagttaatgtaagaatactttaaatctctaagcttctgaagtgttagaggtagagatggtctagtaaagatgtagtagtaatgttttatccatttagcatgtgtttattttttcatatgtactcaaaggtgacttattggttcacctcagtgatattacagctaaaaaaatcattcattagcaaaaggaaaagtggtctcaacctaacatcagaagtgtttcttattattattttatattgagttgaatattgaactctaacagttttctacatacaaaacacagtgtcatgaaggttattcataattgcattatagaggaatgtagtatgtcataagtactttgtaaagatttgacattcaactgtagtatccatatgttgcttaaatttccttatgagccccatgatggaaagacttaaagatgaatttgagaaaaattgaaagaaattagattatcaggttctgttaaattgttacatgtatcttgcttaaatttctgtttattaatttatatccacccaagtacataaagcaaatttggaggaaacaactg

SEQ ID NO: 6290 - protein, 53 aa, Homo sapiens; identical to SEQ ID NO: 6280

SEQ ID NO: 6291 - DNA, 1859 bp, Homo sapiens
agccaggattaggaattaagatcgtgcacaaaagtttccttaaaattcctggatggctgcagatgttgggggaaaaagtacgtgatattttagaaacttagtgggaaaagtaggatggtatttttatgtaaagccttgacccaatgtttaaaaatataattgtatttagatcttgttattgctccagtacataggaattgtgtaaagtgttaacagcagctgtatttgtttaaattgtgtgtattgaagattaggaaaaagatagtagttatttttcctaaatgaaataactttcttctcttccccttccccacccgaattcttttctgaagttgctggcatttgggtcaaggttttattaaaagctacattttataacactggcacacacaaaaaagtagttttaagcttgtttgcacagttctttttttccattggaaatggaattcattgccttaggtctttttaaatagtgtattattatcgttggggctggctctatgcttgaaaaccagtttatttataacctgttataagtgctatattctgtttgcagttaggaaatgcagaattcaaagtgatctcctagcttgtaagcaaactgagatgcactatcccttttctataaaaaataagttaatgtgtcaagaaaccaactctattaaggtggggtttaatattaccctttcctatgtgttttatctaattattttggttgttaatatggtgataatggaaagtcaagttaaattttaaatattaagaattctgatttattgagattgaattatgccaccacgtttatgtaaaaatgaaggtggcaccgtggtgagacctaatgagaaatagttactcagttgtaaaaattttgatttattctctttcttctgacctccttgcctcttgtcttgaaccatagcaaaaggatactgcatctctcattactgtagtgctgaggttattgaagttatacaaaacacatctcagtctctgtttcttggaaaggtatctattacatcctgctagctgactgacaaaactaagcagggagaataaagataattgtattttatgttttgcacacaaacgcagaatttgtataaccatatgacttcatagttgtgatctcaaaaaagaaggaatttctcctttgtttcttgcagttaatgtaagaatactttaaatctctaagcttctgaagtgttagaggtagagatggtctagtaaagatgtagtagtaatgttttatccatttagcatgtgtttattttttcatatgtactcaaaggtgacttattggttcacctcagtgatattacagctaaaaaaatcattcattagcaaaaggaaaagtggtctcaacctaacatcagaagtgtttcttattattattttatattgagttgaatattgaactctaacagttttctacatacaaaacacagtgtcatgaaggttattcataattgcattatagaggaatgtagtatgtcataagtactttgtaaagatttgacattcaactgtagtatccatatgttgcttaaatttccttatgagccccatgatggaaagacttaaagatgaatttgagaaaaattgaaagaaattagattatcaggttctgttaaattgttacatgtatcttgcttaaatttctgtttattaatttatatccacccaagtacataaagcaaatttggaggaaacaactgaagttgtgcaatattttctgataattgctttttttattcttgtgttttctacttaaacataatgtctgtgtcatcaagtattatagtcagacttttctttttttctagattgttaaaattggcaaatgaacttttttaaaaatc

SEQ ID NO: 6292 - protein, 53 aa, Homo sapiens; identical to SEQ ID NO: 6280

SEQ ID NO: 6293 - DNA, 1933 bp, Homo sapiens
agccaggtctcttatctgacttcaagtgaaccaccattttggtggttttgatcttttgtcactgagcccaaagagccagggattaggaattaagatcgtgcacaaaagtttccttaaaattcctggatggctgcagatgttgggggaaaaagtacgtgatattttagaaacttagtgggaaaagtaggatggtatttttatgtaaagccttgacccaatgtttaaaaatataattgtatttagatcttgttattgctccagtacataggaattgtgtaaagtgttaacagcagctgtatttgtttaaattgtgtgtattgaagattaggaaaaagatagtagttatttttcctaaatgaaataactttcttctcttccccttccccacccgaattcttttctgaagttgctggcatttgggtcaaggttttattaaaagctacattttataacactggcacacacaaaaaagtagttttaagcttgtttgcacagttctttttttccattggaaatggaattcattgccttaggtctttttaaatagtgtattattatcgttggggctggctctatgcttgaaaaccagtttatttataacctgttataagtgctatattctgtttgcagttaggaaatgcagaattcaaagtgatctcctagcttgtaagcaaactgagatgcactatcccttttctataaaaaataagttaatgtgtcaagaaaccaactctattaaggtggggtttaatattaccctttcctatgtgttttatctaattattttggttgttaatatggtgataatggaaagtcaagttaaattttaaatattaagaattctgatttattgagattgaattatgccaccacgtttatgtaaaaatgaaggtggcaccgtggtgagacctaatgagaaatagttactcagttgtaaaaattttgatttattctctttcttctgacctccttgcctcttgtcttgaaccatagcaaaaggatactgcatctctcattactgtagtgctgaggttattgaagttatacaaaacacatctcagtctctgtttcttggaaaggtatctattacatcctgctagctgactgacaaaactaagcagggagaataaagataattgtattttatgttttgcacacaaacgcagaatttgtataaccatatgacttcatagttgtgatctcaaaaaagaaggaatttctcctttgtttcttgcagttaatgtaagaatactttaaatctctaagcttctgaagtgttagaggtagagatggtctagtaaagatgtagtagtaatgttttatccatttagcatgtgtttattttttcatatgtactcaaaggtgacttattggttcacctcagtgatattacagctaaaaaaatcattcattagcaaaaggaaaagtggtctcaacctaacatcagaagtgtttcttattattattttatattgagttgaatattgaactctaacagttttctacatacaaaacacagtgtcatgaaggttattcataattgcattatagaggaatgtagtatgtcataagtactttgtaaagatttgacattcaactgtagtatccatatgttgcttaaatttccttatgagccccatgatggaaagacttaaagatgaatttgagaaaaattgaaagaaattagattatcaggttctgttaaattgttacatgtatcttgcttaaatttctgtttattaatttatatccacccaagtacataaagcaaatttggaggaaacaactgaagttgtgcaatattttctgataattgctttttttattcttgtgttttctacttaaacataatgtctgtgtcatcaagtattatagtcagacttttctttttttctagattgttaaaattggcaaatgaacttttttaaaaatc

SEQ ID NO: 6294 - protein, 53 aa, Homo sapiens; identical to SEQ ID NO: 6280

SEQ ID NO: 6295 - DNA, 2055 bp, Homo sapiens
agccaggattaggaattaagatcgtgcacaaaagtttccttaaaattcctggatggctgcagatgttgggggaaaaagtacgtgatattttagaaacttagtgggaaaagtaggatggtatttttatgtaaagccttgacccaatgtttaaaaatataattgtatttagatcttgttattgctccagtacataggaattgtgtaaagtgttaacagcagctgtatttgtttaaattgtgtgtattgaagattaggaaaaagatagtagttatttttcctaaatgaaataactttcttctcttccccttccccacccgaattcttttctgaagttgctggcatttgggtcaaggttttattaaaagctacattttataacactggcacacacaaaaaagtagttttaagcttgtttgcacagttctttttttccattggaaatggaattcattgccttaggtctttttaaatagtgtattattatcgttggggctggctctatgcttgaaaaccagtttatttataacctgttataagtgctatattctgtttgcagttaggaaatgcagaattcaaagtgatctcctagcttgtaagcaaactgagatgcactatcccttttctataaaaaataagttaatgtgtcaagaaaccaactctattaaggtggggtttaatattaccctttcctatgtgttttatctaattattttggttgttaatatggtgataatggaaagtcaagttaaattttaaatattaagaattctgatttattgagattgaattatgccaccacgtttatgtaaaaatgaaggtggcaccgtggtgagacctaatgagaaatagttactcagttgtaaaaattttgatttattctctttcttctgacctccttgcctcttgtcttgaaccatagcaaaaggatactgcatctctcattactgtagtgctgaggttattgaagttatacaaaacacatctcagtctctgtttcttggaaaggtatctattacatcctgctagctgactgacaaaactaagcagggagaataaagataattgtattttatgttttgcacacaaacgcagaatttgtataaccatatgacttcatagttgtgatctcaaaaaagaaggaatttctcctttgtttcttgcagttaatgtaagaatactttaaatctctaagcttctgaagtgttagaggtagagatggtctagtaaagatgtagtagtaatgttttatccatttagcatgtgtttattttttcatatgtactcaaaggtgacttattggttcacctcagtgatattacagctaaaaaaatcattcattagcaaaaggaaaagtggtctcaacctaacatcagaagtgtttcttattattattttatattgagttgaatattgaactctaacagttttctacatacaaaacacagtgtcatgaaggttattcataattgcattatagaggaatgtagtatgtcataagtactttgtaaagatttgacattcaactgtagtatccatatgttgcttaaatttccttatgagccccatgatggaaagacttaaagatgaatttgagaaaaattgaaagaaattagattatcaggttctgttaaattgttacatgtatcttgcttaaatttctgtttattaatttatatccacccaagtacataaagcaaatttggaggaaacaactgaagttgtgcaatattttctgataattgctttttttattcttgtgttttctacttaaacataatgtctgtgtcatcaagtattatagtcagacttttctttttttctagattgttaaaattggcaaatgaacttttttaaaaatcatcttccatgttgcagttagtctttcttttcattacaagtctttcacagaagtttggtggtaatattgaaagaactagcattgggcagaatgtgtcttttttaggcactttatattctcaacatacaatgttaagaaccatcaattttgacttttactaagttgttaaataaagttataatacagctgtgaagggc

SEQ ID NO: 6296 - protein, 53 aa, Homo sapiens; identical to SEQ ID NO: 6280

SEQ ID NO: 6297 - DNA, 2129 bp, Homo sapiens
agccaggtctcttatctgacttcaagtgaaccaccattttggtggttttgatcttttgtcactgagcccaaagagccagggattaggaattaagatcgtgcacaaaagtttccttaaaattcctggatggctgcagatgttgggggaaaaagtacgtgatattttagaaacttagtgggaaaagtaggatggtatttttatgtaaagccttgacccaatgtttaaaaatataattgtatttagatcttgttattgctccagtacataggaattgtgtaaagtgttaacagcagctgtatttgtttaaattgtgtgtattgaagattaggaaaaagatagtagttatttttcctaaatgaaataactttcttctcttccccttccccacccgaattcttttctgaagttgctggcatttgggtcaaggttttattaaaagctacattttataacactggcacacacaaaaaagtagttttaagcttgtttgcacagttctttttttccattggaaatggaattcattgccttaggtctttttaaatagtgtattattatcgttggggctggctctatgcttgaaaaccagtttatttataacctgttataagtgctatattctgtttgcagttaggaaatgcagaattcaaagtgatctcctagcttgtaagcaaactgagatgcactatcccttttctataaaaaataagttaatgtgtcaagaaaccaactctattaaggtggggtttaatattaccctttcctatgtgttttatctaattattttggttgttaatatggtgataatggaaagtcaagttaaattttaaatattaagaattctgatttattgagattgaattatgccaccacgtttatgtaaaaatgaaggtggcaccgtggtgagacctaatgagaaatagttactcagttgtaaaaattttgatttattctctttcttctgacctccttgcctcttgtcttgaaccatagcaaaaggatactgcatctctcattactgtagtgctgaggttattgaagttatacaaaacacatctcagtctctgtttcttggaaaggtatctattacatcctgctagctgactgacaaaactaagcagggagaataaagataattgtattttatgttttgcacacaaacgcagaatttgtataaccatatgacttcatagttgtgatctcaaaaaagaaggaatttctcctttgtttcttgcagttaatgtaagaatactttaaatctctaagcttctgaagtgttagaggtagagatggtctagtaaagatgtagtagtaatgttttatccatttagcatgtgtttattttttcatatgtactcaaaggtgacttattggttcacctcagtgatattacagctaaaaaaatcattcattagcaaaaggaaaagtggtctcaacctaacatcagaagtgtttcttattattattttatattgagttgaatattgaactctaacagttttctacatacaaaacacagtgtcatgaaggttattcataattgcattatagaggaatgtagtatgtcataagtactttgtaaagatttgacattcaactgtagtatccatatgttgcttaaatttccttatgagccccatgatggaaagacttaaagatgaatttgagaaaaattgaaagaaattagattatcaggttctgttaaattgttacatgtatcttgcttaaatttctgtttattaatttatatccacccaagtacataaagcaaatttggaggaaacaactgaagttgtgcaatattttctgataattgctttttttattcttgtgttttctacttaaacataatgtctgtgtcatcaagtattatagtcagacttttctttttttctagattgttaaaattggcaaatgaacttttttaaaaatcatcttccatgttgcagttagtctttcttttcattacaagtctttcacagaagtttggtggtaatattgaaagaactagcattgggcagaatgtgtcttttttaggcactttatattctcaacatacaatgttaagaaccatcaattttgacttttactaagttgttaaataaagttataatacagctgtgaagggc

SEQ ID NO: 6298 - protein, 53 aa, Homo sapiens; identical to SEQ ID NO: 6280

SEQ ID NO: 6299 - DNA, 2143 bp, Homo sapiens
agccaggattaggaattaagatcgtgcacaaaagtttccttaaaattcctggatggctgcagatgttgggggaaaaagtacgtgatattttagaaacttagtgggaaaagtaggatggtatttttatgtaaagccttgacccaatgtttaaaaatataattgtatttagatcttgttattgctccagtacataggaattgtgtaaagtgttaacagcagctgtatttgtttaaattgtgtgtattgaagattaggaaaaagatagtagttatttttcctaaatgaaataactttcttctcttccccttccccacccgaattcttttctgaagttgctggcatttgggtcaaggttttattaaaagctacattttataacactggcacacacaaaaaagtagttttaagcttgtttgcacagttctttttttccattggaaatggaattcattgccttaggtctttttaaatagtgtattattatcgttggggctggctctatgcttgaaaaccagtttatttataacctgttataagtgctatattctgtttgcagttaggaaatgcagaattcaaagtgatctcctagcttgtaagcaaactgagatgcactatcccttttctataaaaaataagttaatgtgtcaagaaaccaactctattaaggtggggtttaatattaccctttcctatgtgttttatctaattattttggttgttaatatggtgataatggaaagtcaagttaaattttaaatattaagaattctgatttattgagattgaattatgccaccacgtttatgtaaaaatgaaggtggcaccgtggtgagacctaatgagaaatagttactcagttgtaaaaattttgatttattctctttcttctgacctccttgcctcttgtcttgaaccatagcaaaaggatactgcatctctcattactgtagtgctgaggttattgaagttatacaaaacacatctcagtctctgtttcttggaaaggtatctattacatcctgctagctgactgacaaaactaagcagggagaataaagataattgtattttatgttttgcacacaaacgcagaatttgtataaccatatgacttcatagttgtgatctcaaaaaagaaggaatttctcctttgtttcttgcagttaatgtaagaatactttaaatctctaagcttctgaagtgttagaggtagagatggtctagtaaagatgtagtagtaatgttttatccatttagcatgtgtttattttttcatatgtactcaaaggtgacttattggttcacctcagtgatattacagctaaaaaaatcattcattagcaaaaggaaaagtggtctcaacctaacatcagaagtgtttcttattattattttatattgagttgaatattgaactctaacagttttctacatacaaaacacagtgtcatgaaggttattcataattgcattatagaggaatgtagtatgtcataagtactttgtaaagatttgacattcaactgtagtatccatatgttgcttaaatttccttatgagccccatgatggaaagacttaaagatgaatttgagaaaaattgaaagaaattagattatcaggttctgttaaattgttacatgtatcttgcttaaatttctgtttattaatttatatccacccaagtacataaagcaaatttggaggaaacaactgaagttgtgcaatattttctgataattgctttttttattcttgtgttttctacttaaacataatgtctgtgtcatcaagtattatagtcagacttttctttttttctagattgttaaaattggcaaatgaacttttttaaaaatcatcttccatgttgcagttagtctttcttttcattacaagtctttcacagaagtttggtggtaatattgaaagaactagcattgggcagaatgtgtcttttttaggcactttatattctcaacatacaatgttaagaaccatcaattttgacttttactaagttgttaaataaagttataatacagctgtgaagggctaaagttagagttgattacataagtaagtattccccatataatcttttaaaaagttgtgtatgattattttaaaatctctctctctat

SEQ ID NO: 6300 - protein, 53 aa, Homo sapiens; identical to SEQ ID NO: 6280

SEQ ID NO: 6301 - DNA, 2217 bp, Homo sapiens
agccaggtctcttatctgacttcaagtgaaccaccattttggtggttttgatcttttgtcactgagcccaaagagccagggattaggaattaagatcgtgcacaaaagtttccttaaaattcctggatggctgcagatgttgggggaaaaagtacgtgatattttagaaacttagtgggaaaagtaggatggtatttttatgtaaagccttgacccaatgtttaaaaatataattgtatttagatcttgttattgctccagtacataggaattgtgtaaagtgttaacagcagctgtatttgtttaaattgtgtgtattgaagattaggaaaaagatagtagttatttttcctaaatgaaataactttcttctcttccccttccccacccgaattcttttctgaagttgctggcatttgggtcaaggttttattaaaagctacattttataacactggcacacacaaaaaagtagttttaagcttgtttgcacagttctttttttccattggaaatggaattcattgccttaggtctttttaaatagtgtattattatcgttggggctggctctatgcttgaaaaccagtttatttataacctgttataagtgctatattctgtttgcagttaggaaatgcagaattcaaagtgatctcctagcttgtaagcaaactgagatgcactatcccttttctataaaaaataagttaatgtgtcaagaaaccaactctattaaggtggggtttaatattaccctttcctatgtgttttatctaattattttggttgttaatatggtgataatggaaagtcaagttaaattttaaatattaagaattctgatttattgagattgaattatgccaccacgtttatgtaaaaatgaaggtggcaccgtggtgagacctaatgagaaatagttactcagttgtaaaaattttgatttattctctttcttctgacctccttgcctcttgtcttgaaccatagcaaaaggatactgcatctctcattactgtagtgctgaggttattgaagttatacaaaacacatctcagtctctgtttcttggaaaggtatctattacatcctgctagctgactgacaaaactaagcagggagaataaagataattgtattttatgttttgcacacaaacgcagaatttgtataaccatatgacttcatagttgtgatctcaaaaaagaaggaatttctcctttgtttcttgcagttaatgtaagaatactttaaatctctaagcttctgaagtgttagaggtagagatggtctagtaaagatgtagtagtaatgttttatccatttagcatgtgtttattttttcatatgtactcaaaggtgacttattggttcacctcagtgatattacagctaaaaaaatcattcattagcaaaaggaaaagtggtctcaacctaacatcagaagtgtttcttattattattttatattgagttgaatattgaactctaacagttttctacatacaaaacacagtgtcatgaaggttattcataattgcattatagaggaatgtagtatgtcataagtactttgtaaagatttgacattcaactgtagtatccatatgttgcttaaatttccttatgagccccatgatggaaagacttaaagatgaatttgagaaaaattgaaagaaattagattatcaggttctgttaaattgttacatgtatcttgcttaaatttctgtttattaatttatatccacccaagtacataaagcaaatttggaggaaacaactgaagttgtgcaatattttctgataattgctttttttattcttgtgttttctacttaaacataatgtctgtgtcatcaagtattatagtcagacttttctttttttctagattgttaaaattggcaaatgaacttttttaaaaatcatcttccatgttgcagttagtctttcttttcattacaagtctttcacagaagtttggtggtaatattgaaagaactagcattgggcagaatgtgtcttttttaggcactttatattctcaacatacaatgttaagaaccatcaattttgacttttactaagttgttaaataaagttataatacagctgtgaagggctaaagttagagttgattacataagtaagtattccccatataatcttttaaaaagttgtgtatgattattttaaaatctctctctctat

SEQ ID NO: 6302 - protein, 53 aa, Homo sapiens; identical to SEQ ID NO: 6280

SEQ ID NO: 6303 - DNA, 1664 bp, Homo sapiens
gagctgggcagggcacagcagggcaggagtgtgtttgatgtgtcctgggaaccgccctgaggccgtcgtgtggctggagtgctgcaggtgtcaaggaaattgtaggagatgtctcctgagtgtgatggaatataaccagatttccagaaggaactgacatgatctgacttaaaaagagctgtgccaggcctgaagctcaagattgctgggaaatctctacccacagagaagtttgccatccggaagtcccggcgctacttctcctccaaccctatctcgctgccagtgcctgctctggaaatgatgtacatctggaacggctacgccgtgattgggaagcagccgaaactcacggatgggatacttgagattatcactaaggctgaagagatgctggagaaaggcccagagaacgagtactcagtggatgacgagtgcttggtgaaattgttgaaaggcctgtgtctgaaatacctgggccgtgtccaggaggccgaggagaattttaggagcatctctgccaatgaaaagaagattaaatatgaccactacttgatcccaaacgccctgctggagctggccctgctgcttatggagcaagacagaaacgaagaggccatcaaacttttggaatctgccaagcaaaactacaagaattactccatggagtcaaggacacactttcgaatccaggcagccacactccaagccaagtcttccctagagaacagcagcagatccatggtctcatcagtgtccttgtagctttgtgcagcagttccgggctggaagacagagacagctggacagagctcctgaaaacatttcaaaataccccctccccctgccctgccctgcctttggggtccaccggcactccagttggatggcacaacatagtgtatccgtgcagaagccgagctggcattttcaccagtgtagccaagggcctttgccaagggcagagcaggtggagccctctgcctgccctatcacacatacgggtacttgcttttcactgtgatgtttaagagaatgtatgaacagtttacattttccttagaaatacattgatgggatcacagttggctttaaaaaccaacaacaatcaaccacctgtaagtctttgtcttcacctattatcatctggaggtaaatctctttatatgatgatgccaaagggcaaattgcttttcaaattcagcaagttctcagcttgtgtgacggaaggtccttcagaggacctgaggaatgcctgggagaggctaagcctcaggcttcaatgcttctggggttgggcatgaggatgtacacagacacccactaccttactactcacacttcatttcactccttttgtaaatttccaatttaaaaatcaagcacgtctttttagtgagataaaatctgagctcttctgtagaaaaatcaatctctaccagtagaaaatgccagggcttgatggaagagctgtgtagccctttctatgccaaagccaggaaatttggggggcaggaggaggttctcagaatccagtctgtatctttgctgtatgccaaactgaaaccactgggaataatttatgaaacataaaaatcttctgtacttcactccaaggtacatttgcttactgacagcatttttgttaaaactgttattcttga

SEQ ID NO: 6304 - protein, 154 aa, Homo sapiens
MMYIWNGYAVIGKQPKLTDGILEIITKAEEMLEKGPENEYSVDDECLVKLLKGLCLKYLGRVQEAEENFRSISANEKKIKYDHYLIPNALLELALLLMEQDRNEEAIKLLESAKQNYKNYSMESRTHFRIQAATLQAKSSLENSSRSMVSSVSL

SEQ ID NO: 6305 - DNA, 1781 bp, Homo sapiens
acatggcaggccgttagggcagagggagctgggcagggcacagcagggcaggagtgtgtttgatgtgtcctgggaaccgccctgaggccgtcgtgtggctggagtgctgcaggtgtcaaggaaattgtaggagatgtctcctgagtgtgatggaatataaccagatttccagaaggaactgacatgatctgacttaaaaaggccacctacatttacatgaaggccgcctacctcagcatgtttgggaaggaggaccacaagccgttcggggacgacgaagtggaattatttcgagctgtgccaggcctgaagctcaagattgctgggaaatctctacccacagagaagtttgccatccggaagtcccggcgctacttctcctccaaccctatctcgctgccagtgcctgctctggaaatgatgtacatctggaacggctacgccgtgattgggaagcagccgaaactcacggatgggatacttgagattatcactaaggctgaagagatgctggagaaaggcccagagaacgagtactcagtggatgacgagtgcttggtgaaattgttgaaaggcctgtgtctgaaatacctgggccgtgtccaggaggccgaggagaattttaggagcatctctgccaatgaaaagaagattaaatatgaccactacttgatcccaaacgccctgctggagctggccctgctgcttatggagcaagacagaaacgaagaggccatcaaacttttggaatctgccaagcaaaactacaagaattactccatggagtcaaggacacactttcgaatccaggcagccacactccaagccaagtcttccctagagaacagcagcagatccatggtctcatcagtgtccttgtagctttgtgcagcagttccgggctggaagacagagacagctggacagagctcctgaaaacatttcaaaataccccctccccctgccctgccctgcctttggggtccaccggcactccagttggatggcacaacatagtgtatccgtgcagaagccgagctggcattttcaccagtgtagccaagggcctttgccaagggcagagcaggtggagccctctgcctgccctatcacacatacgggtacttgcttttcactgtgatgtttaagagaatgtatgaacagtttacattttccttagaaatacattgatgggatcacagttggctttaaaaaccaacaacaatcaaccacctgtaagtctttgtcttcacctattatcatctggaggtaaatctctttatatgatgatgccaaagggcaaattgcttttcaaattcagcaagttctcagcttgtgtgacggaaggtccttcagaggacctgaggaatgcctgggagaggctaagcctcaggcttcaatgcttctggggttgggcatgaggatgtacacagacacccactaccttactactcacacttcatttcactccttttgtaaatttccaatttaaaaatcaagcacgtctttttagtgagataaaatctgagctcttctgtagaaaaatcaatctctaccagtagaaaatgccagggcttgatggaagagctgtgtagccctttctatgccaaagccaggaaatttggggggcaggaggaggttctcagaatccagtctgtatctttgctgtatgccaaactgaaaccactgggaataatttatgaaacataaaaatcttctgtacttcactccaaggtacatttgcttactgacagcatttttgttaaaactgttattcttga

SEQ ID NO: 6306 - protein, 221 aa, Homo sapiens; identical to SEQ ID NO: 216

SEQ ID NO: 6307 - DNA, 2819 bp, Homo sapiens
cttggagaaggaggagggaaaaaggggctgtgggatttagtggctgggctgcaccccctgggggggcagcagagcccaatgggccagaagggccacaaagactccctttacccttgtggagggactcctgagagcagcctccatgaggccctggaccagtgcatgaccgccctggacctcttcctcaccaaccagttctcagaagcactcagctacctcaagcccagaaccaaggaaagcatgtaccactcactgacatatgccaccatcctggagatgcaggccatgatgacctttgaccctcaggacatcctgcttgccggcaacatgatgaaggaggcacagatgctgtgtcagaggcaccggaggaagtcttctgtaacagattccttcagcagcctggtgaaccgccccacgctgggccaattcactgaagaggaaatccacgctgaggtctgctatgcagagtgcctgctgcagcgagcagccctgaccttcctgcagggttcctcacacggaggggcagtcaggcccagagccttgcatgatccctctcacgcctgcagctgcccacctgggccaggccgtcagcatcttttcctcctgcaggacgagaacatggtgagcttcatcaaaggcggcatcaaagttcgaaacagctaccagacctacaaggagctggacagccttgttcagtcctcacaatactgcaagggtgagaaccacccgcactttgaaggaggagtgaagcttggtgtaggggccttcaacctgacactgtccatgcttcctactaggatcctgaggctgttggagtttgtggggttttcaggaaacaaggactatgggctgctgcagctggaggagggagcgtcagggcacagcttccgctctgtgctctgtgtcatgctcctgctgtgctaccacaccttcctcaccttcgtgctcggtactgggaacgtcaacatcgaggaggccgagaagctcttgaagccctacctgaaccggtaccctaagggtgccatcttcctgttctttgcagggaggattgaagtcattaaaggcaacattgatgcagccatccggcgtttcgaggagtgctgtgaggcccagcagcactggaagcagttccaccacatgtgctactgggagctgatgtggtgcttcacctacaagggccagtggaagatgtcctacttctacgccgacctgctcagcaaggagaactgctggtccaaggccacctacatttacatgaaggccgcctacctcagcatgtttgggaaggaggaccacaagccgttcggggacgacgaagtggaattatttcgagctgtgccaggcctgaagctcaagattgctgggaaatctctacccacagagaagtttgccatccggaagtcccggcgctacttctcctccaaccctatctcgctgccagtgcctgctctggaaatgatgtacatctggaacggctacgccgtgattgggaagcagccgaaactcacggatgggatacttgagattatcactaaggctgaagagatgctggagaaaggcccagagaacgagtactcagtggatgacgagtgcttggtgaaattgttgaaaggcctgtgtctgaaatacctgggccgtgtccaggaggccgaggagaattttaggagcatctctgccaatgaaaagaagattaaatatgaccactacttgatcccaaacgccctgctggagctggccctgctgcttatggagcaagacagaaacgaagaggccatcaaacttttggaatctgccaagcaaaactacaagaattactccatggagtcaaggacacactttcgaatccaggcagccacactccaagccaagtcttccctagagaacagcagcagatccatggtctcatcagtgtccttgtagctttgtgcagcagttccgggctggaagacagagacagctggacagagctcctgaaaacatttcaaaataccccctccccctgccctgccctgcctttggggtccaccggcactccagttggatggcacaacatagtgtatccgtgcagaagccgagctggcattttcaccagtgtagccaagggcctttgccaagggcagagcaggtggagccctctgcctgccctatcacacatacgggtacttgcttttcactgtgatgtttaagagaatgtatgaacagtttacattttccttagaaatacattgatgggatcacagttggctttaaaaaccaacaacaatcaaccacctgtaagtctttgtcttcacctattatcatctggaggtaaatctctttatatgatgatgccaaagggcaaattgcttttcaaattcagcaagttctcagcttgtgtgacggaaggtccttcagaggacctgaggaatgcctgggagaggctaagcctcaggcttcaatgcttctggggttgggcatgaggatgtacacagacacccactaccttactactcacacttcatttcactccttttgtaaatttccaatttaaaaatcaagcacgtctttttagtgagataaaatctgagctcttctgtagaaaaatcaatctctaccagtagaaaatgccagggcttgatggaagagctgtgtagccctttctatgccaaagccaggaaatttggggggcaggaggaggttctcagaatccagtctgtatctttgctgtatgccaaactgaaaccactgggaataatttatgaaacataaaaatcttctgtacttcactccaaggtacatttgcttactgacagcatttttgttaaaactgttattcttga

SEQ ID NO: 6308 - protein, 613 aa, Homo sapiens
MGQKGHKDSLYPCGGTPESSLHEALDQCMTALDLFLTNQFSEALSYLKPRTKESMYHSLTYATILEMQAMMTFDPQDILLAGNMMKEAQMLCQRHRRKSSVTDSFSSLVNRPTLGQFTEEEIHAEVCYAECLLQRAALTFLQGSSHGGAVRPRALHDPSHACSCPPGPGRQHLFLLQDENMVSFIKGGIKVRNSYQTYKELDSLVQSSQYCKGENHPHFEGGVKLGVGAFNLTLSMLPTRILRLLEFVGFSGNKDYGLLQLEEGASGHSFRSVLCVMLLLCYHTFLTFVLGTGNVNIEEAEKLLKPYLNRYPKGAIFLFFAGRIEVIKGNIDAAIRRFEECCEAQQHWKQFHHMCYWELMWCFTYKGQWKMSYFYADLLSKENCWSKATYIYMKAAYLSMFGKEDHKPFGDDEVELFRAVPGLKLKIAGKSLPTEKFAIRKSRRYFSSNPISLPVPALEMMYIWNGYAVIGKQPKLTDGILEIITKAEEMLEKGPENEYSVDDECLVKLLKGLCLKYLGRVQEAEENFRSISANEKKIKYDHYLIPNALLELALLLMEQDRNEEAIKLLESAKQNYKNYSMESRTHFRIQAATLQAKSSLENSSRSMVSSVSL

SEQ ID NO: 6309 - DNA, 2645 bp, Homo sapiens
atggcctttctgaccacctggaaggaggcggcctccgggaaaagcgaccgcaggactcctgagagcagcctccatgaggccctggaccagtgcatgaccgccctggacctcttcctcaccaaccagttctcagaagcactcagctacctcaagcccagaaccaaggaaagcatgtaccactcactgacatatgccaccatcctggagatgcaggccatgatgacctttgaccctcaggacatcctgcttgccggcaacatgatgaaggaggcacagatgctgtgtcagaggcaccggaggaagtcttctgtaacagattccttcagcagcctggtgaaccgccccacgctgggccaattcactgaagaggaaatccacgctgaggtctgctatgcagagtgcctgctgcagcgagcagccctgaccttcctgcaggacgagaacatggtgagcttcatcaaaggcggcatcaaagttcgaaacagctaccagacctacaaggagctggacagccttgttcagtcctcacaatactgcaagggtgagaaccacccgcactttgaaggaggagtgaagcttggtgtaggggccttcaacctgacactgtccatgcttcctactaggatcctgaggctgttggagtttgtggggttttcaggaaacaaggactatgggctgctgcagctggaggagggagcgtcagggcacagcttccgctctgtgctctgtgtcatgctcctgctgtgctaccacaccttcctcaccttcgtgctcggtactgggaacgtcaacatcgaggaggccgagaagctcttgaagccctacctgaaccggtaccctaagggtgccatcttcctgttctttgcagggaggattgaagtcattaaaggcaacattgatgcagccatccggcgtttcgaggagtgctgtgaggcccagcagcactggaagcagttccaccacatgtgctactgggagctgatgtggtgcttcacctacaagggccagtggaagatgtcctacttctacgccgacctgctcagcaaggagaactgctggtccaaggccacctacatttacatgaaggccgcctacctcagcatgtttgggaaggaggaccacaagccgttcggggacgacgaagtggaattatttcgagctgtgccaggcctgaagctcaagattgctgggaaatctctacccacagagaagtttgccatccggaagtcccggcgctacttctcctccaaccctatctcgctgccagtgcctgctctggaaatgatgtacatctggaacggctacgccgtgattgggaagcagccgaaactcacggatgggatacttgagattatcactaaggctgaagagatgctggagaaaggcccagagaacgagtactcagtggatgacgagtgcttggtgaaattgttgaaaggcctgtgtctgaaatacctgggccgtgtccaggaggccgaggagaattttaggagcatctctgccaatgaaaagaagattaaatatgaccactacttgatcccaaacgccctgctggagctggccctgctgcttatggagcaagacagaaacgaagaggccatcaaacttttggaatctgccaagcaaaactacaagaattactccatggagtcaaggacacactttcgaatccaggcagccacactccaagccaagtcttccctagagaacagcagcagatccatggtctcatcagtgtccttgtagctttgtgcagcagttccgggctggaagacagagacagctggacagagctcctgaaaacatttcaaaataccccctccccctgccctgccctgcctttggggtccaccggcactccagttggatggcacaacatagtgtatccgtgcagaagccgagctggcattttcaccagtgtagccaagggcctttgccaagggcagagcaggtggagccctctgcctgccctatcacacatacgggtacttgcttttcactgtgatgtttaagagaatgtatgaacagtttacattttccttagaaatacattgatgggatcacagttggctttaaaaaccaacaacaatcaaccacctgtaagtctttgtcttcacctattatcatctggaggtaaatctctttatatgatgatgccaaagggcaaattgcttttcaaattcagcaagttctcagcttgtgtgacggaaggtccttcagaggacctgaggaatgcctgggagaggctaagcctcaggcttcaatgcttctggggttgggcatgaggatgtacacagacacccactaccttactactcacacttcatttcactccttttgtaaatttccaatttaaaaatcaagcacgtctttttagtgagataaaatctgagctcttctgtagaaaaatcaatctctaccagtagaaaatgccagggcttgatggaagagctgtgtagccctttctatgccaaagccaggaaatttggggggcaggaggaggttctcagaatccagtctgtatctttgctgtatgccaaactgaaaccactgggaataatttatgaaacataaaaatcttctgtacttcactccaaggtacatttgcttactgacagcatttttgttaaaactgttattcttga

SEQ ID NO: 6310 - protein, 581 aa, Homo sapiens; identical to SEQ ID NO: 210

SEQ ID NO: 6311 - DNA, 1874 bp, Homo sapiens
acagcgcccggctcggggttgcggcggcagcacctgggccgcgattggcgtccggctggggcagcgccgcccgcgcccctcggcgatgacctcggctggcggcgccccaggagccctgcccgcggggactcctgagagcagcctccatgaggccctggaccagtgcatgaccgccctggacctcttcctcaccaaccagttctcagaagcactcagctacctcaagcccagaaccaaggaaagcatgtaccactcactgacatatgccaccatcctggagatgcaggccatgatgacctttgaccctcaggacatcctgcttgccggcaacatgatgaaggaggcacagatgctgtgtcagaggcaccggaggaagtcttctgtaacagattccttcagcagcctggtgaaccgccccacgctgggccaattcactgaagaggaaatccacgctgaggtctgctatgcagagtgcctgctgcagcgagcagccctgaccttcctgcagggttcctcacacggaggggcagtcaggcccagagccttgcatgatccctctcacgcctgcagctgcccacctgggccaggccgtcagcatcttttcctcctgcaggacgagaacatggtgagcttcatcaaaggcggcatcaaagttcgaaacagctaccagacctacaaggagctggacagccttgttcagtcctcacaatactgcaagggtgagaaccacccgcactttgaaggaggagtgaagcttggtgtaggggccttcaacctgacactgtccatgcttcctactaggatcctgaggctgttggagtttgtggggttttcaggaaacaaggactatgggctgctgcagctggaggagggagcgtcagggcacagcttccgctctgtgctctgtgtcatgctcctgctgtgctaccacaccttcctcaccttcgtgctcggtactgggaacgtcaacatcgaggaggccgagaagctcttgaagccctacctgaaccggtaccctaagggtgccatcttcctgttctttgcagggaggattgaagtcattaaaggcaacattgatgcagccatccggcgtttcgaggagtgctgtgaggcccagcagcactggaagcagttccaccacatgtgctactgggagctgatgtggtgcttcacctacaagggccagtggaagatgtcctacttctacgccgacctgctcagcaaggagaactgctggtccaaggccacctacatttacatgaaggccgcctacctcagcatgtttgggaaggaggaccacaagccgttcggggacgacgaagtggaattatttcggtgggtcccacatcgtgctcccactgtgtaggccactcccaccgtgtaggccgctatggacagaccagccaggccaccctgagctgtgggcactggggagggaggagtagggtggctccctgcccccacccgcggactgccccccctgcgtgtcctcccctcccatcaccaccccatgctgctgctgctggtggttggagccctttgactttcttcagaggctttctttcacagaaatggttttgctaatatcgtcttcctccgagtctctttcatgtggacagtaggacagatgtggctccaaggtccagggagggaaggtctttcactctgctgagttaacctgagacactcagagaagcacagtagagagctgacagtcggaatcgaacaaacaagagtaaacccagcctctgcttgttcttagctgtgtcaccttggacaacttcagcatctgtaaaatgggaacaacaacctccacctcgcagcactgttttgcaaatcaactagataataaatgttaagagcctggcgcatag

SEQ ID NO: 6312 - protein, 426 aa, Homo sapiens; identical to SEQ ID NO: 212

SEQ ID NO: 6313 - DNA, 6255 bp, Homo sapiens
ggtggagacaccgcctcagggctcggtgcacagtggacatttggggagcgttgtgggtgacccccacacaggcactgggaatgcaggggagagggggccaagggggaaaggggccagagtgttggctttggattcaggagggatggattccagtcctagcttgccacttattaggactcctgagagcagcctccatgaggccctggaccagtgcatgaccgccctggacctcttcctcaccaaccagttctcagaagcactcagctacctcaagcccagaaccaaggaaagcatgtaccactcactgacatatgccaccatcctggagatgcaggccatgatgacctttgaccctcaggacatcctgcttgccggcaacatgatgaaggaggcacagatgctgtgtcagaggcaccggaggaagtcttctgtaacagattccttcagcagcctggtgaaccgccccacgctgggccaattcactgaagaggaaatccacgctgaggtctgctatgcagagtgcctgctgcagcgagcagccctgaccttcctgcagggttcctcacacggaggggcagtcaggcccagagccttgcatgatccctctcacgcctgcagctgcccacctgggccaggccgtcagcatcttttcctcctgcaggacgagaacatggtgagcttcatcaaaggcggcatcaaagttcgaaacagctaccagacctacaaggagctggacagccttgttcagtcctcacaatactgcaagggtgagaaccacccgcactttgaaggaggagtgaagcttggtgtaggggccttcaacctgacactgtccatgcttcctactaggatcctgaggctgttggagtttgtggggttttcaggaaacaaggactatgggctgctgcagctggaggagggagcgtcagggcacagcttccgctctgtgctctgtgtcatgctcctgctgtgctaccacaccttcctcaccttcgtgctcggtactgggaacgtcaacatcgaggaggccgagaagctcttgaagccctacctgaaccggtaccctaagggtgccatcttcctgttctttgcagggaggattgaagtcattaaaggcaacattgatgcagtgagtgatgggggtccgggccggggctggggatccctcggggtctcccagaccagcaggaagtcaggcacatgtgacatactcagggacaggatagactgggggcggggggggggccaagagagaaccaaccagagagcaggggcaggagaggcccttctggcagagcagcctgggaagacaagggaggaggaggcatttgtggtgcctgggattttgactgggagatataggactgcagcattgcagtggagggaggtggagggaggtgcttgagggaggcagaggttaggaaagcccatctgtttagggcatgacgattaggctggagtctggtacctcccctccattatagctctctcctgctctttcattttgttactaaaaaccagagtcctaggcgggggctgtatttgagcccaacgtcatgtaagacttaggaggtaaaaccaggactggaggccagatctcctggctcctggggccccacctgagcctagcacagggctggaccactatgccctggaggagtcccggtctgctgtggtgttgggaggttcggaggatgcagaggggttggggctgggtgggcacccgtcaggctgaccagaaggtgcctgcaggccatccggcgtttcgaggagtgctgtgaggcccagcagcactggaagcagttccaccacatgtgctactgggagctgatgtggtgcttcacctacaagggccagtggaagatgtcctacttctacgccgacctgctcagcaaggagaactgctggtccaaggtgggctgatgccacgtgttaggggcattgggtgaccagggctgactgtgtgcctccagaccacgggccaaatccctaactgaacacagatgtctcagctggaatctaaacataaccttaaattctaataggactcaggcttggaaggaactaaagaccacaagagaaacttctgaaccacaatgtgtcacaaagagatttctagtcacaaaggacagaaacatggctccctctgtccagtagaactgtttctgtggtagaaatgttctacttatgcactgcccaaatatggtagtcaccagccacatgtgcacaatgagcacatgaaatgtgcctagtgcaactgggaaactgattgttttcagttttatttaattttaattaactaaatgttaaatttaaatagccatgtagggcttgtggccactatattggactatgcaggtccaaaacacaaaaggctcatataactgaacattcttggcacatccgacttcaggtagggctggatccaggaattcaaatgatgtcgtctggcttggtctttccatttgtggctgtgctctctcctatgacatctttgtttctgctgcatctttgcaggaaggttctctccatgtgacaggcaaggtggccacgggctgcttctactcatatcctccccttggtttcaaccagagtcccacagtttgagcctcactggtctgacttgtcacctgccaatgcctggaacagaggggtgggaagattcctcatgggctgagagtaggagaggggtggttccacagaagaaaatgatgcacccagaaatagtggagggattaacaagatgccatacaggcaaaacaaagccaaacagatgcccgcctaccaaagatgaaatttatcatggtaagtattgaaataagtgttagcttgtaccatcatagtaatgatagtgcagaaattggaaccaagagtcttacaaccacctagctcagcaaacgtctaatctgttatttgtaaatacacaggacatgtgtcttcatggcttcatcccctgcccatagcagacattgctaatcaatcctctgccatgagcctagctgtgaccttagataccttccctgcaaagctccaggcagccgttagaactgacccacattggcacctgttaggagacctgtcatctgcatctggtccctccccctcctctgcatggaggtctcttccgtagccctgcctggggaccaagctgaaggggaattctctgggtctggggcaggtggggctggggaagggagcaggcttctactgagctctcaacatgtctggcacctgtcatgtcctccacaccacacccagtgaggagaagttattatctccattgggcacatgagggccactgatgctaagcgaggactgtgactttcccacccacatggctgttggtgacagacaccggatttgaggacagtcctgtgtgactcagaggcctctgcttctctcttgctcctagagtcctcctgaggagtcggggcttgccctgagcccaccctgctgttgaaggtgcttcctcaggcccagctcccatggcccccacaccccctcctcatcacctcctactcccaaaaaggacaaagcctcagggaaccttttttctttttttagagacagggtcttgctatgttggtcaggctagtcttgaactcctgggcccaagcaatcttcccacctctgcctcctaaagtgctgggattctgggccttagggaacctttttgaactgaaagtgactctcgaagccttcctgtagagtgaggtgggtggctggggctaaccatatggggaaggagagacctggtgggggcacacagctgctatatagaggaacagaaggtgggccaggcctcccagctgtcaggaaatctggctcagtccccagaccgctgtgtggctttggggtggccagtccctctctctctgcaacactctcctcatgaggacttctgtgaaaaatgggggttgtaaccctctgagttctggggccccacccatttctaatctccagaacttggccaccacagactccaccaacttctagtcctggggcctgggcctctggccattgccataggcaccacctgctctgtgcaggcagcgcccccctctgccaggatcctccgaggtcagctgctgggtctgacccgcagaccctggctgagcgacggatgaacggagtatgcagacacaggcttgcctgtcagcagatgggggacccctgccagagtcagcagcggcccccataagcctgccacgcttgcatttatttagtacagatgtaatgacaaaggcctaaagcaaactccatttgtgggtaattaacattgtcgcccccccagaaagagcagtcctccgcatgatgattaaaggccaggttccgaggcctaagtaaaccaacttatctagatcaattcccttacttcttgttatctactctgagagaattcagctgccttcagccaaatcctttcccgaagcttttgcaaaacctccgagccttccaaggtttgcttctttctgtaatttttctcaccaccctgacctatctcctgcagtcagccctgtggaggcctttgtgtttcccccagtgctggcagcctagaggctgagatggccagaaacaaggtggtgacagtggcgtgctcagggcttgggaaacccaaggagctaaaggcatgcccaggcaaccaaagaggacaggaaggcttctgaggagagacctctgaggtgggtcttggagaggaaggacttagggaggcagagtggaggaagtgagaggacaccccaagccaagagggcggcaggaccaaaggctcagaagccagggcgctgcagaggggctgtgtgccacagggtgaagagtttgtgtggcagaagggcagggggcttgcatcaggggtgacagctgctcttttgtcccagcatagcccctgtacatccctggagagctggggcgtccacaactctaagtcacagcccccatcctaaccctggtggtgcagtgagggtgagctgtctgtgggcaggagggaagactcttggagatgagcctggtgaagggataatggcatcccgggccgaggagcagcacaggcagaggcctggggagagtttaaggagtgtaggggaggaaatggcagaagatgagccagaaaaagaaaggttagggcaggtcctggaggacatgagtggctgtttgggctttatccagcagtgggggagccttggcaggcttgtggcttagataggtgctttagaaagcccaccagcagttgctgggccaccccgctggctgggtcctgttctaaggcaggaaatacaagcatgagcaggaaaagaccccctcaaggctcacgtcctagtggggagacaagaaacacagatgggcaatataacacgatgtctggttccagtaagtgcagtgaagaacaagcgaggctggatgcagggagtgatgggaggggctttgtaaggggaggtcgggggaagcctgtctcagaggacaccagaatggagcgcaggagcagcacgtggcagtcacatggcaggccgttagggcagagggagctgggcagggcacagcagggcaggagtgtgtttgatgtgtcctgggaaccgccctgaggccgtcgtgtggctggagtgctgcaggtgtcaaggaaattgtaggagatgtctcctgagtgtgatggaatataaccagatttccagaaggaactgacatgatctgacttaaaaaggtcagtgtgcgaaatggcttgcaggggacaggagtgggagcagggagataggagacaatgtgtaccaggacagcagaaagacatcccgggtagcctggaacagggagacggtgtggagatggtggcagtccgataatgagagccgtagggcaaggccagcaggatcctagagtgagacgggaggtaaagtcaccgggacttggtgtctccacgtcaggggcaggggaaagggagaggacaagggtgacccgggaggttaaagatgggaccggggccagacgcagtggctcatgcctgtaatcctagcactttgggaggctgaggcgggcggatagcttgaggtcaggagtttgaaaccagcctggccaacatggtgaaaccccgtctctactaaaatatacaaaaattagcctggcgtggtggtgcatgcctgcagtcccagctattcaggaggctgaggcaacaagaatcgcttgaacctgggaggcggaggttgcagtgagccgagatcgcgccatagcactccagccttagcctgggcgacagagcgagaccacatc

SEQ ID NO: 6314 - protein, 420 aa, Homo sapiens
MDSSPSLPLIRTPESSLHEALDQCMTALDLFLTNQFSEALSYLKPRTKESMYHSLTYATILEMQAMMTFDPQDILLAGNMMKEAQMLCQRHRRKSSVTDSFSSLVNRPTLGQFTEEEIHAEVCYAECLLQRAALTFLQGSSHGGAVRPRALHDPSHACSCPPGPGRQHLFLLQDENMVSFIKGGIKVRNSYQTYKELDSLVQSSQYCKGENHPHFEGGVKLGVGAFNLTLSMLPTRILRLLEFVGFSGNKDYGLLQLEEGASGHSFRSVLCVMLLLCYHTFLTFVLGTGNVNIEEAEKLLKPYLNRYPKGAIFLFFAGRIEVIKGNIDAVSDGGPGRGWGSLGVSQTSRKSGTCDILRDRIDWGRGGGQERTNQRAGAGEALLAEQPGKTREEEAFVVPGILTGRYRTAALQWREVEGGA

SEQ ID NO: 6315 - DNA, 763 bp, Homo sapiens
cagctcacctgggccggctctctgcccagcaacctcccagcagtcagggctcctagcagctgccccctgccctgcccactggggcccaggaaaagcagagagttgctgaaggtctcccggcagtagcggctgtcactgctacggggggtgatctaggagtgaacgccacgaggcaggtggggaaggctgctctgaacgtgtctgtgactacagctccgtgagaaagttgggacccagaagatgaaaaatgagctcagtaagggaagcagaagagccgcctttagagctggaactctccccacaccatcacagcgaacagtgatgctagagccagtcacctggtgagtcagcgcatcagagtggcccacccctcaggagggccccacccaggccgttcctggcccccaggagctctggcccagccccagcacaggggagtctgtgagtcaccatcatcatttctgcctccccaactcaagtgaccttacttggatcacctgtgtgtccccaccttgaggtgacagctgggccctggcgatgggacagcatcctgagtcctggatgccttcctcctgtcaggagacctgtttcctggtgcgttacatctgggagatgccaggcctgctttcctccctcatttcctccccagcgtgcaagaacaaatcaccagtgtcaccacacctctcaatggccctgagaacttcatggactgctttcacctgtgccattgtcaacttaagaaggcccttaatatggccgggcg

SEQ ID NO: 6316 - protein, 34 aa, Homo sapiens
MKNELSKGSRRAAFRAGTLPTPSQRTVMLEPVTW

SEQ ID NO: 6317 - DNA, 554 bp, Homo sapiens
agagagttgctgaaggtctcccggcagtagcggctgtcactgctacggggggtgatctaggagtgaacgccacgaggcaggtggggaaggctgctctgaacgtgtctgtgactacagctccgtgagaaagttgggacccagaagcttccgccccgaagcggcccccacctgagccgtcaccatcctcccgcattaatgggggcattcgtgcagacaaagacagcccccagagtcaggcctggattttaatcccaccatctcgcccactgagtgactgcaggagaccagaaggcggggaaaacacggtttagcactcactgctagctggcagttcacactgccttctcaaatgatccccataattgctattttacagatggggaaactgaggcatggggttcatttgattcacgcatggtcactcacctaataagtggcaagctaggactggaatccatccctcctgaatccaaagccaacactctggcccctttcccccttggccccctctcccctgcattcccagtgcctgtgtgggggtcacccacaacgct

SEQ ID NO: 6318 - protein, 45 aa, Homo sapiens
MVTHLISGKLGLESIPPESKANTLAPFPLGPLSPAFPVPVWGSPT

SEQ ID NO: 6319 - DNA, 5229 bp, Homo sapiens
ggcctcgcctgcggccgctccctccgcctcctccccgccccgagccccagtcagcccgtcttccttcccctcccttgcatgatggaaacaccatggctgcggcggcccagctctctctgacacagttatcaagtgggaatcctgtatatgaaaaatactatagacaggttgatacaggcaatactggaagggtgttggcttctgatgctgctgctttcctgaaaaaatcagggcttccagacttgatacttggaaagatttgggatttagccgacacagatggcaaaggtatcctgaacaaacaagaattctttgttgctttgcgtcttgtggcatgtgcccagaatggattggaagtttcactaagtagtttgaacctggctgttcctccaccaagatttcatgataccagtagtcctttgctaatcagtggaacctctgcagctgagctcccatgggctgtaaaacctgaagataaggccaaatatgatgcaatatttgatagtttaagcccagtgaatggatttctgtctggtgataaagtgaaaccagtgttgctcaactctaagttacctgtggatatccttggaagagtttgggagttgagtgatattgaccatgatggaatgcttgacagagatgagtttgcagttgccatgtttttggtatactgtgcactggagaaagaacctgtgccaatgtccttgcctccagccttggtgccaccatctaagagaaaaacgtgggttgtatcccctgcagaaaaagctaaatatgatgaaatcttcctgaaaactgataaagatatggacggatttgtgtctggattggaggtccgtgaaatattcttgaaaacaggtttaccttctaccttactagcccatatatggtcattatgcgacacaaaggactgtgggaagctttcaaaggatcagtttgccttggcttttcacttaatcagtcagaagttaatcaagggcattgatcctcctcacgttcttactcctgaaatgattccaccatcagacagggccagtttacaaaagaacatcataggatcaagtcctgttgcagatttctctgctattaaggaactagatactcttaacaatgaaatagttgacctacagagggaaaagaataatgtggaacaggaccttaaggagaaggaagatactattaaacagaggacaagtgaggttcaggatcttcaagatgaagttcaaagggagaatactaatctgcaaaaactacaggcccagaaacagcaggtacaggaactccttgatgaactggatgagcagaaagcccagctggaggagcaactcaaggaagtcagaaagaaatgtgctgaggaggcccaactgatctcttctctgaaagctgaattaactagtcaggaatcgcagatctccacttacgaagaagaattggcaaaagctagagaagagctgagccgtctacagcaagaaacagcagaattggaggagagtgtagagtcagggaaggctcagttggaacctcttcagcagcacctacaagattcacaacaggaaattagttcaatgcaaatgaaactgatggaaatgaaagatttggaaaatcataatagtcagttaaattggtgcagtagcccacacagcattcttgtaaacggagctacagattattgcagcctcagcaccagcagcagtgaaacagccaaccttaatgaacatgttgaaggccagagcaacctagagtctgagcccatacaccaggaatctccagcaagaagtagtcctgaactactgccttctggtgtgactgatgaaaatgaggtgactacagctgttactgaaaaagtttgttctgaactcgacaataatagacattcaaaagaggaagatccatttaatgtagactcaagttcgctgacaggtccagttgcagatacaaacttggattttttccagtctgatccttttgttggcagtgatcctttcaaggatgatccttttggaaaaatcgatccatttggtggtgatcctttcaaaggttcagatccatttgcatcagactgtttcttcaggcaatctactgatccttttgccacttcaagcactgaccctttcagtgcagccaacaatagcagtattacatcggtagaaacgttgaagcacaatgatccttttgctcctggtggaacagttgttgcagcaagcgattcagccacagacccctttgcttctgtttttgggaatgaatcatttggaggtggatttgctgacttcagcacattgtcaaaggtcaacaatgaagatccttttcgttcagccacatcgagctctgtcagcaacgtagtgattacaaaaaatgtatttgaggaaacatcggtcaaaagtgaagatgaacccccagcactgccaccaaagatcggaactccaacaagaccctgccctctaccacctgggaaaagatccatcaacaaattggattctcctgatccctttaaactgaatgatccatttcagcctttcccaggcaacgatagccccaaagaaaaagatcctgaaatattttgtgatccattcacttctgctactaccactaccaataaagaggctgatccaagcaattttgccaacttcagtgcttatccctctgaagaagatatgatcgaatgggccaagagggaaagtgagagagaggaagagcagaggcttgcccgactaaatcagcaggaacaagaagacttagaactggctattgcactcagcaaatctgagatatcagaagcatgaagaattctcttgttctttggcaacaatatagtattcttcttcctgaatactgaaactatttacaatgtgtatcaaaactacctgtgagcatgggaatacaaaaggtttgagattcctgtaaatgtgacaaaattttaggattttttttttttcttcattacagattcgtctttttttttttttcttataaaagccgtaacccagtcagacaaattcaccttcacttaggcccctgttctggtatacatttactgtgagcttttgcctgcctgtgctattttacttgtaaagctagagcacccaagcttctgccttctggaatatagagaaatagtttcaccctgcactaccctgttctgtagttattctgatgatagccagtgaggttcttaaagtttgcagtattctcccctgattggaatggttgagtgagggtaagggaaagaatatcttatttcttttatgattggtgcaaattggctaaagtgcatttttaaatttcctctacttaatttgtttttcagagataaggaaaaatattttgcacagatttactccactatggaaaagggatgctgtaggttgaaccattatagcctcagattcgatcttttcctaactaaaaatattaaagcctcatgtgtgaaataaatttttaaaaagatttatctggatttagagaattttagatcaacagatacctctcagtgtgtttgctaattaataaaaatcagtttcttacaaataaagtttgtaagaaaatgttcattttaagtgatagatagtggagaaaatttatcacctaaaatatacccatcagtataaggcaagcaaaagtcttaacatggcagccattctgcctttgccgtggccctgtcctgtttagttcttagtgggttaatttttgtacttttgcagaagaaacttcagcaagctagaactggaaggtactttaatttttcatatatatttgtttttttttttttaatgaaggctcatttacttgaaatgtaaaaactttcactgaatacaaatagaaaaagtgatgtgttttatatcatattgctttttgtccatctttgtggtttagtttatttactcacttcatgtttttcacctataaaattgtcaagctagcaaaaaaactcttgtttttttaattgggagagaagagacctgccagattatcagacctcttcatgttaaaagaccatctcctgtaaaactgacctagtggacaagctgaatttgaaatagactgtgaagtaagctgtaacttgtcattttaattttgtttaacacggttactgacttagatgatgtattaaataccaagataaagaaaaatgcacctaaaatctaattagaattctctgggtcaacaagtcaaggtggtattgatctgtgttaatctgagtaacttattgcctagcctataaataaattccaaaatatccaattcatttcttcttgaaatggtgcttgttttgttttctttccattacacaattagactcctacagtttaaaacaaactttaaaccactatcttgcactgctaacttttttctacctttgtaaatagaaacatttctgcataaaagtcatacatatgaagcaagggctgaatcataatcacaaggcttaattttgataaacgaatccagtgacctaaggattttctgcaaaatttgactgggagttgtgataggtggtatttttgtttattttcttcctcttactccttaggataaaggtaagttgacttgaacaactttcttttgcactgggaaaataagcaaatgtttaaatgcttcaaaaaaattttcaattaaactcaaatattaaatatctataacttataaacaccaactttcaatgtaataaatgtatcctaatcttatgtatgtttaactggattacatagatttttatcttttgttaaaatgtgtataccccgtggaccaacataatattaaagtatgtatatattatataaatatatatgtatatgtgctcgcttgtgtaggatgaatgtcttagagtcgtttgtggtattttatgttgttgactctggctccagggcctgtgcttgaaaaggacagataagtattgcccagagctaagtggcactacttacaaagttttaaatgtcttctacatactgattcatgtttatttgagctctctttatagaattttctcttaaagtttcaaacctctaagttgtagcctgtaattatgagaacagtaaactttaagtaataataaagaatcccatccatatatccaatttgcaattgagttttgcatggttctctgattatgtccatgctgtgtccaaggaggagtaggtacatacaatcagcacagattaatatatgtaaagggtttgggacagcacctggtatagaataaataataaatgtaaactattatttttggtt

SEQ ID NO: 6320 - protein, 896 aa, Homo sapiens; identical to SEQ ID NO: 222

SEQ ID NO: 6321 - DNA, 5079 bp, Homo sapiens
ggcctcgcctgcggccgctccctccgcctcctccccgccccgagccccagtcagcccgtcttccttcccctcccttgcatgatggaaacaccatggctgcggcggcccagctctctctgacacagttatcaagtgggaatcctgtatatgaaaaatactatagacaggttgatacaggcaatactggaagggtgttggcttctgatgctgctgctttcctgaaaaaatcagggcttccagacttgatacttggaaagatttgggatttagccgacacagatggcaaaggtatcctgaacaaacaagaattctttgttgctttgcgtcttgtggcatgtgcccagaatggattggaagtttcactaagtagtttgaacctggctgttcctccaccaagatttcatgataccagtagtcctttgctaatcagtggaacctctgcagctgagctcccatgggctgtaaaacctgaagataaggccaaatatgatgcaatatttgatagtttaagcccagtgaatggatttctgtctggtgataaagtgaaaccagtgttgctcaactctaagttacctgtggatatccttggaagagtttgggagttgagtgatattgaccatgatggaatgcttgacagagatgagtttgcagttgccatgtttttggtatactgtgcactggagaaagaacctgtgccaatgtccttgcctccagccttggtgccaccatctaagagaaaaacgtgggttgtatcccctgcagaaaaagctaaatatgatgaaatcttcctgaaaactgataaagatatggacggatttgtgtctggattggaggtccgtgaaatattcttgaaaacaggtttaccttctaccttactagcccatatatggtcattatgcgacacaaaggactgtgggaagctttcaaaggatcagtttgccttggcttttcacttaatcagtcagaagttaatcaagggcattgatcctcctcacgttcttactcctgaaatgattccaccatcagacagggccagtttacaaaagaacatcataggatcaagtcctgttgcagatttctctgctattaaggaactagatactcttaacaatgaaatagttgacctacagagggaaaagaataatgtggaacaggaccttaaggagaaggaagatactattaaacagaggacaagtgaggttcaggatcttcaagatgaagttcaaagggagaatactaatctgcaaaaactacaggcccagaaacagcaggtacaggaactccttgatgaactggatgagcagaaagcccagctggaggagcaactcaaggaagtcagaaagaaatgtgctgaggaggcccaactgatctcttctctgaaagctgaattaactagtcaggaatcgcagatctccacttacgaagaagaattggcaaaagctagagaagagctgagccgtctacagcaagaaacagcagaattggaggagagtgtagagtcagggaaggctcagttggaacctcttcagcagcacctacaagattcacaacaggaaattagttcaatgcaaatgaaactgatggaaatgaaagatttggaaaatcataatagtcagttaaattggtgcagtagcccacacagcattcttgtaaacggagctacagattattgcagcctcagcaccagcagcagtgaaacagccaaccttaatgaacatgttgaaggccagagcaacctagagtctgagcccatacaccaggaatctccagcaagaagtagtcctgaactactgccttctggtgtgactgatgaaaatgaggtgactacagctgttactgaaaaagtttgttctgaactcgacaataatagacattcaaaagaggaagatccatttaatgtagactcaagttcgctgacaggtccagttgcagatacaaacttggattttttccagtctgatccttttgttggcagtgatcctttcaaggatgatccttttggaaaaatcgatccatttggtggtgatcctttcaaaggttcagatccatttgcatcagactgtttcttcaggcaatctactgatccttttgccacttcaagcactgaccctttcagtgcagccaacaatagcagtattacatcggtagaaacgttgaagcacaatgatccttttgctcctggtggaacagttgttgcagcaagcgattcagccacagacccctttgcttctgtttttgggaatgaatcatttggaggtggatttgctgacttcagcacattgtcaaaggtcaacaatgaagatccttttcgttcagccacatcgagctctgtcagcaacgtagtgattacaaaaaatgtatttgaggaaacatcggtcaaaagtgaagatgaacccccagcactgccaccaaagatcggaactccaacaagaccctgccctctaccacctgggaaaagatccatcaacaaattggattctcctgatccctttaaactgaatgatccatttcagcctttcccaggcaacgatagccccaaagaaaaagatcctgaaatattttgtgatccattcacttctgctactaccactaccaataaagaggctgatccaagcaattttgccaacttcagtgcttatccctctgaagaagatatgatcgaatgggccaagagggaaagtgagagagaggaagagcagaggcttgcccgactaaatcagcaggaacaagaagacttagaactggctattgcactcagcaaatctgagatatcagaagcatgaagaattctcttgttctttggcaacaatatagtattcttcttcctgaatactgaaactatttacaatgtgtatcaaaactacctgtgagcatgggaatacaaaaggtttgagattcctgtaaatgtgacaaaattttaggattttttttttttcttcattacagattcgtctttttttttttttcttataaaagccgtaacccagtcagacaaattcaccttcacttaggcccctgttctggtatacatttactgtgagcttttgcctgcctgtgctattttacttgtaaagctagagcacccaagcttctgccttctggaatatagagaaatagtttcaccctgcactaccctgttctgtagttattctgatgatagccagtgaggttcttaaagtttgcagtattctcccctgattggaatggttgagtgagggtaagggaaagaatatcttatttcttttatgattggtgcaaattggctaaagtgcatttttaaatttcctctacttaatttgtttttcagagataaggaaaaatattttgcacagatttactccactatggaaaagggatgctgtaggttgaaccattatagcctcagattcgatcttttcctaactaaaaatattaaagcctcatgtgtgaaataaatttttaaaaagatttatctggatttagagaattttagatcaacagatacctctcagtgtgtttgctaattaataaaaatcagtttcttacaaataaagtttgtaagaaaatgttcattttaagtgatagatagtggagaaaatttatcacctaaaatatacccatcagtataaggcaagcaaaagtcttaacatggcagccattctgcctttgccgtggccctgtcctgtttagttcttagtgggttaatttttgtacttttgcagaagaaacttcagcaagctagaactggaaggtactttaatttttcatatatatttgtttttttttttttaatgaaggctcatttacttgaaatgtaaaaactttcactgaatacaaatagaaaaagtgatgtgttttatatcatattgctttttgtccatctttgtggtttagtttatttactcacttcatgtttttcacctataaaattgtcaagctagcaaaaaaactcttgtttttttaattgggagagaagagacctgccagattatcagacctcttcatgttaaaagaccatctcctgtaaaactgacctagtggacaagctgaatttgaaatagactgtgaagtaagctgtaacttgtcattttaattttgtttaacacggttactgacttagatgatgtattaaataccaagataaagaaaaatgcacctaaaatctaattagaattctctgggtcaacaagtcaaggtggtattgatctgtgttaatctgagtaacttattgcctagcctataaataaattccaaaatatccaattcatttcttcttgaaatggtgcttgttttgttttctttccattacacaattagactcctacagtttaaaacaaactttaaaccactatcttgcactgctaacttttttctacctttgtaaatagaaacatttctgcataaaagtcatacatatgaagcaagggctgaatcataatcacaaggcttaattttgataaacgaatccagtgacctaaggattttctgcaaaatttgactgggagttgtgataggtggtatttttgtttattttcttcctcttactccttaggataaaggtaagttgacttgaacaactttcttttgcactgggaaaataagcaaatgtttaaatgcttcaaaaaaattttcaattaaactcaaatattaaatatctataacttataaacaccaactttcaatgtaataaatgtatcctaatcttatgtatgtttaactggattacatagatttttatcttttgttaaaatgtgtataccccgtggaccaacataatattaaagtatgtatatattatataaatatatatgtatatgtgctcgcttgtgtaggatgaatgtcttagagtcgtttgtggtattttatgttgttgactctggctccagggcctgtgcttgaaaaggacagataagtattgcccagagctaagtggcactacttacaaagttttaaatgtcttctacatactgattcatgtttatttgagctctctttatagaattttctcttaaagtttcaaacctctaagttgtagcctgtaattatgagaacagtaaactttaagtaataataaagaatcccatccatatatccaatttg

SEQ ID NO: 6322 - protein, 896 aa, Homo sapiens; identical to SEQ ID NO: 222

SEQ ID NO: 6323 - DNA, 3893 bp, Homo sapiens
tccttttttaatctatcctcttttcaccacattttagtgagaaagcaattttttttttacaaatggagcttatattgatttttatttcataaataattgaaagagggtagaaaaatctgcccttcatttaaaaattgaatgtttcactatgtatttaaaaagcgattcaggattaggaggatggataaccataccagctgtagctgatgttctaaaatattcttgcattgtttgctggtcttctagggaaaagaataatgtggaacaggaccttaaggagaaggaagatactattaaacagaggacaagtgaggttcaggatcttcaagatgaagttcaaagggagaatactaatctgcaaaaactacaggcccagaaacagcaggtacaggaactccttgatgaactggatgagcagaaagcccagctggaggagcaactcaaggaagtcagaaagaaatgtgctgaggaggcccaactgatctcttctctgaaagctgaattaactagtcaggaatcgcagatctccacttacgaagaagaattggcaaaagctagagaagagctgagccgtctacagcaagaaacagcagaattggaggagagtgtagagtcagggaaggctcagttggaacctcttcagcagcacctacaagattcacaacaggaaattagttcaatgcaaatgaaactgatggaaatgaaagatttggaaaatcataatagtcagttaaattggtgcagtagcccacacagcattcttgtaaacggagctacagattattgcagcctcagcaccagcagcagtgaaacagccaaccttaatgaacatgttgaaggccagagcaacctagagtctgagcccatacaccaggaatctccagcaagaagtagtcctgaactactgccttctggtgtgactgatgaaaatgaggtgactacagctgttactgaaaaagtttgttctgaactcgacaataatagacattcaaaagaggaagatccatttaatgtagactcaagttcgctgacaggtccagttgcagatacaaacttggattttttccagtctgatccttttgttggcagtgatcctttcaaggatgatccttttggaaaaatcgatccatttggtggtgatcctttcaaaggttcagatccatttgcatcagactgtttcttcaggcaatctactgatccttttgccacttcaagcactgaccctttcagtgcagccaacaatagcagtattacatcggtagaaacgttgaagcacaatgatccttttgctcctggtggaacagttgttgcagcaagcgattcagccacagacccctttgcttctgtttttgggaatgaatcatttggaggtggatttgctgacttcagcacattgtcaaaggtcaacaatgaagatccttttcgttcagccacatcgagctctgtcagcaacgtagtgattacaaaaaatgtatttgaggaaacatcggtcaaaagtgaagatgaacccccagcactgccaccaaagatcggaactccaacaagaccctgccctctaccacctgggaaaagatccatcaacaaattggattctcctgatccctttaaactgaatgatccatttcagcctttcccaggcaacgatagccccaaagaaaaagatcctgaaatattttgtgatccattcacttctgctactaccactaccaataaagaggctgatccaagcaattttgccaacttcagtgcttatccctctgaagaagatatgatcgaatgggccaagagggaaagtgagagagaggaagagcagaggcttgcccgactaaatcagcaggaacaagaagacttagaactggctattgcactcagcaaatctgagatatcagaagcatgaagaattctcttgttctttggcaacaatatagtattcttcttcctgaatactgaaactatttacaatgtgtatcaaaactacctgtgagcatgggaatacaaaaggtttgagattcctgtaaatgtgacaaaattttaggattttttttttttcttcattacagattcgtctttttttttttttcttataaaagccgtaacccagtcagacaaattcaccttcacttaggcccctgttctggtatacatttactgtgagcttttgcctgcctgtgctattttacttgtaaagctagagcacccaagcttctgccttctggaatatagagaaatagtttcaccctgcactaccctgttctgtagttattctgatgatagccagtgaggttcttaaagtttgcagtattctcccctgattggaatggttgagtgagggtaagggaaagaatatcttatttcttttatgattggtgcaaattggctaaagtgcatttttaaatttcctctacttaatttgtttttcagagataaggaaaaatattttgcacagatttactccactatggaaaagggatgctgtaggttgaaccattatagcctcagattcgatcttttcctaactaaaaatattaaagcctcatgtgtgaaataaatttttaaaaagatttatctggatttagagaattttagatcaacagatacctctcagtgtgtttgctaattaataaaaatcagtttcttacaaataaagtttgtaagaaaatgttcattttaagtgatagatagtggagaaaatttatcacctaaaatatacccatcagtataaggcaagcaaaagtcttaacatggcagccattctgcctttgccgtggccctgtcctgtttagttcttagtgggttaatttttgtacttttgcagaagaaacttcagcaagctagaactggaaggtactttaatttttcatatatatttgtttttttttttttaatgaaggctcatttacttgaaatgtaaaaactttcactgaatacaaatagaaaaagtgatgtgttttatatcatattgctttttgtccatctttgtggtttagtttatttactcacttcatgtttttcacctataaaattgtcaagctagcaaaaaaactcttgtttttttaattgggagagaagagacctgccagattatcagacctcttcatgttaaaagaccatctcctgtaaaactgacctagtggacaagctgaatttgaaatagactgtgaagtaagctgtaacttgtcattttaattttgtttaacacggttactgacttagatgatgtattaaataccaagataaagaaaaatgcacctaaaatctaattagaattctctgggtcaacaagtcaaggtggtattgatctgtgttaatctgagtaacttattgcctagcctataaataaattccaaaatatccaattcatttcttcttgaaatggtgcttgttttgttttctttccattacacaattagactcctacagtttaaaacaaactttaaaccactatcttgcactgctaacttttttctacctttgtaaatagaaacatttctgcataaaagtcatacatatgaagcaagggctgaatcataatcacaaggcttaattttgataaacgaatccagtgacctaaggattttctgcaaaatttgactgggagttgtgataggtggtatttttgtttattttcttcctcttactccttaggataaaggtaagttgacttgaacaactttcttttgcactgggaaaataagcaaatgtttaaatgcttcaaaaaaattttcaattaaactcaaatattaaatatctataacttataaacaccaactttcaatgtaataaatgtatcctaatcttatgtatgtttaactggattacatagatttttatcttttgttaaaatgtgtataccccgtggaccaacataatattaaagtatgtatatattatat

SEQ ID NO: 6324 - protein, 582 aa, Homo sapiens
MYLKSDSGLGGWITIPAVADVLKYSCIVCWSSREKNNVEQDLKEKEDTIKQRTSEVQDLQDEVQRENTNLQKLQAQKQQVQELLDELDEQKAQLEEQLKEVRKKCAEEAQLISSLKAELTSQESQISTYEEELAKAREELSRLQQETAELEESVESGKAQLEPLQQHLQDSQQEISSMQMKLMEMKDLENHNSQLNWCSSPHSILVNGATDYCSLSTSSSETANLNEHVEGQSNLESEPIHQESPARSSPELLPSGVTDENEVTTAVTEKVCSELDNNRHSKEEDPFNVDSSSLTGPVADTNLDFFQSDPFVGSDPFKDDPFGKIDPFGGDPFKGSDPFASDCFFRQSTDPFATSSTDPFSAANNSSITSVETLKHNDPFAPGGTVVAASDSATDPFASVFGNESFGGGFADFSTLSKVNNEDPFRSATSSSVSNVVITKNVFEETSVKSEDEPPALPPKIGTPTRPCPLPPGKRSINKLDSPDPFKLNDPFQPFPGNDSPKEKDPEIFCDPFTSATTTTNKEADPSNFANFSAYPSEEDMIEWAKRESEREEEQRLARLNQQEQEDLELAIALSKSEISEA

SEQ ID NO: 6325 - DNA, 4779 bp, Homo sapiens
ggcctcgcctgcggccgctccctccgcctcctccccgccccgagccccagtcagcccgtcttccttcccctcccttgcatgatggaaacaccatggctgcggcggcccagctctctctgacacagttatcaagtgggaatcctgtatatgaaaaatactatagacaggttgatacaggcaatactggaagggtgttggcttctgatgctgctgctttcctgaaaaaatcagggcttccagacttgatacttggaaagatttgggatttagccgacacagatggcaaaggtatcctgaacaaacaagaattctttgttgctttgcgtcttgtggcatgtgcccagaatggattggaagtttcactaagtagtttgaacctggctgttcctccaccaagatttcatgataccagtagtcctttgctaatcagtggaacctctgcagctgagctcccatgggctgtaaaacctgaagataaggccaaatatgatgcaatatttgatagtttaagcccagtgaatggatttctgtctggtgataaagtgaaaccagtgttgctcaactctaagttacctgtggatatccttggaagagtttgggagttgagtgatattgaccatgatggaatgcttgacagagatgagtttgcagttgccatgtttttggtatactgtgcactggagaaagaacctgtgccaatgtccttgcctccagccttggtgccaccatctaagagaaaaacgtgggttgtatcccctgcagaaaaagctaaatatgatgaaatcttcctgaaaactgataaagatatggacggatttgtgtctggattggaggtccgtgaaatattcttgaaaacaggtttaccttctaccttactagcccatatatggtcattatgcgacacaaaggactgtgggaagctttcaaaggatcagtttgccttggcttttcacttaatcagtcagaagttaatcaagggcattgatcctcctcacgttcttactcctgaaatgattccaccatcagacagggccagtttacaaaagaacatcataggatcaagtcctgttgcagatttctctgctattaaggaactagatactcttaacaatgaaatagttgacctacagagggaaaagaataatgtggaacaggaccttaaggagaaggaagatactattaaacagaggacaagtgaggttcaggatcttcaagatgaagttcaaagggagaatactaatctgcaaaaactacaggcccagaaacagcaggtacaggaactccttgatgaactggatgagcagaaagcccagctggaggagcaactcaaggaagtcagaaagaaatgtgctgaggaggcccaactgatctcttctctgaaagctgaattaactagtcaggaatcgcagatctccacttacgaagaagaattggcaaaagctagagaagagctgagccgtctacagcaagaaacagcagaattggaggagagtgtagagtcagggaaggctcagttggaacctcttcagcagcacctacaagattcacaacaggaaattagttcaatgcaaatgaaactgatggaaatgaaagatttggaaaatcataatagtcagttaaattggtgcagtagcccacacagcattcttgtaaacggagctacagattattgcagcctcagcaccagcagcagtgaaacagccaaccttaatgaacatgttgaaggccagagcaacctagagtctgagcccatacaccaggaatctccagcaagaagtagtcctgaactactgccttctggtgtgactgatgaaaatgaggtgactacagctgttactgaaaaagtttgttctgaactcgacaataatagacattcaaaagaggaagatccatttaatgtagactcaagttcgctgacaggtccagttgcagatacaaacttggattttttccagtctgatccttttgttggcagtgatcctttcaaggatgatccttttggaaaaatcgatccatttggtggtgatcctttcaaaggttcagatccatttgcatcagactgtttcttcaggcaatctactgatccttttgccacttcaagcactgaccctttcagtgcagccaacaatagcagtattacatcggtagaaacgttgaagcacaatgatccttttgctcctggtggaacagttgttgcagcaagcgattcagccacagacccctttgcttctgtttttgggaatgaatcatttggaggtggatttgctgacttcagcacattgtcaaaggtcaacaatgaagatccttttcgttcagccacatcgagctctgtcagcaacgtagtgattacaaaaaatgtatttgaggaaacatcggtcaaaagtgaagatgaacccccagcactgccaccaaagatcggaactccaacaagaccctgccctctaccacctgggaaaagatccatcaacaaattggattctcctgatccctttaaactgaatgatccatttcagcctttcccaggcaacgatagccccaaagaaaaagatcctgaaatattttgtgatccattcacttctgctactaccactaccaataaagaggctgatccaagcaattttgccaacttcagtgcttatccctctgaagaagatatgatcgaatgggccaagagggaaagtgagagagaggaagagcagaggcttgcccgactaaatcagcaggaacaagaagacttagaactggctattgcactcagcaaatctgagatatcagaagcatgaagaattctcttgttctttggcaacaatatagtattcttcttcctgaatactgaaactatttacaatgtgtatcaaaactacctgtgagcatgggaatacaaaaggtttgagattcctgtaaatgtgacaaaattttaggattttttttttttcttcattacagattcgtctttttttttttttcttataaaagccgtaacccagtcagacaaattcaccttcacttaggcccctgttctggtatacatttactgtgagcttttgcctgcctgtgctattttacttgtaaagctagagcacccaagcttctgccttctggaatatagagaaatagtttcaccctgcactaccctgttctgtagttattctgatgatagccagtgaggttcttaaagtttgcagtattctcccctgattggaatggttgagtgagggtaagggaaagaatatcttatttcttttatgattggtgcaaattggctaaagtgcatttttaaatttcctctacttaatttgtttttcagagataaggaaaaatattttgcacagatttactccactatggaaaagggatgctgtaggttgaaccattatagcctcagattcgatcttttcctaactaaaaatattaaagcctcatgtgtgaaataaatttttaaaaagatttatctggatttagagaattttagatcaacagatacctctcagtgtgtttgctaattaataaaaatcagtttcttacaaataaagtttgtaagaaaatgttcattttaagtgatagatagtggagaaaatttatcacctaaaatatacccatcagtataaggcaagcaaaagtcttaacatggcagccattctgcctttgccgtggccctgtcctgtttagttcttagtgggttaatttttgtacttttgcagaagaaacttcagcaagctagaactggaaggtactttaatttttcatatatatttgtttttttttttttaatgaaggctcatttacttgaaatgtaaaaactttcactgaatacaaatagaaaaagtgatgtgttttatatcatattgctttttgtccatctttgtggtttagtttatttactcacttcatgtttttcacctataaaattgtcaagctagcaaaaaaactcttgtttttttaattgggagagaagagacctgccagattatcagacctcttcatgttaaaagaccatctcctgtaaaactgacctagtggacaagctgaatttgaaatagactgtgaagtaagctgtaacttgtcattttaattttgtttaacacggttactgacttagatgatgtattaaataccaagataaagaaaaatgcacctaaaatctaattagaattctctgggtcaacaagtcaaggtggtattgatctgtgttaatctgagtaacttattgcctagcctataaataaattccaaaatatccaattcatttcttcttgaaatggtgcttgttttgttttctttccattacacaattagactcctacagtttaaaacaaactttaaaccactatcttgcactgctaacttttttctacctttgtaaatagaaacatttctgcataaaagtcatacatatgaagcaagggctgaatcataatcacaaggcttaattttgataaacgaatccagtgacctaaggattttctgcaaaatttgactgggagttgtgataggtggtatttttgtttattttcttcctcttactccttaggataaaggtaagttgacttgaacaactttcttttgcactgggaaaataagcaaatgtttaaatgcttcaaaaaaattttcaattaaactcaaatattaaatatctataacttataaacaccaactttcaatgtaataaatgtatcctaatcttatgtatgtttaactggattacatagatttttatcttttgttaaaatgtgtataccccgtggaccaacataatattaaagtatgtatatattatat

SEQ ID NO: 6326 - protein, 896 aa, Homo sapiens; identical to SEQ ID NO: 222

SEQ ID NO: 6327 - DNA, 3111 bp, Homo sapiens
agtgagaaagcaattttttttttacaaatggagcttatattgatttttatttcataaataattgaaagagggtagaaaaatctgcccttcatttaaaaattgaatgtttcactatgtatttaaaaagcgattcaggattaggaggatggataaccataccagctgtagctgatgttctaaaatattcttgcattgtttgctggtcttctagggaaaagaataatgtggaacaggaccttaaggagaaggaagatactattaaacagaggacaagtgaggttcaggatcttcaagatgaagttcaaagggagaatactaatctgcaaaaactacaggcccagaaacagcaggtacaggaactccttgatgaactggatgagcagaaagcccagctggaggagcaactcaaggaattggcagatgcaaatgaaactgatggaaatgaaagatttggaaaatcataatagtcagttaaattggtgcagtagcccacacagcattcttgtaaacggagctacagattattgcagcctcagcaccagcagcagtgaaacagccaaccttaatgaacatgttgaaggccagagcaacctagagtctgagcccatacaccaggaatctccagcaagaagtagtcctgaactactgccttctggtgtgactgatgaaaatgaggtgactacagctgttactgaaaaagtttgttctgaactcgacaataatagacattcaaaagaggaagatccatttaatgtagactcaagttcgctgacaggtccagttgcagatacaaacttggattttttccagtctgatccttttgttggcagtgatcctttcaaggatgatccttttggaaaaatcgatccatttggtggtgatcctttcaaaggttcagatccatttgcatcagactgtttcttcaggcaatctactgatccttttgccacttcaagcactgaccctttcagtgcagccaacaatagcagtattacatcggtagaaacgttgaagcacaatgatccttttgctcctggtggaacagttgttgcagcaagcgattcagccacagacccctttgcttctgtttttgggaatgaatcatttggaggtggatttgctgacttcagcacattgtcaaaggtcaacaatgaagatccttttcgttcagccacatcgagctctgtcagcaacgtagtgattacaaaaaatgtatttgaggaaacatcggtcaaaagtgaagatgaacccccagcactgccaccaaagatcggaactccaacaagaccctgccctctaccacctgggaaaagatccatcaacaaattggattctcctgatccctttaaactgaatgatccatttcagcctttcccaggcaacgatagccccaaagaaaaagatcctgaaatattttgtgatccattcacttctgctactaccactaccaataaagaggctgatccaagcaattttgccaacttcagtgcttatccctctgaagaagatatgatcgaatgggccaagagggaaagtgagagagaggaagagcagaggcttgcccgactaaatcagcaggaacaagaagacttagaactggctattgcactcagcaaatctgagatatcagaagcatgaagaattctcttgttctttggcaacaatatagtattcttcttcctgaatactgaaactatttacaatgtgtatcaaaactacctgtgagcatgggaatacaaaaggtttgagattcctgtaaatgtgacaaaattttaggattttttttttttcttcattacagattcgtctttttttttttttcttataaaagccgtaacccagtcagacaaattcaccttcacttaggcccctgttctggtatacatttactgtgagcttttgcctgcctgtgctattttacttgtaaagctagagcacccaagcttctgccttctggaatatagagaaatagtttcaccctgcactaccctgttctgtagttattctgatgatagccagtgaggttcttaaagtttgcagtattctcccctgattggaatggttgagtgagggtaagggaaagaatatcttatttcttttatgattggtgcaaattggctaaagtgcatttttaaatttcctctacttaatttgtttttcagagataaggaaaaatattttgcacagatttactccactatggaaaagggatgctgtaggttgaaccattatagcctcagattcgatcttttcctaactaaaaatattaaagcctcatgtgtgaaataaatttttaaaaagatttatctggatttagagaattttagatcaacagatacctctcagtgtgtttgctaattaataaaaatcagtttcttacaaataaagtttgtaagaaaatgttcattttaagtgatagatagtggagaaaatttatcacctaaaatatacccatcagtataaggcaagcaaaagtcttaacatggcagccattctgcctttgccgtggccctgtcctgtttagttcttagtgggttaatttttgtacttttgcagaagaaacttcagcaagctagaactggaaggtactttaatttttcatatatatttgtttttttttttttaatgaaggctcatttacttgaaatgtaaaaactttcactgaatacaaatagaaaaagtgatgtgttttatatcatattgctttttgtccatctttgtggtttagtttatttactcacttcatgtttttcacctataaaattgtcaagctagcaaaaaaactcttgtttttttaattgggagagaagagacctgccagattatcagacctcttcatgttaaaagaccatctcctgtaaaactgacctagtggacaagctgaatttgaaatagactgtgaagtaagctgtaacttgtcattttaattttgtttaacacggttactgacttagatgatgtattaaataccaagataaagaaaaatgcacctaaaatctaattagaattctctgggtcaacaagtcaaggtggtattgatctgtgttaatctgagtaacttattgcctagcctataaataaattccaaaatatccaattcatttcttcttg

SEQ ID NO: 6328 - protein, 471 aa, Homo sapiens [sequence omitted]

SEQ ID NO: 6329 - DNA, 4256 bp, Homo sapiens
ggcctcgcctgcggccgctccctccgcctcctccccgccccgagccccagtcagcccgtcttccttcccctcccttgcatgatggaaacaccatggctgcggcggcccagctctctctgacacagttatcaagtgggaatcctgtatatgaaaaatactatagacaggttgatacaggcaatactggaagggtgttggcttctgatgctgctgctttcctgaaaaaatcagggcttccagacttgatacttggaaagatttgggatttagccgacacagatggcaaaggtatcctgaacaaacaagaattctttgttgctttgcgtcttgtggcatgtgcccagaatggattggaagtttcactaagtagtttgaacctggctgttcctccaccaagatttcatgataccagtagtcctttgctaatcagtggaacctctgcagctgagctcccatgggctgtaaaacctgaagataaggccaaatatgatgcaatatttgatagtttaagcccagtgaatggatttctgtctggtgataaagtgaaaccagtgttgctcaactctaagttacctgtggatatccttggaagagtttgggagttgagtgatattgaccatgatggaatgcttgacagagatgagtttgcagttgccatgtttttggtatactgtgcactggagaaagaacctgtgccaatgtccttgcctccagccttggtgccaccatctaagagaaaaacgtgggttgtatcccctgcagaaaaagctaaatatgatgaaatcttcctgaaaactgataaagatatggacggatttgtgtctggattggaggtccgtgaaatattcttgaaaacaggtttaccttctaccttactagcccatatatggtcattatgcgacacaaaggactgtgggaagctttcaaaggatcagtttgccttggcttttcacttaatcagtcagaagttaatcaagggcattgatcctcctcacgttcttactcctgaaatgattccaccatcagacagggccagtttacaaaagaacatcataggatcaagtcctgttgcagatttctctgctattaaggaactagatactcttaacaatgaaatagttgacctacagagggaaaagaataatgtggaacaggaccttaaggagaaggaagatactattaaacagaggacaagtgaggttcaggatcttcaagatgaagttcaaagggagaatactaatctgcaaaaactacaggcccagaaacagcaggtacaggaactccttgatgaactggatgagcagaaagcccagctggaggagcaactcaaggaagtcagaaagaaatgtgctgaggaggcccaactgatctcttctctgaaagctgaattaactagtcaggaatcgcagatctccacttacgaagaagaattggcaaaagctagagaagagctgagccgtctacagcaagaaacagcagaattggaggagagtgtagagtcagggaaggctcagttggaacctcttcagcagcacctacaagattcacaacaggaaattagttcaatgcaaatgaaactgatggaaatgaaagatttggaaaatcataatagtcagttaaattggtgcagtagcccacacagcattcttgtaaacggagctacagattattgcagcctcagcaccagcagcagtgaaacagccaaccttaatgaacatgttgaaggccagagcaacctagagtctgagcccatacaccaggaatctccagcaagaagtagtcctgaactactgccttctggtgtgactgatgaaaatgaggtgactacagctgttactgaaaaagtttgttctgaactcgacaataatagacattcaaaagaggaagatccatttaatgtagactcaagttcgctgacaggtccagttgcagatacaaacttggattttttccagtctgatccttttgttggcagtgatcctttcaaggatgatccttttggaaaaatcgatccatttggtggtgatcctttcaaaggttcagatccatttgcatcagactgtttcttcaggcaatctactgatccttttgccacttcaagcactgaccctttcagtgcagccaacaatagcagtattacatcggtagaaacgttgaagcacaatgatccttttgctcctggtggaacagttgttgcagcaagcgattcagccacagacccctttgcttctgtttttgggaatgaatcatttggaggtggatttgctgacttcagcacattgtcaaaggtcaacaatgaagatccttttcgttcagccacatcgagctctgtcagcaacgtagtgattacaaaaaatgtatttgaggaaacatcggtcaaaagtgaagatgaacccccagcactgccaccaaagatcggaactccaacaagaccctgccctctaccacctgggaaaagatccatcaacaaattggattctcctgatccctttaaactgaatgatccatttcagcctttcccaggcaacgatagccccaaagaaaaagatcctgaaatattttgtgatccattcacttctgctactaccactaccaataaagaggctgatccaagcaattttgccaacttcagtgcttatccctctgaagaagatatgatcgaatgggccaagagggaaagtgagagagaggaagagcagaggcttgcccgactaaatcagcaggaacaagaagacttagaactggctattgcactcagcaaatctgagatatcagaagcatgaagaattctcttgttctttggcaacaatatagtattcttcttcctgaatactgaaactatttacaatgtgtatcaaaactacctgtgagcatgggaatacaaaaggtttgagattcctgtaaatgtgacaaaattttaggattttttttttttcttcattacagattcgtctttttttttttttcttataaaagccgtaacccagtcagacaaattcaccttcacttaggcccctgttctggtatacatttactgtgagcttttgcctgcctgtgctattttacttgtaaagctagagcacccaagcttctgccttctggaatatagagaaatagtttcaccctgcactaccctgttctgtagttattctgatgatagccagtgaggttcttaaagtttgcagtattctcccctgattggaatggttgagtgagggtaagggaaagaatatcttatttcttttatgattggtgcaaattggctaaagtgcatttttaaatttcctctacttaatttgtttttcagagataaggaaaaatattttgcacagatttactccactatggaaaagggatgctgtaggttgaaccattatagcctcagattcgatcttttcctaactaaaaatattaaagcctcatgtgtgaaataaatttttaaaaagatttatctggatttagagaattttagatcaacagatacctctcagtgtgtttgctaattaataaaaatcagtttcttacaaataaagtttgtaagaaaatgttcattttaagtgatagatagtggagaaaatttatcacctaaaatatacccatcagtataaggcaagcaaaagtcttaacatggcagccattctgcctttgccgtggccctgtcctgtttagttcttagtgggttaatttttgtacttttgcagaagaaacttcagcaagctagaactggaaggtactttaatttttcatatatatttgtttttttttttttaatgaaggctcatttacttgaaatgtaaaaactttcactgaatacaaatagaaaaagtgatgtgttttatatcatattgctttttgtccatctttgtggtttagtttatttactcacttcatgtttttcacctataaaattgtcaagctagcaaaaaaactcttgtttttttaattgggagagaagagacctgccagattatcagacctcttcatgttaaaagaccatctcctgtaaaactgacctagtggacaagctgaatttgaaatagactgtgaagtaagctgtaacttgtcattttaattttgtttaacacggttactgacttagatgatgtattaaataccaagataaagaaaaatgcacctaaaatctaattagaattctctgggtcaacaagtcaaggtggtattgatctgtgttaatctgagtaacttattgcctagcctataaataaattccaaaatatccaattcatttcttcttg

SEQ ID NO: 6330 - protein, 896 aa, Homo sapiens; identical to SEQ ID NO: 222

SEQ ID NO: 6331 - DNA, 723 bp, Homo sapiens
tccttttttaatctatcctcttttcaccacattttagtgagaaagcaattttttttttacaaatggagcttatattgatttttatttcataaataattgaaagagggtagaaaaatctgcccttcatttaaaaattgaatgtttcactatgtatttaaaaagcgattcaggattaggaggatggataaccataccagctgtagctgatgttctaaaatattcttgcattgtttgctggtcttctagggaaaagaataatgtggaacaggaccttaaggagaaggaagatactattaaacagaggacaagtgaggttcaggatcttcaagatgaagttcaaagggagaatactaatctgcaaaaactacaggcccagaaacagcaggtacaggaactccttgatgaactggatgagcagaaagcccagctggaggagcaactcaaggaagtcagaaagaaatgtgctgaggaggcccaactgatctcttctctgaaagctgaattaactagtcaggaatcgcagatctccacttacgaagaagaattggcaaaagctagagaagagctgagccgtctacagcaagaaacagcagaattggaggagagtgtagagtcagggaaggctcagttggaacctcttcagcagcacctacaagattcacaacaggaaattagttcagcaagaagtagtcctgaactactgccttctggtgtgactgatga

SEQ ID NO: 6332 - protein, 190 aa, Homo sapiens
MYLKSDSGLGGWITIPAVADVLKYSCIVCWSSREKNNVEQDLKEKEDTIKQRTSEVQDLQDEVQRENTNLQKLQAQKQQVQELLDELDEQKAQLEEQLKEVRKKCAEEAQLISSLKAELTSQESQISTYEEELAKAREELSRLQQETAELEESVESGKAQLEPLQQHLQDSQQEISSARSSPELLPSGVT

SEQ ID NO: 6333 - DNA, 650 bp, Homo sapiens
gggcaacatagcaagaccctgtctctacaaaaaagaaagaaagaaagaaagaaaattggatttttttggtaagctaaatggaatttatagctaccaggtatggagagttacttatagaagtttttgtccttatttgtaataaaataaatattttattatctgctttgtgagttatggggggggcctttttgtgaattttttgattccttatgatgtatgacatgagtcccttaagttgtggaaaaggctgaaagtgatgccacccagaaggataaaggttactgaatatgcatttttgctctttgctatataactgtacctcagttatggaatactgtgttgtttcatgctttctttcacctatgcagactgctttttttttttctgccttcttcattttataacctattcaattgcctaccaacacaaattttagatatgacagaaatttctgaagcaaattaaaagtttgaagtctatgttagtagatgcttgaagttgcatgaggtatagtttttaatttagtagatttgtctgaagttcattcactagatcatagatacgtttgtctatttatgtcagataccagtattattcattgaaatgggaatttatcactgctatcttatctattaacccaaaattttaac

SEQ ID NO: 6334 - protein, 38 aa, Homo sapiens
MHFCSLLYNCTSVMEYCVVSCFLSPMQTAFFFSAFFIL

SEQ ID NO: 6335 - DNA, 402 bp, Homo sapiens
acttgttaaccattttgtcacatttgctttctccctgtatccatattcttcagaattttttcctagttttaaactctagcttgtgtgattttaatactgcttctcctgttccctctttttttgaattacctgatatttcttatgtttgttgtgtatgtctcttgaaaatggcagatttctgtattttaatgctttacctaattggatagtttttaagataatagcacttatattgatttgattttcccttctttaccgatttattttacatttttattttctctgtttcttactgttgcttattatcaacttgtgattcattcccatccccaagataggataatattccagaatctggaaaaaaaaaaaaaaaaaaaaaaaaagataatattccaaaatccg

SEQ ID NO: 6336 - protein, 61 aa, Homo sapiens
DNSTYIDLIFPSLPIYFTFLFSLFLTVAYYQLVIHSHPQDRIIFQNLEKKKKKKKKIIFQN

SEQ ID NO: 6337 - DNA, 1828 bp, Homo sapiens
ccgcctcctccccgccccgagccccagtcagcccgtcttccttcccctcccttgcatgatggaaacaccatggctgcggcggcccagctctctctgacacagttatcaagtgggaatcctgtatatgaaaaatactatagacaggttgatacaggcaatactggaagggtgttggcttctgatgctgctgctttcctgaaaaaatcagggcttccagacttgatacttggaaagatttgggatttagccgacacagatggcaaaggtatcctgaacaaacaagaattctttgttgctttgcgtcttgtggcatgtgcccagaatggattggaagtttcactaagtagtttgaacctggctgttcctccaccaagatttcatgataccagtagtcctttgctaatcagtggaacctctgcagctgagctcccatgggctgtaaaacctgaagataaggccaaatatgatgcaatatttgatagtttaagcccagtgaatggatttctgtctggtgataaagtgaaaccagtgttgctcaactctaagttacctgtggatatccttggaagagtttgggagttgagtgatattgaccatgatggaatgcttgacagagatgagtttgcagttacggagtctcactctgtcactcaggctggagtgcagtggcgggatctcagctcactgcagcctcggcctcctggattcaagttattcttccacctcagcctcctgaggagctgggattacaggcatgcaccaccacccccggctaatttttatatttttagtagagacagcgtttcgccgtgtttgccagactggtctcgagctcctgataataggtgatccactcgcctcggcctcccaaagtgccgggattacaggcatgagccacctcttcaggcccaagacaaaaatatagttagagtagatggggaatagtagtgtcatcatttgataaacagtagtgcatgctaaggtaaatgaataaacacaatttatcttatatgcctggagcctattcccaggtaactggccttttttttttttaataaaaagctttattaaaaataatttttgaataataaatacatttgtaggaaattactaccttgaattttgttttaaatagtagacacccctttatcttctcctagatttacttgttaaccattttgtcacatttgctttctccctgtatccatattcttcagaattttttcctagttttaaactctagcttgtgtgattttaatactgcttctcctgttccctctttttttgaattacctgatatttcttatgtttgttgtgtatgtctcttgaaaatggcagatttctgtattttaatgctttacctaattggatagtttttaagataatagcacttatattgatttgattttcccttctttaccgatttattttacatttttattttctctgtttcttactgttgcttattatcaacttgtgattcattcccttaccccgcctcccagttaatgtggaaattttgttataatgtcttgtttcattaatatagttaatacaggttgagcatccctaatctgaaaatccaaaacttgaaatgcttcaaaatctgaaacttttgagtactgacatgacccacaaagtggaaaattccactcctggtctcatgtgataagttacagtcaaaacttttgtttcatgcacaaaattattaaaaagattgtataaaattatcttagattatgtgtataaagtttatatgaaacataaatgaatttcatgtttagacttgggtcccatccccaagataggataatattccagaatctgg

SEQ ID NO: 6338 - protein, 259 aa, Homo sapiens
MAAAAQLSLTQLSSGNPVYEKYYRQVDTGNTGRVLASDAAAFLKKSGLPDLILGKIWDLADTDGKGILNKQEFFVALRLVACAQNGLEVSLSSLNLAVPPPRFHDTSSPLLISGTSAAELPWAVKPEDKAKYDAIFDSLSPVNGFLSGDKVKPVLLNSKLPVDILGRVWELSDIDHDGMLDRDEFAVTESHSVTQAGVQWRDLSSLQPRPPGFKLFFHLSLLRSWDYRHAPPPPANFYIFSRDSVSPCLPDWSRAPDNR

SEQ ID NO: 6339 - DNA, 1925 bp, Homo sapiens
ccgcctcctccccgccccgagccccagtcagcccgtcttccttcccctcccttgcatgatggaaacaccatggctgcggcggcccagctctctctgacacagttatcaagtgggaatcctgtatatgaaaaatactatagacaggttgatacaggcaatactggaagggtgttggcttctgatgctgctgctttcctgaaaaaatcagggcttccagacttgatacttggaaagatttgggatttagccgacacagatggcaaaggtatcctgaacaaacaagaattctttgttgctttgcgtcttgtggcatgtgcccagaatggattggaagtttcactaagtagtttgaacctggctgttcctccaccaagatttcatgataccagtagtcctttgctaatcagtggaacctctgcagctgagctcccatgggctgtaaaacctgaagataaggccaaatatgatgcaatatttgatagtttaagcccagtgaatggatttctgtctggtgataaagtgaaaccagtgttgctcaactctaagttacctgtggatatccttggaagagtttgggagttgagtgatattgaccatgatggaatgcttgacagagatgagtttgcagttgtaagtaatctaatgttcttaacatcttcattatcttaatgattttctcatgtgcaaatttcctcttttagttcatccttagaggaaaactatattctcatcagattattgggtgaactttttttttttttctttttgagacagagtctcactctgtcacccaggctggagtgcagtggcacaatcttggctcaccacaacctctacctcccaggttcaagtaattctcgtgcctcagcctcccaagtatctgggattgcaggcacatgccaccacgcccagctaattttggtatcttttgaagagatggggttttgccgtgttggctaggctggtcttgaactcctgacctcaagtgatctgcccacctcagcctcccaaagtgctgggattacaggcatgaaccactgtgcccggctggttgaacattcttatatagaatttatatttattttctaaacaaatggataacagaaaatgtgtgttctgccatcttcattttatttggctttaaggtacataggaacgtatactttgtataattactgtaaagatagtatcttttgtatcacaacctgaccaggtatcttagtacctgcttctaatatggaataattttgcttcaaatgtatctcccaaatttcacatttccttttatttcatttaaaggaaacatgaataacacttgagtttcacttcatttatgaaggcagaaaagttttgacattttatctgaagacatgtcatcttagtaattgaatagttaattccaaatatggttgtattcacctcttccttaaaggtttgataaaactttgctgtgaattcatcagtggtaaatttctaatttcccttttactctcagattttctctttttattttggtaaggaattactaatttcttttactttcaaacttgttgctacaaatttgtgatactctctttcgtggttgttctctttactcactccaagtcttgggagtactcccacttgtatttttacttaatctgattttgtctagtttattgatctgttagaagaaccatcttttgaatttacttatcctttctattatattttgacttttaatttaatgatgtttaacatttaattccctgttacattttcttattctttttattttaaatttctcggagatgagtattatgtttcttcagttctctttatctttaatattgaaatcatttaaaggatatattcacccttgaatacaggtttagtgggattccatagatattggtacaaagttttctcctttatacagcttttta

SEQ ID NO: 6340 - protein, 199 aa, Homo sapiens
MAAAAQLSLTQLSSGNPVYEKYYRQVDTGNTGRVLASDAAAFLKKSGLPDLILGKIWDLADTDGKGILNKQEFFVALRLVACAQNGLEVSLSSLNLAVPPPRFHDTSSPLLISGTSAAELPWAVKPEDKAKYDAIFDSLSPVNGFLSGDKVKPVLLNSKLPVDILGRVWELSDIDHDGMLDRDEFAVVSNLMFLTSSLS

SEQ ID NO: 6341 - DNA, 644 bp, Homo sapiens
gtgctgtacactcttgacctcctatttgcttgagttaatttctagagaccatcagtattttatgtctgccacttactctgtggctgtatcatggtgtcttgttgtaaggaatagttttatctctgaaatcataaattcttctctctaacttgtacttcctgtctttatagagctcttttccagaaactagcaagactaattctttgactggttttactaagacctttaaatctgacttcttggctgggcatggtggctcacacctgcttcagcctcccaaagtgttgagattacagcgtgagccaccagcacccggctgccctttctttaattacctgcttcagcagattacatagggtcaaatcctggctgcaccacttcttagctgtgtgaccttgggcaagtcattagaaagccatgtctcagttttctaatctttaaaagggacataattcccagcttatagaattgtagtgattgaatgtgataatgaatgttaagtcctgcttattaccatgattgctacatactctttgaatgctagctgctatgatgatgacaaccaccataccaccatattattactactactggatcaatgttatatagattttagatgctcaataaatatttatttaaatgcc

SEQ ID NO: 6342 - protein, 42 aa, Homo sapiens
MIATYSLNASCYDDDNHHTTILLLLLDQCYIDFRCSINIYLN

SEQ ID NO: 6343 - DNA, 259 bp, Homo sapiens
ggcaatactggaagggtgttggcttctgatgctgctgctttcctgaaaaaatcagggcttccagacttgatacttggaaagatttgggatttagccgacacagatggcaaaggtatcctgaacaaacaagaattctttgttgctttgcgtcttgtggcatgtgcccagaatggattggaagtttcactaagtagtttgaacctggctgttcctccaccaagatttcatgataccagtagtcctttgctaatcagtggaa

SEQ ID NO: 6344 - protein, 85 aa, Homo sapiens
GNTGRVLASDAAAFLKKSGLPDLILGKIWDLADTDGKGILNKQEFFVALRLVACAQNGLEVSLSSLNLAVPPPRFHDTSSPLLIS

SEQ ID NO: 6345 - DNA, 970 bp, Homo sapiens
gatggaaacaccatggctgcggcggcccagctctctctgacacaggaagaatttttaactttgaccatagagcataggaaggggactcaaggatagacttcaaaagatctgtgatctactccaaaacaatggagtcttcctctgtcacccagactggagtacagtgacgtgatctcagcccactgcaacttccatctcccaggttcaagcagttctcctgcctcagtatcccaagtagctgggattacagacagggtcttgctctgttgcccaggctggagtgcagtggtacaatcacagttcattgcaacctcgacctccagggctcaagtgatcctcccacctcagcctccccagtagctgggactacaagtgcacgccaccttgcccagctaattgtttttatattttttgtagagatggggtttcaccatgttgcccaggctggtcttgaactcctgggcaacatgctcgctttcgcctcccagagtgctgggattacaggctgacataagccaccttgcctggcctgaagtttataatttttataaagtctaatttatatatatttttcttttgttgcttgtgcttttggtgacatagctgagtcttttggcaaatctaaggtcatgaagatttatccctgtgttttcttttaagagttttatagttttagctattatatctaggtccttgatctatttcaagttgatttttatatatggtgtgaggtaaaggtccaacttcatttttttgctagtggatatcttttgcttgtgacatggtattccagcatcatttgttgaaaaggctattctttccacattgaatgatcttggcactcttgtcaataatcagttaaccatagatgtatgatttagttctgacttaattctgttccattgatctatatgtcctgtgcagtacaacactgtcttgagtattgttgttttgtaatacattttgaaat

SEQ ID NO: 6346 - protein, 41 aa, Homo sapiens
MLPRLVLNSWATCSLSPPRVLGLQADISHLAWPEVYNFYKV

SEQ ID NO: 6347 - DNA, 515 bp, Homo sapiens
ggcaaggaagacgggatgggccccaatcgggaagcacgcgccaccagctctggagagaaccgtctgaggagacgcgggggagagtttgggtcacaggagcaggaaggaactggcaggtgtctgtcaccttatcatcccggacaccatgtttacattgtaattggcttctttacagagagggagggaccaggttcccagtgtgagtgatgtttagaggttttctgagaagcacaaggactggactttgacaggaagcaacgaggcaagagggaagctcgagaacaggttttgctgaggattccccccaagaaaagtgctccccgggaggccgttcctggcaccaagactggcggagccaccacacccgttaaagggatccacctggacagcgatcaggcgtgagccccccgaggggaagttgaagtggaagcagacaagcacctccaaggatcacgtaggaccagcagaagcagcgtaaagtattggaactttgaatctgacatcagaaagacctg

SEQ ID NO: 6348 - protein, 63 aa, Homo sapiens
MGPNREARATSSGENRLRRRGGEFGSQEQEGTGRCLSPYHPGHHVYIVIGFFTEREGPGSQCE

SEQ ID NO: 6349 - DNA, 680 bp, Homo sapiens
ggcaaggaagacgggatgggccccaatcgggaagcacgcgccaccagctctggagagaaccgtctgaggagacgcgggggagagtttgggtcacaggagcaggaaggaactggcaggtgtctgtcaccttatcatcccggacaccatgtttacattgtaattggcttctttacagagagggagggaccaggttcccagtgtgagtgatgtttagaggttttctgagaagcacaaggactggactttgacaggaagcaacgaggcaagagggaagctcgagaacaggttttgctgaggattccccccaagaaaagtgctccccgggaggccgttcctggcaccaagactggcggagccaccacacccgttaaagggatccacctggacagcgatcaggccacctccaaggatcacgtaggaccagcagaagcagcgtaaagtattggaactttgaatctgacatcagaaagacctgcactcagccgggcacggtggctcacgattgtaatcccaggccgaggcggtggatcacttgagattcactgattctaggtaaatcagaggaacaagcaacatgaacagaaaaaatgtagaaaatgcaattatgctgaagtacaattgttgtttcagaagtccagcatctggtgtacttaacaatagagaatatattaaatttttcc

SEQ ID NO: 6350 - protein, 63 aa, Homo sapiens; identical to SEQ ID NO: 6348

SEQ ID NO: 6351 - DNA, 3280 bp, Homo sapiens
atgattataagcttcctgaggcctccctagaagctgagcagatggcagaaccatgcttcctgtaaatcctgcagaatcaagaaggaactgagtctctaagatggaggatatacaactgacaagtagtaaagtcaagatacacagccagacagtgtctcagtctggcatccaactcaggctggagtgcagtgacatgatcttggctcactgcagtcttgacctcctgggctcaagcaatcctcctgcctcagcttcctgagtagattataaataatcttaatagcagtattcacgtttgcattctcgcatccgtggcatggagtcctacacacaataggcgccctaagaaagcgtgtttgacttgatcgctggagcatctgccggcaccgcccaggacccgcccaggacccgccccgccccctgcggccccgccccccgcatgctgaatgccatataggcgagtgacgtcaggccgtttgttgtcattggcggctcccaagatggcgtccatcatggaagggccgctgagcaaatggactaacgtgatgaagggctggcagtaccgttggttcgtgctggactacaatgcaggactgctctcctactacacgtccaaggacaaaatgatgagaggctctcgcagaggatgtgttagactcagaggagctgtgattggtatagacgatgaggacgacagcaccttcacaataactgttgatcagaaaaccttccatttccaggcccgtgatgctgatgagcgagagaagtggatccatgccttagaagaaacaattcttcgacatactctccagcttcaaggtttggattcaggatttgttcctagtgtccaagattttgataagaaacttacagaagctgatgcttacctacaaatcttgattgaacaattaaagctttttgatgacaagcttcaaaactgcaaagaagatgaacagagaaagaaaattgaaactctcaaagagacaacaaatagcatggtagaatcaattaaacactgcattgtgttgctgcagattgccaaaagtactattaatcccgtagatgcaatatatcaacctagtcctttggaacctgtgatcagcacaatgccttcccagactgtgttacctccagaacctgttcagttgtgtaagtcagagcagcgtccatcttccctaccagttggacctgtgttggctaccttgggacatcatcagactcctacaccaaatagtacaggcagtggccattcaccaccgagtagcagtctcacttctccaagccacgtgaacttgtctccaaatacagtcccagagttctcttactccagcagtgaagatgaattttatgatgctgatgaattccatcaaagtggctcatccccaaagcgcttaatagattcttctggatctgcctcagtcctgacacacagcagctcgggaaatagtctaaaacgcccagataccacagaatcacttaattcttccttgtccaatggaacaagtgatgctgacctgtttgattcacatgatgacagagatgatgatgcggaggcagggtctgtggaggagcacaagagcgttatcatgcatctcttgtcgcaggttagacttggaatggatcttactaaggtagttcttccaacgtttattcttgaaagaagatctcttttagaaatgtatgcagacttttttgcacatccggacctgtttgtgagcattagtgaccagaaggatcccaaggatcgaatggttcaggttgtgaaatggtacctctcagcctttcatgcgggaaggaaaggatcagttgccaaaaagccatacaatcccattttgggcgagatttttcagtgtcattggacattaccaaatgatactgaagagaacacagaactagtttcagaaggaccagttccctgggtttccaaaaacagtgtaacatttgtggctgagcaggtttcccatcatccacccatttcagccttttatgctgagtgttttaacaagaagatacaattcaatgctcatatctggaccaaatcaaaattccttgggatgtcaattggggtgcacaacatagggcagggctgtgtctcatgtctagactatgatgaacattacattctcacattccccaatggctatggaaggtctatcctcacagtgccctgggtggaattaggaggagaatgcaatattaattgttccaaaacaggctatagtgcaaatatcatcttccacactaaacccttctatgggggcaagaagcacagaattactgccgagattttttctccaaatgacaagaagtctttttgctcaattgaaggggaatggaatggtgtgatgtatgcaaaatatgcaacaggggaaaatacagtctttgtagataccaagaagttgcctataatcaagaagaaagtgaggaagttggaagatcagaacgagtatgaatcccgcagcctttggaaggatgtcactttcaacttaaaaatcagagacattgatgcagcaactgaagcaaagcacaggcttgaagaaagacaaagagcagaagcccgagaaaggaaggagaaggaaattcagtgggagacaaggttatttcatgaagatggagaatgctgggtttatgatgaaccattactgaaacgtcttggtgctgccaagcattaggttggaagatgcaaagtttatacctgatgatcagggcagtaggcataattcagcaacaaacaatcttcctttgggagaaacctgttcattccaatcttctaattacagtggttcctatctcagggatactggactttctgacgcagatgaacaattaaggggaaaagcttcccttttccctctgtggcagttacgattttgacttcagtcctgagaaaaacttcaggttttgaaaatcagatgatgtcttctccttttccaaacaccacacgttgaaagcatttataaatccaagtctgaaactctgcgctctagtactgctgttaagatacacaacttgtttcttagttcatataatctcgggatacacacacacacacacatatatatacacacacatacgtatacacacacatacatatatataaatatacctgatgccagatttttttcataaatattctgcctactgtaaatatgggttcctctgagttgttttagaaaattagcgcaatgtattaaaatcaagtgttaggaaatttcatggtcttacctacaataacttttattttggaattgaactattattaaattgtatctaatcctgg

SEQ ID NO: 6352 - protein, 741 aa, Homo sapiens
MPYRRVTSGRLLSLAAPKMASIMEGPLSKWTNVMKGWQYRWFVLDYNAGLLSYYTSKDKMMRGSRRGCVRLRGAVIGIDDEDDSTFTITVDQKTFHFQARDADEREKWIHALEETILRHTLQLQGLDSGFVPSVQDFDKKLTEADAYLQILIEQLKLFDDKLQNCKEDEQRKKIETLKETTNSMVESIKHCIVLLQIAKSTINPVDAIYQPSPLEPVISTMPSQTVLPPEPVQLCKSEQRPSSLPVGPVLATLGHHQTPTPNSTGSGHSPPSSSLTSPSHVNLSPNTVPEFSYSSSEDEFYDADEFHQSGSSPKRLIDSSGSASVLTHSSSGNSLKRPDTTESLNSSLSNGTSDADLFDSHDDRDDDAEAGSVEEHKSVIMHLLSQVRLGMDLTKVVLPTFILERRSLLEMYADFFAHPDLFVSISDQKDPKDRMVQVVKWYLSAFHAGRKGSVAKKPYNPILGEIFQCHWTLPNDTEENTELVSEGPVPWVSKNSVTFVAEQVSHHPPISAFYAECFNKKIQFNAHIWTKSKFLGMSIGVHNIGQGCVSCLDYDEHYILTFPNGYGRSILTVPWVELGGECNINCSKTGYSANIIFHTKPFYGGKKHRITAEIFSPNDKKSFCSIEGEWNGVMYAKYATGENTVFVDTKKLPIIKKKVRKLEDQNEYESRSLWKDVTFNLKIRDIDAATEAKHRLEERQRAEARERKEKEIQWETRLFHEDGECWVYDEPLLKRLGAAKH

SEQ ID NO: 6353 - DNA, 3347 bp, Homo sapiens
atgattataagcttcctgaggcctccctagaagctgagcagatggcagaaccatgcttcctgtaaatcctgcagaatcaagaaggaactgagtctctaagatggaggatatacaactgacaagtagtaaagtcaagatacacagccagacagtgtctcagtctggcatccaactcaggctggagtgcagtgacatgatcttggctcactgcagtcttgacctcctgggctcaagcaatcctcctgcctcagcttcctgagtagattataaataatcttaatagcagtattcacgtttgcattctcgcatccgtggcatggagtcctacacacaataggcgccctaagaaagcgtgtttgacttgatcgctggagcatctgccggcaccgcccaggacccgcccaggacccgccccgccccctgcggccccgccccccgcatgctgaatgccatataggcgagtgacgtcaggccgtttgttgtcattggcggctcccaagatggcgtccatcatggaagggccgctgagcaaatggactaacgtgatgaagggctggcagtaccgttggttcgtgctggactacaatgcaggactgctctcctactacacgtccaaggacaaaatgatgagaggctctcgcagaggatgtgttagactcagaggagctgtgattggtatagacgatgaggacgacagcaccttcacaataactgttgatcagaaaaccttccatttccaggcccgtgatgctgatgagcgagagaagtggatccatgccttagaagaaacaattcttcgacatactctccagcttcaaggtttggattcaggatttgttcctagtgtccaagattttgataagaaacttacagaagctgatgcttacctacaaatcttgattgaacaattaaagctttttgatgacaagcttcaaaactgcaaagaagatgaacagagaaagaaaattgaaactctcaaagagacaacaaatagcatggtagaatcaattaaacactgcattgtgttgctgcagattgccaaaagtactattaatcccgtagatgcaatatatcaacctagtcctttggaacctgtgatcagcacaatgccttcccagactgtgttacctccagaacctgttcagttgtgtaagtcagagcagcgtccatcttccctaccagttggacctgtgttggctaccttgggacatcatcagactcctacaccaaatagtacaggcagtggccattcaccaccgagtagcagtctcacttctccaagccacgtgaacttgtctccaaatacagtcccagagttctcttactccagcagtgaagatgaattttatgatgctgatgaattccatcaaagtggctcatccccaaagcgcttaatagattcttctggatctgcctcagtcctgacacacagcagctcgggaaatagtctaaaacgcccagataccacagaatcacttaattcttccttgtccaatggaacaagtgatgctgacctgtttgattcacatgatgacagagatgatgatgcggaggcagggtctgtggaggagcacaagagcgttatcatgcatctcttgtcgcaggttagacttggaatggatcttactaaggtagttcttccaacgtttattcttgaaagaagatctcttttagaaatgtatgcagacttttttgcacatccggacctgtttgtgagcattagtgaccagaaggatcccaaggatcgaatggttcaggttgtgaaatggtacctctcagcctttcatgcgggaaggaaaggatcagttgccaaaaagccatacaatcccattttgggcgagatttttcagtgtcattggacattaccaaatgatactgaagagaacacagaactagtttcagaaggaccagttccctgggtttccaaaaacagtgtaacatttgtggctgagcaggtttcccatcatccacccatttcagccttttatgctgagtgttttaacaagaagatacaattcaatgctcatatctggaccaaatcaaaattccttgggatgtcaattggggtgcacaacatagggcagggctgtgtctcatgtctagactatgatgaacattacattctcacattccccaatggctatggaaggtctatcctcacagtgccctgggtggaattaggaggagaatgcaatattaattgttccaaaacaggctatagtgcaaatatcatcttccacactaaacccttctatgggggcaagaagcacagaattactgccgagattttttctccaaatgacaagaagtctttttgctcaattgaaggggaatggaatggtgtgatgtatgcaaaatatgcaacaggggaaaatacagtctttgtagataccaagaagttgcctataatcaagaagaaagtgaggaagttggaagatcagaacgagtatgaatcccgcagcctttggaaggatgtcactttcaacttaaaaatcagagacattgatgcagcaactgaagcaaagcacaggcttgaagaaagacaaagagcagaagcccgagaaaggaaggagaaggaaattcagtgggagacaaggttatttcatgaagatggagaatgctgggtttatgatgaaccattactgaaacgtcttggtgctgccaagcattaggttggaagatgcaaagtttatacctgatgatcagggcagtaggcataattcagcaacaaacaatcttcctttgggagaaacctgttcattccaatcttctaattacagtggttcctatctcagggatactggactttctgacgcagatgaacaattaaggggaaaagcttcccttttccctctgtggcagttacgattttgacttcagtcctgagaaaaacttcaggttttgaaaatcagatgatgtcttctccttttccaaacaccacacgttgaaagcatttataaatccaagtctgaaactctgcgctctagtactgctgttaagatacacaacttgtttcttagttcatataatctcgggatacacacacacacacacatatatatacacacacatacgtatacacacacatacatatatataaatatacctgatgccagatttttttcataaatattctgcctactgtaaatatgggttcctctgagttgttttagaaaattagcgcaatgtattaaaatcaagtgttaggaaatttcatggtcttacctacaataacttttattttggaattgaactattattaaattgtatctaatcctggattacagtttaattaattattcttagtgcttaaggcttcataaagtaatttttccaacctttttttt

SEQ ID NO: 6354 - protein, 741 aa, Homo sapiens; identical to SEQ ID NO: 6352

SEQ ID NO: 6355 - DNA, 5350 bp, Homo sapiens
atgattataagcttcctgaggcctccctagaagctgagcagatggcagaaccatgcttcctgtaaatcctgcagaatcaagaaggaactgagtctctaagatggaggatatacaactgacaagtagtaaagtcaagatacacagccagacagtgtctcagtctggcatccaactcaggctggagtgcagtgacatgatcttggctcactgcagtcttgacctcctgggctcaagcaatcctcctgcctcagcttcctgagtagattataaataatcttaatagcagtattcacgtttgcattctcgcatccgtggcatggagtcctacacacaataggcgccctaagaaagcgtgtttgacttgatcgctggagcatctgccggcaccgcccaggacccgcccaggacccgccccgccccctgcggccccgccccccgcatgctgaatgccatataggcgagtgacgtcaggccgtttgttgtcattggcggctcccaagatggcgtccatcatggaagggccgctgagcaaatggactaacgtgatgaagggctggcagtaccgttggttcgtgctggactacaatgcaggactgctctcctactacacgtccaaggacaaaatgatgagaggctctcgcagaggatgtgttagactcagaggagctgtgattggtatagacgatgaggacgacagcaccttcacaataactgttgatcagaaaaccttccatttccaggcccgtgatgctgatgagcgagagaagtggatccatgccttagaagaaacaattcttcgacatactctccagcttcaaggtttggattcaggatttgttcctagtgtccaagattttgataagaaacttacagaagctgatgcttacctacaaatcttgattgaacaattaaagctttttgatgacaagcttcaaaactgcaaagaagatgaacagagaaagaaaattgaaactctcaaagagacaacaaatagcatggtagaatcaattaaacactgcattgtgttgctgcagattgccaaaagtactattaatcccgtagatgcaatatatcaacctagtcctttggaacctgtgatcagcacaatgccttcccagactgtgttacctccagaacctgttcagttgtgtaagtcagagcagcgtccatcttccctaccagttggacctgtgttggctaccttgggacatcatcagactcctacaccaaatagtacaggcagtggccattcaccaccgagtagcagtctcacttctccaagccacgtgaacttgtctccaaatacagtcccagagttctcttactccagcagtgaagatgaattttatgatgctgatgaattccatcaaagtggctcatccccaaagcgcttaatagattcttctggatctgcctcagtcctgacacacagcagctcgggaaatagtctaaaacgcccagataccacagaatcacttaattcttccttgtccaatggaacaagtgatgctgacctgtttgattcacatgatgacagagatgatgatgcggaggcagggtctgtggaggagcacaagagcgttatcatgcatctcttgtcgcaggttagacttggaatggatcttactaaggtagttcttccaacgtttattcttgaaagaagatctcttttagaaatgtatgcagacttttttgcacatccggacctgtttgtgagcattagtgaccagaaggatcccaaggatcgaatggttcaggttgtgaaatggtacctctcagcctttcatgcgggaaggaaaggatcagttgccaaaaagccatacaatcccattttgggcgagatttttcagtgtcattggacattaccaaatgatactgaagagaacacagaactagtttcagaaggaccagttccctgggtttccaaaaacagtgtaacatttgtggctgagcaggtttcccatcatccacccatttcagccttttatgctgagtgttttaacaagaagatacaattcaatgctcatatctggaccaaatcaaaattccttgggatgtcaattggggtgcacaacatagggcagggctgtgtctcatgtctagactatgatgaacattacattctcacattccccaatggctatggaaggtctatcctcacagtgccctgggtggaattaggaggagaatgcaatattaattgttccaaaacaggctatagtgcaaatatcatcttccacactaaacccttctatgggggcaagaagcacagaattactgccgagattttttctccaaatgacaagaagtctttttgctcaattgaaggggaatggaatggtgtgatgtatgcaaaatatgcaacaggggaaaatacagtctttgtagataccaagaagttgcctataatcaagaagaaagtgaggaagttggaagatcagaacgagtatgaatcccgcagcctttggaaggatgtcactttcaacttaaaaatcagagacattgatgcagcaactgaagcaaagcacaggcttgaagaaagacaaagagcagaagcccgagaaaggaaggagaaggaaattcagtgggagacaaggttatttcatgaagatggagaatgctgggtttatgatgaaccattactgaaacgtcttggtgctgccaagcattaggttggaagatgcaaagtttatacctgatgatcagggcagtaggcataattcagcaacaaacaatcttcctttgggagaaacctgttcattccaatcttctaattacagtggttcctatctcagggatactggactttctgacgcagatgaacaattaaggggaaaagcttcccttttccctctgtggcagttacgattttgacttcagtcctgagaaaaacttcaggttttgaaaatcagatgatgtcttctccttttccaaacaccacacgttgaaagcatttataaatccaagtctgaaactctgcgctctagtactgctgttaagatacacaacttgtttcttagttcatataatctcgggatacacacacacacacacatatatatacacacacatacgtatacacacacatacatatatataaatatacctgatgccagatttttttcataaatattctgcctactgtaaatatgggttcctctgagttgttttagaaaattagcgcaatgtattaaaatcaagtgttaggaaatttcatggtcttacctacaataacttttattttggaattgaactattattaaattgtatctaatcctggattacagtttaattaattattcttagtgcttaaggcttcataaagtaatttttccaaccttttttttaaaaatgtgcatcttttattatcttttatggttaaacttggaagccaattatttggcaaccttgaatacaagagctagcttttcaaagaaagacacttgaaataatggaggatccattcttttcctctgtcagattgtatgttctgtctttagcccctgccaggcaattccccagaatcttcacttaactcatattgcacatgtagggctgcctaccaacattttatccaaaaatgttttattgccttagagggtttgggaagagtgtgtatttatagatccccaccccacagtgaacaaaaatagatagatagatagaataaaatgaatgccacagcagcagatggctcattctgaagggaaatacagaactatatctatctatctatctatcatcttttttatttaaaaatacattaaaaaaacaggtattagtacctagcatttagttagttattcaatatactggttacgtaaggcctttcaagaagtagattctcagtctgagaggacacaggccagggcttctcaaagtgctgctgcaggctttctggtctcgcttggcccattctgctaattttcctttgccagctcctacagtaaccctgggtttattagtctcaacaaaggataaaaagtaaatcaaatgctatgatgccagtgcaaaacttcaatggaagccctaaggcagtagtataactaactccataaaatacaaacaaacacattttaaaatacacattgcttcaggccaacgtgactgcagtttatttatttgactattttatggtaggggagaaggttgagtgttgttgtgaaagccctgatatcagtaatggggatgatacaatctgccagcagaggagaggttggcaggtaggtcagctgcatcacttcacaagaagaatttgaatcctcactagaaggggtaccatcctcttccagttcatacttcccatatccaacaacctgaaagaggacaaagacaaaagtgaaaaatatgctgaccagatttaggggtttaagagttctgatgataaccacccaaactcactcagtaaatgacaaccctagaatggatggagttagttaaacatactcacatgaacgctgagcattttacttcctggccctctatgggccttgaaccagttgaccaggtctgattttgagaatgacttcagtgcttcaatcttacaagggaagggaagataggaaagaaattcaagaagaaagatagctcttaaacctaacccccaggcagatgtccctggacctgcttagcatctgaagacctcattttattcttcctattctcaggttacccctaaccttccagaccaaaacgatgatgaagctctctggcatgccttcacattttataccaatcatctacaatggcaagagaggttagcagatgctataattacagctaaataccatacactgagcccaacacccacatccccttagtgtcacctcccaattacatggtagctgcataccacggcttgaggaaatctaccttgcttctattaagaaaactaaaatgtgttaagatgaagcctcttactaaataacctctttacatcacagagcaatgatgtcctatggtaattcaccatgtaggggctatgtattaaccaaagtcacactggagtacaagatccagatctttttcataggttttactactttggaatagaagttgtcaaaacacatgcacttggaataatgaactccgtaaagacaaagagtcctcaattttctttaaacggcaaaactctttttctccacaaaatcttgtagacctcaatatatagcataaaaatagagctgctctgattgaaattggtggtggtgtggtaaggattagcacccagctcacgtggccacctaaggtgctagagaggccagtctgaaaactcaggaagtgagcgagtaatcaggccaggactagtgtttcgagtttctcttccacacaatgctggtgtgcacagacc

SEQ ID NO: 6356 - protein, 741 aa, Homo sapiens; identical to SEQ ID NO: 6352

SEQ ID NO: 6357 - DNA, 2905 bp, Homo sapiens
gtcattggcggctcccaagatggcgtccatcatggaagggccgctgagcaaatggactaacgtgatgaagggctggcagtaccgttggttcgtgctggactacaatgcaggactgctctcctactacacgtccaaggacaaaatgatgagaggctctcgcagaggatgtgttagactcagaggagctgtgattggtatagacgatgaggacgacagcaccttcacaataactgttgatcagaaaaccttccatttccaggcccgtgatgctgatgagcgagagaagtggatccatgccttagaagaaacaattcttcgacatactctccagcttcaaggtttggattcaggatttgttcctagtgtccaagattttgataagaaacttacagaagctgatgcttacctacaaatcttgattgaacaattaaagctttttgatgacaagcttcaaaactgcaaagaagatgaacagagaaagaaaattgaaactctcaaagagacaacaaatagcatggtagaatcaattaaacactgcattgtgttgctgcagattgccaaagaccagagtaatgcggagaagcacgcagatggaatgataagtactattaatcccgtagatgcaatatatcaacctagtcctttggaacctgtgatcagcacaatgccttcccagactgtgttacctccagaacctgttcagttgtgtaagtcagagcagcgtccatcttccctaccagttggacctgtgttggctaccttgggacatcatcagactcctacaccaaatagtacaggcagtggccattcaccaccgagtagcagtctcacttctccaagccacgtgaacttgtctccaaatacagtcccagagttctcttactccagcagtgaagatgaattttatgatgctgatgaattccatcaaagtggctcatccccaaagcgcttaatagattcttctggatctgcctcagtcctgacacacagcagctcgggaaatagtctaaaacgcccagataccacagaatcacttaattcttccttgtccaatggaacaagtgatgctgacctgtttgattcacatgatgacagagatgatgatgcggaggcagggtctgtggaggagcacaagagcgttatcatgcatctcttgtcgcaggttagacttggaatggatcttactaaggtagttcttccaacgtttattcttgaaagaagatctcttttagaaatgtatgcagacttttttgcacatccggacctgtttgtgagcattagtgaccagaaggatcccaaggatcgaatggttcaggttgtgaaatggtacctctcagcctttcatgcgggaaggaaaggatcagttgccaaaaagccatacaatcccattttgggcgagatttttcagtgtcattggacattaccaaatgatactgaagagaacacagaactagtttcagaaggaccagttccctgggtttccaaaaacagtgtaacatttgtggctgagcaggtttcccatcatccacccatttcagccttttatgctgagtgttttaacaagaagatacaattcaatgctcatatctggaccaaatcaaaattccttgggatgtcaattggggtgcacaacatagggcagggctgtgtctcatgtctagactatgatgaacattacattctcacattccccaatggctatggaaggtctatcctcacagtgccctgggtggaattaggaggagaatgcaatattaattgttccaaaacaggctatagtgcaaatatcatcttccacactaaacccttctatgggggcaagaagcacagaattactgccgagattttttctccaaatgacaagaagtctttttgctcaattgaaggggaatggaatggtgtgatgtatgcaaaatatgcaacaggggaaaatacagtctttgtagataccaagaagttgcctataatcaagaagaaagtgaggaagttggaagatcagaacgagtatgaatcccgcagcctttggaaggatgtcactttcaacttaaaaatcagagacattgatgcagcaactgaagcaaagcacaggcttgaagaaagacaaagagcagaagcccgagaaaggaaggagaaggaaattcagtgggagacaaggttatttcatgaagatggagaatgctgggtttatgatgaaccattactgaaacgtcttggtgctgccaagcattaggttggaagatgcaaagtttatacctgatgatcagggcagtaggcataattcagcaacaaacaatcttcctttgggagaaacctgttcattccaatcttctaattacagtggttcctatctcagggatactggactttctgacgcagatgaacaattaaggggaaaagcttcccttttccctctgtggcagttacgattttgacttcagtcctgagaaaaacttcaggttttgaaaatcagatgatgtcttctccttttccaaacaccacacgttgaaagcatttataaatccaagtctgaaactctgcgctctagtactgctgttaagatacacaacttgtttcttagttcatataatctcgggatacacacacacacacacatatatatacacacacatacgtatacacacacatacatatatataaatatacctgatgccagatttttttcataaatattctgcctactgtaaatatgggttcctctgagttgttttagaaaattagcgcaatgtattaaaatcaagtgttaggaaatttcatggtcttacctacaataacttttattttggaattgaactattattaaattgtatctaatcctggattacagtttaattaattattcttagtgcttaaggcttcataaagtaatttttccaacctttttttt

SEQ ID NO: 6358 - protein, 736 aa, Homo sapiens; identical to SEQ ID NO: 224

SEQ ID NO: 6359 - DNA, 2935 bp, Homo sapiens
gtcattggcggctcccaagatggcgtccatcatggaagggccgctgagcaaatggactaacgtgatgaagggctggcagtaccgttggttcgtgctggactacaatgcaggactgctctcctactacacgtccaaggacaaaatgatgagaggctctcgcagaggatgtgttagactcagaggagctgtgattggtatagacgatgaggacgacagcaccttcacaataactgttgatcagaaaaccttccatttccaggcccgtgatgctgatgagcgagagaagtggatccatgccttagaagaaacaattcttcgacatactctccagcttcaaatcagtaccacacttgcttttttccagtcttctggtatctctccagttcttgaattttcaaaaataattggtttggattcaggatttgttcctagtgtccaagattttgataagaaacttacagaagctgatgcttacctacaaatcttgattgaacaattaaagctttttgatgacaagcttcaaaactgcaaagaagatgaacagagaaagaaaattgaaactctcaaagagacaacaaatagcatggtagaatcaattaaacactgcattgtgttgctgcagattgccaaaagtactattaatcccgtagatgcaatatatcaacctagtcctttggaacctgtgatcagcacaatgccttcccagactgtgttacctccagaacctgttcagttgtgtaagtcagagcagcgtccatcttccctaccagttggacctgtgttggctaccttgggacatcatcagactcctacaccaaatagtacaggcagtggccattcaccaccgagtagcagtctcacttctccaagccacgtgaacttgtctccaaatacagtcccagagttctcttactccagcagtgaagatgaattttatgatgctgatgaattccatcaaagtggctcatccccaaagcgcttaatagattcttctggatctgcctcagtcctgacacacagcagctcgggaaatagtctaaaacgcccagataccacagaatcacttaattcttccttgtccaatggaacaagtgatgctgacctgtttgattcacatgatgacagagatgatgatgcggaggcagggtctgtggaggagcacaagagcgttatcatgcatctcttgtcgcaggttagacttggaatggatcttactaaggtagttcttccaacgtttattcttgaaagaagatctcttttagaaatgtatgcagacttttttgcacatccggacctgtttgtgagcattagtgaccagaaggatcccaaggatcgaatggttcaggttgtgaaatggtacctctcagcctttcatgcgggaaggaaaggatcagttgccaaaaagccatacaatcccattttgggcgagatttttcagtgtcattggacattaccaaatgatactgaagagaacacagaactagtttcagaaggaccagttccctgggtttccaaaaacagtgtaacatttgtggctgagcaggtttcccatcatccacccatttcagccttttatgctgagtgttttaacaagaagatacaattcaatgctcatatctggaccaaatcaaaattccttgggatgtcaattggggtgcacaacatagggcagggctgtgtctcatgtctagactatgatgaacattacattctcacattccccaatggctatggaaggtctatcctcacagtgccctgggtggaattaggaggagaatgcaatattaattgttccaaaacaggctatagtgcaaatatcatcttccacactaaacccttctatgggggcaagaagcacagaattactgccgagattttttctccaaatgacaagaagtctttttgctcaattgaaggggaatggaatggtgtgatgtatgcaaaatatgcaacaggggaaaatacagtctttgtagataccaagaagttgcctataatcaagaagaaagtgaggaagttggaagatcagaacgagtatgaatcccgcagcctttggaaggatgtcactttcaacttaaaaatcagagacattgatgcagcaactgaagcaaagcacaggcttgaagaaagacaaagagcagaagcccgagaaaggaaggagaaggaaattcagtgggagacaaggttatttcatgaagatggagaatgctgggtttatgatgaaccattactgaaacgtcttggtgctgccaagcattaggttggaagatgcaaagtttatacctgatgatcagggcagtaggcataattcagcaacaaacaatcttcctttgggagaaacctgttcattccaatcttctaattacagtggttcctatctcagggatactggactttctgacgcagatgaacaattaaggggaaaagcttcccttttccctctgtggcagttacgattttgacttcagtcctgagaaaaacttcaggttttgaaaatcagatgatgtcttctccttttccaaacaccacacgttgaaagcatttataaatccaagtctgaaactctgcgctctagtactgctgttaagatacacaacttgtttcttagttcatataatctcgggatacacacacacacacacatatatatacacacacatacgtatacacacacatacatatatataaatatacctgatgccagatttttttcataaatattctgcctactgtaaatatgggttcctctgagttgttttagaaaattagcgcaatgtattaaaatcaagtgttaggaaatttcatggtcttacctacaataacttttattttggaattgaactattattaaattgtatctaatcctggattacagtttaattaattattcttagtgcttaaggcttcataaagtaatttttccaacctttttttt

SEQ ID NO: 6360 - protein, 746 aa, Homo sapiens; identical to SEQ ID NO: 236

SEQ ID NO: 6361 - DNA, 2775 bp, Homo sapiens
gtcattggcggctcccaagatggcgtccatcatggaagggccgctgagcaaatggactaacgtgatgaagggctggcagtaccgttggttcgtgctggactacaatgcaggactgctctcctactacacgcccgtgatgctgatgagcgagagaagtggatccatgccttagaagaaacaattcttcgacatactctccagcttcaaggtttggattcaggatttgttcctagtgtccaagattttgataagaaacttacagaagctgatgcttacctacaaatcttgattgaacaattaaagctttttgatgacaagcttcaaaactgcaaagaagatgaacagagaaagaaaattgaaactctcaaagagacaacaaatagcatggtagaatcaattaaacactgcattgtgttgctgcagattgccaaagaccagagtaatgcggagaagcacgcagatggaatgataagtactattaatcccgtagatgcaatatatcaacctagtcctttggaacctgtgatcagcacaatgccttcccagactgtgttacctccagaacctgttcagttgtgtaagtcagagcagcgtccatcttccctaccagttggacctgtgttggctaccttgggacatcatcagactcctacaccaaatagtacaggcagtggccattcaccaccgagtagcagtctcacttctccaagccacgtgaacttgtctccaaatacagtcccagagttctcttactccagcagtgaagatgaattttatgatgctgatgaattccatcaaagtggctcatccccaaagcgcttaatagattcttctggatctgcctcagtcctgacacacagcagctcgggaaatagtctaaaacgcccagataccacagaatcacttaattcttccttgtccaatggaacaagtgatgctgacctgtttgattcacatgatgacagagatgatgatgcggaggcagggtctgtggaggagcacaagagcgttatcatgcatctcttgtcgcaggttagacttggaatggatcttactaaggtagttcttccaacgtttattcttgaaagaagatctcttttagaaatgtatgcagacttttttgcacatccggacctgtttgtgagcattagtgaccagaaggatcccaaggatcgaatggttcaggttgtgaaatggtacctctcagcctttcatgcgggaaggaaaggatcagttgccaaaaagccatacaatcccattttgggcgagatttttcagtgtcattggacattaccaaatgatactgaagagaacacagaactagtttcagaaggaccagttccctgggtttccaaaaacagtgtaacatttgtggctgagcaggtttcccatcatccacccatttcagccttttatgctgagtgttttaacaagaagatacaattcaatgctcatatctggaccaaatcaaaattccttgggatgtcaattggggtgcacaacatagggcagggctgtgtctcatgtctagactatgatgaacattacattctcacattccccaatggctatggaaggtctatcctcacagtgccctgggtggaattaggaggagaatgcaatattaattgttccaaaacaggctatagtgcaaatatcatcttccacactaaacccttctatgggggcaagaagcacagaattactgccgagattttttctccaaatgacaagaagtctttttgctcaattgaaggggaatggaatggtgtgatgtatgcaaaatatgcaacaggggaaaatacagtctttgtagataccaagaagttgcctataatcaagaagaaagtgaggaagttggaagatcagaacgagtatgaatcccgcagcctttggaaggatgtcactttcaacttaaaaatcagagacattgatgcagcaactgaagcaaagcacaggcttgaagaaagacaaagagcagaagcccgagaaaggaaggagaaggaaattcagtgggagacaaggttatttcatgaagatggagaatgctgggtttatgatgaaccattactgaaacgtcttggtgctgccaagcattaggttggaagatgcaaagtttatacctgatgatcagggcagtaggcataattcagcaacaaacaatcttcctttgggagaaacctgttcattccaatcttctaattacagtggttcctatctcagggatactggactttctgacgcagatgaacaattaaggggaaaagcttcccttttccctctgtggcagttacgattttgacttcagtcctgagaaaaacttcaggttttgaaaatcagatgatgtcttctccttttccaaacaccacacgttgaaagcatttataaatccaagtctgaaactctgcgctctagtactgctgttaagatacacaacttgtttcttagttcatataatctcgggatacacacacacacacacatatatatacacacacatacgtatacacacacatacatatatataaatatacctgatgccagatttttttcataaatattctgcctactgtaaatatgggttcctctgagttgttttagaaaattagcgcaatgtattaaaatcaagtgttaggaaatttcatggtcttacctacaataacttttattttggaattgaactattattaaattgtatctaatcctggattacagtttaattaattattcttagtgcttaaggcttcataaagtaatttttccaacctttttttt

SEQ ID NO: 6362 - protein, 571 aa, Homo sapiens; identical to SEQ ID NO: 230

SEQ ID NO: 6363 - DNA, 4938 bp, Homo sapiens
gtcattggcggctcccaagatggcgtccatcatggaagggccgctgagcaaatggactaacgtgatgaagggctggcagtaccgttggttcgtgctggactacaatgcaggactgctctcctactacacgtccaaggacaaaatgatgagaggctctcgcagaggatgtgttagactcagaggagctgtgattggtatagacgatgaggacgacagcaccttcacaataactgttgatcagaaaaccttccatttccaggcccgtgatgctgatgagcgagagaagtggatccatgccttagaagaaacaattcttcgacatactctccagcttcaaatcagtaccacacttgcttttttccagtcttctggtatctctccagttcttgaattttcaaaaataattggtttggattcaggatttgttcctagtgtccaagattttgataagaaacttacagaagctgatgcttacctacaaatcttgattgaacaattaaagctttttgatgacaagcttcaaaactgcaaagaagatgaacagagaaagaaaattgaaactctcaaagagacaacaaatagcatggtagaatcaattaaacactgcattgtgttgctgcagattgccaaaagtactattaatcccgtagatgcaatatatcaacctagtcctttggaacctgtgatcagcacaatgccttcccagactgtgttacctccagaacctgttcagttgtgtaagtcagagcagcgtccatcttccctaccagttggacctgtgttggctaccttgggacatcatcagactcctacaccaaatagtacaggcagtggccattcaccaccgagtagcagtctcacttctccaagccacgtgaacttgtctccaaatacagtcccagagttctcttactccagcagtgaagatgaattttatgatgctgatgaattccatcaaagtggctcatccccaaagcgcttaatagattcttctggatctgcctcagtcctgacacacagcagctcgggaaatagtctaaaacgcccagataccacagaatcacttaattcttccttgtccaatggaacaagtgatgctgacctgtttgattcacatgatgacagagatgatgatgcggaggcagggtctgtggaggagcacaagagcgttatcatgcatctcttgtcgcaggttagacttggaatggatcttactaaggtagttcttccaacgtttattcttgaaagaagatctcttttagaaatgtatgcagacttttttgcacatccggacctgtttgtgagcattagtgaccagaaggatcccaaggatcgaatggttcaggttgtgaaatggtacctctcagcctttcatgcgggaaggaaaggatcagttgccaaaaagccatacaatcccattttgggcgagatttttcagtgtcattggacattaccaaatgatactgaagagaacacagaactagtttcagaaggaccagttccctgggtttccaaaaacagtgtaacatttgtggctgagcaggtttcccatcatccacccatttcagccttttatgctgagtgttttaacaagaagatacaattcaatgctcatatctggaccaaatcaaaattccttgggatgtcaattggggtgcacaacatagggcagggctgtgtctcatgtctagactatgatgaacattacattctcacattccccaatggctatggaaggtctatcctcacagtgccctgggtggaattaggaggagaatgcaatattaattgttccaaaacaggctatagtgcaaatatcatcttccacactaaacccttctatgggggcaagaagcacagaattactgccgagattttttctccaaatgacaagaagtctttttgctcaattgaaggggaatggaatggtgtgatgtatgcaaaatatgcaacaggggaaaatacagtctttgtagataccaagaagttgcctataatcaagaagaaagtgaggaagttggaagatcagaacgagtatgaatcccgcagcctttggaaggatgtcactttcaacttaaaaatcagagacattgatgcagcaactgaagcaaagcacaggcttgaagaaagacaaagagcagaagcccgagaaaggaaggagaaggaaattcagtgggagacaaggttatttcatgaagatggagaatgctgggtttatgatgaaccattactgaaacgtcttggtgctgccaagcattaggttggaagatgcaaagtttatacctgatgatcagggcagtaggcataattcagcaacaaacaatcttcctttgggagaaacctgttcattccaatcttctaattacagtggttcctatctcagggatactggactttctgacgcagatgaacaattaaggggaaaagcttcccttttccctctgtggcagttacgattttgacttcagtcctgagaaaaacttcaggttttgaaaatcagatgatgtcttctccttttccaaacaccacacgttgaaagcatttataaatccaagtctgaaactctgcgctctagtactgctgttaagatacacaacttgtttcttagttcatataatctcgggatacacacacacacacacatatatatacacacacatacgtatacacacacatacatatatataaatatacctgatgccagatttttttcataaatattctgcctactgtaaatatgggttcctctgagttgttttagaaaattagcgcaatgtattaaaatcaagtgttaggaaatttcatggtcttacctacaataacttttattttggaattgaactattattaaattgtatctaatcctggattacagtttaattaattattcttagtgcttaaggcttcataaagtaatttttccaaccttttttttaaaaatgtgcatcttttattatcttttatggttaaacttggaagccaattatttggcaaccttgaatacaagagctagcttttcaaagaaagacacttgaaataatggaggatccattcttttcctctgtcagattgtatgttctgtctttagcccctgccaggcaattccccagaatcttcacttaactcatattgcacatgtagggctgcctaccaacattttatccaaaaatgttttattgccttagagggtttgggaagagtgtgtatttatagatccccaccccacagtgaacaaaaatagatagatagatagaataaaatgaatgccacagcagcagatggctcattctgaagggaaatacagaactatatctatctatctatctatcatcttttttatttaaaaatacattaaaaaaacaggtattagtacctagcatttagttagttattcaatatactggttacgtaaggcctttcaagaagtagattctcagtctgagaggacacaggccagggcttctcaaagtgctgctgcaggctttctggtctcgcttggcccattctgctaattttcctttgccagctcctacagtaaccctgggtttattagtctcaacaaaggataaaaagtaaatcaaatgctatgatgccagtgcaaaacttcaatggaagccctaaggcagtagtataactaactccataaaatacaaacaaacacattttaaaatacacattgcttcaggccaacgtgactgcagtttatttatttgactattttatggtaggggagaaggttgagtgttgttgtgaaagccctgatatcagtaatggggatgatacaatctgccagcagaggagaggttggcaggtaggtcagctgcatcacttcacaagaagaatttgaatcctcactagaaggggtaccatcctcttccagttcatacttcccatatccaacaacctgaaagaggacaaagacaaaagtgaaaaatatgctgaccagatttaggggtttaagagttctgatgataaccacccaaactcactcagtaaatgacaaccctagaatggatggagttagttaaacatactcacatgaacgctgagcattttacttcctggccctctatgggccttgaaccagttgaccaggtctgattttgagaatgacttcagtgcttcaatcttacaagggaagggaagataggaaagaaattcaagaagaaagatagctcttaaacctaacccccaggcagatgtccctggacctgcttagcatctgaagacctcattttattcttcctattctcaggttacccctaaccttccagaccaaaacgatgatgaagctctctggcatgccttcacattttataccaatcatctacaatggcaagagaggttagcagatgctataattacagctaaataccatacactgagcccaacacccacatccccttagtgtcacctcccaattacatggtagctgcataccacggcttgaggaaatctaccttgcttctattaagaaaactaaaatgtgttaagatgaagcctcttactaaataacctctttacatcacagagcaatgatgtcctatggtaattcaccatgtaggggctatgtattaaccaaagtcacactggagtacaagatccagatctttttcataggttttactactttggaatagaagttgtcaaaacacatgcacttggaataatgaactccgtaaagacaaagagtcctcaattttctttaaacggcaaaactctttttctccacaaaatcttgtagacctcaatatatagcataaaaatagagctgctctgattgaaattggtggtggtgtggtaaggattagcacccagctcacgtggccacctaaggtgctagagaggccagtctgaaaactcaggaagtgagcgagtaatcaggccaggactagtgtttcgagtttctcttccacacaatgctggtgtgcacagacc

SEQ ID NO: 6364 - protein, 746 aa, Homo sapiens; identical to SEQ ID NO: 236

SEQ ID NO: 6365 - DNA, 4778 bp, Homo sapiens
gtcattggcggctcccaagatggcgtccatcatggaagggccgctgagcaaatggactaacgtgatgaagggctggcagtaccgttggttcgtgctggactacaatgcaggactgctctcctactacacgcccgtgatgctgatgagcgagagaagtggatccatgccttagaagaaacaattcttcgacatactctccagcttcaaggtttggattcaggatttgttcctagtgtccaagattttgataagaaacttacagaagctgatgcttacctacaaatcttgattgaacaattaaagctttttgatgacaagcttcaaaactgcaaagaagatgaacagagaaagaaaattgaaactctcaaagagacaacaaatagcatggtagaatcaattaaacactgcattgtgttgctgcagattgccaaagaccagagtaatgcggagaagcacgcagatggaatgataagtactattaatcccgtagatgcaatatatcaacctagtcctttggaacctgtgatcagcacaatgccttcccagactgtgttacctccagaacctgttcagttgtgtaagtcagagcagcgtccatcttccctaccagttggacctgtgttggctaccttgggacatcatcagactcctacaccaaatagtacaggcagtggccattcaccaccgagtagcagtctcacttctccaagccacgtgaacttgtctccaaatacagtcccagagttctcttactccagcagtgaagatgaattttatgatgctgatgaattccatcaaagtggctcatccccaaagcgcttaatagattcttctggatctgcctcagtcctgacacacagcagctcgggaaatagtctaaaacgcccagataccacagaatcacttaattcttccttgtccaatggaacaagtgatgctgacctgtttgattcacatgatgacagagatgatgatgcggaggcagggtctgtggaggagcacaagagcgttatcatgcatctcttgtcgcaggttagacttggaatggatcttactaaggtagttcttccaacgtttattcttgaaagaagatctcttttagaaatgtatgcagacttttttgcacatccggacctgtttgtgagcattagtgaccagaaggatcccaaggatcgaatggttcaggttgtgaaatggtacctctcagcctttcatgcgggaaggaaaggatcagttgccaaaaagccatacaatcccattttgggcgagatttttcagtgtcattggacattaccaaatgatactgaagagaacacagaactagtttcagaaggaccagttccctgggtttccaaaaacagtgtaacatttgtggctgagcaggtttcccatcatccacccatttcagccttttatgctgagtgttttaacaagaagatacaattcaatgctcatatctggaccaaatcaaaattccttgggatgtcaattggggtgcacaacatagggcagggctgtgtctcatgtctagactatgatgaacattacattctcacattccccaatggctatggaaggtctatcctcacagtgccctgggtggaattaggaggagaatgcaatattaattgttccaaaacaggctatagtgcaaatatcatcttccacactaaacccttctatgggggcaagaagcacagaattactgccgagattttttctccaaatgacaagaagtctttttgctcaattgaaggggaatggaatggtgtgatgtatgcaaaatatgcaacaggggaaaatacagtctttgtagataccaagaagttgcctataatcaagaagaaagtgaggaagttggaagatcagaacgagtatgaatcccgcagcctttggaaggatgtcactttcaacttaaaaatcagagacattgatgcagcaactgaagcaaagcacaggcttgaagaaagacaaagagcagaagcccgagaaaggaaggagaaggaaattcagtgggagacaaggttatttcatgaagatggagaatgctgggtttatgatgaaccattactgaaacgtcttggtgctgccaagcattaggttggaagatgcaaagtttatacctgatgatcagggcagtaggcataattcagcaacaaacaatcttcctttgggagaaacctgttcattccaatcttctaattacagtggttcctatctcagggatactggactttctgacgcagatgaacaattaaggggaaaagcttcccttttccctctgtggcagttacgattttgacttcagtcctgagaaaaacttcaggttttgaaaatcagatgatgtcttctccttttccaaacaccacacgttgaaagcatttataaatccaagtctgaaactctgcgctctagtactgctgttaagatacacaacttgtttcttagttcatataatctcgggatacacacacacacacacatatatatacacacacatacgtatacacacacatacatatatataaatatacctgatgccagatttttttcataaatattctgcctactgtaaatatgggttcctctgagttgttttagaaaattagcgcaatgtattaaaatcaagtgttaggaaatttcatggtcttacctacaataacttttattttggaattgaactattattaaattgtatctaatcctggattacagtttaattaattattcttagtgcttaaggcttcataaagtaatttttccaaccttttttttaaaaatgtgcatcttttattatcttttatggttaaacttggaagccaattatttggcaaccttgaatacaagagctagcttttcaaagaaagacacttgaaataatggaggatccattcttttcctctgtcagattgtatgttctgtctttagcccctgccaggcaattccccagaatcttcacttaactcatattgcacatgtagggctgcctaccaacattttatccaaaaatgttttattgccttagagggtttgggaagagtgtgtatttatagatccccaccccacagtgaacaaaaatagatagatagatagaataaaatgaatgccacagcagcagatggctcattctgaagggaaatacagaactatatctatctatctatctatcatcttttttatttaaaaatacattaaaaaaacaggtattagtacctagcatttagttagttattcaatatactggttacgtaaggcctttcaagaagtagattctcagtctgagaggacacaggccagggcttctcaaagtgctgctgcaggctttctggtctcgcttggcccattctgctaattttcctttgccagctcctacagtaaccctgggtttattagtctcaacaaaggataaaaagtaaatcaaatgctatgatgccagtgcaaaacttcaatggaagccctaaggcagtagtataactaactccataaaatacaaacaaacacattttaaaatacacattgcttcaggccaacgtgactgcagtttatttatttgactattttatggtaggggagaaggttgagtgttgttgtgaaagccctgatatcagtaatggggatgatacaatctgccagcagaggagaggttggcaggtaggtcagctgcatcacttcacaagaagaatttgaatcctcactagaaggggtaccatcctcttccagttcatacttcccatatccaacaacctgaaagaggacaaagacaaaagtgaaaaatatgctgaccagatttaggggtttaagagttctgatgataaccacccaaactcactcagtaaatgacaaccctagaatggatggagttagttaaacatactcacatgaacgctgagcattttacttcctggccctctatgggccttgaaccagttgaccaggtctgattttgagaatgacttcagtgcttcaatcttacaagggaagggaagataggaaagaaattcaagaagaaagatagctcttaaacctaacccccaggcagatgtccctggacctgcttagcatctgaagacctcattttattcttcctattctcaggttacccctaaccttccagaccaaaacgatgatgaagctctctggcatgccttcacattttataccaatcatctacaatggcaagagaggttagcagatgctataattacagctaaataccatacactgagcccaacacccacatccccttagtgtcacctcccaattacatggtagctgcataccacggcttgaggaaatctaccttgcttctattaagaaaactaaaatgtgttaagatgaagcctcttactaaataacctctttacatcacagagcaatgatgtcctatggtaattcaccatgtaggggctatgtattaaccaaagtcacactggagtacaagatccagatctttttcataggttttactactttggaatagaagttgtcaaaacacatgcacttggaataatgaactccgtaaagacaaagagtcctcaattttctttaaacggcaaaactctttttctccacaaaatcttgtagacctcaatatatagcataaaaatagagctgctctgattgaaattggtggtggtgtggtaaggattagcacccagctcacgtggccacctaaggtgctagagaggccagtctgaaaactcaggaagtgagcgagtaatcaggccaggactagtgtttcgagtttctcttccacacaatgctggtgtgcacagacc

SEQ ID NO: 6366 - protein, 571 aa, Homo sapiens; identical to SEQ ID NO: 230

SEQ ID NO: 6367 - DNA, 2837 bp, Homo sapiens
agatggcgtccatcatggaagggccgctgagcaaatggactaacgtgatgaagggctggcagtaccgttggttcgtgctggactacaatgcaggactgctctcctactacacgggagctgtgattggtatagacgatgaggacgacagcaccttcacaataactgttgatcagaaaaccttccatttccaggcccgtgatgctgatgagcgagagaagtggatccatgccttagaagaaacaattcttcgacatactctccagcttcaaggtttggattcaggatttgttcctagtgtccaagattttgataagaaacttacagaagctgatgcttacctacaaatcttgattgaacaattaaagctttttgatgacaagcttcaaaactgcaaagaagatgaacagagaaagaaaattgaaactctcaaagagacaacaaatagcatggtagaatcaattaaacactgcattgtgttgctgcagattgccaaagaccagagtaatgcggagaagcacgcagatggaatgataagtactattaatcccgtagatgcaatatatcaacctagtcctttggaacctgtgatcagcacaatgccttcccagactgtgttacctccagaacctgttcagttgtgtaagtcagagcagcgtccatcttccctaccagttggacctgtgttggctaccttgggacatcatcagactcctacaccaaatagtacaggcagtggccattcaccaccgagtagcagtctcacttctccaagccacgtgaacttgtctccaaatacagtcccagagttctcttactccagcagtgaagatgaattttatgatgctgatgaattccatcaaagtggctcatccccaaagcgcttaatagattcttctggatctgcctcagtcctgacacacagcagctcgggaaatagtctaaaacgcccagataccacagaatcacttaattcttccttgtccaatggaacaagtgatgctgacctgtttgattcacatgatgacagagatgatgatgcggaggcagggtctgtggaggagcacaagagcgttatcatgcatctcttgtcgcaggttagacttggaatggatcttactaaggtagttcttccaacgtttattcttgaaagaagatctcttttagaaatgtatgcagacttttttgcacatccggacctgtttgtgagcattagtgaccagaaggatcccaaggatcgaatggttcaggttgtgaaatggtacctctcagcctttcatgcgggaaggaaaggatcagttgccaaaaagccatacaatcccattttgggcgagatttttcagtgtcattggacattaccaaatgatactgaagagaacacagaactagtttcagaaggaccagttccctgggtttccaaaaacagtgtaacatttgtggctgagcaggtttcccatcatccacccatttcagccttttatgctgagtgttttaacaagaagatacaattcaatgctcatatctggaccaaatcaaaattccttgggatgtcaattggggtgcacaacatagggcagggctgtgtctcatgtctagactatgatgaacattacattctcacattccccaatggctatggaaggtctatcctcacagtgccctgggtggaattaggaggagaatgcaatattaattgttccaaaacaggctatagtgcaaatatcatcttccacactaaacccttctatgggggcaagaagcacagaattactgccgagattttttctccaaatgacaagaagtctttttgctcaattgaaggggaatggaatggtgtgatgtatgcaaaatatgcaacaggggaaaatacagtctttgtagataccaagaagttgcctataatcaagaagaaagtgaggaagttggaagatcagaacgagtatgaatcccgcagcctttggaaggatgtcactttcaacttaaaaatcagagacattgatgcagcaactgaagcaaagcacaggcttgaagaaagacaaagagcagaagcccgagaaaggaaggagaaggaaattcagtgggagacaaggttatttcatgaagatggagaatgctgggtttatgatgaaccattactgaaacgtcttggtgctgccaagcattaggttggaagatgcaaagtttatacctgatgatcagggcagtaggcataattcagcaacaaacaatcttcctttgggagaaacctgttcattccaatcttctaattacagtggttcctatctcagggatactggactttctgacgcagatgaacaattaaggggaaaagcttcccttttccctctgtggcagttacgattttgacttcagtcctgagaaaaacttcaggttttgaaaatcagatgatgtcttctccttttccaaacaccacacgttgaaagcatttataaatccaagtctgaaactctgcgctctagtactgctgttaagatacacaacttgtttcttagttcatataatctcgggatacacacacacacacacatatatatacacacacatacgtatacacacacatacatatatataaatatacctgatgccagatttttttcataaatattctgcctactgtaaatatgggttcctctgagttgttttagaaaattagcgcaatgtattaaaatcaagtgttaggaaatttcatggtcttacctacaataacttttattttggaattgaactattattaaattgtatctaatcctggattacagtttaattaattattcttagtgcttaaggcttcataaagtaatttttccaacctttttttt

SEQ ID NO: 6368 - protein, 719 aa, Homo sapiens
MASIMEGPLSKWTNVMKGWQYRWFVLDYNAGLLSYYTGAVIGIDDEDDSTFTITVDQKTFHFQARDADEREKWIHALEETILRHTLQLQGLDSGFVPSVQDFDKKLTEADAYLQILIEQLKLFDDKLQNCKEDEQRKKIETLKETTNSMVESIKHCIVLLQIAKDQSNAEKHADGMISTINPVDAIYQPSPLEPVISTMPSQTVLPPEPVQLCKSEQRPSSLPVGPVLATLGHHQTPTPNSTGSGHSPPSSSLTSPSHVNLSPNTVPEFSYSSSEDEFYDADEFHQSGSSPKRLIDSSGSASVLTHSSSGNSLKRPDTTESLNSSLSNGTSDADLFDSHDDRDDDAEAGSVEEHKSVIMHLLSQVRLGMDLTKVVLPTFILERRSLLEMYADFFAHPDLFVSISDQKDPKDRMVQVVKWYLSAFHAGRKGSVAKKPYNPILGEIFQCHWTLPNDTEENTELVSEGPVPWVSKNSVTFVAEQVSHHPPISAFYAECFNKKIQFNAHIWTKSKFLGMSIGVHNIGQGCVSCLDYDEHYILTFPNGYGRSILTVPWVELGGECNINCSKTGYSANIIFHTKPFYGGKKHRITAEIFSPNDKKSFCSIEGEWNGVMYAKYATGENTVFVDTKKLPIIKKKVRKLEDQNEYESRSLWKDVTFNLKIRDIDAATEAKHRLEERQRAEARERKEKEIQWETRLFHEDGECWVYDEPLLKRLGAAKH

SEQ ID NO: 6369 - DNA, 2772 bp, Homo sapiens
gaagggggtgaagggggtgtcccgggggacgggctgaacctcagtcaggaccgcctgcaccgcagtccggggatcgggtcgaggggagaagaaaaaggggtgctcgggagcagcccccggctacctcccctggaggcacagagggcgggggccttggcgaatggctttcttgctggccacttgcggagtgagtagaccccgagggtctgggagaggggccggcccctacccctgagtccccggggtcccggccgccaggccggagcgcgaatgtcgtgctcaccctgcctccttcccgccgccccctgggggtttggattcaggatttgttcctagtgtccaagattttgataagaaacttacagaagctgatgcttacctacaaatcttgattgaacaattaaagctttttgatgacaagcttcaaaactgcaaagaagatgaacagagaaagaaaattgaaactctcaaagagacaacaaatagcatggtagaatcaattaaacactgcattgtgttgctgcagattgccaaaagtactattaatcccgtagatgcaatatatcaacctagtcctttggaacctgtgatcagcacaatgccttcccagactgtgttacctccagaacctgttcagttgtgtaagtcagagcagcgtccatcttccctaccagttggacctgtgttggctaccttgggacatcatcagactcctacaccaaatagtacaggcagtggccattcaccaccgagtagcagtctcacttctccaagccacgtgaacttgtctccaaatacagtcccagagttctcttactccagcagtgaagatgaattttatgatgctgatgaattccatcaaagtggctcatccccaaagcgcttaatagattcttctggatctgcctcagtcctgacacacagcagctcgggaaatagtctaaaacgcccagataccacagaatcacttaattcttccttgtccaatggaacaagtgatgctgacctgtttgattcacatgatgacagagatgatgatgcggaggcagggtctgtggaggagcacaagagcgttatcatgcatctcttgtcgcaggttagacttggaatggatcttactaaggtagttcttccaacgtttattcttgaaagaagatctcttttagaaatgtatgcagacttttttgcacatccggacctgtttgtgagcattagtgaccagaaggatcccaaggatcgaatggttcaggttgtgaaatggtacctctcagcctttcatgcgggaaggaaaggatcagttgccaaaaagccatacaatcccattttgggcgagatttttcagtgtcattggacattaccaaatgatactgaagagaacacagaactagtttcagaaggaccagttccctgggtttccaaaaacagtgtaacatttgtggctgagcaggtttcccatcatccacccatttcagccttttatgctgagtgttttaacaagaagatacaattcaatgctcatatctggaccaaatcaaaattccttgggatgtcaattggggtgcacaacatagggcagggctgtgtctcatgtctagactatgatgaacattacattctcacattccccaatggctatggaaggtctatcctcacagtgccctgggtggaattaggaggagaatgcaatattaattgttccaaaacaggctatagtgcaaatatcatcttccacactaaacccttctatgggggcaagaagcacagaattactgccgagattttttctccaaatgacaagaagtctttttgctcaattgaaggggaatggaatggtgtgatgtatgcaaaatatgcaacaggggaaaatacagtctttgtagataccaagaagttgcctataatcaagaagaaagtgaggaagttggaagatcagaacgagtatgaatcccgcagcctttggaaggatgtcactttcaacttaaaaatcagagacattgatgcagcaactgaagcaaagcacaggcttgaagaaagacaaagagcagaagcccgagaaaggaaggagaaggaaattcagtgggagacaaggttatttcatgaagatggagaatgctgggtttatgatgaaccattactgaaacgtcttggtgctgccaagcattaggttggaagatgcaaagtttatacctgatgatcagggcagtaggcataattcagcaacaaacaatcttcctttgggagaaacctgttcattccaatcttctaattacagtggttcctatctcagggatactggactttctgacgcagatgaacaattaaggggaaaagcttcccttttccctctgtggcagttacgattttgacttcagtcctgagaaaaacttcaggttttgaaaatcagatgatgtcttctccttttccaaacaccacacgttgaaagcatttataaatccaagtctgaaactctgcgctctagtactgctgttaagatacacaacttgtttcttagttcatataatctcgggatacacacacacacacacatatatatacacacacatacgtatacacacacatacatatatataaatatacctgatgccagatttttttcataaatattctgcctactgtaaatatgggttcctctgagttgttttagaaaattagcgcaatgtattaaaatcaagtgttaggaaatttcatggtcttacctacaataacttttattttggaattgaactattattaaattgtatctaatcctgg

SEQ ID NO: 6370 - protein, 558 aa, Homo sapiens; identical to SEQ ID NO: 226

SEQ ID NO: 6371 - DNA, 2839 bp, Homo sapiens
gaagggggtgaagggggtgtcccgggggacgggctgaacctcagtcaggaccgcctgcaccgcagtccggggatcgggtcgaggggagaagaaaaaggggtgctcgggagcagcccccggctacctcccctggaggcacagagggcgggggccttggcgaatggctttcttgctggccacttgcggagtgagtagaccccgagggtctgggagaggggccggcccctacccctgagtccccggggtcccggccgccaggccggagcgcgaatgtcgtgctcaccctgcctccttcccgccgccccctgggggtttggattcaggatttgttcctagtgtccaagattttgataagaaacttacagaagctgatgcttacctacaaatcttgattgaacaattaaagctttttgatgacaagcttcaaaactgcaaagaagatgaacagagaaagaaaattgaaactctcaaagagacaacaaatagcatggtagaatcaattaaacactgcattgtgttgctgcagattgccaaaagtactattaatcccgtagatgcaatatatcaacctagtcctttggaacctgtgatcagcacaatgccttcccagactgtgttacctccagaacctgttcagttgtgtaagtcagagcagcgtccatcttccctaccagttggacctgtgttggctaccttgggacatcatcagactcctacaccaaatagtacaggcagtggccattcaccaccgagtagcagtctcacttctccaagccacgtgaacttgtctccaaatacagtcccagagttctcttactccagcagtgaagatgaattttatgatgctgatgaattccatcaaagtggctcatccccaaagcgcttaatagattcttctggatctgcctcagtcctgacacacagcagctcgggaaatagtctaaaacgcccagataccacagaatcacttaattcttccttgtccaatggaacaagtgatgctgacctgtttgattcacatgatgacagagatgatgatgcggaggcagggtctgtggaggagcacaagagcgttatcatgcatctcttgtcgcaggttagacttggaatggatcttactaaggtagttcttccaacgtttattcttgaaagaagatctcttttagaaatgtatgcagacttttttgcacatccggacctgtttgtgagcattagtgaccagaaggatcccaaggatcgaatggttcaggttgtgaaatggtacctctcagcctttcatgcgggaaggaaaggatcagttgccaaaaagccatacaatcccattttgggcgagatttttcagtgtcattggacattaccaaatgatactgaagagaacacagaactagtttcagaaggaccagttccctgggtttccaaaaacagtgtaacatttgtggctgagcaggtttcccatcatccacccatttcagccttttatgctgagtgttttaacaagaagatacaattcaatgctcatatctggaccaaatcaaaattccttgggatgtcaattggggtgcacaacatagggcagggctgtgtctcatgtctagactatgatgaacattacattctcacattccccaatggctatggaaggtctatcctcacagtgccctgggtggaattaggaggagaatgcaatattaattgttccaaaacaggctatagtgcaaatatcatcttccacactaaacccttctatgggggcaagaagcacagaattactgccgagattttttctccaaatgacaagaagtctttttgctcaattgaaggggaatggaatggtgtgatgtatgcaaaatatgcaacaggggaaaatacagtctttgtagataccaagaagttgcctataatcaagaagaaagtgaggaagttggaagatcagaacgagtatgaatcccgcagcctttggaaggatgtcactttcaacttaaaaatcagagacattgatgcagcaactgaagcaaagcacaggcttgaagaaagacaaagagcagaagcccgagaaaggaaggagaaggaaattcagtgggagacaaggttatttcatgaagatggagaatgctgggtttatgatgaaccattactgaaacgtcttggtgctgccaagcattaggttggaagatgcaaagtttatacctgatgatcagggcagtaggcataattcagcaacaaacaatcttcctttgggagaaacctgttcattccaatcttctaattacagtggttcctatctcagggatactggactttctgacgcagatgaacaattaaggggaaaagcttcccttttccctctgtggcagttacgattttgacttcagtcctgagaaaaacttcaggttttgaaaatcagatgatgtcttctccttttccaaacaccacacgttgaaagcatttataaatccaagtctgaaactctgcgctctagtactgctgttaagatacacaacttgtttcttagttcatataatctcgggatacacacacacacacacatatatatacacacacatacgtatacacacacatacatatatataaatatacctgatgccagatttttttcataaatattctgcctactgtaaatatgggttcctctgagttgttttagaaaattagcgcaatgtattaaaatcaagtgttaggaaatttcatggtcttacctacaataacttttattttggaattgaactattattaaattgtatctaatcctggattacagtttaattaattattcttagtgcttaaggcttcataaagtaatttttccaacctttttttt

SEQ ID NO: 6372 - protein, 558 aa, Homo sapiens; identical to SEQ ID NO: 226

SEQ ID NO: 6373 - DNA, 2743 bp, Homo sapiens
gaagggggtgaagggggtgtcccgggggacgggctgaacctcagtcaggaccgcctgcaccgcagtccggggatcgggtcgaggggagaagaaaaaggggtgctcgggagcagcccccggctacctcccctggaggcacagagggcgggggccttggcgaatggctttcttgctggccacttgcggagtgagtagaccccgagggtctgggagaggggccggcccctacccctgagtccccggggtcccggccgccaggccggagcgcgaatgtcgtgctcaccctgcctccttcccgccgccccctgggctttttgatgacaagcttcaaaactgcaaagaagatgaacagagaaagaaaattgaaactctcaaagagacaacaaatagcatggtagaatcaattaaacactgcattgtgttgctgcagattgccaaaagtactattaatcccgtagatgcaatatatcaacctagtcctttggaacctgtgatcagcacaatgccttcccagactgtgttacctccagaacctgttcagttgtgtaagtcagagcagcgtccatcttccctaccagttggacctgtgttggctaccttgggacatcatcagactcctacaccaaatagtacaggcagtggccattcaccaccgagtagcagtctcacttctccaagccacgtgaacttgtctccaaatacagtcccagagttctcttactccagcagtgaagatgaattttatgatgctgatgaattccatcaaagtggctcatccccaaagcgcttaatagattcttctggatctgcctcagtcctgacacacagcagctcgggaaatagtctaaaacgcccagataccacagaatcacttaattcttccttgtccaatggaacaagtgatgctgacctgtttgattcacatgatgacagagatgatgatgcggaggcagggtctgtggaggagcacaagagcgttatcatgcatctcttgtcgcaggttagacttggaatggatcttactaaggtagttcttccaacgtttattcttgaaagaagatctcttttagaaatgtatgcagacttttttgcacatccggacctgtttgtgagcattagtgaccagaaggatcccaaggatcgaatggttcaggttgtgaaatggtacctctcagcctttcatgcgggaaggaaaggatcagttgccaaaaagccatacaatcccattttgggcgagatttttcagtgtcattggacattaccaaatgatactgaagagaacacagaactagtttcagaaggaccagttccctgggtttccaaaaacagtgtaacatttgtggctgagcaggtttcccatcatccacccatttcagccttttatgctgagtgttttaacaagaagatacaattcaatgctcatatctggaccaaatcaaaattccttgggatgtcaattggggtgcacaacatagggcagggctgtgtctcatgtctagactatgatgaacattacattctcacattccccaatggctatggaaggtctatcctcacagtgccctgggtggaattaggaggagaatgcaatattaattgttccaaaacaggctatagtgcaaatatcatcttccacactaaacccttctatgggggcaagaagcacagaattactgccgagattttttctccaaatgacaagaagtctttttgctcaattgaaggggaatggaatggtgtgatgtatgcaaaatatgcaacaggggaaaatacagtctttgtagataccaagaagttgcctataatcaagaagaaagtgaggaagttggaagatcagaacgagtatgaatcccgcagcctttggaaggatgtcactttcaacttaaaaatcagagacattgatgcagcaactgaagcaaagcacaggcttgaagaaagacaaagagcagaagcccgagaaaggaaggagaaggaaattcagtgggagacaaggttatttcatgaagatggagaatgctgggtttatgatgaaccattactgaaacgtcttggtgctgccaagcattaggttggaagatgcaaagtttatacctgatgatcagggcagtaggcataattcagcaacaaacaatcttcctttgggagaaacctgttcattccaatcttctaattacagtggttcctatctcagggatactggactttctgacgcagatgaacaattaaggggaaaagcttcccttttccctctgtggcagttacgattttgacttcagtcctgagaaaaacttcaggttttgaaaatcagatgatgtcttctccttttccaaacaccacacgttgaaagcatttataaatccaagtctgaaactctgcgctctagtactgctgttaagatacacaacttgtttcttagttcatataatctcgggatacacacacacacacacatatatatacacacacatacgtatacacacacatacatatatataaatatacctgatgccagatttttttcataaatattctgcctactgtaaatatgggttcctctgagttgttttagaaaattagcgcaatgtattaaaatcaagtgttaggaaatttcatggtcttacctacaataacttttattttggaattgaactattattaaattgtatctaatcctggattacagtttaattaattattcttagtgcttaaggcttcataaagtaatttttccaacctttttttt

SEQ ID NO: 6374 - protein, 558 aa, Homo sapiens; identical to SEQ ID NO: 226

SEQ ID NO: 6375 - DNA, 2681 bp, Homo sapiens
gaacctcagtcaggaccgcctgcaccgcagtccggggatcgggtcgaggggagaagaaaaaggggtgctcgggagcagcccccggctacctcccctggaggcacagagggcgggggccttggcgaatggctttcttgctggccacttgcggaggtttggattcaggatttgttcctagtgtccaagattttgataagaaacttacagaagctgatgcttacctacaaatcttgattgaacaattaaagctttttgatgacaagcttcaaaactgcaaagaagatgaacagagaaagaaaattgaaactctcaaagagacaacaaatagcatggtagaatcaattaaacactgcattgtgttgctgcagattgccaaaagtactattaatcccgtagatgcaatatatcaacctagtcctttggaacctgtgatcagcacaatgccttcccagactgtgttacctccagaacctgttcagttgtgtaagtcagagcagcgtccatcttccctaccagttggacctgtgttggctaccttgggacatcatcagactcctacaccaaatagtacaggcagtggccattcaccaccgagtagcagtctcacttctccaagccacgtgaacttgtctccaaatacagtcccagagttctcttactccagcagtgaagatgaattttatgatgctgatgaattccatcaaagtggctcatccccaaagcgcttaatagattcttctggatctgcctcagtcctgacacacagcagctcgggaaatagtctaaaacgcccagataccacagaatcacttaattcttccttgtccaatggaacaagtgatgctgacctgtttgattcacatgatgacagagatgatgatgcggaggcagggtctgtggaggagcacaagagcgttatcatgcatctcttgtcgcaggttagacttggaatggatcttactaaggtagttcttccaacgtttattcttgaaagaagatctcttttagaaatgtatgcagacttttttgcacatccggacctgtttgtgagcattagtgaccagaaggatcccaaggatcgaatggttcaggttgtgaaatggtacctctcagcctttcatgcgggaaggaaaggatcagttgccaaaaagccatacaatcccattttgggcgagatttttcagtgtcattggacattaccaaatgatactgaagagaacacagaactagtttcagaaggaccagttccctgggtttccaaaaacagtgtaacatttgtggctgagcaggtttcccatcatccacccatttcagccttttatgctgagtgttttaacaagaagatacaattcaatgctcatatctggaccaaatcaaaattccttgggatgtcaattggggtgcacaacatagggcagggctgtgtctcatgtctagactatgatgaacattacattctcacattccccaatggctatggaaggtctatcctcacagtgccctgggtggaattaggaggagaatgcaatattaattgttccaaaacaggctatagtgcaaatatcatcttccacactaaacccttctatgggggcaagaagcacagaattactgccgagattttttctccaaatgacaagaagtctttttgctcaattgaaggggaatggaatggtgtgatgtatgcaaaatatgcaacaggggaaaatacagtctttgtagataccaagaagttgcctataatcaagaagaaagtgaggaagttggaagatcagaacgagtatgaatcccgcagcctttggaaggatgtcactttcaacttaaaaatcagagacattgatgcagcaactgaagcaaagcacaggcttgaagaaagacaaagagcagaagcccgagaaaggaaggagaaggaaattcagtgggagacaaggttatttcatgaagatggagaatgctgggtttatgatgaaccattactgaaacgtcttggtgctgccaagcattaggttggaagatgcaaagtttatacctgatgatcagggcagtaggcataattcagcaacaaacaatcttcctttgggagaaacctgttcattccaatcttctaattacagtggttcctatctcagggatactggactttctgacgcagatgaacaattaaggggaaaagcttcccttttccctctgtggcagttacgattttgacttcagtcctgagaaaaacttcaggttttgaaaatcagatgatgtcttctccttttccaaacaccacacgttgaaagcatttataaatccaagtctgaaactctgcgctctagtactgctgttaagatacacaacttgtttcttagttcatataatctcgggatacacacacacacacacatatatatacacacacatacgtatacacacacatacatatatataaatatacctgatgccagatttttttcataaatattctgcctactgtaaatatgggttcctctgagttgttttagaaaattagcgcaatgtattaaaatcaagtgttaggaaatttcatggtcttacctacaataacttttattttggaattgaactattattaaattgtatctaatcctggattacagtttaattaattattcttagtgcttaaggcttcataaagtaatttttccaacctttttttt

SEQ ID NO: 6376 - protein, 626 aa, Homo sapiens; identical to SEQ ID NO: 232

SEQ ID NO: 6377 - DNA, 4684 bp, Homo sapiens
gaacctcagtcaggaccgcctgcaccgcagtccggggatcgggtcgaggggagaagaaaaaggggtgctcgggagcagcccccggctacctcccctggaggcacagagggcgggggccttggcgaatggctttcttgctggccacttgcggaggtttggattcaggatttgttcctagtgtccaagattttgataagaaacttacagaagctgatgcttacctacaaatcttgattgaacaattaaagctttttgatgacaagcttcaaaactgcaaagaagatgaacagagaaagaaaattgaaactctcaaagagacaacaaatagcatggtagaatcaattaaacactgcattgtgttgctgcagattgccaaaagtactattaatcccgtagatgcaatatatcaacctagtcctttggaacctgtgatcagcacaatgccttcccagactgtgttacctccagaacctgttcagttgtgtaagtcagagcagcgtccatcttccctaccagttggacctgtgttggctaccttgggacatcatcagactcctacaccaaatagtacaggcagtggccattcaccaccgagtagcagtctcacttctccaagccacgtgaacttgtctccaaatacagtcccagagttctcttactccagcagtgaagatgaattttatgatgctgatgaattccatcaaagtggctcatccccaaagcgcttaatagattcttctggatctgcctcagtcctgacacacagcagctcgggaaatagtctaaaacgcccagataccacagaatcacttaattcttccttgtccaatggaacaagtgatgctgacctgtttgattcacatgatgacagagatgatgatgcggaggcagggtctgtggaggagcacaagagcgttatcatgcatctcttgtcgcaggttagacttggaatggatcttactaaggtagttcttccaacgtttattcttgaaagaagatctcttttagaaatgtatgcagacttttttgcacatccggacctgtttgtgagcattagtgaccagaaggatcccaaggatcgaatggttcaggttgtgaaatggtacctctcagcctttcatgcgggaaggaaaggatcagttgccaaaaagccatacaatcccattttgggcgagatttttcagtgtcattggacattaccaaatgatactgaagagaacacagaactagtttcagaaggaccagttccctgggtttccaaaaacagtgtaacatttgtggctgagcaggtttcccatcatccacccatttcagccttttatgctgagtgttttaacaagaagatacaattcaatgctcatatctggaccaaatcaaaattccttgggatgtcaattggggtgcacaacatagggcagggctgtgtctcatgtctagactatgatgaacattacattctcacattccccaatggctatggaaggtctatcctcacagtgccctgggtggaattaggaggagaatgcaatattaattgttccaaaacaggctatagtgcaaatatcatcttccacactaaacccttctatgggggcaagaagcacagaattactgccgagattttttctccaaatgacaagaagtctttttgctcaattgaaggggaatggaatggtgtgatgtatgcaaaatatgcaacaggggaaaatacagtctttgtagataccaagaagttgcctataatcaagaagaaagtgaggaagttggaagatcagaacgagtatgaatcccgcagcctttggaaggatgtcactttcaacttaaaaatcagagacattgatgcagcaactgaagcaaagcacaggcttgaagaaagacaaagagcagaagcccgagaaaggaaggagaaggaaattcagtgggagacaaggttatttcatgaagatggagaatgctgggtttatgatgaaccattactgaaacgtcttggtgctgccaagcattaggttggaagatgcaaagtttatacctgatgatcagggcagtaggcataattcagcaacaaacaatcttcctttgggagaaacctgttcattccaatcttctaattacagtggttcctatctcagggatactggactttctgacgcagatgaacaattaaggggaaaagcttcccttttccctctgtggcagttacgattttgacttcagtcctgagaaaaacttcaggttttgaaaatcagatgatgtcttctccttttccaaacaccacacgttgaaagcatttataaatccaagtctgaaactctgcgctctagtactgctgttaagatacacaacttgtttcttagttcatataatctcgggatacacacacacacacacatatatatacacacacatacgtatacacacacatacatatatataaatatacctgatgccagatttttttcataaatattctgcctactgtaaatatgggttcctctgagttgttttagaaaattagcgcaatgtattaaaatcaagtgttaggaaatttcatggtcttacctacaataacttttattttggaattgaactattattaaattgtatctaatcctggattacagtttaattaattattcttagtgcttaaggcttcataaagtaatttttccaaccttttttttaaaaatgtgcatcttttattatcttttatggttaaacttggaagccaattatttggcaaccttgaatacaagagctagcttttcaaagaaagacacttgaaataatggaggatccattcttttcctctgtcagattgtatgttctgtctttagcccctgccaggcaattccccagaatcttcacttaactcatattgcacatgtagggctgcctaccaacattttatccaaaaatgttttattgccttagagggtttgggaagagtgtgtatttatagatccccaccccacagtgaacaaaaatagatagatagatagaataaaatgaatgccacagcagcagatggctcattctgaagggaaatacagaactatatctatctatctatctatcatcttttttatttaaaaatacattaaaaaaacaggtattagtacctagcatttagttagttattcaatatactggttacgtaaggcctttcaagaagtagattctcagtctgagaggacacaggccagggcttctcaaagtgctgctgcaggctttctggtctcgcttggcccattctgctaattttcctttgccagctcctacagtaaccctgggtttattagtctcaacaaaggataaaaagtaaatcaaatgctatgatgccagtgcaaaacttcaatggaagccctaaggcagtagtataactaactccataaaatacaaacaaacacattttaaaatacacattgcttcaggccaacgtgactgcagtttatttatttgactattttatggtaggggagaaggttgagtgttgttgtgaaagccctgatatcagtaatggggatgatacaatctgccagcagaggagaggttggcaggtaggtcagctgcatcacttcacaagaagaatttgaatcctcactagaaggggtaccatcctcttccagttcatacttcccatatccaacaacctgaaagaggacaaagacaaaagtgaaaaatatgctgaccagatttaggggtttaagagttctgatgataaccacccaaactcactcagtaaatgacaaccctagaatggatggagttagttaaacatactcacatgaacgctgagcattttacttcctggccctctatgggccttgaaccagttgaccaggtctgattttgagaatgacttcagtgcttcaatcttacaagggaagggaagataggaaagaaattcaagaagaaagatagctcttaaacctaacccccaggcagatgtccctggacctgcttagcatctgaagacctcattttattcttcctattctcaggttacccctaaccttccagaccaaaacgatgatgaagctctctggcatgccttcacattttataccaatcatctacaatggcaagagaggttagcagatgctataattacagctaaataccatacactgagcccaacacccacatccccttagtgtcacctcccaattacatggtagctgcataccacggcttgaggaaatctaccttgcttctattaagaaaactaaaatgtgttaagatgaagcctcttactaaataacctctttacatcacagagcaatgatgtcctatggtaattcaccatgtaggggctatgtattaaccaaagtcacactggagtacaagatccagatctttttcataggttttactactttggaatagaagttgtcaaaacacatgcacttggaataatgaactccgtaaagacaaagagtcctcaattttctttaaacggcaaaactctttttctccacaaaatcttgtagacctcaatatatagcataaaaatagagctgctctgattgaaattggtggtggtgtggtaaggattagcacccagctcacgtggccacctaaggtgctagagaggccagtctgaaaactcaggaagtgagcgagtaatcaggccaggactagtgtttcgagtttctcttccacacaatgctggtgtgcacagacc

SEQ ID NO: 6378 - protein, 626 aa, Homo sapiens; identical to SEQ ID NO: 232

SEQ ID NO: 6379 - DNA, 3370 bp, Homo sapiens
cttctaaatggtaaatgtaaactttgctgtggcaaagactttggtttaacatgtacacactcgcacccccctgctgccctatggagttttctttttaaaatgccttcatgctgtcagaataatttcttgacttagaatcagagaatcctagacttttctcccctctaaaattaactacatgtctgaatttttctccctctcttctgaatcctcagaaagcaagccctcttctctacactccccagttagaagatgcatctctttctctttagtgaccataaaactagacacacagtcagccttctgcatctgtggattcaaccaaccatggattcaaaatatttgaggaaaaaaaaagtacctctttactgaatatgtatatactgttttccttgtcatgatttcctaaacaatacagtataatggtgatttatataatatttacataatattaggtgtcataagtaatttagagatgatttaacttatatgggagcgtatgtgtaggttgtatgcaaatactacacgatattttatcagggacttgagtgtctgtggattttggcatcctcggggggtgcttggaaccagtccccctggatacctgaggagtgactgtactgtgtgatagcagcagtatgggatggaaagatgagatcctagtggtgcaggtacatcagttggacatttggtgtaactcaccaaaagtgaaaaaaacagagaaacaatatttgtggtgaattaagagattgagaagcaccgaattgaattgagaggtggttttgacttcctgaaatctccccacaccattttataactcctcagtttttccatttagctttaccttcttctgtgacagagattcattcattgtctttccttactatgctttaagcaactcttacacttctgtatagaaaaggtgtttcattccctcttttcattttgatcaacatatctatatagctaccctcaggattttgaagtcataaatgtgggcatttgggagggtagcatgagaagagcatttaattaaaaatagctatattgtgtttctttattttagagtactattaatcccgtagatgcaatatatcaacctagtcctttggaacctgtgatcagcacaatgccttcccagactgtgttacctccagaacctgttcagttgtgtaagtcagagcagcgtccatcttccctaccagttggacctgtgttggctaccttgggacatcatcagactcctacaccaaatagtacaggcagtggccattcaccaccgagtagcagtctcacttctccaagccacgtgaacttgtctccaaatacagtcccagagttctcttactccagcagtgaagatgaattttatgatgctgatgaattccatcaaagtggctcatccccaaagcgcttaatagattcttctggatctgcctcagtcctgacacacagcagctcgggaaatagtctaaaacgcccagataccacagaatcacttaattcttccttgtccaatggaacaagtgatgctgacctgtttgattcacatgatgacagagatgatgatgcggaggcagggtctgtggaggagcacaagagcgttatcatgcatctcttgtcgcaggttagacttggaatggatcttactaaggtagttcttccaacgtttattcttgaaagaagatctcttttagaaatgtatgcagacttttttgcacatccggacctgtttgtgagcattagtgaccagaaggatcccaaggatcgaatggttcaggttgtgaaatggtacctctcagcctttcatgcgggaaggaaaggatcagttgccaaaaagccatacaatcccattttgggcgagatttttcagtgtcattggacattaccaaatgatactgaagagaacacagaactagtttcagaaggaccagttccctgggtttccaaaaacagtgtaacatttgtggctgagcaggtttcccatcatccacccatttcagccttttatgctgagtgttttaacaagaagatacaattcaatgctcatatctggaccaaatcaaaattccttgggatgtcaattggggtgcacaacatagggcagggctgtgtctcatgtctagactatgatgaacattacattctcacattccccaatggctatggaaggtctatcctcacagtgccctgggtggaattaggaggagaatgcaatattaattgttccaaaacaggctatagtgcaaatatcatcttccacactaaacccttctatgggggcaagaagcacagaattactgccgagattttttctccaaatgacaagaagtctttttgctcaattgaaggggaatggaatggtgtgatgtatgcaaaatatgcaacaggggaaaatacagtctttgtagataccaagaagttgcctataatcaagaagaaagtgaggaagttggaagatcagaacgagtatgaatcccgcagcctttggaaggatgtcactttcaacttaaaaatcagagacattgatgcagcaactgaagcaaagcacaggcttgaagaaagacaaagagcagaagcccgagaaaggaaggagaaggaaattcagtgggagacaaggttatttcatgaagatggagaatgctgggtttatgatgaaccattactgaaacgtcttggtgctgccaagcattaggttggaagatgcaaagtttatacctgatgatcagggcagtaggcataattcagcaacaaacaatcttcctttgggagaaacctgttcattccaatcttctaattacagtggttcctatctcagggatactggactttctgacgcagatgaacaattaaggggaaaagcttcccttttccctctgtggcagttacgattttgacttcagtcctgagaaaaacttcaggttttgaaaatcagatgatgtcttctccttttccaaacaccacacgttgaaagcatttataaatccaagtctgaaactctgcgctctagtactgctgttaagatacacaacttgtttcttagttcatataatctcgggatacacacacacacacacatatatatacacacacatacgtatacacacacatacatatatataaatatacctgatgccagatttttttcataaatattctgcctactgtaaatatgggttcctctgagttgttttagaaaattagcgcaatgtattaaaatcaagtgttaggaaatttcatggtcttacctacaataacttttattttggaattgaactattattaaattgtatctaatcctggattacagtttaattaattattcttagtgcttaaggcttcataaagtaatttttccaacctttttttt

SEQ ID NO: 6380 - protein, 521 aa, Homo sapiens
MPSQTVLPPEPVQLCKSEQRPSSLPVGPVLATLGHHQTPTPNSTGSGHSPPSSSLTSPSHVNLSPNTVPEFSYSSSEDEFYDADEFHQSGSSPKRLIDSSGSASVLTHSSSGNSLKRPDTTESLNSSLSNGTSDADLFDSHDDRDDDAEAGSVEEHKSVIMHLLSQVRLGMDLTKVVLPTFILERRSLLEMYADFFAHPDLFVSISDQKDPKDRMVQVVKWYLSAFHAGRKGSVAKKPYNPILGEIFQCHWTLPNDTEENTELVSEGPVPWVSKNSVTFVAEQVSHHPPISAFYAECFNKKIQFNAHIWTKSKFLGMSIGVHNIGQGCVSCLDYDEHYILTFPNGYGRSILTVPWVELGGECNINCSKTGYSANIIFHTKPFYGGKKHRITAEIFSPNDKKSFCSIEGEWNGVMYAKYATGENTVFVDTKKLPIIKKKVRKLEDQNEYESRSLWKDVTFNLKIRDIDAATEAKHRLEERQRAEARERKEKEIQWETRLFHEDGECWVYDEPLLKRLGAAKH

SEQ ID NO: 6381 - DNA, 5373 bp, Homo sapiens
cttctaaatggtaaatgtaaactttgctgtggcaaagactttggtttaacatgtacacactcgcacccccctgctgccctatggagttttctttttaaaatgccttcatgctgtcagaataatttcttgacttagaatcagagaatcctagacttttctcccctctaaaattaactacatgtctgaatttttctccctctcttctgaatcctcagaaagcaagccctcttctctacactccccagttagaagatgcatctctttctctttagtgaccataaaactagacacacagtcagccttctgcatctgtggattcaaccaaccatggattcaaaatatttgaggaaaaaaaaagtacctctttactgaatatgtatatactgttttccttgtcatgatttcctaaacaatacagtataatggtgatttatataatatttacataatattaggtgtcataagtaatttagagatgatttaacttatatgggagcgtatgtgtaggttgtatgcaaatactacacgatattttatcagggacttgagtgtctgtggattttggcatcctcggggggtgcttggaaccagtccccctggatacctgaggagtgactgtactgtgtgatagcagcagtatgggatggaaagatgagatcctagtggtgcaggtacatcagttggacatttggtgtaactcaccaaaagtgaaaaaaacagagaaacaatatttgtggtgaattaagagattgagaagcaccgaattgaattgagaggtggttttgacttcctgaaatctccccacaccattttataactcctcagtttttccatttagctttaccttcttctgtgacagagattcattcattgtctttccttactatgctttaagcaactcttacacttctgtatagaaaaggtgtttcattccctcttttcattttgatcaacatatctatatagctaccctcaggattttgaagtcataaatgtgggcatttgggagggtagcatgagaagagcatttaattaaaaatagctatattgtgtttctttattttagagtactattaatcccgtagatgcaatatatcaacctagtcctttggaacctgtgatcagcacaatgccttcccagactgtgttacctccagaacctgttcagttgtgtaagtcagagcagcgtccatcttccctaccagttggacctgtgttggctaccttgggacatcatcagactcctacaccaaatagtacaggcagtggccattcaccaccgagtagcagtctcacttctccaagccacgtgaacttgtctccaaatacagtcccagagttctcttactccagcagtgaagatgaattttatgatgctgatgaattccatcaaagtggctcatccccaaagcgcttaatagattcttctggatctgcctcagtcctgacacacagcagctcgggaaatagtctaaaacgcccagataccacagaatcacttaattcttccttgtccaatggaacaagtgatgctgacctgtttgattcacatgatgacagagatgatgatgcggaggcagggtctgtggaggagcacaagagcgttatcatgcatctcttgtcgcaggttagacttggaatggatcttactaaggtagttcttccaacgtttattcttgaaagaagatctcttttagaaatgtatgcagacttttttgcacatccggacctgtttgtgagcattagtgaccagaaggatcccaaggatcgaatggttcaggttgtgaaatggtacctctcagcctttcatgcgggaaggaaaggatcagttgccaaaaagccatacaatcccattttgggcgagatttttcagtgtcattggacattaccaaatgatactgaagagaacacagaactagtttcagaaggaccagttccctgggtttccaaaaacagtgtaacatttgtggctgagcaggtttcccatcatccacccatttcagccttttatgctgagtgttttaacaagaagatacaattcaatgctcatatctggaccaaatcaaaattccttgggatgtcaattggggtgcacaacatagggcagggctgtgtctcatgtctagactatgatgaacattacattctcacattccccaatggctatggaaggtctatcctcacagtgccctgggtggaattaggaggagaatgcaatattaattgttccaaaacaggctatagtgcaaatatcatcttccacactaaacccttctatgggggcaagaagcacagaattactgccgagattttttctccaaatgacaagaagtctttttgctcaattgaaggggaatggaatggtgtgatgtatgcaaaatatgcaacaggggaaaatacagtctttgtagataccaagaagttgcctataatcaagaagaaagtgaggaagttggaagatcagaacgagtatgaatcccgcagcctttggaaggatgtcactttcaacttaaaaatcagagacattgatgcagcaactgaagcaaagcacaggcttgaagaaagacaaagagcagaagcccgagaaaggaaggagaaggaaattcagtgggagacaaggttatttcatgaagatggagaatgctgggtttatgatgaaccattactgaaacgtcttggtgctgccaagcattaggttggaagatgcaaagtttatacctgatgatcagggcagtaggcataattcagcaacaaacaatcttcctttgggagaaacctgttcattccaatcttctaattacagtggttcctatctcagggatactggactttctgacgcagatgaacaattaaggggaaaagcttcccttttccctctgtggcagttacgattttgacttcagtcctgagaaaaacttcaggttttgaaaatcagatgatgtcttctccttttccaaacaccacacgttgaaagcatttataaatccaagtctgaaactctgcgctctagtactgctgttaagatacacaacttgtttcttagttcatataatctcgggatacacacacacacacacatatatatacacacacatacgtatacacacacatacatatatataaatatacctgatgccagatttttttcataaatattctgcctactgtaaatatgggttcctctgagttgttttagaaaattagcgcaatgtattaaaatcaagtgttaggaaatttcatggtcttacctacaataacttttattttggaattgaactattattaaattgtatctaatcctggattacagtttaattaattattcttagtgcttaaggcttcataaagtaatttttccaaccttttttttaaaaatgtgcatcttttattatcttttatggttaaacttggaagccaattatttggcaaccttgaatacaagagctagcttttcaaagaaagacacttgaaataatggaggatccattcttttcctctgtcagattgtatgttctgtctttagcccctgccaggcaattccccagaatcttcacttaactcatattgcacatgtagggctgcctaccaacattttatccaaaaatgttttattgccttagagggtttgggaagagtgtgtatttatagatccccaccccacagtgaacaaaaatagatagatagatagaataaaatgaatgccacagcagcagatggctcattctgaagggaaatacagaactatatctatctatctatctatcatcttttttatttaaaaatacattaaaaaaacaggtattagtacctagcatttagttagttattcaatatactggttacgtaaggcctttcaagaagtagattctcagtctgagaggacacaggccagggcttctcaaagtgctgctgcaggctttctggtctcgcttggcccattctgctaattttcctttgccagctcctacagtaaccctgggtttattagtctcaacaaaggataaaaagtaaatcaaatgctatgatgccagtgcaaaacttcaatggaagccctaaggcagtagtataactaactccataaaatacaaacaaacacattttaaaatacacattgcttcaggccaacgtgactgcagtttatttatttgactattttatggtaggggagaaggttgagtgttgttgtgaaagccctgatatcagtaatggggatgatacaatctgccagcagaggagaggttggcaggtaggtcagctgcatcacttcacaagaagaatttgaatcctcactagaaggggtaccatcctcttccagttcatacttcccatatccaacaacctgaaagaggacaaagacaaaagtgaaaaatatgctgaccagatttaggggtttaagagttctgatgataaccacccaaactcactcagtaaatgacaaccctagaatggatggagttagttaaacatactcacatgaacgctgagcattttacttcctggccctctatgggccttgaaccagttgaccaggtctgattttgagaatgacttcagtgcttcaatcttacaagggaagggaagataggaaagaaattcaagaagaaagatagctcttaaacctaacccccaggcagatgtccctggacctgcttagcatctgaagacctcattttattcttcctattctcaggttacccctaaccttccagaccaaaacgatgatgaagctctctggcatgccttcacattttataccaatcatctacaatggcaagagaggttagcagatgctataattacagctaaataccatacactgagcccaacacccacatccccttagtgtcacctcccaattacatggtagctgcataccacggcttgaggaaatctaccttgcttctattaagaaaactaaaatgtgttaagatgaagcctcttactaaataacctctttacatcacagagcaatgatgtcctatggtaattcaccatgtaggggctatgtattaaccaaagtcacactggagtacaagatccagatctttttcataggttttactactttggaatagaagttgtcaaaacacatgcacttggaataatgaactccgtaaagacaaagagtcctcaattttctttaaacggcaaaactctttttctccacaaaatcttgtagacctcaatatatagcataaaaatagagctgctctgattgaaattggtggtggtgtggtaaggattagcacccagctcacgtggccacctaaggtgctagagaggccagtctgaaaactcaggaagtgagcgagtaatcaggccaggactagtgtttcgagtttctcttccacacaatgctggtgtgcacagacc

SEQ ID NO: 6382 - protein, 521 aa, Homo sapiens; identical to SEQ ID NO: 6380

SEQ ID NO: 6383 - DNA, 852 bp, Homo sapiens
tcccttgtaagattgaagcactgaagtcattctcaaaatcagacctggtcaactggttcaaggcccatagagggccaggaagtaaaatgctcagcgttcatgttgttggatatgggaagtatgaactggaagaggatggtaccccttctagtgaggattcaaattcttcttgtgaagtgatgcagctgacctacctgccaacctctcctctgctggcagattgtatcatccccattactgatatcagggctttcacaacaacactcaaccttctcccctaccataaaatagtcaaataaataaactgcagtcacgttggcctgaagcaatgtgtattttaaaatgtgtttgtttgtattttatggagttagttatactactgccttagggcttccattgaagttttgcactggcatcatagcatttgatttactttttatcctttgttgagactaataaacccagggttactgtaggagctggcaaaggaaaattagcagaatgggccaagcgagaccagaaagcctgcagcagcactttgagaagccctggcctgtgtcctctcagactgagaatctacttcttgaaaggccttacgtaaccagtatattgaataactaactaaatgctaggtactaatacctgtttttttaatgtatttttaaataaaaaagatgatagatagatagatagatatagttctgtatttcccttcagaatgagccatctgctgctgtggcattcattttattctatctatctatctatttttgttcactgtggggtggggatctataaatacacactcttcccaaaccctctaaggcaataaaacatttttggataaaatgt

SEQ ID NO: 6384 - protein, 70 aa, Homo sapiens [sequence omitted]

SEQ ID NO: 6385 - DNA, 1614 bp, Homo sapiens
gaaacactagtcctggcctgattactcgctcacttcctgagttttcagactggcctctctagcaccttaggtggccacgtgagctgggtgctaatccttaccacaccaccaccaatttcaatcagagcagctctatttttatgctatatattgaggtctacaagattttgtggagaaaaagagttttgccgtttaaagaaaattgaggactctttgtctttacggagttcattattccaagtgcatgtgttttgacaacttctattccaaagtagtaaaacctatgaaaaagatctggatcttgtactccagtgtgactttggttaatacatagcccctacatggtgaattaccataggacatcattgctctgtgatgtaaagaggttatttagtaagaggcttcatcttaacacattttagttttcttaatagaagcaaggtagatttcctcaagccgtggtatgcagctaccatgtaattgggaggtgacactaaggggatgtgggtgttgggctcagtgtatggtatttagctgtaattatagcatctgctaacctctcttgccattgtagatgattggtataaaatgtgaaggcatgccagagagcttcatcatcgttttggtctggaaggttaggggtaacctgagaataggaagaataaaatgaggtcttcagatgctaagcaggtccagggacatctgcctgggggttaggtttaagagctatctttcttcttgaatttctttcctatcttcccttcccttgtaagattgaagcactgaagtcattctcaaaatcagacctggtcaactggttcaaggcccatagagggccaggaagtaaaatgctcagcgttcatgttgttggatatgggaagtatgaactggaagaggatggtaccccttctagtgaggattcaaattcttcttgtgaagtgatgcagctgacctacctgccaacctctcctctgctggcagattgtatcatccccattactgatatcagggctttcacaacaacactcaaccttctcccctaccataaaatagtcaaataaataaactgcagtcacgttggcctgaagcaatgtgtattttaaaatgtgtttgtttgtattttatggagttagttatactactgccttagggcttccattgaagttttgcactggcatcatagcatttgatttactttttatcctttgttgagactaataaacccagggttactgtaggagctggcaaaggaaaattagcagaatgggccaagcgagaccagaaagcctgcagcagcactttgagaagccctggcctgtgtcctctcagactgagaatctacttcttgaaaggccttacgtaaccagtatattgaataactaactaaatgctaggtactaatacctgtttttttaatgtatttttaaataaaaaagatgatagatagatagatagatatagttctgtatttcccttcagaatgagccatctgctgctgtggcattcattttattctatctatctatctatttttgttcactgtggggtggggatctataaatacacactcttcccaaaccctctaaggcaataaaacatttttggataaaatgt

SEQ ID NO: 6386 - protein, 70 aa, Homo sapiens [sequence omitted]

SEQ ID NO: 6387 - DNA, 3749 bp, Homo sapiens
tctccccccagatacatcaaattacagaatggcttgcaggcacttctgatttcagacctaagtaatatggaaggtaaaacaggaaatacaacagatgatgaagaagaagaggaggtggaggaagaagaagaagatgatgatgaagattctggagctgaaatagaagatgacgatgaagagggttttgatgatgaagatgagtttgatgatgaacatgatgatgatcttgatactgaggataatgaattggaagaattagaagagagagcagaagctagaaaaaaaactactgaaaaacaggtctgcacctgttcagcatttggcaggatggcaagcggaggagcagcagggtgaaactgacacagttctgtctgcagcggctctttgtgttggagttgggagtttcgctgatccagatgacctgccggggctggcacactttttggagcacatggtattcatgggtagtttgaaatatccagatgagaatggatttgatgccttcctgaagaagcatgggggtagtgataatgcctcaactgattgtgaacgcactgtctttcagtttgatgtccagaggaagtacttcaaggaagctcttgatagatgggcgcagttcttcatccacccactaatgatcagagatgcaattgaccgtgaagttgaagctgttgatagtgaatatcaacttgcaaggccttctgatgcaaacagaaaggaaatgttgtttggaagccttgctagacctggacatcctatgggaaaatttttttggggaaatgctgagacgctcaagcatgagccaagaaagaataatattgatacacatgctagattgagagaattctggatgcgttactactcttctcattacatgactttagtggttcaatccaaagaaacactggatactttggaaaagtgggtgactgaaatcttctctcagataccaaacaatgggttacccagaccaaactttggccatttaacggatccatttgacacaccagcatttaacaaactttatagagttgttccaatcagaaaaattcatgctctgaccatcacatgggcacttcctcctcaacagcaacattacagggtgaagccacttcattatatatcctggctggttggacatgaaggcaaaggcagcattctttctttccttaggaaaaaatgctgggctcttgcactgtttggtggaaatggtgagacaggatttgagcaaaattctacttattcagtgttcagcatttctattacattgactgatgagggttatgaacatttttatgaggttgcttacactgtctttcagtatttaaaaatgctgcagaagctaggcccagaaaaaagaatttttgaagagattcggaaaattgaggataatgaatttcattaccaagaacagacagatccagttgagtatgtggaaaacatgtgtgagaacatgcagctgtacccattgcaggacattctcactggagatcagcttctttttgaatacaagccagaagtcattggtgaagccttgaatcagctagttcctcaaaaagcaaatcttgttttactgtctggtgctaatgagggaaaatgtgacctcaaggagaaatggtttggaactcaatatagtatagaagatattgaaaactcttgggctgaactgtggaatagtaatttcgaattaaatccagatcttcatcttccagctgaaaacaagtacatagccacggactttacgttgaaggctttcgattgcccggaaacagaatacccagttaaaattgtgaatactccacaaggttgcctgtggtataagaaagacaacaaattcaaaatccccaaagcatatatacgtttccatctaatttcaccgttgatacagaaatctgcagcaaatgtggtcctctttgatatctttgtcaatatccttacgcataaccttgcggaaccagcttatgaagcagatgtggcacagctggagtataaactggtagctggagaacatggtttaattattcgagtgaaaggatttaaccacaaactacctctactgtttcagctcattattgactacttagctgagttcaattccacaccagctgtctttacaatgataactgagcagttgaagaagacctactttaacatcctcatcaagcccgagactttggccaaagatgtacggcttttaatcttggaatatgcccgttggtctatgattgacaagtaccaggctttgatggacggcctttcccttgagtctctgctgagcttcgtcaaagaattcaaatcccagctctttgtggagggcctggtacaagggaatgtcacaagcacagaatctatggatttcctgaaatatgttgttgacaaactaaacttcaagcctctggagcaggagatgcctgtgcagttccaggtggtagagctgcccagtggccaccatctatgcaaagtgaaagctctgaacaagggtgatgccaactctgaagtcactgtgtactaccagtcaggtaccaggagtctaagagaatatacgcttatggagctgcttgtgatgcacatggaagaaccttgttttgacttccttcgaaccaagcagacccttgggtaccatgtctaccctacctgtaggaacacatccgggattctaggattttctgtcactgtggggactcaggcaaccaaatacaattctgaagttgttgataagaagatagaagagtttctttctagctttgaggagaagattgagaacctcactgaagaggcattcaacacccaggtcacagctctcatcaagctgaaggagtgtgaggatacccaccttggggaggaggtggataggaactggaatgaagtggttacacagcagtacctctttgaccgccttgcccacgagattgaagcactgaagtcattctcaaaatcagacctggtcaactggttcaaggcccatagagggccaggaagtaaaatgctcagcgttcatgttgttggatatgggaagtatgaactggaagaggatggtaccccttctagtgaggattcaaattcttcttgtgaagtgatgcagctgacctacctgccaacctctcctctgctggcagattgtatcatccccattactgatatcagggctttcacaacaacactcaaccttctcccctaccataaaatagtcaaataaataaactgcagtcacgttggcctgaagcaatgtgtattttaaaatgtgtttgtttgtattttatggagttagttatactactgccttagggcttccattgaagttttgcactggcatcatagcatttgatttactttttatcctttgttgagactaataaacccagggttactgtaggagctggcaaaggaaaattagcagaatgggccaagcgagaccagaaagcctgcagcagcactttgagaagccctggcctgtgtcctctcagactgagaatctacttcttgaaaggccttacgtaaccagtatattgaataactaactaaatgctaggtactaatacctgtttttttaatgtatttttaaataaaaaagatgatagatagatagatagatatagttctgtatttcccttcagaatgagccatctgctgctgtggcattcattttattctatctatctatctatttttgttcactgtggggtggggatctataaatacacactcttcccaaaccctctaaggcaataaaacatttttggataaaatgt

SEQ ID NO: 6388 - protein, 914 aa, Homo sapiens
MVFMGSLKYPDENGFDAFLKKHGGSDNASTDCERTVFQFDVQRKYFKEALDRWAQFFIHPLMIRDAIDREVEAVDSEYQLARPSDANRKEMLFGSLARPGHPMGKFFWGNAETLKHEPRKNNIDTHARLREFWMRYYSSHYMTLVVQSKETLDTLEKWVTEIFSQIPNNGLPRPNFGHLTDPFDTPAFNKLYRVVPIRKIHALTITWALPPQQQHYRVKPLHYISWLVGHEGKGSILSFLRKKCWALALFGGNGETGFEQNSTYSVFSISITLTDEGYEHFYEVAYTVFQYLKMLQKLGPEKRIFEEIRKIEDNEFHYQEQTDPVEYVENMCENMQLYPLQDILTGDQLLFEYKPEVIGEALNQLVPQKANLVLLSGANEGKCDLKEKWFGTQYSIEDIENSWAELWNSNFELNPDLHLPAENKYIATDFTLKAFDCPETEYPVKIVNTPQGCLWYKKDNKFKIPKAYIRFHLISPLIQKSAANVVLFDIFVNILTHNLAEPAYEADVAQLEYKLVAGEHGLIIRVKGFNHKLPLLFQLIIDYLAEFNSTPAVFTMITEQLKKTYFNILIKPETLAKDVRLLILEYARWSMIDKYQALMDGLSLESLLSFVKEFKSQLFVEGLVQGNVTSTESMDFLKYVVDKLNFKPLEQEMPVQFQVVELPSGHHLCKVKALNKGDANSEVTVYYQSGTRSLREYTLMELLVMHMEEPCFDFLRTKQTLGYHVYPTCRNTSGILGFSVTVGTQATKYNSEVVDKKIEEFLSSFEEKIENLTEEAFNTQVTALIKLKECEDTHLGEEVDRNWNEVVTQQYLFDRLAHEIEALKSFSKSDLVNWFKAHRGPGSKMLSVHVVGYGKYELEEDGTPSSEDSNSSCEVMQLTYLPTSPLLADCIIPITDIRAFTTTLNLLPYHKIVK

SEQ ID NO: 6389 - DNA, 3237 bp, Homo sapiens
tctccccccagatacatcaaattacagaatggcttgcaggcacttctgatttcagacctaagtaatatggaaggtaaaacaggaaatacaacagatgatgaagaagaagaggaggtggaggaagaagaagaagatgatgatgaagattctggagctgaaatagaagatgacgatgaagagggttttgatgatgaagatgagtttgatgatgaacatgatgatgatcttgatactgaggataatgaattggaagaattagaagagagagcagaagctagaaaaaaaactactgaaaaacaggtctgcacctgttcagcatttggcaggatggcaagcggaggagcagcagggtgaaactgacacagttctgtctgcagcggctctttgtgttggagttgggagtttcgctgatccagatgacctgccggggctggcacactttttggagcacatggtattcatgggtagtttgaaatatccagatgagaatggatttgatgccttcctgaagaagcatgggggtagtgataatgcctcaactgattgtgaacgcactgtctttcagtttgatgtccagaggaagtacttcaaggaagctcttgatagatgggcgcagttcttcatccacccactaatgatcagagatgcaattgaccgtgaagttgaagctgttgatagtgaatatcaacttgcaaggccttctgatgcaaacagaaaggaaatgttgtttggaagccttgctagacctggacatcctatgggaaaatttttttggggaaatgctgagacgctcaagcatgagccaagaaagaataatattgatacacatgctagattgagagaattctggatgcgttactactcttctcattacatgactttagtggttcaatccaaagaaacactggatactttggaaaagtgggtgactgaaatcttctctcagataccaaacaatgggttacccagaccaaactttggccatttaacggatccatttgacacaccagcatttaacaaactttatagagttgttccaatcagaaaaattcatgctctgaccatcacatgggcacttcctcctcaacagcaacattacagggtgaagccacttcattatatatcctggctggttggacatgaaggcaaaggcagcattctttctttccttaggaaaaaatgctgggctcttgcactgtttggtggaaatggtgagacaggatttgagcaaaattctacttattcagtgttcagcatttctattacattgactgatgagggttatgaacatttttatgaggttgcttacactgtctttcagtatttaaaaatgctgcagaagctaggcccagaaaaaagaatttttgaagagattcggaaaattgaggataatgaatttcattaccaagaacagacagatccagttgagtatgtggaaaacatgtgtgagaacatgcagctgtacccattgcaggacattctcactggagatcagcttctttttgaatacaagccagaagtcattggtgaagccttgaatcagctagttcctcaaaaagcaaatcttgttttactgtctggtgctaatgagggaaaatgtgacctcaaggagaaatggtttggaactcaatatagtatagaagatattgaaaactcttgggctgaactgtggaatagtaatttcgaattaaatccagatcttcatcttccagctgaaaacaagtacatagccacggactttacgttgaaggctttcgattgcccggaaacagaatacccagttaaaattgtgaatactccacaaggttgcctgtggtataagaaagacaacaaattcaaaatccccaaagcatatatacgtttccatctaatttcaccgttgatacagaaatctgcagcaaatgtggtcctctttgatatctttgtcaatatccttacgcataaccttgcggaaccagcttatgaagcagatgtggcacagctggagtataaactggtagctggagaacatggtttaattattcgagtgaaaggatttaaccacaaactacctctactgtttcagctcattattgactacttagctgagttcaattccacaccagctgtctttacaatgataactgagcagttgaagaagacctactttaacatcctcatcaagcccgagactttggccaaagatgtacggcttttaatcttggaatatgcccgttggtctatgattgacaagtaccaggctttgatggacggcctttcccttgagtctctgctgagcttcgtcaaagaattcaaatcccagctctttgtggagggcctggtacaagggaatgtcacaagcacagaatctatggatttcctgaaatatgttgttgacaaactaaacttcaagcctctggagcaggagatgcctgtgcagttccaggtggtagagctgcccagtggccaccatctatgcaaagtgaaagctctgaacaagggtgatgccaactctgaagtcactgtgtactaccagtcaggtaccaggagtctaagagaatatacgcttatggagctgcttgtgatgcacatggaagaaccttgttttgacttccttcgaaccaagcagacccttgggtaccatgtctaccctacctgtaggaacacatccgggattctaggattttctgtcactgtggggactcaggcaaccaaatacaattctgaagttgttgataagaagatagaagagtttctttctagctttgaggagaagattgagaacctcactgaagaggcattcaacacccaggtcacagctctcatcaagctgaaggagtgtgaggatacccaccttggggaggaggtggataggaactggaatgaagtggttacacagcagtacctctttgaccgccttgcccacgagattgaagcactgaagtcattctcaaaatcagacctggtcaactggttcaaggcccatagagggccaggaagtaaaatgctcagcgttcatgttgttggatatgggaagtatgaactggaagaggatggtaccccttctagtgaggattcaaattcttcttgtgaagtgatgcagctgacctacctgccaacctctcctctgctggcagattgtatcatccccattactgatatcagggctttcacaacaacactcaaccttctcccctaccataaaatagtcaaataaataaactgcagtcacgttggcctgaagcaatgtgtatttta

SEQ ID NO: 6390 - protein, 914 aa, Homo sapiens; identical to SEQ ID NO: 6388

SEQ ID NO: 6391 - DNA, 4006 bp, Homo sapiens
gttcgctggctgttccgagaatcagtccgggtcacgttggtgcctctcctttcctgttctgattggttgcttacgtgagcgtgactactttcttgcctcatgattggctgaaatcagtagcgtcatcggcggccgggagggcggagggacgagggaagtcggcgagagggagactgggttgggggaggggttcaggcctgttccccgcggctgcggcagcaccagggccggccgccaccgcctctagaacgcggaggaggtgggtcctgggaagcgggatgtccatcgctccagcttggtggtgaatgctgaggagagtcactgttgctgcagtctgtgccacccggaggaagttgtgtgaggccgggcgggagctcgcggcgctctggggaatcgaaacgcggggtcggtgcgaagactctgctgctgccagaccctttcctattctggccatgcctggaaggaacaaggcgaagtctacctgcagctgccctgacctgcagcccaatggacaggatctgggcgagaacagccgggttgcccgtctaggagcggatgaatctgaggaagagggacggagggggtctctcagtaatgctggggaccctgagatcgtcaagtctcccagcgaccccaagcaataccgatacatcaaattacagaatggcttgcaggcacttctgatttcagacctaagtaatatggaaggtaaaacaggaaatacaacagatgatgaagaagaagaggaggtggaggaagaagaagaagatgatgatgaagattctggagctgaaatagaagatgacgatgaagagggttttgatgatgaagatgagtttgatgatgaacatgatgatgatcttgatactgaggataatgaattggaagaattagaagagagagcagaagctagaaaaaaaactactgaaaaacagcaattgcagagcctgtttttgctgtggtcaaagctgactgatagactgtggtttaagtcaacttattcaaaaatgtcttcaaccctgctggtcgagacaagaaatctttatggggtagttggagctgaaagcaggtctgcacctgttcagcatttggcaggatggcaagcggaggagcagcagggtgaaactgacacagttctgtctgcagcggctctttgtgttggagttgggagtttcgctgatccagatgacctgccggggctggcacactttttggagcacatggtattcatgggtagtttgaaatatccagatgagaatggatttgatgccttcctgaagaagcatgggggtagtgataatgcctcaactgattgtgaacgcactgtctttcagtttgatgtccagaggaagtacttcaaggaagctcttgatagatgggcgcagttcttcatccacccactaatgatcagagatgcaattgaccgtgaagttgaagctgttgatagtgaatatcaacttgcaaggccttctgatgcaaacagaaaggaaatgttgtttggaagccttgctagacctggacatcctatgggaaaatttttttggggaaatgctgagacgctcaagcatgagccaagaaagaataatattgatacacatgctagattgagagaattctggatgcgttactactcttctcattacatgactttagtggttcaatccaaagaaacactggatactttggaaaagtgggtgactgaaatcttctctcagataccaaacaatgggttacccagaccaaactttggccatttaacggatccatttgacacaccagcatttaacaaactttatagagttgttccaatcagaaaaattcatgctctgaccatcacatgggcacttcctcctcaacagcaacattacagggtgaagccacttcattatatatcctggctggttggacatgaaggcaaaggcagcattctttctttccttaggaaaaaatgctgggctcttgcactgtttggtggaaatggtgagacaggatttgagcaaaattctacttattcagtgttcagcatttctattacattgactgatgagggttatgaacatttttatgaggttgcttacactgtctttcagtatttaaaaatgctgcagaagctaggcccagaaaaaagaatttttgaagagattcggaaaattgaggataatgaatttcattaccaagaacagacagatccagttgagtatgtggaaaacatgtgtgagaacatgcagctgtacccattgcaggacattctcactggagatcagcttctttttgaatacaagccagaagtcattggtgaagccttgaatcagctagttcctcaaaaagcaaatcttgttttactgtctggtgctaatgagggaaaatgtgacctcaaggagaaatggtttggaactcaatatagtatagaagatattgaaaactcttgggctgaactgtggaatagtaatttcgaattaaatccagatcttcatcttccagctgaaaacaagtacatagccacggactttacgttgaaggctttcgattgcccggaaacagaatacccagttaaaattgtgaatactccacaaggttgcctgtggtataagaaagacaacaaattcaaaatccccaaagcatatatacgtttccatctaatttcaccgttgatacagaaatctgcagcaaatgtggtcctctttgatatctttgtcaatatccttacgcataaccttgcggaaccagcttatgaagcagatgtggcacagctggagtataaactggtagctggagaacatggtttaattattcgagtgaaaggatttaaccacaaactacctctactgtttcagctcattattgactacttagctgagttcaattccacaccagctgtctttacaatgataactgagcagttgaagaagacctactttaacatcctcatcaagcccgagactttggccaaagatgtacggcttttaatcttggaatatgcccgttggtctatgattgacaagtaccaggctttgatggacggcctttcccttgagtctctgctgagcttcgtcaaagaattcaaatcccagctctttgtggagggcctggtacaagggaatgtcacaagcacagaatctatggatttcctgaaatatgttgttgacaaactaaacttcaagcctctggagcaggagatgcctgtgcagttccaggtggtagagctgcccagtggccaccatctatgcaaagtgaaagctctgaacaagggtgatgccaactctgaagtcactgtgtactaccagtcaggtaccaggagtctaagagaatatacgcttatggagctgcttgtgatgcacatggaagaaccttgttttgacttccttcgaaccaagcagacccttgggtaccatgtctaccctacctgtaggaacacatccgggattctaggattttctgtcactgtggggactcaggcaaccaaatacaattctgaagttgttgataagaagatagaagagtttctttctagctttgaggagaagattgagaacctcactgaagaggcattcaacacccaggtcacagctctcatcaagctgaaggagtgtgaggatacccaccttggggaggaggtggataggaactggaatgaagtggttacacagcagtacctctttgaccgccttgcccacgagattgaagcactgaagtcattctcaaaatcagacctggtcaactggttcaaggcccatagagggccaggaagtaaaatgctcagcgttcatgttgttggatatgggaagtatgaactggaagaggatggtaccccttctagtgaggattcaaattcttcttgtgaagtgatgcagctgacctacctgccaacctctcctctgctggcagattgtatcatccccattactgatatcagggctttcacaacaacactcaaccttctcccctaccataaaatagtcaaataaataaactgcagtcacgttggcctgaagcaatgtgtatttta

SEQ ID NO: 6392 - protein, 1219 aa, Homo sapiens
MLRRVTVAAVCATRRKLCEAGRELAALWGIETRGRCEDSAAARPFPILAMPGRNKAKSTCSCPDLQPNGQDLGENSRVARLGADESEEEGRRGSLSNAGDPEIVKSPSDPKQYRYIKLQNGLQALLISDLSNMEGKTGNTTDDEEEEEVEEEEEDDDEDSGAEIEDDDEEGFDDEDEFDDEHDDDLDTEDNELEELEERAEARKKTTEKQQLQSLFLLWSKLTDRLWFKSTYSKMSSTLLVETRNLYGVVGAESRSAPVQHLAGWQAEEQQGETDTVLSAAALCVGVGSFADPDDLPGLAHFLEHMVFMGSLKYPDENGFDAFLKKHGGSDNASTDCERTVFQFDVQRKYFKEALDRWAQFFIHPLMIRDAIDREVEAVDSEYQLARPSDANRKEMLFGSLARPGHPMGKFFWGNAETLKHEPRKNNIDTHARLREFWMRYYSSHYMTLVVQSKETLDTLEKWVTEIFSQIPNNGLPRPNFGHLTDPFDTPAFNKLYRVVPIRKIHALTITWALPPQQQHYRVKPLHYISWLVGHEGKGSILSFLRKKCWALALFGGNGETGFEQNSTYSVFSISITLTDEGYEHFYEVAYTVFQYLKMLQKLGPEKRIFEEIRKIEDNEFHYQEQTDPVEYVENMCENMQLYPLQDILTGDQLLFEYKPEVIGEALNQLVPQKANLVLLSGANEGKCDLKEKWFGTQYSIEDIENSWAELWNSNFELNPDLHLPAENKYIATDFTLKAFDCPETEYPVKIVNTPQGCLWYKKDNKFKIPKAYIRFHLISPLIQKSAANVVLFDIFVNILTHNLAEPAYEADVAQLEYKLVAGEHGLIIRVKGFNHKLPLLFQLIIDYLAEFNSTPAVFTMITEQLKKTYFNILIKPETLAKDVRLLILEYARWSMIDKYQALMDGLSLESLLSFVKEFKSQLFVEGLVQGNVTSTESMDFLKYVVDKLNFKPLEQEMPVQFQVVELPSGHHLCKVKALNKGDANSEVTVYYQSGTRSLREYTLMELLVMHMEEPCFDFLRTKQTLGYHVYPTCRNTSGILGFSVTVGTQATKYNSEVVDKKIEEFLSSFEEKIENLTEEAFNTQVTALIKLKECEDTHLGEEVDRNWNEVVTQQYLFDRLAHEIEALKSFSKSDLVNWFKAHRGPGSKMLSVHVVGYGKYELEEDGTPSSEDSNSSCEVMQLTYLPTSPLLADCIIPITDIRAFTTTLNLLPYHKIVK

SEQ ID NO: 6393 - DNA, 3802 bp, Homo sapiens
gttcgctggctgttccgagaatcagtccgggtcacgttggtgcctctcctttcctgttctgattggttgcttacgtgagcgtgactactttcttgcctcatgattggctgaaatcagtagcgtcatcggcggccgggagggcggagggacgagggaagtcggcgagagggagactgggttgggggaggggttcaggcctgttccccgcggctgcggcagcaccagggccggccgccaccgcctctagaacgcggaggaggtgggtcctgggaagcgggatgtccatcgctccagcttggtggtgaatgctgaggagagtcactgttgctgcagtctgtgccacccggaggaagttgtgtgaggccgggcgggagctcgcggcgctctggggaatcgaaacgcggggtcggtgcgaagactctgctgctgccagaccctttcctattctggccatgcctggaaggaacaaggcgaagtctacctgcagctgccctgacctgcagcccaatggacaggatctgggcgagaacagccgggttgcccgtctaggagcggatgaatctgaggaagagggacggagggggtctctcagtaatgctggggaccctgagatcgtcaagtctcccagcgaccccaagcaataccgatacatcaaattacagaatggcttgcaggcacttctgatttcagacctaagtaatatggaaggtaaaacaggaaatacaacagatgatgaagaagaagaggaggtggaggaagaagaagaagatgatgatgaagattctggagctgaaatagaagatgacgatgaagagggttttgatgatgaagatgagtttgatgatgaacatgatgatgatcttgatactgaggataatgaattggaagaattagaagagagagcagaagctagaaaaaaaactactgaaaaacagtctgcagcggctctttgtgttggagttgggagtttcgctgatccagatgacctgccggggctggcacactttttggagcacatggtattcatgggtagtttgaaatatccagatgagaatggatttgatgccttcctgaagaagcatgggggtagtgataatgcctcaactgattgtgaacgcactgtctttcagtttgatgtccagaggaagtacttcaaggaagctcttgatagatgggcgcagttcttcatccacccactaatgatcagagatgcaattgaccgtgaagttgaagctgttgatagtgaatatcaacttgcaaggccttctgatgcaaacagaaaggaaatgttgtttggaagccttgctagacctggacatcctatgggaaaatttttttggggaaatgctgagacgctcaagcatgagccaagaaagaataatattgatacacatgctagattgagagaattctggatgcgttactactcttctcattacatgactttagtggttcaatccaaagaaacactggatactttggaaaagtgggtgactgaaatcttctctcagataccaaacaatgggttacccagaccaaactttggccatttaacggatccatttgacacaccagcatttaacaaactttatagagttgttccaatcagaaaaattcatgctctgaccatcacatgggcacttcctcctcaacagcaacattacagggtgaagccacttcattatatatcctggctggttggacatgaaggcaaaggcagcattctttctttccttaggaaaaaatgctgggctcttgcactgtttggtggaaatggtgagacaggatttgagcaaaattctacttattcagtgttcagcatttctattacattgactgatgagggttatgaacatttttatgaggttgcttacactgtctttcagtatttaaaaatgctgcagaagctaggcccagaaaaaagaatttttgaagagattcggaaaattgaggataatgaatttcattaccaagaacagacagatccagttgagtatgtggaaaacatgtgtgagaacatgcagctgtacccattgcaggacattctcactggagatcagcttctttttgaatacaagccagaagtcattggtgaagccttgaatcagctagttcctcaaaaagcaaatcttgttttactgtctggtgctaatgagggaaaatgtgacctcaaggagaaatggtttggaactcaatatagtatagaagatattgaaaactcttgggctgaactgtggaatagtaatttcgaattaaatccagatcttcatcttccagctgaaaacaagtacatagccacggactttacgttgaaggctttcgattgcccggaaacagaatacccagttaaaattgtgaatactccacaaggttgcctgtggtataagaaagacaacaaattcaaaatccccaaagcatatatacgtttccatctaatttcaccgttgatacagaaatctgcagcaaatgtggtcctctttgatatctttgtcaatatccttacgcataaccttgcggaaccagcttatgaagcagatgtggcacagctggagtataaactggtagctggagaacatggtttaattattcgagtgaaaggatttaaccacaaactacctctactgtttcagctcattattgactacttagctgagttcaattccacaccagctgtctttacaatgataactgagcagttgaagaagacctactttaacatcctcatcaagcccgagactttggccaaagatgtacggcttttaatcttggaatatgcccgttggtctatgattgacaagtaccaggctttgatggacggcctttcccttgagtctctgctgagcttcgtcaaagaattcaaatcccagctctttgtggagggcctggtacaagggaatgtcacaagcacagaatctatggatttcctgaaatatgttgttgacaaactaaacttcaagcctctggagcaggagatgcctgtgcagttccaggtggtagagctgcccagtggccaccatctatgcaaagtgaaagctctgaacaagggtgatgccaactctgaagtcactgtgtactaccagtcaggtaccaggagtctaagagaatatacgcttatggagctgcttgtgatgcacatggaagaaccttgttttgacttccttcgaaccaagcagacccttgggtaccatgtctaccctacctgtaggaacacatccgggattctaggattttctgtcactgtggggactcaggcaaccaaatacaattctgaagttgttgataagaagatagaagagtttctttctagctttgaggagaagattgagaacctcactgaagaggcattcaacacccaggtcacagctctcatcaagctgaaggagtgtgaggatacccaccttggggaggaggtggataggaactggaatgaagtggttacacagcagtacctctttgaccgccttgcccacgagattgaagcactgaagtcattctcaaaatcagacctggtcaactggttcaaggcccatagagggccaggaagtaaaatgctcagcgttcatgttgttggatatgggaagtatgaactggaagaggatggtaccccttctagtgaggattcaaattcttcttgtgaagtgatgcagctgacctacctgccaacctctcctctgctggcagattgtatcatccccattactgatatcagggctttcacaacaacactcaaccttctcccctaccataaaatagtcaaataaataaactgcagtcacgttggcctgaagcaatgtgtatttta

SEQ ID NO: 6394 - protein, 1151 aa, Homo sapiens
MLRRVTVAAVCATRRKLCEAGRELAALWGIETRGRCEDSAAARPFPILAMPGRNKAKSTCSCPDLQPNGQDLGENSRVARLGADESEEEGRRGSLSNAGDPEIVKSPSDPKQYRYIKLQNGLQALLISDLSNMEGKTGNTTDDEEEEEVEEEEEDDDEDSGAEIEDDDEEGFDDEDEFDDEHDDDLDTEDNELEELEERAEARKKTTEKQSAAALCVGVGSFADPDDLPGLAHFLEHMVFMGSLKYPDENGFDAFLKKHGGSDNASTDCERTVFQFDVQRKYFKEALDRWAQFFIHPLMIRDAIDREVEAVDSEYQLARPSDANRKEMLFGSLARPGHPMGKFFWGNAETLKHEPRKNNIDTHARLREFWMRYYSSHYMTLVVQSKETLDTLEKWVTEIFSQIPNNGLPRPNFGHLTDPFDTPAFNKLYRVVPIRKIHALTITWALPPQQQHYRVKPLHYISWLVGHEGKGSILSFLRKKCWALALFGGNGETGFEQNSTYSVFSISITLTDEGYEHFYEVAYTVFQYLKMLQKLGPEKRIFEEIRKIEDNEFHYQEQTDPVEYVENMCENMQLYPLQDILTGDQLLFEYKPEVIGEALNQLVPQKANLVLLSGANEGKCDLKEKWFGTQYSIEDIENSWAELWNSNFELNPDLHLPAENKYIATDFTLKAFDCPETEYPVKIVNTPQGCLWYKKDNKFKIPKAYIRFHLISPLIQKSAANVVLFDIFVNILTHNLAEPAYEADVAQLEYKLVAGEHGLIIRVKGFNHKLPLLFQLIIDYLAEFNSTPAVFTMITEQLKKTYFNILIKPETLAKDVRLLILEYARWSMIDKYQALMDGLSLESLLSFVKEFKSQLFVEGLVQGNVTSTESMDFLKYVVDKLNFKPLEQEMPVQFQVVELPSGHHLCKVKALNKGDANSEVTVYYQSGTRSLREYTLMELLVMHMEEPCFDFLRTKQTLGYHVYPTCRNTSGILGFSVTVGTQATKYNSEVVDKKIEEFLSSFEEKIENLTEEAFNTQVTALIKLKECEDTHLGEEVDRNWNEVVTQQYLFDRLAHEIEALKSFSKSDLVNWFKAHRGPGSKMLSVHVVGYGKYELEEDGTPSSEDSNSSCEVMQLTYLPTSPLLADCIIPITDIRAFTTTLNLLPYHKIVK

SEQ ID NO: 6395 - DNA, 792 bp, Homo sapiens
gaaacactagtcctggcctgattactcgctcacttcctgagttttcagactggcctctctagcaccttaggtggccacgtgagctgggtgctaatccttaccacaccaccaccaatttcaatcagagcagctctatttttatgctatatattgaggtctacaagattttgtggagaaaaagagttttgccgtttaaagaaaattgaggactctttgtctttacggagttcattattccaagtgcatgtgttttgacaacttctattccaaagtagtaaaacctatgaaaaagatctggatcttgtactccagtgtgactttggttaatacatagcccctacatggtgaattaccataggacatcattgctctgtgatgtaaagaggttatttagtaagaggcttcatcttaacacattttactttcttcttgaatttctttcctatcttcccttcccttgtaagattgaagcactgaagtcattctcaaaatcagacctggtcaactggttcaaggcccatagagggccaggaagtaaaatgctcagcgttcatgttgttggatatgggaagtatgaactggaagaggatggtaccccttctagtgaggattcaaattcttcttgtgaagtgatgcagctgacctacctgccaacctctcctctgctggcagattgtatcatccccattactgatatcagggctttcacaacaacactcaaccttctcccctaccataaaatagtcaaataaataaactgcagtcacgttggcctgaagcaatgtgtatttt

SEQ ID NO: 6396 - protein, 136 aa, Homo sapiens
MVNYHRTSLLCDVKRLFSKRLHLNTFYFLLEFLSYLPFPCKIEALKSFSKSDLVNWFKAHRGPGSKMLSVHVVGYGKYELEEDGTPSSEDSNSSCEVMQLTYLPTSPLLADCIIPITDIRAFTTTLNLLPYHKIVK

SEQ ID NO: 6397 - DNA, 1101 bp, Homo sapiens
gaaacactagtcctggcctgattactcgctcacttcctgagttttcagactggcctctctagcaccttaggtggccacgtgagctgggtgctaatccttaccacaccaccaccaatttcaatcagagcagctctatttttatgctatatattgaggtctacaagattttgtggagaaaaagagttttgccgtttaaagaaaattgaggactctttgtctttacggagttcattattccaagtgcatgtgttttgacaacttctattccaaagtagtaaaacctatgaaaaagatctggatcttgtactccagtgtgactttggttaatacatagcccctacatggtgaattaccataggacatcattgctctgtgatgtaaagaggttatttagtaagaggcttcatcttaacacattttagttttcttaatagaagcaaggtagatttcctcaagccgtggtatgcagctaccatgtaattgggaggtgacactaaggggatgtgggtgttgggctcagtgtatggtatttagctgtaattatagcatctgctaacctctcttgccattgtagatgattggtataaaatgtgaaggcatgccagagagcttcatcatcgttttggtctggaaggttaggggtaacctgagaataggaagaataaaatgaggtcttcagatgctaagcaggtccagggacatctgcctgggggttaggtttaagagctatctttcttcttgaatttctttcctatcttcccttcccttgtaagattgaagcactgaagtcattctcaaaatcagacctggtcaactggttcaaggcccatagagggccaggaagtaaaatgctcagcgttcatgttgttggatatgggaagtatgaactggaagaggatggtaccccttctagtgaggattcaaattcttcttgtgaagtgatgcagctgacctacctgccaacctctcctctgctggcagattgtatcatccccattactgatatcagggctttcacaacaacactcaaccttctcccctaccataaaatagtcaaataaataaactgcagtcacgttggcctgaagcaatgtgtatttt

SEQ ID NO: 6398 - protein, 70 aa, Homo sapiens [sequence omitted]

SEQ ID NO: 6399 - DNA, 568 bp, Homo sapiens
cagaggtgataaatccttcctctcagggatgagttctcactgtgttgcctggactggtctcgaaatcctgaccttaagtaatgcttctgccttggcctcccaaaatgctgaaattacaggcgtgagccatcattcccagcccagcagtcttcatcttaagaagaaagctgcccagcatcagaggggtcaggttcccttctaaacagaatatgataatgctggcctgccaaaactacagcttcccctttaggaaagaactatggcaattccagagttcacaactgcattcagacctggcctacagagcatctcacactcactgtgcttgtgacattcccttgtaccaggccctccacaaagagctgggatttgaattctttgacgaagctcagcagagactcaagggaaaggccgtccatcaaagcctggtacttgtcaatcatagaccaacgggcatattccaagattaaaagccgtacatctctgtacagagggcagaaaaaaaacactcaaagttttgttattagaaatgaatcttcagaataaagaaatgtttggtcaaagttct

SEQ ID NO: 6400 - protein, 86 aa, Homo sapiens
MIMLACQNYSFPFRKELWQFQSSQLHSDLAYRASHTHCACDIPLYQALHKELGFEFFDEAQQRLKGKAVHQSLVLVNHRPTGIFQD

SEQ ID NO: 6401 - DNA, 1319 bp, Homo sapiens
cctgtaatctcagctacttgggggctgaggtgggaggattgcttgagcccaggaagtggaggctgcagtgagctgaggtcatgccactgccctccagcctgggcaataaagcaagaccctggtgtttttttttgtttgtttaaagaagtgcttaagaaatagaagatgatggaaattcactcagtgggagtgagagagaaggcagtctagaatgatgcccagatttctttcttgaagcagtgggttggtggaacaggaacagtagtaagagtgggagcatatgaggagtttgttctgatacgtatttagttggaaatgtctgtggggccttgtacctgactaaggccttttcctcagtcagatgcttgttcaagattctctccctgaactgttttgttattaaccatcctcctccatgccttcccagtttctcagggctggccctttgattggaatatataaatggccactcttgaaattgtggctgctatcctcccctttctctctatcttcattctgcaaccccagaaccagccttagtttctgtcttggccaccaaaagaatcttaagtctcagtccacaaagggaagagaagaaataggctgcctgtttttccgagcaccgttgaagtaccaggcaagggcttttgatacagagtccttagtaccatgaatttcctccagtagaaatcactttagagaagagctaatccctccatttatcccttattttatagataagaaaacagaattcttaagaagggaagaggatgtattcactcagtattaaatgttattttctttgctttatccaggttctatgtcaatgggcccaggattctgaaacatagtccatgttgtcataaaggccacagcctagttgggtaaaccaacactgaacaattaagtttgatccagttgggaaactgtattatgggtaaacagattgccaagagagccagaacagttaagagctgcttagtgttccacaaacacaatcaatcttgaatcagtcaatgaataacttgccagcatttaggtcaccaactatatctgctttcctaaagctatgcagggctccccaagcaattggaacattgatattagctgattctgggtgaaatgaatgtctagagagcttaatgtagttattctcttttgcctcttaggaatctatggatttcctgaaatatgttgttgacaaactaaacttcaagcctctggagcaggagatgcctgtgcagttccaggtggtagagctgcccagtggccaccatctatgcaaagtgaaagctctgaacaagggtgatgccaactct

SEQ ID NO: 6402 - protein, 47 aa, Homo sapiens
MDFLKYVVDKLNFKPLEQEMPVQFQVVELPSGHHLCKVKALNKGDAN

SEQ ID NO: 6403 - DNA, 648 bp, Homo sapiens
ataatttcttcctattaatgctctatttggaattatgagatctattttaagttaaaagtgaatctattaatttccaatctgttcatagagaccttagcatacagactatcaagtgacatatatatacctttttttcccccagtgttttgatgttcatctctacagccttccaagttaaaactatttaatacttggtctatcatgctacccaaaaacaggatcactaataatctgagtagtaaacaggaaaaagcttcttaaaaatattactcaatccaacaacttagtaaaaaactggtacaatctttctttttaaaaaataattttttccaagaagaataactattaaatcatatctactacttatacctcaactcttcccacctttaagggtgaccactttttttctttttctttttttttttttttttgagacaaagtctcactctgttggccagggtggagtgcagtggtgtaatcaaagctcactgcaaccttaacctccctgggctcaggtgatcctcccatcttcagcctgtcaagtagctgaggtgggaggatggcttaagcccgggacatggaagttgccgtgagccacgttcatgccactgcactccagcctgggcaacagagcaaaaacctgtctca

SEQ ID NO: 6404 - protein, 30 aa, Homo sapiens
PPWAQVILPSSACQVAEVGGWLKPGTWKLP

SEQ ID NO: 6405 - DNA, 2154 bp, Homo sapiens
gttcgctggctgttccgagaatcagtccgggtcacgttggtgcctctcctttcctgttctgattggttgcttacgtgagcgtgactactttcttgcctcatgattggctgaaatcagtagcgtcatcggcggccgggagggcggagggacgagggaagtcggcgagagggagactgggttgggggaggggttcaggcctgttccccgcggctgcggcagcaccagggccggccgccaccgcctctagaacgcggaggaggtgggtcctgggaagcgggatgtccatcgctccagcttggtggtgaatgctgaggagagtcactgttgctgcagtctgtgccacccggaggaagttgtgtgaggccgggcgggagctcgcggcgctctggggaatcgaaacgcggggtcggtgcgaagactctgctgctgccagaccctttcctattctggccatgcctggaaggaacaaggcgaagtctacctgcagctgccctgacctgcagcccaatggacaggatctgggcgagaacagccgggttgcccgtctaggagcggatgaatctgaggaagagggacggagggggtctctcagtaatgctggggaccctgagatcgtcaagtctcccagcgaccccaagcaataccgatacatcaaattacagaatggcttgcaggcacttctgatttcagacctaagtaatatggaaggtaaaacaggaaatacaacagatgatgaagaagaagaggaggtggaggaagaagaagaagatgatgatgaagattctggagctgaaatagaagatgacgatgaagagggttttgatgatgaagatgagtttgatgatgaacatgatgatgatcttgatactgaggataatgaattggaagaattagaagagagagcagaagctagaaaaaaaactactgaaaaacaggtgcgagtcatgtctgttttcttctaatttgggaattctttgggtaacttctaaactcaagctttattttttaatggcaaaaaggaagtatatagttatcttttggtcttcagtaaaggtctattctgtatcaggattacattttgaaaacattttcctccaattataaaagtagtaaatgctcattatataaactaatggaatataaagaaaacaaaaatataaaaatcacccatagctatatctctcagaggtaatcaacactcagaggtatttgaatttatgtgtatttgtatacattatatgttttaaaaacaaatactggtagatgaggagctgcagaattcttagcctggattagagaaataagagtatgttatccttggtgagactggaaaaagaagaagaaaagaatggggctagtgtgaaatctttacatgggcctagggctctaagagttattgtatgggtggcttctatatagataattagataattgagtttgatttagcactttatatgggaacgcaaaggtctggacaaataagtactttggaagagttgaaatagaaactgggcagttaagcttatttaatatgtaacaaccatcagtggatagataaataagtcttgatagggagaatttcttaatatcttttgaagaatacctccattttcatagtagggagtacccagaggataattttcggagccagtacagtggaattgaccagcaaaagttagttaaagctagtttcttgaatattgataatatattcaacatggtacagtctacatacaaagaggccgagatgggcagatcacttgagtccaggagttctgagactagcctaggtaatgtggtgaaaccctgtctctctaaaacattaaaaaaaattagctgggtgtggtggcacatgcctgtggttccagctacttgacaggctgaagatgggaggatcacctgagcccagggaggttaaggttgcagtgagctttgattacaccactgcactccaccctggccaacagagtgagactttgtctcaaaaaaaaaaaaaaaaagaaaaagaaaaaaagtggtcacccttaaaggtgggaagagttgaggtataagtagtagatatgatttaatagttattcttcttggaaaaaattattttttaaaaagaaagattgtaccagttttttactaagttgttggattgagtaatatttt

SEQ ID NO: 6406 - protein, 218 aa, Homo sapiens
MLRRVTVAAVCATRRKLCEAGRELAALWGIETRGRCEDSAAARPFPILAMPGRNKAKSTCSCPDLQPNGQDLGENSRVARLGADESEEEGRRGSLSNAGDPEIVKSPSDPKQYRYIKLQNGLQALLISDLSNMEGKTGNTTDDEEEEEVEEEEEDDDEDSGAEIEDDDEEGFDDEDEFDDEHDDDLDTEDNELEELEERAEARKKTTEKQVRVMSVFF

SEQ ID NO: 6407 - DNA, 788 bp, Homo sapiens
gttcgctggctgttccgagaatcagtccgggtcacgttggtgcctctcctttcctgttctgattggttgcttacgtgagcgtgactactttcttgcctcatgattggctgaaatcagtagcgtcatcggcggccgggagggcggagggacgagggaagtcggcgagagggagactgggttgggggaggggttcaggcctgttccccgcggctgcggcagcaccagggccggccgccaccgcctctagaacgcggaggaggtgggtcctgggaagcgggatgtccatcgctccagcttggtggtgaatgctgaggagagtcactgttgctgcagtctgtgccacccggaggaagttgtgtgaggccgggcgggagctcgcggcgctctggggaatcgaaacgcggggtcggtgcgaagactctgctgctgccagaccctttcctattctggccatgcctggaaggaacaaggcgaagtctacctgcagctgccctgacctgcagcccaatggacaggatctgggcgagaacagccgggttgcccgtctaggagcggatgaatctgaggaagagggacggagggggtctctcagtaatgctggggaccctgagatcgtcaagtctcccagcgaccccaagcaataccgaactgaacttgggtctgctcgcctggcacaataaggacataaccacactgaggttttgcagcagtagaaaggaaggcatttattttcaggatgctacgcaaagaggaccaggtagctaatgcttaaatcctgacctccccga

SEQ ID NO: 6408 - protein, 124 aa, Homo sapiens
MLRRVTVAAVCATRRKLCEAGRELAALWGIETRGRCEDSAAARPFPILAMPGRNKAKSTCSCPDLQPNGQDLGENSRVARLGADESEEEGRRGSLSNAGDPEIVKSPSDPKQYRTELGSARLAQ

SEQ ID NO: 6409 - DNA, 726 bp, Homo sapiens
gttcgctggctgttccgagaatcagtccgggtcacgttggtgcctctcctttcctgttctgattggttgcttacgtgagcgtgactactttcttgcctcatgattggctgaaatcagtagcgtcatcggcggccgggagggcggagggacgagggaagtcggcgagagggagactgggttgggggaggggttcaggcctgttccccgcggctgcggcagcaccagggccggccgccaccgcctctagaacgcggaggaggtgggtcctgggaagcgggatgtccatcgctccagcttggtggtgaatgctgaggagagtcactgttgctgcagtctgtgccacccggaggaagttgtgtgaggccgggcgggagctcgcggcgctctggggaatcgaaacgcggggtcggtgcgaagactctgctgctgccagaccctttcctattctggccatgcctggaaggaacaaggcgaagtctacctgcagctgccctgacctgcagcccaatggacaggatctgggcgagaacagccgggttgcccgtctaggagcggatgaatctgaggaagagggacggagggggtctctcagtaatgctggggaccctgagatcgtcaagtctcccagcgaccccaagcaataccgagtctccatctgtcacccatgctggagtgccatggcgcaatcttggctcactgcaacctcttcctccctggctcaagtga

SEQ ID NO: 6410 - protein, 139 aa, Homo sapiens
MLRRVTVAAVCATRRKLCEAGRELAALWGIETRGRCEDSAAARPFPILAMPGRNKAKSTCSCPDLQPNGQDLGENSRVARLGADESEEEGRRGSLSNAGDPEIVKSPSDPKQYRVSICHPCWSAMAQSWLTATSSSLAQ

SEQ ID NO: 6411 - DNA, 863 bp, Homo sapiens
gttcgctggctgttccgagaatcagtccgggtcacgttggtgcctctcctttcctgttctgattggttgcttacgtgagcgtgactactttcttgcctcatgattggctgaaatcagtagcgtcatcggcggccgggagggcggagggacgagggaagtcggcgagagggagactgggttgggggaggggttcaggcctgttccccgcggctgcggcagcaccagggccggccgccaccgcctctagaacgcggaggaggtgggtcctgggaagcgggatgtccatcgctccagcttggtggtgaatgctgaggagagtcactgttgctgcagtctgtgccacccggaggaagttgtgtgaggccgggcgggagctcgcggcgctctggggaatcgaaacgcggggtcggtgcgaagactctgctgctgccagaccctttcctattctggccatgcctggaaggaacaaggcgaagtctacctgcagctgccctgacctgcagcccaatggacaggatctgggcgagaacagccgggttgcccgtctaggagcggatgaatctgaggaagagggacggagggggtctctcagtaatgctggggaccctgagatcgtcaagtctcccagcgaccccaagcaataccgagagatgatctcactgtgtcacccaggctgtactgcagtggtgccatcatagctcactgcagcatcgaacttctaggctcaagtgatcctcctgcctgtgccgcccaaagtgttggaattacaggcatgagccactgcttctagatggatgtcttttattggcgggggggaaagccctatatacgtatatatgtattttttactaattctaaaactg

SEQ ID NO: 6412 - protein, 130 aa, Homo sapiens
MLRRVTVAAVCATRRKLCEAGRELAALWGIETRGRCEDSAAARPFPILAMPGRNKAKSTCSCPDLQPNGQDLGENSRVARLGADESEEEGRRGSLSNAGDPEIVKSPSDPKQYREMISLCHPGCTAVVPS

SEQ ID NO: 6413 - DNA, 1043 bp, Homo sapiens
cttggatcacataccaagagagtgttaaagccacattaggattcaattccagggccatcagattccaagtccactggagaaaagatgtatatctctaatctgttaacaaattgctcaactactcagactaatcccaggtgatggatgtctaatgctcaggaaaggcgagtcagtctctgaggcaacagatcccatgggcctgggtagaaaatgcccagtgcttcccagtcccaagtgctggctttccctgtatctgcctctgccaggcaacacttatcaggctcccaatcagcaggagcctccatgctccactttgaacagcctctatgctccagcaatggggcatttgtgaagagtgacttgattaacttttctgaccatgggtataatacagttgcttcagagggcagtggttctgggtgtgatttttacactgtaacattgtatacagtgtcatggataattactatttttttctggtcattaacactcacctactctagtactaggatttcagaccaaggtcctcatgacgcctggatattttagtatctatatccaataatcttttctctcctactgaatatccaggcaaagatgaaatcgttttctttaaaactgtcaaattctgtaaaactcaggagccagttcaagggaacaagcatcttcacaatagatggaatcaagagttaaatgttatagtggcaagctcctgagtcactaggattgtacgtatgagccaccgcatccagcctcaatggcaatctcttaaaaatctaaataaatgaacggctcagtaacactgaggtttacttcacacaaaaacaatccaaaccttggcaagacggtgaaaccctgtctctacaaaaaatacaaaaaattaactgggcaaagtagcctgcacctatagtcccagctacttgggaggctgaggtgggaggatcgattgagccctggaggtcaagaatacagtgagccatagccatgattgtacactgtgccactccagcctgggtgacagagcaagaccctgtccccctctc

SEQ ID NO: 6414 - protein, 112 aa, Homo sapiens
MPSASQSQVLAFPVSASARQHLSGSQSAGASMLHFEQPLCSSNGAFVKSDLINFSDHGYNTVASEGSGSGCDFYTVTLYTVSWIITIFFWSLTLTYSSTRISDQGPHDAWIF

SEQ ID NO: 6415 - DNA, 1697 bp, Homo sapiens
atgcggccggagcggagcagtgctggagcgggagcctcagccctcaggcgccactgtgaggacctgaccggaccagaccatcccgcagcgccccgccccggccccctccgcgccctcccgacgccaggtcctgccgtcccgccgaccgtccgggagcgaacccgtcgtcccgcactcggagtccgcgatggcttcagtgacagatggtaaaactggagtcaaagatgcctctgaccagaattttgactacatgtttaaactgcttatcattggcaacagcagtgttggcaagacctccttcctcttccgctatgctgatgacacgttcaccccagccttcgttagcaccgtgggcatcgacttcaaggtgaagacagtctaccgtcacgagaagcgggtgaaactgcagatctgggacacagctgggcaggagcggtaccggaccatcacaacagcctattaccgtggggccatgggcttcattctgatgtatgacatcaccaatgaagagtccttcaatgctgtccaagactgggctactcagatcaagacctactcctgggacaatgcacaagttattctggtggggaacaagtgtgacatggaggaagagagggttgttcccactgagaagggccagctccttgcagagcagcttgggtttgatttctttgaagccagtgcaaaggagaacatcagtgtaaggcaggcctttgagcgcctggtggatgccatttgtgacaagatgtctgattcgctggacacagacccgtcgatgctgggctcctccaagaacacgcgtctctcggacaccccaccgctgctgcagcagaactgctcatgctaggcaaggcccaccttcctgacctcccctcattgtggccccacacccagtctgcttctccctgttacacactgtccgctctcagcccactctccctgttacacactgcccacactcagagcaagatgagttgctgctattctttgcctgcccctggggttctctgcagatggtcccagtaatagatactcagcactagactaacataacaggtcactacacgggtgcagaatcactttacaaaagaagactctgttttacgaaggggattcactacagggacttagagaacagtctcttttctgcctttaaaatgagagttcctccatttaccaaaatttgacacgcacacattcttcaggggcatgccaattgcgtaaagtgaggctcgcctgcatagctaatcctgttaaagacaacttctcaaagcacaacgtgcttgtttcctatcgggctccctgcggggctttctctcactacaagtcaagcttgggctctcaaagccctgcgcctgttaccacggatgcccacagggcctgggcagttgctgtggcgacaggaagagctaatcttcagagagctcagactctctaatgatgctgaaggagcaaaggctgagtcagaaacacacttaagagaaaaggattggccgggcgcggtggctcacgcctgtaatcccagcactttgggaggccgaggcgggtggatcatgaggtcaggagatcgagaccatcctggctaacaaggtgaaaccccgtctctactaaaaatacaaaaaattagccgggcgcggtggcgggcgcctgtagtcccagctactcgggaggctgaggcaggagaatggcgtgaaccc

SEQ ID NO: 6416 - protein, 219 aa, Homo sapiens; identical to SEQ ID NO: 240

SEQ ID NO: 6417 - DNA, 721 bp, Homo sapiens
agttgttcaggggatgaaggaagctcaggaaaggctgacgggtgatgccttcagaaagaaacatcttgaagatgaattgtaacatgaatgtgccccttctttcatcagagttagtgttctggaaggaaagcagcagggaagggaatattgaggaatcatctagaacaattaagccgaccaggaaacctcattcctacctacactggaaggagcgctctcactgtggaagagttctgctaacagaagctggtctgcatgtttgtggatccagcggagagtggcagactttcttctccttttccctctcacctaaatgtcaacttgtcattgaatgtaaagaatgaaaccttctgacacaaaacttgagccacttggatgtttactcctcgcacttaagtatttgagtcttttcccatttcctcccactttactcaccttagtggtgaaaggagactagtagcatcttttctacaaccctctttcctcttctcatgcttgagcttccctgtttgcacgcatgcgtgtgcaggactggctgtgtgcttggactcggctccaggtggaagcatgctttcccttgttactgttggagaaactcaaaccttcaagccctaggtgtagccattttgtcaagtcatcaactgtatttttgtactggcattaacaaaaaaagagataaaatattgtaccattaaactttaataaaactttaaaaggaaat

SEQ ID NO: 6418 - protein, 99 aa, Homo sapiens [sequence omitted]

SEQ ID NO: 6419 - DNA, 2284 bp, Homo sapiens
ccgagcgttctgttgtgtccctgcctacaattttagggaacctaataaaagggtggtcggtatgtttttatttgggtgtgtacttttgttaggtcgctttttcgctatgcattaagtacggactttaggactcaactagtaccaggaagaaaaagaccggacattttcacctgtttgttatacagcgaaggggaaaaattgggaagaaatcctcaagctacaagaaaaataaccagaagctttacactttagcctgcagtgacttatatcctggtgtcctaagtccacctaagtcagttttgcaataagaggtcccaagtttggttttcttggagcttgcatcagttggttgcatcatccctgagtagaagatttgcggttgcaaggaaaaataaggtacagagcttctccagcgggaaagtgcatgtctgcacggcacgagcccacgcaccgcagaacaggcttgccaggtctcctcagagaccctcgcaggaacctaacaatgaaatccagttgtccagtcttgatttgtggaggggtaaggagaatccgaggccagtgggcaatccgcccactgttgggagcgactgacctcacgaatcaataatttgcttttgactaggaagtgcagcggttcttggggggaggggctggactgggtggcggacgcgaggagcaacggttctcccgaacctctcccccgcccctactatcttggcctacattttcccgctccgtcccgggacctggacacccagaatccacgaaaagcaactcgcgctcgagaacagctctcgtacccttctacgtgatctgcacctttaagctcactccatcccaaaccggaccccggaggcaccacccacatccgtctaacatcacttccttcagagtttgaaaaaaaaaaatctgggaagtagaggtgttgtgctgagcggcgctcggcgaactgtgtggaccgtctgctgggactccggccctgcgtccgctcagccccgtggccccgcgcacctactgccatggagacgcggcctcgtctcggggccacctgtttgctgggcttcagtttcctgctcctcgtcatctcttctgatggacataatgggcttggaaagggtagtggactgcccctgatggtgattattcataaatcctggtgtggagcttgcaaagctctaaagcccaaatttgcagaatctacggaaatttcagaactctcccataattttgttatggtaaatcttgaggatgaagaggaacccaaagatgaagatttcagccctgacgggggttatattccacgaatcctttttctggatcccagtggcaaggtgcatcctgaaatcatcaatgagaatggaaaccccagctacaagtatttttatgtcagtgccgagcaagttgttcaggggatgaaggaagctcaggaaaggctgacgggtgatgccttcagaaagaaacatcttgaagatgaattgtaacatgaatgtgccccttctttcatcagagttagtgttctggaaggaaagcagcagggaagggaatattgaggaatcatctagaacaattaagccgaccaggaaacctcattcctacctacactggaaggagcgctctcactgtggaagagttctgctaacagaagctggtctgcatgtttgtggatccagcggagagtggcagactttcttctccttttccctctcacctaaatgtcaacttgtcattgaatgtaaagaatgaaaccttctgacacaaaacttgagccacttggatgtttactcctcgcacttaagtatttgagtcttttcccatttcctcccactttactcaccttagtggtgaaaggagactagtagcatcttttctacaacgttaaaattgcagaagtagcttatcattaaaaaacaacaacaacaacaataacaataaatcctaagtgtaaatcagttattctaccccctaccaaggatatcagcctgttttttcccttttttctcctgggaataattgtgggcttcttcccaaatttctacagcctctttcctcttctcatgcttgagcttccctgtttgcacgcatgcgtgtgcaggactggctgtgtgcttggactcggctccaggtggaagcatgctttcccttgttactgttggagaaactcaaaccttcaagccctaggtgtagccattttgtcaagtcatcaactgtatttttgtactggcattaacaaaaaaagagataaaatattgtaccattaaactttaataaaactttaaaaggaaat

SEQ ID NO: 6420 - protein, 153 aa, Homo sapiens
METRPRLGATCLLGFSFLLLVISSDGHNGLGKGSGLPLMVIIHKSWCGACKALKPKFAESTEISELSHNFVMVNLEDEEEPKDEDFSPDGGYIPRILFLDPSGKVHPEIINENGNPSYKYFYVSAEQVVQGMKEAQERLTGDAFRKKHLEDEL

SEQ ID NO: 6421 - DNA, 2401 bp, Homo sapiens
tcttagtgctagtggcggcaggtgcaggtggccgcgcggcatcctggggcttgcagtctcccgagcgttctgttgtgtccctgcctacaattttagggaacctaataaaagggtggtcggtatgtttttatttgggtgtgtacttttgttaggtcgctttttcgctatgcattaagtacggactttaggactcaactagtaccaggaagaaaaagaccggacattttcacctgtttgttatacagcgaaggggaaaaattgggaagaaatcctcaagctacaagaaaaataaccagaagctttacactttagcctgcagtgacttatatcctggtgtcctaagtccacctaagtcagttttgcaataagaggtcccaagtttggttttcttggagcttgcatcagttggttgcatcatccctgagtagaagatttgcggttgcaaggaaaaataaggtacagagcttctccagcgggaaagtgcatgtctgcacggcacgagcccacgcaccgcagaacaggcttgccaggtctcctcagagaccctcgcaggaacctaacaatgaaatccagttgtccagtcttgatttgtggaggggtaaggagaatccgaggccagtgggcaatccgcccactgttgggagcgactgacctcacgaatcaataatttgcttttgactaggaagtgcagcggttcttggggggaggggctggactgggtggcggacgcgaggagcaacggttctcccgaacctctcccccgcccctactatcttggcctacattttcccgctccgtcccgggacctggacacccagaatccacgaaaagcaactcgcgctcgagaacagctctcgtacccttctacgtgatctgcacctttaagctcactccatcccaaaccggaccccggaggcaccacccacatccgtctaacatcacttccttcagagtttgaaaaaaaaaaatctgggaagtagaggtgttgtgctgagcggcgctcggcgaactgtgtggaccgtctgctgggactccggccctgcgtccgctcagccccgtggccccgcgcacctactgccatggagacgcggcctcgtctcggggccacctgtttgctgggcttcagtttcctgctcctcgtcatctcttctgatggacataatgggcttggaaagggttttggagatcatattcattggaggacactggaagatgggaagaaagaagcagctgccagtggactgcccctgatggtgattattcataaatcctggtgtggagcttgcaaagctctaaagcccaaatttgcagaatctacggaaatttcagaactctcccataattttgttatggtaaatcttgaggatgaagaggaacccaaagatgaagatttcagccctgacgggggttatattccacgaatcctttttctggatcccagtggcaaggtgcatcctgaaatcatcaatgagaatggaaaccccagctacaagtatttttatgtcagtgccgagcaagttgttcaggggatgaaggaagctcaggaaaggctgacgggtgatgccttcagaaagaaacatcttgaagatgaattgtaacatgaatgtgccccttctttcatcagagttagtgttctggaaggaaagcagcagggaagggaatattgaggaatcatctagaacaattaagccgaccaggaaacctcattcctacctacactggaaggagcgctctcactgtggaagagttctgctaacagaagctggtctgcatgtttgtggatccagcggagagtggcagactttcttctccttttccctctcacctaaatgtcaacttgtcattgaatgtaaagaatgaaaccttctgacacaaaacttgagccacttggatgtttactcctcgcacttaagtatttgagtcttttcccatttcctcccactttactcaccttagtggtgaaaggagactagtagcatcttttctacaacgttaaaattgcagaagtagcttatcattaaaaaacaacaacaacaacaataacaataaatcctaagtgtaaatcagttattctaccccctaccaaggatatcagcctgttttttcccttttttctcctgggaataattgtgggcttcttcccaaatttctacagcctctttcctcttctcatgcttgagcttccctgtttgcacgcatgcgtgtgcaggactggctgtgtgcttggactcggctccaggtggaagcatgctttcccttgttactgttggagaaactcaaaccttcaagccctaggtgtagccattttgtcaagtcatcaactgtatttttgtactggcattaacaaaaaaagagataaaatattgtaccattaaactttaataaaactttaaaaggaaat

SEQ ID NO: 6422 - protein, 172 aa, Homo sapiens; identical to SEQ ID NO: 242

SEQ ID NO: 6423 - DNA, 653 bp, Homo sapiens
aagtggggaagccactgaatggttttgaggagagagaggacgttatctgacttaaggtttacatttaatcttaataggatgaagaggaacccaaagatgaagatttcagccctgacgggggttatattccacgaatcctttttctggatcccagtggcaaggtgcatcctgaaatcatcaatgagaatggaaaccccagctacaagtatttttatgtcagtgccgagcaaggtatagttatgctgaagggagggaggattattgctagattgaactaggatgaaccacatgcaaggtctgtgataggaaagtaaattcagcatgttagctgagcatctcctgcatgtctatagcttttggccagatcctgtgtaggatataggaggaagatgagactgagccccttcccttggaagagctgactgacccacaggcagctgtgaagaactgaggcacacaagtgactgaggtagtcacttgcccatagtttcatagttaagtagcagagccagaatttgagtccagaacttagtttttttcctactgagctaatactgtttttcctatgaaaattcagtggaagaggaatagtgttaggtgaacaagtctaagaggttttatagatattaaacttaaataggccgagcacagtg

SEQ ID NO: 6424 - protein, 72 aa, Homo sapiens
MVLRRERTLSDLRFTFNLNRMKRNPKMKISALTGVIFHESFFWIPVARCILKSSMRMETPATSIFMSVPSKV

SEQ ID NO: 6425 - DNA, 1718 bp, Homo sapiens
gcgtacaacccggaagttggcgcagcgcggttgccaatggtcgctccctgagaggatgccgctcgtggtgttttgcgggctgccgtacagcggcaagagccggcgtgctgaagagttgcgcgtggcgctggctgccgagggccgcgcggtgtacgtggtggacgacgcagctgtcctgggcgcagaggacccagcggtgtacggcgattctgcccgtgagaaggcattgcgtggagctctgcgagcctccgtggaacggcgcctgagtcgccacgacgtggtcatcctggactcgcttaactacatcaaaggtttccgttacgagctctactgcctggcacgggcggcgcgcaccccgctctgcctggtctactgcgtacggcccggcggcccgatcgcgggacctcaggtggcgggcgcgaacgagaaccctggccggaacgtcagtgtgagttggcggccacgcgctgaggaggacgggagagcccaggcggcgggcagcagcgtcctcagggaactgcatactgcggactctgtagtaaatggaagtgcccaggccgacgtacccaaggaactggagcgagaagaatccggggctgcggagtctccagctcttgtgactccggattcagagaaatctgcaaagcatgggtccggtgccttttactctcccgaactcctggaggccctaacgctgcgctttgaggctcccgattctcggaatcgctgggaccggcctttattcactttggtgggcctagaggagccgttgcccctggcggggatccgctctgccctgtttgagaaccgggccccaccaccccatcagtctacgcagtcccagcccctcgcctccggcagctttctgcaccagttggaccaggtcacgagtcaagtactggccggattgatggaagcgcagaagagcgctgtccccggggacttgctcacgcttcctggtaccacagagcacttgcggtttacccggcccttgaccatggcagaactgagtcgccttcgtcgccagtttatttcgtacactaaaatgcatcccaacaatgagaacttgccgcaactggccaacatgtttcttcagtatttgagccagagcctgcactgaccagaggaggtaggggggaagccatggcttctgatctccactccactttatttctctgggaaaaataggctgcaggtctccagagcatatcgatgcagtactgtactagagctgttgtgactgattcactcaaactttcctgcatacccctgtgccaggccttgggtttacagcataagttcagactaaagagaatggagaactattgtggtgcaacctggcaaatccctcagaggacagagctaaggtggacagggattacctagattggatcctacttgggctatcacagagcattgaccattggcttccctcatctgaggcgtgggagagcagactggatagatgagaattgttttaaaacaattgtgaacagaaactgaagatggtacagttctacatctgcacctgcccttttttcataccacaaaagtattttttgagtactgtactgactttttgctagtttctattctgggaccgagttcacagataaatccattggtttgtatccttgagaaactttgtttttgtggaagtaagaaagttatctactagattatttcctctaataaaatcttttaaaatagtctactgg

SEQ ID NO: 6426 - protein, 354 aa, Homo sapiens; identical to SEQ ID NO: 244

SEQ ID NO: 6427 - DNA, 797 bp, Homo sapiens
gccgccaactcacactgacgttccggccagggttctcgttcgcgcccgccacctgaggtcccgcgatcgggccgccgggccgtacgcagtagaccaggcagagcggggtgcgcgccgcccgtgccaggcagtagagctcgtaacggaaacctttgatgtagttaagcgagtccaggatgaccacgtcgtggcgactcaggcgccgttccacggaggctcgcagagctccacgcaatgccttctcacgggcagaatcgccgtacaccgctgggtcctctgcgcccaggacagctgcgtcgtccaccacgtacaccgcgcggccctcggcagccagcgccacgcgcaactcttcagcacgccggctcttgccgctgtacggcagcccgcaaaacaccacgagcggcatcctctcagggagcgaccattggcaaccgcgctgcgccaacttccgggttgtacgcgtctccgaccatgggatgctgtcacttgcctaaggctcaagatttgactctgaagagtgagtgattgagaatgaaattgagaggatgcccaggagaactgcaaggtgtctaacatgatcaccatcactctattggtcaatatctaaactcaggcaactgaatcctgctttggcaagatgcccaaccagacagtctgaagggatatacacctacaaaacaatgaaatcctagataaaatggactttcagaatgtgctcactagactcagtaatgacagaaccctccataaacacaaagcaagctaaaacctatgagcaacaagcaagtgaggctgcc

SEQ ID NO: 6428 - protein, 105 aa, Homo sapiens
MTTSWRLRRRSTEARRAPRNAFSRAESPYTAGSSAPRTAASSTTYTARPSAASATRNSSARRLLPLYGSPQNTTSGILSGSDHWQPRCANFRVVRVSDHGMLSLA

SEQ ID NO: 6429 - DNA, 2272 bp, Homo sapiens
aacaagcccagaaggcggcggacactcgcataaagtcacgcagtagtactcggagcccggggtagaacctggacttcaaatctctgcactcccggccgggtggtgggcgcatatcctgggtagcctctaggaagcgctagacacatggaaccaaggcagattcagcctggcagctggcaagtcatggagcactgcctgtccatctgcgagctaacaacagtcgcgctggaagtcaacaagggaaatggaaagggagagacccagcctccacaggggctcacgccctgggacctgtgccagtgtgaacaaggttttccggccccaggaagcaggcctaagtactctcatttcatcactgaggagcctgagacgttcagtcattgattggacagccctcaccattcaagccctccttggtttacagcagcagaaagagaggctctgaaggttctagccagaggaagctgcagccaggcctggcagtctcccctgctcccttccaccagcttggttcctgtttctgctggtcctgggagcccccagcagatggactgcccttatcagccggctccaggccagaggaggaatcctccggtcacgtgtggctctctggagggagagagacctcataaatacatacagcccacgcagaggaaggggggagggtcaaggggaaagaaaccttgacattctggcgactgggccaggattaaagtccaccaggcatagtccttattggctatttctatgaggaatctcaaatccacatggcttccctggatgacaacgctgactttgactagccctgggatctggggcattcccagtgtgctgctggcttgatccaggcctaatcctttgcccaggactgacctttcacagtttacagagcactttatctcctggctcagtgaagtctcacagaaccctccagagagaagggagtttatcatcaccctcaatttacagatgaggaagctgaggctgcgattgtaactgactccatgccccgggcgagccatcgttcctgcctggcgaagtccacaatccaataaggagggaaggttgaagggatgaatctcaacagaattgtgcacagtgaaagaagccaatgaaagaagagtacatattgtataattccatttatagaaaactctagaaaatgcaagctgatctacagtgacagaaagcagatccatggttgtttggggaagtgaggcagaaggaaaggattcagagaagcacaaggaaccttttagggtggtagacatgcttactatctggtactgagagtttctcatgtctgcacgtatctaattgtacactttaaatacacacagtttattgtatgtcaattatatctccataaagctatttaaaaagaggaacgtaagtggggaaaagaatgaaggaagttggctggcgtataattaagtaagtctgtgagcagtcttaaagtggggacacaaagtaccatgggcacgtaagagaagaaggtagagattcattcccaaacggaagagatcaggaaggagttcttagaacagggtttcaacaaagctcaaggtatggataagtaagggtcaggttaagaaagattcagatggaagatacagatagagtttatttgggaaatagagagtggagtattatacacacgcacaattcgcctttttacccaagttttgaaggactgaagttaaaactaacagcaactatcctctcttttcttcagaaattcagacacatgccctacttggcaggcagctagttttgctaataagattcctgcccttctccctccctctctgtgcatctcatcccttcggtcccgctgaggcccctaccctctcggatttcctctttgaactgaactgccaaatacttgccagcttccagggccctgagtacccacatttcagcctcttccaaaccccagagtaagaaggagatttggggagttctgggtgggcatgtgatgggagactaggtccaacataaaaagatatttccctttttcttccatactttttggcttagtaattgacatgtgaccattggagaattttgaatagtttattagaatacattgtgatagagaagaaggaaattcaagaattgttacaatgttgtacactgattaactggctaatttgctgcaaaaccaattctgatcactgctcttatggtttgtaatacattattttgggtttggatgatcctgttattcatagctttacataaagaaatattccaatgacatatgaaaccc

SEQ ID NO: 6430 - protein, 79 aa, Homo sapiens
MEPRQIQPGSWQVMEHCLSICELTTVALEVNKGNGKGETQPPQGLTPWDLCQCEQGFPAPGSRPKYSHFITEEPETFSH

SEQ ID NO: 6431 - DNA, 394 bp, Homo sapiens
cctaagaagatgtagataaagtgactgcaaggacctccgctgacctgagcacttcctgcatgaaaggggctcaataccaaggaagaaaacagatacatgcaccctttctaagtagcaaaactgggttcaaatcctcggctacatcacttatgtgagatgaagtcccactatattgccaaggctggacttgaatccctaagctcaagtagtgttcccacctcaccctcccaagtaactgagactacaggtgcacaccactgtaccagcataattgcatatcttatcaatcaatccacagccactaaatacctactgaggtatctgtgtcccctgggctttttccaagagctttcaatatggttagatttgtttattaaatttgcataaatatgtg

SEQ ID NO: 6432 - protein, 76 aa, Homo sapiens
MKSHYIAKAGLESLSSSSVPTSPSQVTETTGAHHCTSIIAYLINQSTATKYLLRYLCPLGFFQELSIWLDLFIKFA

SEQ ID NO: 6433 - DNA, 998 bp, Homo sapiens
ccatcttcaccccaagcccactggctcctgagatacgacatccagacccagtgcagctggacctggcccaggaagatcatgcggtttctgggaagcactggagaaggaaaaggctgaagaaaggaagaccggaaaagaaatacaagtccttccgccttggcaaagatgatagtaccgttcccttcagtgttccggttctgctctattggataagttccggtttgactatgactacgtgaaaatgtggaaccagaccttcaccccacattccagctccagctctaccacagaggaagtgcaatatcaccttagttattcaacacattatgctcctcgtgatacaaccagagttcacatcagcaatcttggcagctctcaccacgctgctgactcacgactctctcatgtcccaatttcctgtccattgttctttcctctacttggcctgatttctaaaggcctctcttggttgcattaagcgggattcctgagggattcccttggcagttaccttgggggagctcttaggtttggggctgatccatgtcctctaaatgtaggacttcaaagctcccaaagataggcaggcccagtgggaagctgggaaatgctctctgacccctctgggagggctggcagtcagagggccttttggaaagagtcagacctgatccataagtccctggaaaacaccctgcccagggagcaaatgccactgtggccttgactgaggcttcagaagagtttgggagctgcaattcatccacacacgcattcattttcaagtagtggtttgcagttcaggctttggagccacataagcctggcttcaaagccactttccagctttgtaggaagtctctacatttttaaacctccatttttttttcctgtaaaactggggtcttcatggtacttaacttcatcgtgatgttgagagaatgaaaagaaaaaggataaataaatggcttagcctcgtgccttggcacatattgtga

SEQ ID NO: 6434 - protein, 78 aa, Homo sapiens
MWNQTFTPHSSSSSTTEEVQYHLSYSTHYAPRDTTRVHISNLGSSHHAADSRLSHVPISCPLFFPLLGLISKGLSWLH

SEQ ID NO: 6435 - DNA, 220 bp, Homo sapiens
aaaactgtagcccagggcattgaaaacctctcggagagggccaggtgtgaccagccctgtgcccatcctgctgtgattcaggagtctcgcagaagacatcagaatgcctttctctgagtcacagtctgtatcttctagaaaaggctgtccatcttcaccccaagcccactggctcctgagatacgacatccagacccagtgcagctggacctggcccagg

SEQ ID NO: 6436 - protein, 38 aa, Homo sapiens
MPFSESQSVSSRKGCPSSPQAHWLLRYDIQTQCSWTWP

SEQ ID NO: 6437 - DNA, 485 bp, Homo sapiens
ttccaccaggtgataagcatgatcatgcctttgctttacaaagattcccttggtgatgatgcagaggaggatggaggggtatcatggagacagacgagtccttttggaggctgttgcaataatccaggcaaaagatgtcaagggcctgcaattgtgtccaagcacagtggatacgttgatagaaatatgatgcttctactttaatcagactttctgatgtttctctttttcccttgtctgttttgaaacttctagtttttcagtgtaacaccagagctgtagagggagaagggccactaggagattccatttcagtgatgtagccagcaggaaagcccccataagtgagagcctggagaagtatctcctaccctggactgtggcaggagggaaaaagagcagtcactgtagggtgaatagagtggtccttagatttagtgttttacttcccctcccagccttgagccagctgctgtgactcatgg

SEQ ID NO: 6438 - protein, 61 aa, Homo sapiens
MIMPLLYKDSLGDDAEEDGGVSWRQTSPFGGCCNNPGKRCQGPAIVSKHSGYVDRNMMLLL

SEQ ID NO: 6439 - DNA, 436 bp, Homo sapiens
aacgatgtggtgcctgctctggggagtggagagtctctgaagggtttccaccaggtgataagcatgatcatgcctttgctttacaaagattcccttggtgatgatgcagaggaggatggaggggtatcatggagacagacgagtccttttggaggctgttgcaataatccaggcaaaagatgtcaagggcctgcaattgtgtccaagcacagtggatacgttgatagaaatatgatgcttctactttaatcagactttctgatgtttctctttttcccttgtctgttttgaaacttctagtttttcagtgtaacaccagagctgtagagggagaagggccactaggagattccatttcagtgatgtagccagcaggaaagcccccataagtgagagcctggagaagtatctcctaccctggactgtggcaggaggg

SEQ ID NO: 6440 - protein, 61 aa, Homo sapiens; identical to SEQ ID NO: 6438

SEQ ID NO: 6441 - DNA, 306 bp, Homo sapiens
cctgtagtctcagctattcgggaggctgaggcaggaggattgcttgatgagcccaggatgtcaagtctgcagagagtcatgattgcacgattgtattcagcctgggcaacaccgtgagactcatcagatgtcatagtagtcattcccttgggttttcctgccggtgaatattacagagtccaagcacagtggatacgttgatagaaatatgatgcttctactttaatcagactttctgatgtttctctttttcccttgtctgttttgaaacttctagtttttcagtgtaacaccagagctgtagag

SEQ ID NO: 6442 - protein, 38 aa, Homo sapiens
AQDVKSAESHDCTIVFSLGNTVRLIRCHSSHSLGFSCR

SEQ ID NO: 6443 - DNA, 316 bp, Homo sapiens
agcctgtgggaaaatgactgagtgcccatagatgaagtgctttcaagactgtctggcacctagaggtatcatcgcagaagccttggatatgaacagaagcaggcagaggatgaagctgatggtgtgcatggtcactgtgctcctgcccatttttgagcttctggaatacaagctgtgcctttgcctggaatgtccctcccagtctgactaggcatcttctgatggggtttgacctggttgcttctaacactaggatggacctcttggcaatctctggatatctttctgtggtttgttataatggtaattattactt

SEQ ID NO: 6444 - protein, 59 aa, Homo sapiens; identical to SEQ ID NO: 4299

SEQ ID NO: 6445 - DNA, 623 bp, Homo sapiens
agaacaatgcgggagttgcagagagaggtgtcctgtgtttgttcccagtcttccttcactcacctgcacctgctcctgccctgcttcggccaacatgttctatgcaggcagcagagttcatatcaagggcccatgttttaactgaatataatgaattttttttttcaccttggaagagtcttagaggcaagattagaatgttcatctaaaaggagtgcaaatttcttcaaccattcccacggaggaaggtctactctgtgaaaaggaaatgatcatacataattcatgcatttgctgtacggatttaattaaatgatagacaaaaagtagagtggcacaagtcaaactcaaaaaatagtaacaacaaaatcaatttcaaaataagcaacagcaataaatgttacctactattttacgaatgaaaatactgagaccaataaaggcattatagtatacatagccttggaatcagaagaccaagaacatacaagagaacatagccttggaatcagaagaccaagaaacaatttaactctgcccctctagagctctgagaacttgggcaagccttttaccctctgtgagtttcagtttcctcatttatttaattgaaataataatac

SEQ ID NO: 6446 - protein, 44 aa, Homo sapiens
MRELQREVSCVCSQSSFTHLHLLLPCFGQHVLCRQQSSYQGPMF

SEQ ID NO: 6447 - DNA, 963 bp, Homo sapiens
ctacagttactaagcgcccactgtgtgccctggaagggactagactcagcaggaaaaacatccaggcaagtggacagcatttgcaacagcccagcaataagaaggaccatattctacttgggaaaaggtaaagtcgtttcatatggacggagcctgccaggaaacctgtcattcaaccctttgcaataaaacagctcctcatgaatgaagcaaaataaatcagaagttgtgggcttttaaactcactaaatgaaagcacagcatgcatgcagcctccctccaaattaatcaccagattaaatgcaagatgtgcacaccaaatcaatagcttgtgacggggacctcctgcctgtgcttcaggaaaattccatttcctttcagatgttgtcgcttgaaatgtcaggaagtttccattcatcacccgcccttgaaaatgccaccatcaccatacttcatgtttccttgctttctttcttcagaggaatccaagcaccttgcagagggagcccactccttgtcacagactctcctggaggctgaaacaggggcagtctgcacagaggagaggtgtagagaggcgcgatttagaaataagaaaaccaaatcgtaaagaagcctaatgtcttgttgcaacatctgaaagaaacaagatgaatatattccactaggtgggaagcttagggtagtgggaagaacatggattcaggactttgagaaacatggatttaaattttgatccccaatgcctctctgcacttcactgttatctataaaatagaggaaataaaaatactatacattcaagtcttaacaccaacagttaactagttgtgtaaccttggacaagttatgtgacctctctgtctgagcattgtcatttgtatatgagatcatggaggttaaatgtccaacctgttgtcactgtgcacctcaaaataataaataaaacatttcatctctcaa

SEQ ID NO: 6448 - protein, 79 aa, Homo sapiens
MQDVHTKSIACDGDLLPVLQENSISFQMLSLEMSGSFHSSPALENATITILHVSLLSFFRGIQAPCRGSPLLVTDSPGG

SEQ ID NO: 6449 - DNA, 656 bp, Homo sapiens
gtccaggtgctctcctgccgccaacacagccctaatgagctctgcatattcaaaacacaagtaattgatagtccaatttaaagtgtgcagaggccaaatttctttccagacgctgaaggaaaaacaccagctgaggaagaatgaagaactgcctgttctaagttattctccttctgtggtcattcgagcaccaggaagaccaggtttgccccatcaagtacctcaagaaagaagtcaattacctaaagaagtcaagcaaagaggaaaggacaaaatgaaaatcatgtaccagggtacacgtcgaggctccaagctggaatgaatatggccttcaacatactctttatcatacagaagcttgtgttcagggcttggattttgaagtcagacagacctggattaaaaaccaattcaactacctattacatatgtgacctaggaaaaacatccaggcaagtggacagcatttgcaacagcccagcaataagaaggaccatattctacttgggaaaaggtaaagtcgtttcatatggacggagcctgccaggaaacctgtcattcaaccctttgcaataaaacagctcctcatgaatgaagcaaaataaatcagaagttgtgggcttttaaactcactaaatgaaagcacagcatgcatg

SEQ ID NO: 6450 - protein, 85 aa, Homo sapiens
MNMAFNILFIIQKLVFRAWILKSDRPGLKTNSTTYYICDLGKTSRQVDSICNSPAIRRTIFYLGKGKVVSYGRSLPGNLSFNPLQ

SEQ ID NO: 6451 - DNA, 2058 bp, Homo sapiens
cccagaaagaggcttctccaacccggcccggcccttccttcccctttcccgcagtcgttgcctcctcctcccctgcctcctcctccccttcctcctcctggccgcttagtctcacacccgccgggccgttgttcccgagacgttgttgagtcccctgtgtcctcttctgggtggaggaactgcaatgtctggtggagaacagaaaccagagaggtactatgtgggtgtggacgttggaacaggcagtgtccgtgcagctctggtggaccagagtggggtcctgttggcttttgcagaccagccaattaagaattgggagccccagttcaaccaccatgagcagtcctccgaggacatctgggctgcgtgctgtgttgtcacaaagaaagttgtacaagggattgatttaaaccaaattcgaggacttgggtttgatgccacgtgttctctggttgttttggataagcagtttcacccattaccagtcaaccaggaaggggattcccatcgaaacgtcatcatgtggctggaccatcgagcagtcagtcaagttaacaggatcaatgagaccaagcacagtgtcctccagtacgtcgggggggtgatgtctgtggaaatgcaggccccgaaacttctgtggctgaaagagaacttgagagagatttgctgggataaggcgggacatttctttgatctcccggacttcttatcgtggaaggcaacaggtgtcacagcacggtctctctgctccctggtgtgtaagtggacatattcagcagagaaaggctgggacgacagtttctggaaaatgattggtttggaagactttgttgcagataattacagcaaaataggaaaccaagtgctacctcctggagcttctcttggaaatgggctcacaccagaggcagcaagagaccttggccttctccctgggattgcggtcgcagcttcactcattgatgcccatgcaggaggactaggagtgattggggcagatgtgagagggcacggcctcatctgtgaggggcagccagtgacgtcacggctggctgtcatctgtggaacgtcttcttgtcacatggggatcagcaaagacccgatttttgtaccaggcgtctgggggccttatttctcagccatggtacctgggttctggctgaatgaaggtggtcagagcgttactggaaaattgatagaccacatggtacaaggccatgctgcttttccagaactacaagtaaaggccacagccagatgccagagtatatatgcatatttgaacagtcacctggatctgattaagaaggctcagcctgtgggtttccttactgttgatttacatgtttggccagatttccatggcaaccggtctcccttagcagatctgacactaaagggcatgagaaccactggatatctgtatattccggctttggcagcgttgcactctcccagttctctactctcccctcaggtcaccggattgaaactgtctcaggaccttgatgatcttgccattctctacctggccacagttcaagccattgctttggggactcgcttcattatagaagccatggaggcagcagggcactcaatcagtactcttttcctatgtggaggcctcagcaagaatcccctttttgtgcaaatgcatgcggacattactggcatgcctgtggtcctgtcgcaagaggtggagtccgttcttgtgggtgctgctgttctgggtgcctgtgcctcaggggatttcgcttctgtacaggaagcaatggcaaaaatgagcaaagttgggaaagttgtgttcccgagactacaggataaaaaatactatgataagaaataccaagtattcctgaagctggttgaacaccagaaggagtatttggcgatcatgaatgatgactgaacagggcttgcaggtgctgatgccagaagcttctgtgccattgcattaaagacttgtcatttgatccatgttcaagacccttgaggtattgtttcatcatttctgtattgtctttcaataaagaaaacaaacatgtgcaaccagaa

SEQ ID NO: 6452 - protein, 575 aa, Homo sapiens
MSGGEQKPERYYVGVDVGTGSVRAALVDQSGVLLAFADQPIKNWEPQFNHHEQSSEDIWAACCVVTKKVVQGIDLNQIRGLGFDATCSLVVLDKQFHPLPVNQEGDSHRNVIMWLDHRAVSQVNRINETKHSVLQYVGGVMSVEMQAPKLLWLKENLREICWDKAGHFFDLPDFLSWKATGVTARSLCSLVCKWTYSAEKGWDDSFWKMIGLEDFVADNYSKIGNQVLPPGASLGNGLTPEAARDLGLLPGIAVAASLIDAHAGGLGVIGADVRGHGLICEGQPVTSRLAVICGTSSCHMGISKDPIFVPGVWGPYFSAMVPGFWLNEGGQSVTGKLIDHMVQGHAAFPELQVKATARCQSIYAYLNSHLDLIKKAQPVGFLTVDLHVWPDFHGNRSPLADLTLKGMRTTGYLYIPALAALHSPSSLLSPQVTGLKLSQDLDDLAILYLATVQAIALGTRFIIEAMEAAGHSISTLFLCGGLSKNPLFVQMHADITGMPVVLSQEVESVLVGAAVLGACASGDFASVQEAMAKMSKVGKVVFPRLQDKKYYDKKYQVFLKLVEHQKEYLAIMNDD

SEQ ID NO: 6453 - DNA, 1947 bp, Homo sapiens
agaaagaggcttctccaacccggcccggcccttccttcccctttcccgcagtcgttgcctcctcctcccctgcctcctcctccccttcctcctcctggccgcttagtctcacacccgccgggccgttgttcccgagacgttgttgagtcccctgtgtcctcttctgggtggaggaactgcaatgtctggtggagaacagaaaccagagaggtactatgtgggtgtggacgttggaacaggcagtgtccgtgcagctctggtggaccagagtggggtcctgttggcttttgcagaccagccaattaagaattgggagccccagttcaaccaccatgagcagtcctccgaggacatctgggctgcgtgctgtgttgtcacaaaggggattcccatcgaaacgtcatcatgtggctggaccatcgagcagtcagtcaagttaacaggatcaatgagaccaagcacagtgtcctccagtacgtcgggggggtgatgtctgtggaaatgcaggccccgaaacttctgtggctgaaagagaacttgagagagatttgctgggataaggcgggacatttctttgatctcccggacttcttatcgtggaaggcaacaggtgtcacagcacggtctctctgctccctggtgtgtaagtggacatattcagcagagaaaggctgggacgacagtttctggaaaatgattggtttggaagactttgttgcagataattacagcaaaataggaaaccaagtgctacctcctggagcttctcttggaaatgggctcacaccagaggcagcaagagaccttggccttctccctgggattgcggtcgcagcttcactcattgatgcccatgcaggaggactaggagtgattggggcagatgtgagagggcacggcctcatctgtgaggggcagccagtgacgtcacggctggctgtcatctgtggaacgtcttcttgtcacatggggatcagcaaagacccgatttttgtaccaggcgtctgggggccttatttctcagccatggtacctgggttctggctgaatgaaggtggtcagagcgttactggaaaattgatagaccacatggtacaaggccatgctgcttttccagaactacaagtaaaggccacagccaggtaactgctgtctctgttccctctaaaattttccttgtgtgactgtattgagagaattcacgttgggcagttgggtgattttcagatcctacagacaatgaaaatgcctgttagtgcttgaaagatagtcacctggatgatccagaagatagatgtattaattctttaaatgaggtaagagaacttagagaacctagagataccccaagaatatacccagggactatagataagaaactctgatgtagaagaaggaccatggattctggagtcaaaacttcttagtttcacatcccagccatactccttaatagatacaggaccttgagctagttacttaacctctttatgcctgtctcttcatctgtaaaactgaagataataactgatatggagtgatttctagaatattttgaagcaagctgagtgcaaaaaaaatttacgatatactccctttcatgtaaaaagaaagacataggaaaatacatgtgtatctgttcatttttgcaaaagaaatataggaagtggccaggtgcggtggctcactcctgtaaccccagcaccttgggaggccgaggcgggcagatcacgagttcagagatcgagaccagcctggccaacatggtgaaaccccatctctactaaaaatacaaaagttagccgggcatggtgatgtatgcctataatcccagttacttgggaggttgaggcaggagaattgctcaaacccgggaggtggaggttgcagtgagcagagatcgtgccactgcactccagcctgggcaataaagtgagactccgtctc

SEQ ID NO: 6454 - protein, 246 aa, Homo sapiens
MWLDHRAVSQVNRINETKHSVLQYVGGVMSVEMQAPKLLWLKENLREICWDKAGHFFDLPDFLSWKATGVTARSLCSLVCKWTYSAEKGWDDSFWKMIGLEDFVADNYSKIGNQVLPPGASLGNGLTPEAARDLGLLPGIAVAASLIDAHAGGLGVIGADVRGHGLICEGQPVTSRLAVICGTSSCHMGISKDPIFVPGVWGPYFSAMVPGFWLNEGGQSVTGKLIDHMVQGHAAFPELQVKATAR

SEQ ID NO: 6455 - DNA, 2509 bp, Homo sapiens
agaggcttctccaacccggcccggcccttccttcccctttcccgcagtcgttgcctcctcctcccctgcctcctcctccccttcctcctcctggccgcttagtctcacacccgccgggccgttgttcccgagacgttgttgagtcccctgtgtcctcttctggactacgccaagccacaggtggaggaactgcaatgtctggtggagaacagaaaccagagaggtactatgtgggtgtggacgttggaacaggcagtgtccgtgcagctctggtggaccagagtggggtcctgttggcttttgcagaccagccaattaagaattgggagccccagttcaaccaccatgagcagtcctccgaggacatctgggctgcgtgctgtgttgtcacaaagaaagttgtacaagggattgatttaaaccaaattcgaggacttgggtttgatgccacgtgttctctggttgttttggataagcagtttcacccattaccagtcaaccaggaaggggattcccatcgaaacgtcatcatgtggctggaccatcgagcagtcagtcaagttaacaggatcaatgagaccaagcacagtgtcctccagtacgtcgggggggtgatgtctgtggaaatgcaggccccgaaacttctgtggctgaaagagaacttgagagagatttgctgggataaggcgggacatttctttgatctcccggacttcttatcgtggaaggcaacaggtgtcacagcacggtctctctgctccctggtgtgtaagtggacatattcagcagagaaaggctgggacgacagtttctggaaaatgattggtttggaagactttgttgcagataattacagcaaaataggaaaccaagtgctacctcctggagcttctcttggaaatgggctcacaccagaggcagcaagagaccttggccttctccctgggattgcggtcgcagcttcactcattgatgcccatgcaggaggactaggagtgattggggcagatgtgagagggcacggcctcatctgtgaggggcagccagtgacgtcacggctggctgtcatctgtggaacgtcttcttgtcacatggggatcagcaaagacccgatttttgtaccaggcgtctgggggccttatttctcagccatggtacctgggttctggctgaatgaaggtggtcagagcgttactggaaaattgatagaccacatggtacaaggccatgctgcttttccagaactacaagtaaaggccacagccagatgccagagtatatatgcatatttgaacagtcacctggatctgattaagaaggctcagcctgtgggtttccttactgttgatttacatgtttggccagatttccatggcaaccggtctcccttagcagatctgacactaaagggcatggtcaccggattgaaactgtctcaggaccttgatgatcttgccattctctacctggccacagttcaagccattgctttggggactcgcttcattatagaagccatggaggcagcagggcactcaatcagtactcttttcctatgtggaggcctcagcaagaatcccctttttgtgcaaatgcatgcggacattactggcatgcctgtggtcctgtcgcaagaggtggagtccgttcttgtgggtgctgctgttctgggtgcctgtgcctcaggggatttcgcttctgtacagtgggggaaatagatagctcagttgtggacgatagcagcaatgggaagcagtatttgagaagaaatcagactctcttcttccagtcttttgcaagacagctgtccccaaagggatgaatccattacctttcaccagagttgagttcgttttccatttcatctttctgcttaaagagaaagccctttaaaagcgcagcgcatacattgagtgcgtgtacttaatttttaatatgtgtgtgcccacagccaagagaacagagaaccttaaataataatgaaactgaattgtacatgtcgtatgttttatgtggcactgattcctaaatatgctcctagcagccaggtattatttaatacatccccattaatcaagctgccaaatctaaatgaaaaccatgtttaaatatgtttaataagattatagcttttggttgaatatcaaactaacatagctacatttttccttccagccagctctcatttactgtcttacatttttactctgaaagcttttgtactatcaaaccaatcttgattataaaacaaattataccacaaacttttagtatcgtgagcttcagctgagtccctcagtgtaaatgttaggagaaagaacagttctgagattttttttctggctaaaaaatgatatttttcttcttcttggggtgagcctttgagtttaaaaggaaattaaaaattcaattagagatactaaattgtttgtagcttctgtattaaatgatgtctgccttttgcatagttattgaaagtgtttcatattaaatgtactttttctttttg

SEQ ID NO: 6456 - protein, 507 aa, Homo sapiens
MSGGEQKPERYYVGVDVGTGSVRAALVDQSGVLLAFADQPIKNWEPQFNHHEQSSEDIWAACCVVTKKVVQGIDLNQIRGLGFDATCSLVVLDKQFHPLPVNQEGDSHRNVIMWLDHRAVSQVNRINETKHSVLQYVGGVMSVEMQAPKLLWLKENLREICWDKAGHFFDLPDFLSWKATGVTARSLCSLVCKWTYSAEKGWDDSFWKMIGLEDFVADNYSKIGNQVLPPGASLGNGLTPEAARDLGLLPGIAVAASLIDAHAGGLGVIGADVRGHGLICEGQPVTSRLAVICGTSSCHMGISKDPIFVPGVWGPYFSAMVPGFWLNEGGQSVTGKLIDHMVQGHAAFPELQVKATARCQSIYAYLNSHLDLIKKAQPVGFLTVDLHVWPDFHGNRSPLADLTLKGMVTGLKLSQDLDDLAILYLATVQAIALGTRFIIEAMEAAGHSISTLFLCGGLSKNPLFVQMHADITGMPVVLSQEVESVLVGAAVLGACASGDFASVQWGK

SEQ ID NO: 6457 - DNA, 1979 bp, Homo sapiens
agaggcttctccaacccggcccggcccttccttcccctttcccgcagtcgttgcctcctcctcccctgcctcctcctccccttcctcctcctggccgcttagtctcacacccgccgggccgttgttcccgagacgttgttgagtcccctgtgtcctcttctgggtggaggaactgcaatgtctggtggagaacagaaaccagagaggtactatgtgggtgtggacgttggaacaggcagtgtccgtgcagctctggtggaccagagtggggtcctgttggcttttgcagaccagccaattaagaattgggagccccagttcaaccaccatgagcagtcctccgaggacatctgggctgcgtgctgtgttgtcacaaagaaagttgtacaagggattgatttaaaccaaattcgaggacttgggtttgatgccacgtgttctctggttgttttggataagcagtttcacccattaccagtcaaccaggaaggggattcccatcgaaacgtcatcatgtggctggaccatcgagcagtcagtcaagttaacaggatcaatgagaccaagcacagtgtcctccagtacgtcgggggggtgatgtctgtggaaatgcaggccccgaaacttctgtggctgaaagagaacttgagagagatttgctgggataaggcgggacatttctttgatctcccggacttcttatcgtggaaggcaacaggtgtcacagcacggtctctctgctccctggtgtgtaagtggacatattcagcagagaaaggctgggacgacagtttctggaaaatgattggtttggaagactttgttgcagataattacagcaaaataggaaaccaagtgctacctcctggagcttctcttggaaatgggctcacaccagaggcagcaagagaccttggccttctccctgggattgcggtcgcagcttcactcattgatgcccatgcaggaggactaggagtgattggggcagatgtgagagggcacggcctcatctgtgaggggcagccagtgacgtcacggctggctgtcatctgtggaacgtcttcttgtcacatggggatcagcaaagacccgatttttgtaccaggcgtctgggggccttatttctcagccatggtacctgggttctggctgaatgaaggtggtcagagcgttactggaaaattgatagaccacatggtacaaggccatgctgcttttccagaactacaagtaaaggccacagccagatgccagagtatatatgcatatttgaacagtcacctggatctgattaagaaggctcagcctgtgggtttccttactgttgatttacatgtttggccagatttccatggcaaccggtctcccttagcagatctgacactaaagggcatggtcaccggattgaaactgtctcaggaccttgatgatcttgccattctctacctggccacagttcaagccattgctttggggactcgcttcattatagaagccatggaggcagcagggcactcaatcagtactcttttcctatgtggaggcctcagcaagaatcccctttttgtgcaaatgcatgcggacattactggcatgcctgtggtcctgtcgcaagaggtggagtccgttcttgtgggtgctgctgttctgggtgcctgtgcctcaggggatttcgcttctgtacaggaagcaatggcaaaaatgagcaaagttgggaaagttgtgttcccgagactacaggataaaaaatactatgataagaaataccaagtattcctgaagctggttgaacaccagaaggagtatttggcgatcatgaatgatgactgaacagggcttgcaggtgctgatgccagaagcttctgtgccattgcattaaagacttgtcatttgatccatgttcaagacccttgaggtattgtttcatcatttctgtattgtctttcaataaagaaaacaaacatgtgcaaccagaa

SEQ ID NO: 6458 - protein, 551 aa, Homo sapiens
MSGGEQKPERYYVGVDVGTGSVRAALVDQSGVLLAFADQPIKNWEPQFNHHEQSSEDIWAACCVVTKKVVQGIDLNQIRGLGFDATCSLVVLDKQFHPLPVNQEGDSHRNVIMWLDHRAVSQVNRINETKHSVLQYVGGVMSVEMQAPKLLWLKENLREICWDKAGHFFDLPDFLSWKATGVTARSLCSLVCKWTYSAEKGWDDSFWKMIGLEDFVADNYSKIGNQVLPPGASLGNGLTPEAARDLGLLPGIAVAASLIDAHAGGLGVIGADVRGHGLICEGQPVTSRLAVICGTSSCHMGISKDPIFVPGVWGPYFSAMVPGFWLNEGGQSVTGKLIDHMVQGHAAFPELQVKATARCQSIYAYLNSHLDLIKKAQPVGFLTVDLHVWPDFHGNRSPLADLTLKGMVTGLKLSQDLDDLAILYLATVQAIALGTRFIIEAMEAAGHSISTLFLCGGLSKNPLFVQMHADITGMPVVLSQEVESVLVGAAVLGACASGDFASVQEAMAKMSKVGKVVFPRLQDKKYYDKKYQVFLKLVEHQKEYLAIMNDD

SEQ ID NO: 6459 - DNA, 1642 bp, Homo sapiens
atgatcgcatggagaatggattttgttgctttatctgatattgtcctcagctcctcctgaatttgccgagatcttacagcagtcagtaaggtggaggaactgcaatgtctggtggagaacagaaaccagagaggtactatgtgggtgtggacgttggaacaggcagtgtccgtgcagctctggtggaccagagtggggtcctgttggcttttgcagaccagccaattaagaattgggagccccagttcaaccaccatgagcagtcctccgaggacatctgggctgcgtgctgtgttgtcacaaagaacttgagagagatttgctgggataaggcgggacatttctttgatctcccggacttcttatcgtggaaggcaacaggtgtcacagcacggtctctctgctccctggtgtgtaagtggacatattcagcagagaaaggctgggacgacagtttctggaaaatgattggtttggaagactttgttgcagataattacagcaaaataggaaaccaagtgctacctcctggagcttctcttggaaatgggctcacaccagaggcagcaagagaccttggccttctccctgggattgcggtcgcagcttcactcattgatgcccatgcaggaggactaggagtgattggggcagatgtgagagggcacggcctcatctgtgaggggcagccagtgacgtcacggctggctgtcatctgtggaacgtcttcttgtcacatggggatcagcaaagacccgatttttgtaccaggcgtctgggggccttatttctcagccatggtacctgggttctggctgaatgaaggtggtcagagcgttactggaaaattgatagaccacatggtacaaggccatgctgcttttccagaactacaagtaaaggccacagccagatgccagagtatatatgcatatttgaacagtcacctggatctgattaagaaggctcagcctgtgggtttccttactgttgatttacatgtttggccagatttccatggcaaccggtctcccttagcagatctgacactaaagggcatggtcaccggattgaaactgtctcaggaccttgatgatcttgccattctctacctggccacagttcaagccattgctttggggactcgcttcattatagaagccatggaggcagcagggcactcaatcagtactcttttcctatgtggaggcctcagcaagaatcccctttttgtgcaaatgcatgcggacattactggcatgcctgtggtcctgtcgcaagaggtggagtccgttcttgtgggtgctgctgttctgggtgcctgtgcctcaggggatttcgcttctgtacaggaagcaatggcaaaaatgagcaaagttgggaaagttgtgttcccgagactacaggataaaaaatactatgataagaaataccaagtattcctgaagctggttgaacaccagaaggagtatttggcgatcatgaatgatgactgaacagggcttgcaggtgctgatgccagaagcttctgtgccattgcattaaagacttgtcatttgatccatgttcaagacccttgaggtattgtttcatcatttctgtattgtctttcaataaagaaaacaaacatgtgcaaccagaa

SEQ ID NO: 6460 - protein, 463 aa, Homo sapiens
MSGGEQKPERYYVGVDVGTGSVRAALVDQSGVLLAFADQPIKNWEPQFNHHEQSSEDIWAACCVVTKNLREICWDKAGHFFDLPDFLSWKATGVTARSLCSLVCKWTYSAEKGWDDSFWKMIGLEDFVADNYSKIGNQVLPPGASLGNGLTPEAARDLGLLPGIAVAASLIDAHAGGLGVIGADVRGHGLICEGQPVTSRLAVICGTSSCHMGISKDPIFVPGVWGPYFSAMVPGFWLNEGGQSVTGKLIDHMVQGHAAFPELQVKATARCQSIYAYLNSHLDLIKKAQPVGFLTVDLHVWPDFHGNRSPLADLTLKGMVTGLKLSQDLDDLAILYLATVQAIALGTRFIIEAMEAAGHSISTLFLCGGLSKNPLFVQMHADITGMPVVLSQEVESVLVGAAVLGACASGDFASVQEAMAKMSKVGKVVFPRLQDKKYYDKKYQVFLKLVEHQKEYLAIMNDD

SEQ ID NO: 6461 - DNA, 4569 bp, Homo sapiens
agtctttgtttcagcatcactttccatgttgcagacccaactacccaggttttacattttaggaactgcatgacagggacagagggacaggtttcctctccccgccagcaggctgctggctgcggcgccgcctctctctactccctcctcccaccgccccccttccccgcggttgggcccactctgcggcctctgcccgcctcgccctcgcccgggcctcctcccgctttctctctccgcttcccctggagcctccgaggagtccgcagccgctgggcgcccgggaagatggcggcggcggcgggagacggcggcggcgaggggggcgcgggcctgggcagcgcggcggggctggggccggggccggggctgcgcgggcagggcccctcagccgaagcgcacgagggcgccccggacccgatgcccgccgcgctgcaccctgaggaggtcgccgcgcgactgcagcggatgcagcgggagctgagcaaccgcaggaaaatcctggtgaaaaacctgccccaggacagcaactgccaggaagttcatgatttgttaaaagactatgacttaaaatattgttatgtggacagaaataaacgaacagcttttgttaccttattgaatggggaacaagcccagaacgcaattcagatgtttcatcaatattcttttagaggaaaagacttaatagtccagcttcagccaacagatgctttgttgtgtattaccaacgtgcccatttcttttacatcagaagagtttgaagaacttgttcgtgcttatggaaatattgagagatgttttctggtctatagtgaagttactggccattccaaaggctatggatttgtggaatacatgaaaaaggactttgctgcaaaggctagactggagctattgggtagacagttgggagcatcagcactctttgcacaatggatggatgttaatctattggcttcagagctcattcattctaagtgcctttgtattgataaactccccagtgactacagggattcagaagagctgttgcaaattttttccagtgtccataaacctgtgttttgccagcttgcacaggatgaaggtagttacgttggtggctttgcagtggttgaatatagcactgcggagcaggctgaagaggtccagcaggcagcagacggtatgaccatcaagggcagcaaagtccaggtttccttctgtgctcctggagcgccagggcgaagtacattagcagcattgatagcggctcaacgtgtgatgcacagtaatcaaaagggcttacttccagagccaaatccagtacaaattatgaaaagtttaaacaaccctgccatgttgcaagttcttctacagccccagttatgtggacgagctgttaaaccagccgttcttggaacacctcacagcttgccacatctgatgaatccatccatctctcctgcatttttacatttgaataaagcacatcagaatctttctcatataccactggcacaacaacaattaatgaagtttgagaatattcatactaataataaacccggcttacttggagagcccccagctgtggtacttcagactgcactagggatagggtcagtgcttccattgaaaaaggagttgggacatcatcatggagaagcacataaaacatctagcctgattccaactcaaacaacgataacagctggaatgggcatgttaccattctttccaaatcagcacattgctggacaggctgggccagggcacagtaatactcaggagaaacagccagccacggtgggaatggcagaaggaaatttctcagggtcgcagccttatcttcagagctttccaaaccttgctgctggaagcttgctggtgggacaccataagcagcagcaaagccagccaaaaggcacagagataagttcaggggctgcctctaagaatcaaacttcactcttgggagaaccaccaaaagaaattcggctcagtaaaaatccatacttgaatttggcaagtgtgttgcccagtgtgtgcttatcatcccctgcaagtaaaaccactcttcataagactggaattgcaagcagcattctggatgcaatctctcagggaagtgaatcacaacacgcattggaaaagtgcattgcttattctccaccttttggtgattatgcacaggtgtcatctttaagaaatgaaaagcgaggctcatcatatctcatctctgccccagaaggtggttcagtggaatgtgttgaccagcattctcagggcacaggagcatattacatggaaacttacttaaaaaagaagcgagtatactgagttaagctctctcctaataaccccctaaggttctctgcagtatctctgctgttcatcgctgccttaacttcattcaaactagccatatcctttaaatacgggtttatagtttcccagaaggaactgtgttgtgcagcaggcagaaatgccaaataaaaaatagcaataagaagagacatcaattgaggacattttccactagagtcagatgcatcttaatcagtgtgctaacttacaatccattggagaaactaacaatgttccaatattccttgatttaggactgggaataattctgacaccatatataaaagaagtttgaagcaataaatgggaaacagtgttgtttcctgagccttagaagaatgagtttcttataagccaatgtgcatttcaatttactttccctagaagtaattgcatttatagatttttaggacttttcctagaactacaagggtgcaagtaccaaatgtgctgatggtaatattataaagatgctctacatgcacactcaattacgcccacaccagccatgcaaaattaaacccggtaagagagtgacagtgatatccaaggtatccactactaccgatgctttaagatgttgtttaccatttataccttctgtgaaaaatagaaggtattttaagaaaagtaactttggtgatctaataaaagggtttggcaaactacaccctgggtccacatttggtctaccacccgcttttgtgctgcctgcaagctaagactaatgtttacatttttaaatggttggaggaaaaaagaaaacttatgacatgaaatttatatgaaattcagatttcagtgtccataaataaacttttattgggacgttgccatgctcattcatttacgtgttgtctgtggcactcttacgctacaagggcagaactgattagcttcaacagagactgtatggcctacaaagaccatatggcctaaaatttcaagtatctggccatttatatatagtttgctgatccctgatctaatagcactaattctaatagcaactattcctttcaattcacctaaagacagacctttagcctttagacagacttgtaagtggaaaggaacatgggtttctgtgctcatttcatagcgtagactagtaatgatctaatgactagaatggggcctattttgatcactaaatgccctattatttccacaatatagtatagtaaagcagtcaatactgcactttctgatggagtcttaaggagtcacagtatttataaccattttgagctaataagctatacctcactctctgctttctctctcactctttttgatagtgtgttagggtgaaaaatcagttatttaacccaatttacttgtgaaagaagttttatctttatggactatgatgacttttgacatcaccatttcttgaagaccttggtattaaatgcatgagaaaccttttgccatctagaaatttctaagtttgtttatgttataagactgtaattaattgatagggaatttgggatctcaatccggggctttttgaaatcagatcattaaatatctcgtcactttggggacttgttatttttaactatgatgtggatatcctgttttaattatgaagtctagaattggtacatatgttgtatgctttgtaaagaatttcacttggtctaatttattgcatatactagcttctgttggaaaatgactgacagctagaaagtttaaggtaatttctaagtatactacctataagtaactgataagaattaggcatcattcagtgatatagcagatgactaatgggtttttcaggccctgcacttctctttcccattttcctgttgcattcagcctcttcaatgcttagtcacacctccactatagtacaaacaaacaaacaaacagaagaaaggaaagatggtgaattttgcaacagagctgcaaaaagtcagtcagtcaaagcaggaagaggttgaaggaactaaaacaaacaaacaaaggtgtctggactacagcacagtggacatgccatccatactggcctgtgccccgttatcaatcactgggcacaacagtgaagaagtgcaaatcaagtggtgtttgtttgtttgttagtagtaaggaccgtaacccaccccttcctccccccaaaactatactgttatttttctatgtaagcaaattgtttgaaatgctttgaaaatgaaatcttaatattaaaaggcatatgcatgt

SEQ ID NO: 6462 - protein, 751 aa, Homo sapiens
MTGTEGQVSSPRQQAAGCGAASLYSLLPPPPFPAVGPTLRPLPASPSPGPPPAFSLRFPWSLRGVRSRWAPGKMAAAAGDGGGEGGAGLGSAAGLGPGPGLRGQGPSAEAHEGAPDPMPAALHPEEVAARLQRMQRELSNRRKILVKNLPQDSNCQEVHDLLKDYDLKYCYVDRNKRTAFVTLLNGEQAQNAIQMFHQYSFRGKDLIVQLQPTDALLCITNVPISFTSEEFEELVRAYGNIERCFLVYSEVTGHSKGYGFVEYMKKDFAAKARLELLGRQLGASALFAQWMDVNLLASELIHSKCLCIDKLPSDYRDSEELLQIFSSVHKPVFCQLAQDEGSYVGGFAVVEYSTAEQAEEVQQAADGMTIKGSKVQVSFCAPGAPGRSTLAALIAAQRVMHSNQKGLLPEPNPVQIMKSLNNPAMLQVLLQPQLCGRAVKPAVLGTPHSLPHLMNPSISPAFLHLNKAHQNLSHIPLAQQQLMKFENIHTNNKPGLLGEPPAVVLQTALGIGSVLPLKKELGHHHGEAHKTSSLIPTQTTITAGMGMLPFFPNQHIAGQAGPGHSNTQEKQPATVGMAEGNFSGSQPYLQSFPNLAAGSLLVGHHKQQQSQPKGTEISSGAASKNQTSLLGEPPKEIRLSKNPYLNLASVLPSVCLSSPASKTTLHKTGIASSILDAISQGSESQHALEKCIAYSPPFGDYAQVSSLRNEKRGSSYLISAPEGGSVECVDQHSQGTGAYYMETYLKKKRVY

SEQ ID NO: 6463 - DNA, 5999 bp, Homo sapiens
agtctttgtttcagcatcactttccatgttgcagacccaactacccaggttttacattttaggaactgcatgacagggacagagggacaggtttcctctccccgccagcaggctgctggctgcggcgccgcctctctctactccctcctcccaccgccccccttccccgcggttgggcccactctgcggcctctgcccgcctcgccctcgcccgggcctcctcccgctttctctctccgcttcccctggagcctccgaggagtccgcagccgctgggcgcccgggaagatggcggcggcggcgggagacggcggcggcgaggggggcgcgggcctgggcagcgcggcggggctggggccggggccggggctgcgcgggcagggcccctcagccgaagcgcacgagggcgccccggacccgatgcccgccgcgctgcaccctgaggaggtcgccgcgcgactgcagcggatgcagcgggagctgagcaaccgcaggaaaatcctggtgaaaaacctgccccaggacagcaactgccaggaagttcatgatttgttaaaagactatgacttaaaatattgttatgtggacagaaataaacgaacagcttttgttaccttattgaatggggaacaagcccagaacgcaattcagatgtttcatcaatattcttttagaggaaaagacttaatagtccagcttcagccaacagatgctttgttgtgtattaccaacgtgcccatttcttttacatcagaagagtttgaagaacttgttcgtgcttatggaaatattgagagatgttttctggtctatagtgaagttactggccattccaaaggctatggatttgtggaatacatgaaaaaggactttgctgcaaaggctagactggagctattgggtagacagttgggagcatcagcactctttgcacaatggatggatgttaatctattggcttcagagctcattcattctaagtgcctttgtattgataaactccccagtgactacagggattcagaagagctgttgcaaattttttccagtgtccataaacctgtgttttgccagcttgcacaggatgaaggtagttacgttggtggctttgcagtggttgaatatagcactgcggagcaggctgaagaggtccagcaggcagcagacggtatgaccatcaagggcagcaaagtccaggtttccttctgtgctcctggagcgccagggcgaagtacattagcagcattgatagcggctcaacgtgtgatgcacagtaatcaaaagggcttacttccagagccaaatccagtacaaattatgaaaagtttaaacaaccctgccatgttgcaagttcttctacagccccagttatgtggacgagctgttaaaccagccgttcttggaacacctcacagcttgccacatctgatgaatccatccatctctcctgcatttttacatttgaataaagcacatcagaatctttctcatataccactggcacaacaacaattaatgaagtttgagaatattcatactaataataaacccggcttacttggagagcccccagctgtggtacttcagactgcactagggatagggtcagtgcttccattgaaaaaggagttgggacatcatcatggagaagcacataaaacatctagcctgattccaactcaaacaacgataacagctggaatgggcatgttaccattctttccaaatcagcacattgctggacaggctgggccagggcacagtaatactcaggagaaacagccagccacggtgggaatggcagaaggaaatttctcagggtcgcagccttatcttcagagctttccaaaccttgctgctggaagcttgctggtgggacaccataagcagcagcaaagccagccaaaaggcacagagataagttcaggggctgcctctaagaatcaaacttcactcttgggagaaccaccaaaagaaattcggctcagtaaaaatccatacttgaatttggcaagtgtgttgcccagtgtgtgcttatcatcccctgcaagtaaaaccactcttcataagactggaattgcaagcagcattctggatgcaatctctcagggaagtgaatcacaacacgcattggaaaagtgcattgcttattctccaccttttggtgattatgcacaggtgtcatctttaagaaatgaaaagcgaggctcatcatatctcatctctgccccagaaggtggttcagtggaatgtgttgaccagcattctcagggcacaggagcatattacatggaaacttacttaaaaaagaagcgagtatactgagttaagctctctcctaataaccccctaaggttctctgcagtatctctgctgttcatcgctgccttaacttcattcaaactagccatatcctttaaatacgggtttatagtttcccagaaggaactgtgttgtgcagcaggcagaaatgccaaataaaaaatagcaataagaagagacatcaattgaggacattttccactagagtcagatgcatcttaatcagtgtgctaacttacaatccattggagaaactaacaatgttccaatattccttgatttaggactgggaataattctgacaccatatataaaagaagtttgaagcaataaatgggaaacagtgttgtttcctgagccttagaagaatgagtttcttataagccaatgtgcatttcaatttactttccctagaagtaattgcatttatagatttttaggacttttcctagaactacaagggtgcaagtaccaaatgtgctgatggtaatattataaagatgctctacatgcacactcaattacgcccacaccagccatgcaaaattaaacccggtaagagagtgacagtgatatccaaggtatccactactaccgatgctttaagatgttgtttaccatttataccttctgtgaaaaatagaaggtattttaagaaaagtaactttggtgatctaataaaagggtttggcaaactacaccctgggtccacatttggtctaccacccgcttttgtgctgcctgcaagctaagactaatgtttacatttttaaatggttggaggaaaaaagaaaacttatgacatgaaatttatatgaaattcagatttcagtgtccataaataaacttttattgggacgttgccatgctcattcatttacgtgttgtctgtggcactcttacgctacaagggcagaactgattagcttcaacagagactgtatggcctacaaagaccatatggcctaaaatttcaagtatctggccatttatatatagtttgctgatccctgatctaatagcactaattctaatagcaactattcctttcaattcacctaaagacagacctttagcctttagacagacttgtaagtggaaaggaacatgggtttctgtgctcatttcatagcgtagactagtaatgatctaatgactagaatggggcctattttgatcactaaatgccctattatttccacaatatagtatagtaaagcagtcaatactgcactttctgatggagtcttaaggagtcacagtatttataaccattttgagctaataagctatacctcactctctgctttctctctcactctttttgatagtgtgttagggtgaaaaatcagttatttaacccaatttacttgtgaaagaagttttatctttatggactatgatgacttttgacatcaccatttcttgaagaccttggtattaaatgcatgagaaaccttttgccatctagaaatttctaagtttgtttatgttataagactgtaattaattgatagggaatttgggatctcaatccggggctttttgaaatcagatcattaaatatctcgtcactttggggacttgttatttttaactatgatgtggatatcctgttttaattatgaagtctagaattggtacatatgttgtatgctttgtaaagaatttcacttggtctaatttattgcatatactagcttctgttggaaaatgactgacagctagaaagtttaaggtaatttctaagtatactacctataagtaactgataagaattaggcatcattcagtgatatagcagatgactaatgggtttttcaggccctgcacttctctttcccattttcctgttgcattcagcctcttcaatgcttagtcacacctccactatagtacaaacaaacaaacaaacagaagaaaggaaagatggtgaattttgcaacagagctgcaaaaagtcagtcagtcaaagcaggaagaggttgaaggaactaaaacaaacaaacaaaggtgtctggactacagcacagtggacatgccatccatactggcctgtgccccgttatcaatcactgggcacaacagtgaagaagtgcaaatcaagtggtgtttgtttgtttgttagtagtaaggaccgtaacccaccccttcctccccccaaaactatactgttatttttctatgtaagcaaattgtttgaaatgctttgaaaatgaaatcttaatattaaaaggcatatgcatgtaaagtctttagtatatttatttgtataaagagtaaacaaagtgcatatagagtggccacaggtttgacacagagaccttggtgatgtaggctatgaacaaatttaaatggcaacttcattgctgccactgaaccaatcctgaatttgggctcaacaggtgaaaagtaacaatatcaaacgaatactaaacagcataacaaaaagattttcagactcttggtcataaagaccgtaatcgttcacattgaatcaatgactaaacatttttgattacccagctacctccaagcaaactgaaaactgtctagtggatcctgaagtccatagtgcctctagccgggtctttcaagtgttgcaccacagggtgatgattgatggtaaaaacagggatcaacccttgtagatcggtggtaagtatggaaaccctctaagaacagtgcagcgtatgtggtattcagactggttgcatacagcattcaaaaccagtgctggaatagcttgccccaaagtggtagagttataaaaggatatacattgacgtttcttaaaagcatgtgtaatagcatccaggttctgggaatgagttctgattaaaggtatactgcttaggaaagcactggcacaggcttagttcttgagaattaacatgcagcaaattatctattccacagctatccccccatgtagaaccagctttctcaaaaatgggtgctagtgatcacccaaaggaacaggagctaagccactggagaaacaaagtttaagtcctactggtgagagaatacagtcatttttgtacagaaacaatatatactacctggtatctaatattttaagaatgcatggtctagtactgtatagatactgaaatttgagggctaagtccatcaatctttctttatctatgattaatgtgccagcaaaacatttcagatcagctggcagcagggaaaagcaatcatcttcagatattattttggtcaactcctcgttttcaaaaatccccttttggtaatgcagttgtgatggtgaactagccagatgaaatggtggtatattctttccacaaggaggagtgcttaagtgctttcaaatattttggttgtcattatgtgtcactaagttactggtaccaaatttaaagaggaagtccttacacatattaagcactacagtgtgccttatacatgtatatgtactgaagtatgagttcagtgactttttggacagaacacaaacttctttcattagaaatttttaaaaaatgacttgggcatttgttgcaggagaaggacttgataatctgtggaatttaaatgttattcatgcttcttattttaaaagtgcttcaaatccttcaataaggttctgaaagcttgtccgattggatggttggaattcccagcatttcctcataagttgataaacct

SEQ ID NO: 6464 - protein, 751 aa, Homo sapiens; identical to SEQ ID NO: 6462

SEQ ID NO: 6465 - DNA, 2988 bp, Homo sapiens
cagcttttgttaccttattgaatggggaacaagcccagaacgcaattcagatgtttcatcaatattcttttagaggaaaagacttaatagtccagcttcagccaacagatgctttgttgtgtattaccaacgtgcccatttcttttacatcagaagagtttgaagaacttgttcgtgcttatggaaatattgagagatgttttctggtctatagtgaagttactggccattccaaaggctatggatttgtggaatacatgaaaaaggactttgctgcaaaggctagactggagctattgggtagacagttgggagcatcagcactctttgcacaatggatggatgttaatctattggcttcagagctcattcattctaagtgcctttgtattgataaactccccagtgactacagggattcagaagagctgttgcaaattttttccagtgtccataaacctgtgttttgccagcttgcacaggatgaaggtagttacgttggtggctttgcagtggttgaatatagcactgcggagcaggctgaagaggtccagcaggcagcagacggtatgaccatcaagggcagcaaagtccaggtttccttctgtgctcctggagcgccagggcgaagtacattagcagcattgatagcggctcaacgtgtgatgcacagtaatcaaaagggcttacttccagagccaaatccagtacaaattatgaaaagtttaaacaaccctgccatgttgcaagttcttctacagccccagttatgtggacgagctgttaaaccagccgttcttggaacacctcacagcttgccacatctgatgaatccatccatctctcctgcatttttacatttgaataaagcacatcagaatctttctcatataccactggcacaacaacaattaatgaagtttgagaatattcatactaataataaacccggcttacttggagagcccccagctgtggtacttcagactgcactagggatagggtcagtgcttccattgaaaaaggagttgggacatcatcatggagaagcacataaaagctgcctctaagaatcaaacttcactcttgggagaaccaccaaaagaaattcggctcagtaaaaatccatacttgaatttggcaagtgtgttgcccagtgtgtgcttatcatcccctgcaagtaaaaccactcttcataagactggaattgcaagcagcattctggatgcaatctctcagggaagtgaatcacaacacgcattggaaaagtgcattgcttattctccaccttttggtgattatgcacaggtaaataattcccaggttctgatgatactcagaaaaattggttcaactatatattgagttcactgaatatgaaattgtgatttctatattattaacgtaggcaaatcaaattgcactgatctatgtatttcttactcatcatttgaaatttgggaatgtgttcaagacattatttagtatcattttgcactagatatttacctctcactgtttacctagtggttggcaaactacagcccatagaacaaatctagcccaccacctggttttgtaaataaatttgtattgtaatacagccatgtccattcattaacatattgtctatggtgctgtcatgctataataaaagagttgagtgatgacagtagagactatgtggcctgcaagattaaatatttactatctggttctttatagaaaaatgctgctaacctctggtttgcactagtgtagacctaagaaacccaagggaatgcctctgttcttctccactgattgtagatggagaaagatgatcatatttacagacactactgtgctaacttctaaaccagccaatcaataacataaaaatattatgttcataagatgtcctgtgtcattacttaaatatttcagttttgctttggcccttcttcagcttactcttagtggtgtaagctgaatatatatcatgttagccctgtgtgattatggaatcataagagtccacaagagtcttataattatcagttctgactcttactttcctagaacagccagcttcttctcagatctatcctgttcgttggagtcttgtctccactttgatttccctggagcagctttgtgtttgcctgacccatccctaataaacttagaaaagaaaaccacttagaacaattgacgcctgattataagagtactagaaacagcccaagttctgtaaaaatggtgcagctggatattagtgaaatatttgccatctcttatatacctgggacaagacggaaaaatatgggttgggtagatgatgtaattaggtgacagtatatctatatttagagaacagtgatcacaaattgctgcagtctgaaggcattctcttatattgattcataagagtcatcttcagtcctttattagataacatttgaagtaatgacttagataaagacattaattgtaaaatttacaagatatagtcctgtacaattccaatttgtttcttttcaagaaacaaactttttataaacaggagaagcacaataaattttttaaaaattcattaaatacatatttaagctttaaaaattttttgaacttttatttctttttaaatttgcctttttcttagcagttttgcttattagattactgtgatttattgtatacttatatccatggaaagactttctcattcacacatggagaaattctgtgataatgatgccttttgcattactgtatgtcttctgcctccacacttgcttgcccagagatatggtggggaaatgaatcctccctgcactgttcagtgtctcctttgacagtccctgcttctagcgcacgcttgttcataaaatgggatttgttctctctctcgtgttctttcttccttataaacttaattaaatgttactaatggaacattaaagtacatggaattaaactaatggaatactaaaataaccattatag

SEQ ID NO: 6466 - protein, 339 aa, Homo sapiens
MFHQYSFRGKDLIVQLQPTDALLCITNVPISFTSEEFEELVRAYGNIERCFLVYSEVTGHSKGYGFVEYMKKDFAAKARLELLGRQLGASALFAQWMDVNLLASELIHSKCLCIDKLPSDYRDSEELLQIFSSVHKPVFCQLAQDEGSYVGGFAVVEYSTAEQAEEVQQAADGMTIKGSKVQVSFCAPGAPGRSTLAALIAAQRVMHSNQKGLLPEPNPVQIMKSLNNPAMLQVLLQPQLCGRAVKPAVLGTPHSLPHLMNPSISPAFLHLNKAHQNLSHIPLAQQQLMKFENIHTNNKPGLLGEPPAVVLQTALGIGSVLPLKKELGHHHGEAHKSCL

SEQ ID NO: 6467 - DNA, 5108 bp, Homo sapiens
gggaggcggtgcgtcgctgagcgcaggccgcggcggccgcggagtatcctggagctgcagacagtgcgggcctgcgcccagtcccggctgtcctcgccgcgacccctcctcagccctgggcgcgcgcacgctggggccccgcggggctggccgcctagcgagcctgccggtcgaccccagccagcgcagcgacggggcgctgcctggcccaggcgcacacggaagtgcgcttctctgaagtagctttggaaagtagagaagaaaatccagtttgcttcttggagaacactggacagctgaataaatgcagtatctaaatataaaagaggactgcaatgccatggctttctgtgctaaaatgaggagctccaagaagactgaggtgaacctggaggcccctgagccaggggtggaagtgatcttctatctgtcggacagggagcccctccggctgggcagtggagagtacacagcagaggaactgtgcatcagggctgcacaggcatgccgtatctctcctctttgtcacaacctctttgccctgtatgacgagaacaccaagctctggtatgctccaaatcgcaccatcaccgttgatgacaagatgtccctccggctccactaccggatgaggttctatttcaccaattggcatggaaccaacgacaatgagcagtcagtgtggcgtcattctccaaagaagcagaaaaatggctacgagaaaaaaaagattccagatgcaacccctctccttgatgccagctcactggagtatctgtttgctcagggacagtatgatttggtgaaatgcctggctcctattcgagaccccaagaccgagcaggatggacatgatattgagaacgagtgtctagggatggctgtcctggccatctcacactatgccatgatgaagaagatgcagttgccagaactgcccaaggacatcagctacaagcgatatattccagaaacattgaataagtccatcagacagaggaaccttctcaccaggatgcggataaataatgttttcaaggatttcctaaaggaatttaacaacaagaccatttgtgacagcagcgtgtccacgcatgacctgaaggtgaaatacttggctaccttggaaactttgacaaaacattacggtgctgaaatatttgagacttccatgttactgatttcatcagaaaatgagatgaattggtttcattcgaatgacggtggaaacgttctctactacgaagtgatggtgactgggaatcttggaatccagtggaggcataaaccaaatgttgtttctgttgaaaaggaaaaaaataaactgaagcggaaaaaactggaaaataaacacaagaaggatgaggagaaaaacaagatccgggaagagtggaacaatttttcttacttccctgaaatcactcacattgtaataaaggagtctgtggtcagcattaacaagcaggacaacaagaaaatggaactgaagctctcttcccacgaggaggccttgtcctttgtgtccctggtagatggctacttccggctcacagcagatgcccatcattacctctgcaccgacgtggcccccccgttgatcgtccacaacatacagaatggctgtcatggtccaatctgtacagaatacgccatcaataaattgcggcaagaaggaagcgaggaggggatgtacgtgctgaggtggagctgcaccgactttgacaacatcctcatgaccgtcacctgctttgagaagtctgagcaggtgcagggtgcccagaagcagttcaagaactttcagatcgaggtgcagaagggccgctacagtctgcacggttcggaccgcagcttccccagcttgggagacctcatgagccacctcaagaagcagatcctgcgcacggataacatcagcttcatgctaaaacgctgctgccagcccaagccccgagaaatctccaacctgctggtggctactaagaaagcccaggagtggcagcccgtctaccccatgagccagctgagtttcgatcggatcctcaagaaggatctggtgcagggcgagcaccttgggagaggcacgagaacacacatctattctgggaccctgatggattacaaggatgacgaaggaacttctgaagagaagaagataaaagtgatcctcaaagtcttagaccccagccacagggatatttccctggccttcttcgaggcagccagcatgatgagacaggtctcccacaaacacatcgtgtacctctatggcgtctgtgtccgcgacgtggagaatatcatggtggaagagtttgtggaagggggtcctctggatctcttcatgcaccggaaaagcgatgtccttaccacaccatggaaattcaaagttgccaaacagctggccagtgccctgagctacttggaggataaagacctggtccatggaaatgtgtgtactaaaaacctcctcctggcccgtgagggcatcgacagtgagtgtggcccattcatcaagctcagtgaccccggcatccccattacggtgctgtctaggcaagaatgcattgaacgaatcccatggattgctcctgagtgtgttgaggactccaagaacctgagtgtggctgctgacaagtggagctttggaaccacgctctgggaaatctgctacaatggcgagatccccttgaaagacaagacgctgattgagaaagagagattctatgaaagccggtgcaggccagtgacaccatcatgtaaggagctggctgacctcatgacccgctgcatgaactatgaccccaatcagaggcctttcttccgagccatcatgagagacattaataagcttgaagagcagaatccagatattgtttcagaaaaaaaaccagcaactgaagtggaccccacacattttgaaaagcgcttcctaaagaggatccgtgacttgggagagggccactttgggaaggttgagctctgcaggtatgaccccgaaggggacaatacaggggagcaggtggctgttaaatctctgaagcctgagagtggaggtaaccacatagctgatctgaaaaaggaaatcgagatcttaaggaacctctatcatgagaacattgtgaagtacaaaggaatctgcacagaagacggaggaaatggtattaagctcatcatggaatttctgccttcgggaagccttaaggaatatcttccaaagaataagaacaaaataaacctcaaacagcagctaaaatatgccgttcagatttgtaaggggatggactatttgggttctcggcaatacgttcaccgggacttggcagcaagaaatgtccttgttgagagtgaacaccaagtgaaaattggagacttcggtttaaccaaagcaattgaaaccgataaggagtattacaccgtcaaggatgaccgggacagccctgtgttttggtatgctccagaatgtttaatgcaatctaaattttatattgcctctgacgtctggtcttttggagtcactctgcatgagctgctgacttactgtgattcagattctagtcccatggctttgttcctgaaaatgataggcccaacccatggccagatgacagtcacaagacttgtgaatacgttaaaagaaggaaaacgcctgccgtgcccacctaactgtccagatgaggtttatcaacttatgaggaaatgctgggaattccaaccatccaatcggacaagctttcagaaccttattgaaggatttgaagcacttttaaaataagaagcatgaataacatttaaattccacagattatcaagtccttctcctgcaacaaatgcccaagtcattttttaaaaatttctaatgaaagaagtttgtgttctgtccaaaaagtcactgaactcatacttcagtacatatacatgtataaggcacactgtagtgcttaatatgtgtaaggacttcctctttaaatttggtaccagtaacttagtgacacataatgacaaccaaaatatttgaaagcacttaagcactcctccttgtggaaagaatataccaccatttcatctggctagttcaccatcacaactgcattaccaaaaggggatttttgaaaacgaggagttgaccaaaataatatctgaagatgattgcttttccctgctgccagctgatctgaaatgttttgctggcacattaatcatagataaagaaagattgatggacttagccctcaaatttcagtatctatacagtactagaccatgcattcttaaaatattagataccaggtagtatatattgtttctgtacaaaaatgactgtattctctcaccagtaggacttaaactttgtttctccagtggcttagctcctgttcctttgggtgatcactagcacccatttttgagaaagctggttctacatggggggatagctgtggaatagataatttgctgcatgttaattctcaagaactaagcctgtgccagtgctttcctaagcagtatacctttaatcagaactcattcccagaacctggatgctattacacatgcttttaagaaacgtcaatgtatatccttttataactctaccactttggggcaagctattccagcactggttttgaatgctgtatgcaaccagtctgaataccacatacgctgcactgttcttagagggtttccatacttaccaccgatctacaagggttgatccctgtttttaccatcaatcatcaccctgtggtgcaacacttgaaagacccggctagaggcactatggacttcaggatccactagacagttttcagtttgcttggaggtagctgggtaatcaaaaatgtttagtcattgattcaatgtgaacgattacggtctttatgaccaagagtctgaaaatctttttgttatgctgtttagtattcgtttgatattgttacttttcacctgttgagcccaaattcaggattggttcagtggcagcaatgaagttgccatttaaatttgttcatagcctacatcaccaaggtctctgtgtcaaacctgtggccactctatatgcactttgtttactctttatacaaataaatatactaaagactttacatgca

SEQ ID NO: 6468 - protein, 1154 aa, Homo sapiens; identical to SEQ ID NO: 250

SEQ ID NO: 6469 - DNA, 5055 bp, Homo sapiens
agttcagagttaggcaaacagaggtgagcattttgtgccagtccttcacgtacagacaggttaaaaccgatctacacaataatttgcaaataaggtctgctttgctccctctagaaccagggaccccactcccatgccgacagtatgggctgctgtcttcaggaccattgcaagcgcttctctgaagtagctttggaaagtagagaagaaaatccagtttgcttcttggagaacactggacagctgaataaatgcagtatctaaatataaaagaggactgcaatgccatggctttctgtgctaaaatgaggagctccaagaagactgaggtgaacctggaggcccctgagccaggggtggaagtgatcttctatctgtcggacagggagcccctccggctgggcagtggagagtacacagcagaggaactgtgcatcagggctgcacaggcatgccgtatctctcctctttgtcacaacctctttgccctgtatgacgagaacaccaagctctggtatgctccaaatcgcaccatcaccgttgatgacaagatgtccctccggctccactaccggatgaggttctatttcaccaattggcatggaaccaacgacaatgagcagtcagtgtggcgtcattctccaaagaagcagaaaaatggctacgagaaaaaaaagattccagatgcaacccctctccttgatgccagctcactggagtatctgtttgctcagggacagtatgatttggtgaaatgcctggctcctattcgagaccccaagaccgagcaggatggacatgatattgagaacgagtgtctagggatggctgtcctggccatctcacactatgccatgatgaagaagatgcagttgccagaactgcccaaggacatcagctacaagcgatatattccagaaacattgaataagtccatcagacagaggaaccttctcaccaggatgcggataaataatgttttcaaggatttcctaaaggaatttaacaacaagaccatttgtgacagcagcgtgtccacgcatgacctgaaggtgaaatacttggctaccttggaaactttgacaaaacattacggtgctgaaatatttgagacttccatgttactgatttcatcagaaaatgagatgaattggtttcattcgaatgacggtggaaacgttctctactacgaagtgatggtgactgggaatcttggaatccagtggaggcataaaccaaatgttgtttctgttgaaaaggaaaaaaataaactgaagcggaaaaaactggaaaataaacacaagaaggatgaggagaaaaacaagatccgggaagagtggaacaatttttcttacttccctgaaatcactcacattgtaataaaggagtctgtggtcagcattaacaagcaggacaacaagaaaatggaactgaagctctcttcccacgaggaggccttgtcctttgtgtccctggtagatggctacttccggctcacagcagatgcccatcattacctctgcaccgacgtggcccccccgttgatcgtccacaacatacagaatggctgtcatggtccaatctgtacagaatacgccatcaataaattgcggcaagaaggaagcgaggaggggatgtacgtgctgaggtggagctgcaccgactttgacaacatcctcatgaccgtcacctgctttgagaagtctgagcaggtgcagggtgcccagaagcagttcaagaactttcagatcgaggtgcagaagggccgctacagtctgcacggttcggaccgcagcttccccagcttgggagacctcatgagccacctcaagaagcagatcctgcgcacggataacatcagcttcatgctaaaacgctgctgccagcccaagccccgagaaatctccaacctgctggtggctactaagaaagcccaggagtggcagcccgtctaccccatgagccagctgagtttcgatcggatcctcaagaaggatctggtgcagggcgagcaccttgggagaggcacgagaacacacatctattctgggaccctgatggattacaaggatgacgaaggaacttctgaagagaagaagataaaagtgatcctcaaagtcttagaccccagccacagggatatttccctggccttcttcgaggcagccagcatgatgagacaggtctcccacaaacacatcgtgtacctctatggcgtctgtgtccgcgacgtggagaatatcatggtggaagagtttgtggaagggggtcctctggatctcttcatgcaccggaaaagcgatgtccttaccacaccatggaaattcaaagttgccaaacagctggccagtgccctgagctacttggaggataaagacctggtccatggaaatgtgtgtactaaaaacctcctcctggcccgtgagggcatcgacagtgagtgtggcccattcatcaagctcagtgaccccggcatccccattacggtgctgtctaggcaagaatgcattgaacgaatcccatggattgctcctgagtgtgttgaggactccaagaacctgagtgtggctgctgacaagtggagctttggaaccacgctctgggaaatctgctacaatggcgagatccccttgaaagacaagacgctgattgagaaagagagattctatgaaagccggtgcaggccagtgacaccatcatgtaaggagctggctgacctcatgacccgctgcatgaactatgaccccaatcagaggcctttcttccgagccatcatgagagacattaataagcttgaagagcagaatccagatattgtttcagaaaaaaaaccagcaactgaagtggaccccacacattttgaaaagcgcttcctaaagaggatccgtgacttgggagagggccactttgggaaggttgagctctgcaggtatgaccccgaaggggacaatacaggggagcaggtggctgttaaatctctgaagcctgagagtggaggtaaccacatagctgatctgaaaaaggaaatcgagatcttaaggaacctctatcatgagaacattgtgaagtacaaaggaatctgcacagaagacggaggaaatggtattaagctcatcatggaatttctgccttcgggaagccttaaggaatatcttccaaagaataagaacaaaataaacctcaaacagcagctaaaatatgccgttcagatttgtaaggggatggactatttgggttctcggcaatacgttcaccgggacttggcagcaagaaatgtccttgttgagagtgaacaccaagtgaaaattggagacttcggtttaaccaaagcaattgaaaccgataaggagtattacaccgtcaaggatgaccgggacagccctgtgttttggtatgctccagaatgtttaatgcaatctaaattttatattgcctctgacgtctggtcttttggagtcactctgcatgagctgctgacttactgtgattcagattctagtcccatggctttgttcctgaaaatgataggcccaacccatggccagatgacagtcacaagacttgtgaatacgttaaaagaaggaaaacgcctgccgtgcccacctaactgtccagatgaggtttatcaacttatgaggaaatgctgggaattccaaccatccaatcggacaagctttcagaaccttattgaaggatttgaagcacttttaaaataagaagcatgaataacatttaaattccacagattatcaagtccttctcctgcaacaaatgcccaagtcattttttaaaaatttctaatgaaagaagtttgtgttctgtccaaaaagtcactgaactcatacttcagtacatatacatgtataaggcacactgtagtgcttaatatgtgtaaggacttcctctttaaatttggtaccagtaacttagtgacacataatgacaaccaaaatatttgaaagcacttaagcactcctccttgtggaaagaatataccaccatttcatctggctagttcaccatcacaactgcattaccaaaaggggatttttgaaaacgaggagttgaccaaaataatatctgaagatgattgcttttccctgctgccagctgatctgaaatgttttgctggcacattaatcatagataaagaaagattgatggacttagccctcaaatttcagtatctatacagtactagaccatgcattcttaaaatattagataccaggtagtatatattgtttctgtacaaaaatgactgtattctctcaccagtaggacttaaactttgtttctccagtggcttagctcctgttcctttgggtgatcactagcacccatttttgagaaagctggttctacatggggggatagctgtggaatagataatttgctgcatgttaattctcaagaactaagcctgtgccagtgctttcctaagcagtatacctttaatcagaactcattcccagaacctggatgctattacacatgcttttaagaaacgtcaatgtatatccttttataactctaccactttggggcaagctattccagcactggttttgaatgctgtatgcaaccagtctgaataccacatacgctgcactgttcttagagggtttccatacttaccaccgatctacaagggttgatccctgtttttaccatcaatcatcaccctgtggtgcaacacttgaaagacccggctagaggcactatggacttcaggatccactagacagttttcagtttgcttggaggtagctgggtaatcaaaaatgtttagtcattgattcaatgtgaacgattacggtctttatgaccaagagtctgaaaatctttttgttatgctgtttagtattcgtttgatattgttacttttcacctgttgagcccaaattcaggattggttcagtggcagcaatgaagttgccatttaaatttgttcatagcctacatcaccaaggtctctgtgtcaaacctgtggccactctatatgcactttgtttactctttatacaaataaatatactaaagactttacatgca

SEQ ID NO: 6470 - protein, 1154 aa, Homo sapiens; identical to SEQ ID NO: 250

SEQ ID NO: 6471 - DNA, 1333 bp, Homo sapiens
gggaggcggtgcgtcgctgagcgcaggccgcggcggccgcggagtatcctggagctgcagacagtgcgggcctgcgcccagtcccggctgtcctcgccgcgacccctcctcagccctgggcgcgcgcacgctggggccccgcggggctggccgcctagcgagcctgccggtcgaccccagccagcgcagcgacggggcgctgcctggcccaggcgcacacggaagtgcgcttctctgaagtagctttggaaagtagagaagaaaatccagtttgcttcttggagaacactggacagctgaataaatgcagtatctaaatataaaagaggactgcaatgccatggctttctgtgctaaaatgaggagctccaagaagactgaggtgaacctggaggcccctgagccaggggtggaagtgatcttctatctgtcggacagggagcccctccggctgggcagtggagagtacacagcagaggaactgtgcatcagggctgcacaggcatgccgtatctctcctctttgtcacaacctctttgccctgtatgacgagaacaccaagctctggtatgctccaaatcgcaccatcaccgttgatgacaagatgtccctccggctccactaccggatgaggttctatttcaccaattggcatggaaccaacgacaatgagcagtcagtgtggcgtcattctccaaagaagcagaaaaatggctacgagaaaaaaaagattccagatgcaacccctctccttgatgccagctcactggagtatctgtttgctcagggacagtatgatttggtgaaatgcctggctcctattcgagaccccaagaccgagcaggatggacatgatattgagaacgagtgtctagggatggctgtcctggccatctcacactatgccatgatgaagaagatgcagttgccagaactgcccaaggacatcagctacaagcgatatattccagaaacattgaataagtccatcagacagaggaaccttctcaccaggatgcggataaataatgttttcaaggatttcctaaaggaatttaacaacaagaccatttgtgacagcagcgtgtccacgcatgacctgaaggtgaaatacttggctaccttggaaactttgacaaaacattacggtgctgaaatatttgagacttccatgttactgatttcatcagaaaatgagatgaattggtttcattcgaatgacggtggaaacgttctctactacgaagtgatggtgactgggaatcttggaatccagtggaggcataaaccaaatgttgtttctgttgaaaaggaaaaaaataaactgaagcgg

SEQ ID NO: 6472 - protein, 342 aa, Homo sapiens
MQYLNIKEDCNAMAFCAKMRSSKKTEVNLEAPEPGVEVIFYLSDREPLRLGSGEYTAEELCIRAAQACRISPLCHNLFALYDENTKLWYAPNRTITVDDKMSLRLHYRMRFYFTNWHGTNDNEQSVWRHSPKKQKNGYEKKKIPDATPLLDASSLEYLFAQGQYDLVKCLAPIRDPKTEQDGHDIENECLGMAVLAISHYAMMKKMQLPELPKDISYKRYIPETLNKSIRQRNLLTRMRINNVFKDFLKEFNNKTICDSSVSTHDLKVKYLATLETLTKHYGAEIFETSMLLISSENEMNWFHSNDGGNVLYYEVMVTGNLGIQWRHKPNVVSVEKEKNKLK

SEQ ID NO: 6473 - DNA, 1362 bp, Homo sapiens
atgagcaacaaatccagtcaaagcctgagtgaaataactgacaatcttagatcaaccctgatggtcactcacgagtccagcagtttctatgcagagcaccaaacaccttacttacaaaactttgacaggcgtaattcaatgcttactgtcaacctgttggctgccactggtggctgccttatgggactgtgtaaagtagctgagttggttgaaatactgatcctggcctacttggttattggcctcttctgcagactctgcacaggttttgtgcccacgtacatcggagacatctcacctattggcctgcaaggtgtctttggcactctcaaccagctgggcattgttgttggaattctggtggcccagatctttgatctggaattcatcctggggtctgaagacctatggcctgtgctattaggctttcccatctctcctgctatgctacaaagtgcagcccttcctttttgccctgaaagtcccagattcttgctcattaacagaaaagaagaggagaatgctaaggagatcctccagtggttgtggggcacccaggatgtatcccaagacatccaggagatgaaagatgagagtgcaaggatggcacaagaaaagcaagtcactgtgctggagctctttagagtatccagctaccgacagcccatcatcatttccatcatgctccagctctctcagcagctctctgtaatcaatactgtgttctattactcaacaggaatctttaagggtgcaggtgttcaagagcccatctgtgtcaccattggtgtggccctgggcgcgcgcacgctggggccccgcggggctggccgcctagcgagcctgccggtcgaccccagccagcgcagcgacggggcgctgcctggcccaggcgcacacggaagtgcgcgcacggcaagttttcataaacaagcccggagcgcgctgtctgacatcctgtttataccaccccgagatacaggcgcgggctggagggctgacgtccctagctccttgtaccgcgaacttgaccgccagctcccggccggggtggcagcgcagaaaggttctgttaggaaccaggcctcaggtagccagcgagaagtgggaaaggagaccctgggcgagaggaccagggaaggggaacagtgggagagaactacccggggaattgcgaatcccactggaaagggactgattaaccgaaactggggctggtctctggctccctcactccaactccatccgcgcatcgtcggcgaccgggagcatcggaggactaatagacactcctccaaagtcactccccagggtccctgggatgtgggctccttggatgtgtgtttaccacggaacttctag

SEQ ID NO: 6474 - protein, 453 aa, Homo sapiens
MSNKSSQSLSEITDNLRSTLMVTHESSSFYAEHQTPYLQNFDRRNSMLTVNLLAATGGCLMGLCKVAELVEILILAYLVIGLFCRLCTGFVPTYIGDISPIGLQGVFGTLNQLGIVVGILVAQIFDLEFILGSEDLWPVLLGFPISPAMLQSAALPFCPESPRFLLINRKEEENAKEILQWLWGTQDVSQDIQEMKDESARMAQEKQVTVLELFRVSSYRQPIIISIMLQLSQQLSVINTVFYYSTGIFKGAGVQEPICVTIGVALGARTLGPRGAGRLASLPVDPSQRSDGALPGPGAHGSARTASFHKQARSALSDILFIPPRDTGAGWRADVPSSLYRELDRQLPAGVAAQKGSVRNQASGSQREVGKETLGERTREGEQWERTTRGIANPTGKGLINRNWGWSLAPSLQLHPRIVGDREHRRTNRHSSKVTPQGPWDVGSLDVCLPRNF

SEQ ID NO: 6475 - DNA, 2804 bp, Homo sapiens
taatcaaacattttcccaaacttaagaaaaacaccaagaaggaatataagtacaggggacattagaggataagctcataagggctggactaaatctttttttttttttttttttttgagacagaatctcggaatctcgctctgtcgcccaggctggagtgcagtggtgcaatcttggctcactgcaagctccacctcctggattcctgccattctcctgcctcagcctcccgagtagctgggactacaggcacctgccaccatggtgggccaattttttgtatttttggtagagatggggtttcaccatgttagccaggatggtctcgatctcctgacctcatgattcgcccgcctcggcctcccaacgtgctgggattacaggcgtgagccaccgcgcctggcctaaatcttttaaggagactcagtctttgtggcctgacacttggggaacagtcagcttcaggaagttgggatgccacacctttgtttcttgaaccatttagggaggtgtttcttgaaccattttgaaatcagaagtgtgagtcctccagccctgacttttttttcaagattgttttggctatttcaggtcccttgcaatcccatatgaattttttattttttattttttgagaccgactctcactctgttgcccaggctggagtgcggttgcatgatctcagctcactgcaagctccacctcccgggttcaagtgattcttgtgcctcagcctcctgagtagcttggactacagacgtgagccaccatgtccagctaattcttgtatttttagtagaggcgggctttcacgacgttggccaggctgatctcgaactcctgacctcaggggatacgcccgcctcggcctcccaaagtgctgagattttggtgtgaaccaatgcgcctggccacaatcacatatgaatttgaggatatgctttttccattgagcaaaaaagctattgggatttttatagggattgtgttgaatctgtacattgttttgggtattgtcatcttaacaatactaagtcttccagtttatgaatgtgggtaacttctaatttatttatttcttcattaatctctttcagcaatgtttttacagttttcagtgtataatatttacttctttggataaatttattcctaagtatcttatactttttgatgcgattgtaatgcagatagaattgctttatttccttttcaaatatccactgctgatgtatagacaactgatttttgtgtgttgattttataacctgcaactttgttgaattcatttattagttcaagtaggtttcttgtagattctttggtcgtagagatacagttttacttctttctttcccatttggatgctctttctttctgcttcctgtcaacttgctctggctagaattttcagtaggatgttgaatagcagttttgaaagcaggcatctgcattcctggtgatcaaactaattaaattaaaatacatgtaattatttagtttgagacaattagatttaaatggctaggttagggccttaatccaatatgattggtttctgtataagaagaagaaatatcacagtgtgcatgcacagaagtacgaccatgtgaagaggtagcaagagagcagcaatctacaagccaaggaaagaggccacagaggaaaccaaccctgccagcatcttgatcttggacttccagcttccagaactaaccagggaccccactcccatgccgacagtatgggctgctgtcttcaggaccattgcaagatgtcagagctgcagcatgatctggaggctttcctcgctttcttctgcttcccctcccttgatccttcacaggcattttcctcaatacatctcttgcctggctaatcctgtctgatgagtttccagatggacctgaattaaaatcttgttctgctgcccaggctggagtgcagtggcacaatcatggctcactgtggcctctaccttctgggctcaagtaatcctcctgcctcagcctcctcagtagctaggactacagatgcatgccaccatgcccagctagtttttaaattttttatagagtccagggtctccctatgttgcccaggctggtcttgaactcctggcctcaagcattcctcccaccttagcctccaaaagtgctggagttacaggcgtgagccaccacccagcctatgcaaataatttttaaacaataaatattaaatggttttgtttcttttggagacagggtctcactctatcactcaggctggagtgcagtggtgggatcgtggctcatggcagcttcaacctcccaggctcaagcgatcctcccacctcagcctactgagtagctgggactacaggcacaagccaccacacctggctaatttttgtattttttgcagagatggagttttgtcatgttgctcaggctggtctcaaactcctgagctcaagtgatccacccgccttgacctcccaaagtgctgggattaccggcatgagccactgcatgcagcctaaactgtatattaaaacgactgctttagaacacagtcacagaaatgggattgagtcaaatggactgtataattttagattaattcatagattagtattggcaagttactttctattcagtttccacaaatctacactgccctgaaaagcatacaccctatcagggtctaaaacagtggacattataatttttcaaatagtttgtacctttaatgttttaaaaatgtatcttgtagctttaatttgaatttttacatttattaaagaagttaatgattttct

SEQ ID NO: 6476 - protein, 51 aa, Homo sapiens
MPTVWAAVFRTIARCQSCSMIWRLSSLSSASPPLILHRHFPQYISCLANPV

SEQ ID NO: 6477 - DNA, 380 bp, Homo sapiens
atgtgaagaggtagcaagagagcagcaatctacaagccaaggaaagaggccacagaggaaaccaaccctgccagcatcttgatcttggacttccagcttccagaactaaccagggaccccactcccatgccgacagtatgggctgctgtcttcaggaccattgcaagtgtccttcacggttcggttcacatttcacaagccccatgaagtctatctggattttcgatggatgtcttgccttttcctctacacactacaggaagagtggccacccctgccaagggcctagtatagtaccctatacatgtagctgatcagttgattgttactgatcatatgtatcctgcatcatgttataaaaaattaacacagtgcttggc

SEQ ID NO: 6478 - protein, 58 aa, Homo sapiens
MGCCLQDHCKCPSRFGSHFTSPMKSIWIFDGCLAFSSTHYRKSGHPCQGPSIVPYTCS

SEQ ID NO: 6479 - DNA, 1156 bp, Homo sapiens
aaacaggctccaaaagcttgttacttgcttgtagtcaaacagaaggcagagctgcgaatcaaatccaggtttgtctcgacatgccactagctcatacttcccttggatcagccactaaatggctttcactccagtgagcagcgaccagcaccagaattatggaacatttatcaacagcctaaaataaagacaacacgaggagaatttggttgcttatatagattcaaggtacaatcctgctggattctggaagaaatatcacagtgtgcatgcacagaagtacgaccatgtgaagaggtagcaagagagcagcaatctacaagccaaggaaagaggccacagaggaaaccaaccctgccagcatcttgatcttggacttccagcttccagaactaaccagggaccccactcccatgccgacagtatgggctgctgtcttcaggaccattgcaaggctgcaggaagacttagaggcatcatcctgccttggcttctggttgccaaggtgttctgcctgataccaactttgtcagcagtcaccaactagccatgcttttcccttgaaggcacatgtagattgcctaaccatccacaccaggcaaacaattcttcaaatgtcatgccctttgcacttctgttcagatccagccttagagaagcttgtgaagcaatgactgttttaattggtctcctgggtacccaggcctaatcctttaccaagtcactagttatcccatgttccttatctgtctgtctatccatctatccttccatcctcatccaatacttacagaatgcctatggctgcaaatacaaggatgactgcttggttcctgctgtccataaactcacagcctgggataagtgtccttcacggttcggttcacatttcacaagccccatgaagtctatctggattttcggtaatgtttcctgtctctgaaatcttatgacatttatgtctgtatcagccatttgatgcttgattatctatttttcagatggatgtcttgccttttcctctacacactacaggaagagtggccacccctgccaagggcctagtatagtaccctatacatgtagctgatcagttgattgttactgatcatatgtatcctgcatcatgttataaaaaattaacacagtgcttggc

SEQ ID NO: 6480 - protein, 40 aa, Homo sapiens
MGCCLQDHCKAAGRLRGIILPWLLVAKVFCLIPTLSAVTN

SEQ ID NO: 6481 - DNA, 791 bp, Homo sapiens
cagaaggcagagctgcgaatcaaatccagcaccagaattatggaacatttatcaacagcctaaaataaagacaacacgaggagaatttggttgcttatatagattcaaggtacaatcctgctggattctgggattacaggactgtagacaaaagagaaatcatcatggactgttcactggacaaaatttcatggagaggagaagacctttggcggttcatggatgttctataataagttaggtaactaacaggctaactttcttgagcacctacactgtgtagggcactgtactggtacttctcataccttctctcattcatataatcctctgaggtaggtgttatcctctctacagcagggaaaatcaatacccagagaaggggagagacgtccatggcacacaggagaggacagagccaagaatgaatataggacaccagtgccccaactcttaaccactaccatacacggttttataaagtaaattttaaaagtcgactttaaaacatgtatgcaacattgtgtccagtctcccaaaacaaaagaacaatgagcgttcccttttcccttgatgtgtgggcaggtctgtagagtagtacaagaagagattatgttctgcattctcacttcaacaagaaagtcctggtccaccaataatacctttaagcttcaggataattgtgaaaaggccaactagttaatcaaacattttcccaaacttaagaaaaacaccaagaaggaatataagtacaggggacattagaggataagctcataagggctggacta

SEQ ID NO: 6482 - protein, 41 aa, Homo sapiens
MCGQVCRVVQEEIMFCILTSTRKSWSTNNTFKLQDNCEKAN

SEQ ID NO: 6483 - DNA, 531 bp, Homo sapiens
gtaatcacatcgaacacaatgctttgtcacctttttcctttgaatcaaatatcatggaaaaatattttccatacgtgtttttaaatcactacttcgtattccattgtacatttatttaaccaaagccctattgaataacttaaaaattgtgtccggaagtattgctatttaaacaggactggagtgtgcagctttgtagttattttttttttttttaagagatggggtctctctcacccaagtgcactccagcctgttgacagagtgagactccatcttaaaaaaaaaaaaaaaacttatgattctctcccccaacccccagtattttcccagactttctataatgtttatttaccaaaaattgcttgagtgcccatcacatgccagacatgccagaatatagagatggatacattatagcacagacctgaaaaaaatacactgtagttcaaggtgccgtagatactgttagagaaagctttgggcagccaggtgcccacccagtttggggaggatcctgaagaaccagta

SEQ ID NO: 6484 - protein, 34 aa, Homo sapiens
MILSPNPQYFPRLSIMFIYQKLLECPSHARHARI

SEQ ID NO: 6485 - DNA, 953 bp, Homo sapiens
gggcagcggcggcagctgagactccgggggatgtgacagccgccggggaggggacgagacgcagaccacacgttgcccacgtgcgaggaccgggcaggggctcagcccctaggccgcccggtgcgtggggcggcgggggctggctttgagtcacccccgcttgtgccagcttccccggctcggcggagactggcttggggatgcctggccgcccggcccccttctcggacgcggcgtggggagcgagctggagttaaggatgaaggggcggccggcgagtcccagtgagagcggagggtgccagaggtagggggccgagaaacaaagttcccggggcttcctccggggccgcggtcggggctgcgcgtttgaccgcccccctcctcgcgaaggcaatggcttccaaactcctgcgcgcggtcatcctcgggccgcccggctcgggcaagggcaccgtgtgccagaggatcgcccagaactttggtctccagcatctctccagcggccacttcttgcgggagaacatcaaggccagcaccgaagttggtgagatggcaaagcagtatatagagaaaagtcttttggttccagaccatgtgatcacacgcctaatgatgtccgagttggagaacaggcgtggccagcactggctccttgatggttttcctaggacattaggacaagccgaagccctggacaaaatctgtgaagtggatctagtgatcagtttgaatattccatttgaaacacttaaagatcgtctcagccgccgttggattcaccctcctagcggaagggtatataacctggacttcaatccacctcatgtacatggtattgatgacgtcactggtgaaccgttagtccagcaggaggatgataaacccgaagcagttgctgccaggctaagacagtacaaagacgtggcaaagccagtcattgaattatacaag

SEQ ID NO: 6486 - protein, 185 aa, Homo sapiens
MASKLLRAVILGPPGSGKGTVCQRIAQNFGLQHLSSGHFLRENIKASTEVGEMAKQYIEKSLLVPDHVITRLMMSELENRRGQHWLLDGFPRTLGQAEALDKICEVDLVISLNIPFETLKDRLSRRWIHPPSGRVYNLDFNPPHVHGIDDVTGEPLVQQEDDKPEAVAARLRQYKDVAKPVIELY

SEQ ID NO: 6487 - DNA, 552 bp, Homo sapiens
ggggccgcgcgccggggaacctgtggcgccggggggctcgcagcctcgcgcctctccagcccctccacgcagcctcgggcctcggggcagagccctgggtggctttgaaaggcctgtctgttcgttgtcgccttctaagaagttggtgagatggcaaagcagtatatagagaaaagtcttttggttccagaccatgtgatcacacgcctaatgatgtccgagttggagaacaggcgtggccagcactggctccttgatggttttcctaggacattaggacaagccgaagccctggacaaaatctgtgaagtggatctagtgatcagtttgaatattccatttgaaacacttaaagatcgtctcagccgccgttggattcaccctcctagcggaagggtatataacctggacttcaatccacctcatgtacatggtattgatgacgtcactggtgaaccgttagtccagcaggaggatgataaacccgaagcagttgctgccaggctaagacagtacaaagacgtggcaaagccagtcattgaattatacaag

SEQ ID NO: 6488 - protein, 133 aa, Homo sapiens
MAKQYIEKSLLVPDHVITRLMMSELENRRGQHWLLDGFPRTLGQAEALDKICEVDLVISLNIPFETLKDRLSRRWIHPPSGRVYNLDFNPPHVHGIDDVTGEPLVQQEDDKPEAVAARLRQYKDVAKPVIELY

SEQ ID NO: 6489 - DNA, 1774 bp, Homo sapiens
ggtgtgcccatctctttggtagggaaggagaaaggtaagaatagccatcagtgaggaaggattcttggagcgaggagccactgtggtttttcctgctatttaagatgttgagaccggataactttagaaagatacctgcacaaacccataaatagtgcttttataaagtttagttcaccggaacctgagttcagtatttgacattagctttttgtccaaagagttgaagcctgctggaggtctttgctcaaataataaataccacatatttccaagtgtgttcaggtataggcactaggtactgtctgtttacttcatgttaggcacattacatgcattggctaatcaaatcctcatcaattacatatgtaataatctaaacttgcctccttgtattataaatggaaataatcctgtttatttaaacgggttttcatgtacctgtagggattaggaaactcaaatggcctttttaatacctttccctagtttgagctccctgttctctttaacagataaaacaacatatttgcttcagcctggaatctgtttttggtgctttggtgcagagacaggaaatgggcactcagagtcacactggtagttgcacactgtatctacagagggcgtgtctcatctgtactctgctgggttacaggatttcagtaggtatttgtgtccacctgagaattctgtttattacctttcatttgacagtgtctttcctttctgcagttgattttgctagagaggcaattcataaggtgaggtcctgttcatagtatgacttgctttctcaatatctccttcaatttttagtaactcttggtctatttggtgtctttaaaaaaaataacctagtaataaagacttcttttaatgtggaaatgtggtctggtagtaagttatttctttccacatgtaactgacccaatctggtttccaaatgagaagtgtgcaggccccagaggttgagaagccatatttcaactgtgaaaaaaatctgcttcctgcatctgttgaaatatagttgttcatacttgccatcccttatctttcttgtaacaatttgcacagttcttgccagaataaatgccattatctgtatgtttcagggagttccccaatttgatcatttttgtgtgtgtgtggtgtgtgtgtgagagagagagatactgcagtaaaacatttctaaaggatgaaagctcttgtatggcatagatatgaattccttcctctggtaataattaggttattcccagaagcacagtgtcattctttaaataaaagctttcctgtttaaagcttttcaaaggagcagaccaccttgaagattccccctagggttgatatgtgtctaattcattttataaaaattattcttgtcttcattttaaagctttggctatatagtcagaaatgtcctaaataacaaactattttgtatttaatttagggaagactaaagggaagaaaaatgaaaactcagtctttatgtaagctccaaggatattagggcttaaagggcttttctagttttatgagaattttcgtgtgtttatgatgagtcagagtgcttttcctcggtgggacagttgctggccctcttaattttggtgtatgtgcttccaagtatctaaacctccagtctgatctgtatatgctatcctaactgttaattgtattattgattatgttgattatcttgcttgaaggttcatacttttcaatttgatagaaataaagtttttttctgcttatagctagcgaattc

SEQ ID NO: 6490 - protein, 67 aa, Homo sapiens [sequence omitted]

SEQ ID NO: 6491 - DNA, 5016 bp, Homo sapiens
agacgcgcggcggcggcggcgagcggtggcgctcggctcgggcgaccgcggcgggggagggcgcggcgcaccgatgggcgccactgagaagggaggccagaagagccggaagctgttttccttgcggcggccgtggaaggcgacccggcggctgtggaggccacgctcagctcgccaggcggcgcagggtgcctcatctccagacatggagcccagctatgggggaggtctctttgacatggtaaaaggaggtgcagggaggctctttagtaacctaaaggacaacttgaaagacaccctcaaagacacatcttctagagtgatacaatctgtgaccagctacacaaagggagatttagacttcacttatgttacctccagaattattgtgatgtcctttcctctggacaatgttgacataggattcaggaatcaggttgatgacattcgaagctttttggattccagacatcttgaccactacacagtatacaatctgtcacctaagtcttatcgaactgccaagtttcacagccgggtctcagaatgcagttggcccattaggcaggctcccagtctgcacaacctttttgctgtgtgtcggaatatgtataactggctactgcagaatcccaaaaatgtctgtgttgtccactgcttggatggacgggcggcatcatcaattctggttggtgctatgttcattttctgtaatctctactctactcctggcccagccattcgattgctatatgcaaagcgaccaggaattggactttcaccatcccataggagatacctgggctatatgtgtgacctactggcagacaagccctaccgccctcacttcaagcctctcacaattaagtcgatcactgtcagtccaataccctttttcaacaaacagaggaatggatgtcgcccttactgtgatgtactcattggagaaaccaaaatatattcgacttgcacagattttgaacgaatgaaagaatatcgtgtccaagatggaaaaatcttcattcccttgaacatcactgtgcaaggagacgtggttgtttccatgtatcacttgaggtcaaccattgggagccggctacaggctaaggtgaccaacacacagatattccagcttcagtttcacactggattcataccactggacacaacagttttaaagttcaccaagcctgagttagatgcatgtgatgtaccagaaaaatatcctcagctatttcaggtgacactggatgtagaactacagccccatgacaaagtaatagacttaactccaccatgggaacattactgcacaaaagatgtcaatcccagcatcctcttctcttctcaccaggaacatcaagatacgctggccttaggaggacaggctccaatagatatccctccagacaaccccaggcattacggacaaagtggtttctttgcctctctctgttggcaagatcagaaatcggagaagtcattctgtgaggaggaccacgctgccctagtgaatcaggaaagtgagcaatcagatgatgaacttctgacactttccagtccgcatggcaatgccaatggtgacaagcctcatggagtcaagaagcccagcaaaaagtgcagctggtcccacccaggctggacagtcaggagtggaagatgtgtttcatcctagtggacctgcgtctacccagtcaacaccacgccgctctgccacctccacctctgcgtctccaaccctaagagtgggagaaggtgccacctttgacccatttggagcaccttctaaaccatcaggtcaggatttgctgggttcttttctgaacacatccagtgcttccagtgacccctttctccagccaacaagaagtccttcgcccacagtacatgcttctagtacgcctgctgtgaacattcagccagatgtttctggaggttgggactggcatgctaaaccaggaggctttggaatgggaagcaagtcagctgccaccagcccaaccggatcctcgcatggtactcccacccatcaaagcaaaccccagactctggatccttttgccgaccttgggacactaggtagttcttcctttgccagcaaacccaccacaccaactggattgggtggaggattcccgcctctcagctcgccacagaaggcgtctccccagcctatgggtggcgggtggcagcagggaggtgcctacaactggcagcagccacagcctaagcctcagcccagcatgccccactcctctccccagaaccgacccaactacaacgtgagcttctcagccatgcctgggggccagaacgaacgtgggaaaggatcaagtaatttggaagggaaacaaaaagcagctgattttgaagacctactctctggtcaaggtttcaatgctcacaaagacaaaaaggggcctcggacaatagctgagatgagaaaggaggaaatggccaaggaaatggatcctgagaaattaaagattctggaatggattgaaggcaaagaaagaaatatcagagcccttctttccacgatgcataccgtactatgggctggggagaccaagtggaaaccagttggcatggcagacctggtaacaccagagcaggtgaagaaggtgtacaggaaggctgtcctggtggtgcacccagataaagctactgggcaaccctatgaacaatacgcaaagatgattttcatggagctcaatgatgcctggtctgaatttgaaaaccaaggccaaaagcccttatattaatttatgagcttttccatctctgctgcagacctgtgctaatgcttagtgtgtgtcacaattctgaggttttcgcagatgaaccaaaaactccagtaacatgttttcagtactaaaccgttaagttactcatgaattaatttctcattgataaggaatgtggatgtttggtttctccaaagttcccaccataaaagatccaaagcatgagaggaacttctagtcagatgaccttgcagaaccaccgcattccaccctgccctttggggagcctactcagcattctacctggggaaatggaaaacagaggccaccacccatgaaggcataacacccatcacattgtctgagaataggattaatgagcaaaagttatgataatagagttatatgatggtttaatggtttctagatttttcttggaaagatataatttgagcagtggctttatgcagactccaagaacaaaaccaccaggtatttttttttaagtaaaaatttactaaggcctttagcataatactgtaaatgtcttttggtcaagagaactaacaaatataaaggaacttgaaatgtggggagtgataatagtccagtgattaaactacagtccagtgattaccaccaactttctgactaagctaaaaatgaatgaaaatggtggctaaagaaaatagggactctgaagatgtcgaaatctttattcctggttaggaaggtgggccgctacccttctttccctttagaaaactgtgattaattaaataaaaagtcttactactataacaactctaaacctggtttaaatgaaacatctaattttgctgtaaggcttaatgctcttcttttgtttagccaagaaaacattcttagttggaaacaggtggtaaagtagtttggcctgttcacaacttatcaggaccaatatctagtgtggactcagtgttctctaggtttgtgagcagttgtggtaagagaatggaaggcaacactgaataggagttaagggaatggcacgatcacagtgagagagctgcactcacctgcagacccagtcagatggcttgtcagtatctgctctgaggaaccaggtcccacctccccacaaggcaaatctagacccattaaattattacagtgggcttttttgttttaaaagtggttggggatccacaggaacgacattcatacagggacatttgtgaaagcaaagcaagaatgaatgctttcccgatctcagactggctggattcagatcagtgtgttggctggttctcattttaaggggtaagcagtttgctattctgtgactttagtagatctcttttgtgtgcacatatacaatgtgcattatacatatatattaaatatatccacaaagcagatgggcaaaaagattttcatgctaatcttcaaaggttcatgctcaatattgtgaaaagcttttaaaagttgttttgaaaagacaatcattttttgtttttgttttaactttcttgtggcaagctataccggaaaagcggcatgtcaaaaatactttaggttctacatagatctctttctctcttttgttttgtttgtttgtttgttaaagttcattatttattttaccttttactgacaatgtgaaactcgaagaaaatgttctctttttaaatatacagtcataaactgttcaaggtaaccataacaaactaggtgttatttattaacgtattataaaataatgtttgatccagtatgtgcttgtcttatttaaaattggaatgtgagacatgttgctgtgacctgtttttctttctcattcacatttgtagatattgtgtgaactacagtatataatgataacaattaaaaggatattctgtggatgtcacgtattttgaaatgatagaactacattagctttgtatcatgtttggataattcatcaatgttcacagtttaaaacatcattaaacattatgtaattacaatgagaaagaatcttacttaaatttggagattttcccccacatctcttttccggatacattataattctggacccctatttatctcaaaactcttaatatatgcagaccaacaggtctttgcattccttttaaataactggttgtgacaaagcttgttgttgatcagattcactgtttcatcatatttattgtaatatattttttgttttgtaaatatgttacaacaaaatgtgattggtctaaaatatttgtaatgtatattaaaaggttcaaaaata

SEQ ID NO: 6492 - protein, 533 aa, Homo sapiens
MGATEKGGQKSRKLFSLRRPWKATRRLWRPRSARQAAQGASSPDMEPSYGGGLFDMVKGGAGRLFSNLKDNLKDTLKDTSSRVIQSVTSYTKGDLDFTYVTSRIIVMSFPLDNVDIGFRNQVDDIRSFLDSRHLDHYTVYNLSPKSYRTAKFHSRVSECSWPIRQAPSLHNLFAVCRNMYNWLLQNPKNVCVVHCLDGRAASSILVGAMFIFCNLYSTPGPAIRLLYAKRPGIGLSPSHRRYLGYMCDLLADKPYRPHFKPLTIKSITVSPIPFFNKQRNGCRPYCDVLIGETKIYSTCTDFERMKEYRVQDGKIFIPLNITVQGDVVVSMYHLRSTIGSRLQAKVTNTQIFQLQFHTGFIPLDTTVLKFTKPELDACDVPEKYPQLFQVTLDVELQPHDKVIDLTPPWEHYCTKDVNPSILFSSHQEHQDTLALGGQAPIDIPPDNPRHYGQSGFFASLCWQDQKSEKSFCEEDHAALVNQESEQSDDELLTLSSPHGNANGDKPHGVKKPSKKCSWSHPGWTVRSGRCVSS

SEQ ID NO: 6493 - DNA, 5743 bp, Homo sapiens
cgcacaccgacttgcatgcaattatcatagcccgagtgctcctccgttgagagacttcgcccccgagaccgctgactgtgaatgacaaatcaaaagtcagggttgcagaatcagccggactttcctgctcatttgcagcagagggaggaagcagagaatgaaagattctgaaaataaaggtgcctcatctccagacatggagcccagctatgggggaggtctctttgacatggtaaaaggaggtgcagggaggctctttagtaacctaaaggacaacttgaaagacaccctcaaagacacatcttctagagtgatacaatctgtgaccagctacacaaagggagatttagacttcacttatgttacctccagaattattgtgatgtcctttcctctggacaatgttgacataggattcaggaatcaggttgatgacattcgaagctttttggattccagacatcttgaccactacacagtatacaatctgtcacctaagtcttatcgaactgccaagtttcacagccgggtctcagaatgcagttggcccattaggcaggctcccagtctgcacaacctttttgctgtgtgtcggaatatgtataactggctactgcagaatcccaaaaatgtctgtgttgtccactgcttggatggacgggcggcatcatcaattctggttggtgctatgttcattttctgtaatctctactctactcctggcccagccattcgattgctatatgcaaagcgaccaggaattggactttcaccatcccataggagatacctgggctatatgtgtgacctactggcagacaagccctaccgccctcacttcaagcctctcacaattaagtcgatcactgtcagtccaataccctttttcaacaaacagaggaatggatgtcgcccttactgtgatgtactcattggagaaaccaaaatatattcgacttgcacagattttgaacgaatgaaagaatatcgtgtccaagatggaaaaatcttcattcccttgaacatcactgtgcaaggagacgtggttgtttccatgtatcacttgaggtcaaccattgggagccggctacaggctaaggtgaccaacacacagatattccagcttcagtttcacactggattcataccactggacacaacagttttaaagttcaccaagcctgagttagatgcatgtgatgtaccagaaaaatatcctcagctatttcaggtgacactggatgtagaactacagccccatgacaaagtaatagacttaactccaccatgggaacattactgcacaaaagatgtcaatcccagcatcctcttctcttctcaccaggaacatcaagatacgctggccttaggaggacaggctccaatagatatccctccagacaaccccaggcattacggacaaagtggtttctttgcctctctctgttggcaagatcagaaatcggagaagtcattctgtgaggaggaccacgctgccctagtgaatcaggaaagtgagcaatcagatgatgaacttctgacactttccagtccgcatggcaatgccaatggtgacaagcctcatggagtcaagaagcccagcaaaaagcagcaggagccagcagcccctccaccccctgaggatgtggaccttttgggcctggaagggtctgcaatgagtaacagcttctctccgccagcggctcctcccaccaattctgaactactgagtgacctgtttgggggtggaggtgcagctggtcccacccaggctggacagtcaggagtggaagatgtgtttcatcctagtggacctgcgtctacccagtcaacaccacgccgctctgccacctccacctctgcgtctccaaccctaagagtgggagaaggtgccacctttgacccatttggagcaccttctaaaccatcaggtcaggatttgctgggttcttttctgaacacatccagtgcttccagtgacccctttctccagccaacaagaagtccttcgcccacagtacatgcttctagtacgcctgctgtgaacattcagccagatgtttctggaggttgggactggcatgctaaaccaggaggctttggaatgggaagcaagtcagctgccaccagcccaaccggatcctcgcatggtactcccacccatcaaagcaaaccccagactctggatccttttgccgaccttgggacactaggtagttcttcctttgccagcaaacccaccacaccaactggattgggtggaggattcccgcctctcagctcgccacagaaggcgtctccccagcctatgggtggcgggtggcagcagggaggtgcctacaactggcagcagccacagcctaagcctcagcccagcatgccccactcctctccccagaaccgacccaactacaacgtgagcttctcagccatgcctgggggccagaacgaacgtgggaaaggatcaagtaatttggaagggaaacaaaaagcagctgattttgaagacctactctctggtcaaggtttcaatgctcacaaagacaaaaaggggcctcggacaatagctgagatgagaaaggaggaaatggccaaggaaatggatcctgagaaattaaagattctggaatggattgaaggcaaagaaagaaatatcagagcccttctttccacgatgcataccgtactatgggctggggagaccaagtggaaaccagttggcatggcagacctggtaacaccagagcaggtgaagaaggtgtacaggaaggctgtcctggtggtgcacccagataaagctactgggcaaccctatgaacaatacgcaaagatgattttcatggagctcaatgatgcctggtctgaatttgaaaaccaaggccaaaagcccttatattaatttatgagcttttccatctctgctgcagacctgtgctaatgcttagtgtgtgtcacaattctgaggttttcgcagatgaaccaaaaactccagtaacatgttttcagtactaaaccgttaagttactcatgaattaatttctcattgataaggaatgtggatgtttggtttctccaaagttcccaccataaaagatccaaagcatgagaggaacttctagtcagatgaccttgcagaaccaccgcattccaccctgccctttggggagcctactcagcattctacctggggaaatggaaaacagaggccaccacccatgaaggcataacacccatcacattgtctgagaataggattaatgagcaaaagttatgataatagagttatatgatggtttaatggtttctagatttttcttggaaagatataatttgagcagtggctttatgcagactccaagaacaaaaccaccaggtatttttttttaagtaaaaatttactaaggcctttagcataatactgtaaatgtcttttggtcaagagaactaacaaatataaaggaacttgaaatgtggggagtgataatagtccagtgattaaactacagtccagtgattaccaccaactttctgactaagctaaaaatgaatgaaaatggtggctaaagaaaatagggactctgaagatgtcgaaatctttattcctggttaggaaggtgggccgctacccttctttccctttagaaaactgtgattaattaaataaaaagtcttactactataacaactctaaacctggtttaaatgaaacatctaattttgctgtaaggcttaatgctcttcttttgtttagccaagaaaacattcttagttggaaacaggtggtaaagtagtttggcctgttcacaacttatcaggaccaatatctagtgtggactcagtgttctctaggtttgtgagcagttgtggtaagagaatggaaggcaacactgaataggagttaagggaatggcacgatcacagtgagagagctgcactcacctgcagacccagtcagatggcttgtcagtatctgctctgaggaaccaggtcccacctccccacaaggcaaatctagacccattaaattattacagtgggcttttttgttttaaaagtggttggggatccacaggaacgacattcatacagggacatttgtgaaagcaaagcaagaatgaatgctttcccgatctcagactggctggattcagatcagtgtgttggctggttctcattttaaggggtaagcagtttgctattctgtgactttagtagatctcttttgtgtgcacatatacaatgtgcattatacatatatattaaatatatccacaaagcagatgggcaaaaagattttcatgctaatcttcaaaggttcatgctcaatattgtgaaaagcttttaaaagttgttttgaaaagacaatcattttttgtttttgttttaactttcttgtggcaagctataccggaaaagcggcatgtcaaaaatactttaggttctacatagatctctttctctcttttgttttgtttgtttgtttgttaaagttcattatttattttaccttttactgacaatgtgaaactcgaagaaaatgttctctttttaaatatacagtcataaactgttcaaggtaaccataacaaactaggtgttatttattaacgtattataaaataatgtttgatccagtatgtgcttgtcttatttaaaattggaatgtgagacatgttgctgtgacctgtttttctttctcattcacatttgtagatattgtgtgaactacagtatataatgataacaattaaaaggatattctgtggatgtcacgtattttgaaatgatagaactacattagctttgtatcatgtttggataattcatcaatgttcacagtttaaaacatcattaaacattatgtaattacaatgagaaagaatcttacttaaatttggagattttcccccacatctcttttccggatacattataattctggacccctatttatctcaaaactcttaatatatgcagaccaacaggtctttgcattccttttaaataactggttgtgacaaagcttgttgttgatcagattcactgtttcatcatatttattgtaatatattttttgttttgtaaatatgttacaacaaaatgtgattggtctaaaatatttgtaatgtatattaaaaggttcaaaaatatttgtataaatctaagttatttgggtacttgtaggaatacaatgaggagcttgaatgccaccttctgacatgatttacttttaaggaaagttatgaggagagaatacaaaaagcatgcaccaaaatgtaatctgacaggatttctggatttatacgtaatcactcctgccccaacacacacacacacacacacacacacacacacacacatgcacgcacacatgattttgattatgctacatgatatatgtttcaaaaagaattagcatagaaatcctggtctcctagccaaaaaaatcaaaggattttcaaaaaaacgaatctgtatgttgaggcaaaaggattgaacctggaagtctgggactttatcatagaaacaaagtctcagatattttagttctttggaaacaaatgctgtaattcaaaagcatttgacctgtcactgtactatctacatgtggaagaatgttcaagttgaatcctaatgccgtgaatgaaacacagtctgtgtagggaatgagcaaaaaagttgaattccaattgctttttggccttttggctaaaataaatgtagcatctaattttatcagttt

SEQ ID NO: 6494 - protein, 913 aa, Homo sapiens; identical to SEQ ID NO: 260

SEQ ID NO: 6495 - DNA, 514 bp, Homo sapiens
accccatccccttcatacacacctcattccaaatgctatcctgtcacagcagatgccacatcacttttggggtgggctaagagatcaaggacatatgccgtgcccaaatttcatctaataattaaaaatacgggaagtgacacaaaagggaaaacacaggatgctctggaaacttgttataggcagcgagtgggaaggagacctagagtcagaggaagctactactggaaagaggagcagaactgagccaggcaaataggagagaaaatgtatttcaggcagaagaaacagcactctggaaacccaacatctagcctttgagaatgtaaaatgaagccaggatgacactaccaattccaagctgtgtgtgtgtgcatgcatgtgcatgtatgtgtatatatattagatgtatattttaacattctgacttaacattaatattaacatattaatatttatttattgaaatatttaacgtgtattttaatattaaattctggatttccaaaccaga

SEQ ID NO: 6496 - protein, 32 aa, Homo sapiens [sequence omitted]

SEQ ID NO: 6497 - DNA, 5358 bp, Homo sapiens
gccgagctcagcccagggcggcggcttcgcctcgcccggcgaagcttctctccggtggccgctccttcttttccctcctctttgcgtcatgtcgggcacttaatttttttttttttttaattccttcttcagccctttccaccttccatctcccttttcgcttcccaggttgattattttctcttttctccgggcttgcccatgagcctcctcgggagctaccggaaaaagaccagcaacgatggttatgaatctttgcagctggtggacagtaacggggacttaagtgcgggaagcggcggggttggcggcaagcagagagtgaacgccggggcagcggcgcggagtcccgcccgacagcctccggaccgcgccagcaccatggacagctcaggtgcctcatctccagacatggagcccagctatgggggaggtctctttgacatggtaaaaggaggtgcagggaggctctttagtaacctaaaggacaacttgaaagacaccctcaaagacacatcttctagagtgatacaatctgtgaccagctacacaaagggagatttagacttcacttatgttacctccagaattattgtgatgtcctttcctctggacaatgttgacataggattcaggaatcaggttgatgacattcgaagctttttggattccagacatcttgaccactacacagtatacaatctgtcacctaagtcttatcgaactgccaagtttcacagccgggtctcagaatgcagttggcccattaggcaggctcccagtctgcacaacctttttgctgtgtgtcggaatatgtataactggctactgcagaatcccaaaaatgtctgtgttgtccactgcttggatggacgggcggcatcatcaattctggttggtgctatgttcattttctgtaatctctactctactcctggcccagccattcgattgctatatgcaaagcgaccaggaattggactttcaccatcccataggagatacctgggctatatgtgtgacctactggcagacaagccctaccgccctcacttcaagcctctcacaattaagtcgatcactgtcagtccaataccctttttcaacaaacagaggaatggatgtcgcccttactgtgatgtactcattggagaaaccaaaatatattcgacttgcacagattttgaacgaatgaaagaatatcgtgtccaagatggaaaaatcttcattcccttgaacatcactgtgcaaggagacgtggttgtttccatgtatcacttgaggtcaaccattgggagccggctacaggctaaggtgaccaacacacagatattccagcttcagtttcacactggattcataccactggacacaacagttttaaagttcaccaagcctgagttagatgcatgtgatgtaccagaaaaatatcctcagctatttcaggtgacactggatgtagaactacagccccatgacaaagtaatagacttaactccaccatgggaacattactgcacaaaagatgtcaatcccagcatcctcttctcttctcaccaggaacatcaagatacgctggccttaggaggacaggctccaatagatatccctccagacaaccccaggcattacggacaaagtggtttctttgcctctctctgttggcaagatcagaaatcggagaagtcattctgtgaggaggaccacgctgccctagtgaatcaggaaagtgagcaatcagatgatgaacttctgacactttccagtccgcatggcaatgccaatggtgacaagcctcatggagtcaagaagcccagcaaaaagcagcaggagccagcagcccctccaccccctgaggatgtggaccttttgggcctggaagggtctgcaatgagtaacagcttctctccgccagcggctcctcccaccaattctgaactactgagtgacctgtttgggggtggaggtgcagctggtcccacccaggctggacagtcaggagtggaagatgtgtttcatcctagtggacctgcgtctacccagtcaacaccacgccgctctgccacctccacctctgcgtctccaaccctaagagtgggagaaggtgccacctttgacccatttggagcaccttctaaaccatcaggtcaggatttgctgggttcttttctgaacacatccagtgcttccagtgacccctttctccagccaacaagaagtccttcgcccacagtacatgcttctagtacgcctgctgtgaacattcagccagatgtttctggaggttgggactggcatgctaaaccaggaggctttggaatgggaagcaagtcagctgccaccagcccaaccggatcctcgcatggtactcccacccatcaaagcaaaccccagactctggatccttttgccgaccttgggacactaggtagttcttcctttgccagcaaacccaccacaccaactggattgggtggaggattcccgcctctcagctcgccacagaaggcgtctccccagcctatgggtggcgggtggcagcagggaggtgcctacaactggcagcagccacagcctaagcctcagcccagcatgccccactcctctccccagaaccgacccaactacaacgtgagcttctcagccatgcctgggggccagaacgaacgtgggaaaggatcaagtaatttggaagggaaacaaaaagcagctgattttgaagacctactctctggtcaaggtttcaatgctcacaaagacaaaaaggggcctcggacaatagctgagatgagaaaggaggaaatggccaaggaaatggatcctgagaaattaaagattctggaatggattgaaggcaaagaaagaaatatcagagcccttctttccacgatgcataccgtactatgggctggggagaccaagtggaaaccagttggcatggcagacctggtaacaccagagcaggtgaagaaggtgtacaggaaggctgtcctggtggtgcacccagataaagctactgggcaaccctatgaacaatacgcaaagatgattttcatggagctcaatgatgcctggtctgaatttgaaaaccaaggccaaaagcccttatattaatttatgagcttttccatctctgctgcagacctgtgctaatgcttagtgtgtgtcacaattctgaggttttcgcagatgaaccaaaaactccagtaacatgttttcagtactaaaccgttaagttactcatgaattaatttctcattgataaggaatgtggatgtttggtttctccaaagttcccaccataaaagatccaaagcatgagaggaacttctagtcagatgaccttgcagaaccaccgcattccaccctgccctttggggagcctactcagcattctacctggggaaatggaaaacagaggccaccacccatgaaggcataacacccatcacattgtctgagaataggattaatgagcaaaagttatgataatagagttatatgatggtttaatggtttctagatttttcttggaaagatataatttgagcagtggctttatgcagactccaagaacaaaaccaccaggtatttttttttaagtaaaaatttactaaggcctttagcataatactgtaaatgtcttttggtcaagagaactaacaaatataaaggaacttgaaatgtggggagtgataatagtccagtgattaaactacagtccagtgattaccaccaactttctgactaagctaaaaatgaatgaaaatggtggctaaagaaaatagggactctgaagatgtcgaaatctttattcctggttaggaaggtgggccgctacccttctttccctttagaaaactgtgattaattaaataaaaagtcttactactataacaactctaaacctggtttaaatgaaacatctaattttgctgtaaggcttaatgctcttcttttgtttagccaagaaaacattcttagttggaaacaggtggtaaagtagtttggcctgttcacaacttatcaggaccaatatctagtgtggactcagtgttctctaggtttgtgagcagttgtggtaagagaatggaaggcaacactgaataggagttaagggaatggcacgatcacagtgagagagctgcactcacctgcagacccagtcagatggcttgtcagtatctgctctgaggaaccaggtcccacctccccacaaggcaaatctagacccattaaattattacagtgggcttttttgttttaaaagtggttggggatccacaggaacgacattcatacagggacatttgtgaaagcaaagcaagaatgaatgctttcccgatctcagactggctggattcagatcagtgtgttggctggttctcattttaaggggtaagcagtttgctattctgtgactttagtagatctcttttgtgtgcacatatacaatgtgcattatacatatatattaaatatatccacaaagcagatgggcaaaaagattttcatgctaatcttcaaaggttcatgctcaatattgtgaaaagcttttaaaagttgttttgaaaagacaatcattttttgtttttgttttaactttcttgtggcaagctataccggaaaagcggcatgtcaaaaatactttaggttctacatagatctctttctctcttttgttttgtttgtttgtttgttaaagttcattatttattttaccttttactgacaatgtgaaactcgaagaaaatgttctctttttaaatatacagtcataaactgttcaaggtaaccataacaaactaggtgttatttattaacgtattataaaataatgtttgatccagtatgtgcttgtcttatttaaaattggaatgtgagacatgttgctgtgacctgtttttctttctcattcacatttgtagatattgtgtgaactacagtatataatgataacaattaaaaggatattctgtggatgtcacgtattttgaaatgatagaactacattagctttgtatcatgtttggataattcatcaatgttcacagtttaaaacatcattaaacattatgtaattacaatgagaaagaatcttacttaaatttggagattttcccccacatctcttttccggatacattataattctggacccctatttatctcaaaactcttaatatatgcagaccaacaggtctttgcattccttttaaataactggttgtgacaaagcttgttgttgatcagattcactgtttcatcatatttattgtaatatattttttgttttgtaaatatgttacaacaaaatgtgattggtctaaaatatttgtaatgtatattaaaaggttc

SEQ ID NO: 6498 - protein, 970 aa, Homo sapiens
MSLLGSYRKKTSNDGYESLQLVDSNGDLSAGSGGVGGKQRVNAGAAARSPARQPPDRASTMDSSGASSPDMEPSYGGGLFDMVKGGAGRLFSNLKDNLKDTLKDTSSRVIQSVTSYTKGDLDFTYVTSRIIVMSFPLDNVDIGFRNQVDDIRSFLDSRHLDHYTVYNLSPKSYRTAKFHSRVSECSWPIRQAPSLHNLFAVCRNMYNWLLQNPKNVCVVHCLDGRAASSILVGAMFIFCNLYSTPGPAIRLLYAKRPGIGLSPSHRRYLGYMCDLLADKPYRPHFKPLTIKSITVSPIPFFNKQRNGCRPYCDVLIGETKIYSTCTDFERMKEYRVQDGKIFIPLNITVQGDVVVSMYHLRSTIGSRLQAKVTNTQIFQLQFHTGFIPLDTTVLKFTKPELDACDVPEKYPQLFQVTLDVELQPHDKVIDLTPPWEHYCTKDVNPSILFSSHQEHQDTLALGGQAPIDIPPDNPRHYGQSGFFASLCWQDQKSEKSFCEEDHAALVNQESEQSDDELLTLSSPHGNANGDKPHGVKKPSKKQQEPAAPPPPEDVDLLGLEGSAMSNSFSPPAAPPTNSELLSDLFGGGGAAGPTQAGQSGVEDVFHPSGPASTQSTPRRSATSTSASPTLRVGEGATFDPFGAPSKPSGQDLLGSFLNTSSASSDPFLQPTRSPSPTVHASSTPAVNIQPDVSGGWDWHAKPGGFGMGSKSAATSPTGSSHGTPTHQSKPQTLDPFADLGTLGSSSFASKPTTPTGLGGGFPPLSSPQKASPQPMGGGWQQGGAYNWQQPQPKPQPSMPHSSPQNRPNYNVSFSAMPGGQNERGKGSSNLEGKQKAADFEDLLSGQGFNAHKDKKGPRTIAEMRKEEMAKEMDPEKLKILEWIEGKERNIRALLSTMHTVLWAGETKWKPVGMADLVTPEQVKKVYRKAVLVVHPDKATGQPYEQYAKMIFMELNDAWSEFENQGQKPLY

SEQ ID NO: 6499 - DNA, 5958 bp, Homo sapiens
gccgagctcagcccagggcggcggcttcgcctcgcccggcgaagcttctctccggtggccgctccttcttttccctcctctttgcgtcatgtcgggcacttaatttttttttttttttaattccttcttcagccctttccaccttccatctcccttttcgcttcccaggttgattattttctcttttctccgggcttgcccatgagcctcctcgggagctaccggaaaaagaccagcaacgatggttatgaatctttgcagctggtggacagtaacggggacttaagtgcgggaagcggcggggttggcggcaagcagagagtgaacgccggggcagcggcgcggagtcccgcccgacagcctccggaccgcgccagcaccatggacagctcaggtgcctcatctccagacatggagcccagctatgggggaggtctctttgacatggtaaaaggaggtgcagggaggctctttagtaacctaaaggacaacttgaaagacaccctcaaagacacatcttctagagtgatacaatctgtgaccagctacacaaagggagatttagacttcacttatgttacctccagaattattgtgatgtcctttcctctggacaatgttgacataggattcaggaatcaggttgatgacattcgaagctttttggattccagacatcttgaccactacacagtatacaatctgtcacctaagtcttatcgaactgccaagtttcacagccgggtctcagaatgcagttggcccattaggcaggctcccagtctgcacaacctttttgctgtgtgtcggaatatgtataactggctactgcagaatcccaaaaatgtctgtgttgtccactgcttggatggacgggcggcatcatcaattctggttggtgctatgttcattttctgtaatctctactctactcctggcccagccattcgattgctatatgcaaagcgaccaggaattggactttcaccatcccataggagatacctgggctatatgtgtgacctactggcagacaagccctaccgccctcacttcaagcctctcacaattaagtcgatcactgtcagtccaataccctttttcaacaaacagaggaatggatgtcgcccttactgtgatgtactcattggagaaaccaaaatatattcgacttgcacagattttgaacgaatgaaagaatatcgtgtccaagatggaaaaatcttcattcccttgaacatcactgtgcaaggagacgtggttgtttccatgtatcacttgaggtcaaccattgggagccggctacaggctaaggtgaccaacacacagatattccagcttcagtttcacactggattcataccactggacacaacagttttaaagttcaccaagcctgagttagatgcatgtgatgtaccagaaaaatatcctcagctatttcaggtgacactggatgtagaactacagccccatgacaaagtaatagacttaactccaccatgggaacattactgcacaaaagatgtcaatcccagcatcctcttctcttctcaccaggaacatcaagatacgctggccttaggaggacaggctccaatagatatccctccagacaaccccaggcattacggacaaagtggtttctttgcctctctctgttggcaagatcagaaatcggagaagtcattctgtgaggaggaccacgctgccctagtgaatcaggaaagtgagcaatcagatgatgaacttctgacactttccagtccgcatggcaatgccaatggtgacaagcctcatggagtcaagaagcccagcaaaaagcagcaggagccagcagcccctccaccccctgaggatgtggaccttttgggcctggaagggtctgcaatgagtaacagcttctctccgccagcggctcctcccaccaattctgaactactgagtgacctgtttgggggtggaggtgcagctggtcccacccaggctggacagtcaggagtggaagatgtgtttcatcctagtggacctgcgtctacccagtcaacaccacgccgctctgccacctccacctctgcgtctccaaccctaagagtgggagaaggtgccacctttgacccatttggagcaccttctaaaccatcaggtcaggatttgctgggttcttttctgaacacatccagtgcttccagtgacccctttctccagccaacaagaagtccttcgcccacagtacatgcttctagtacgcctgctgtgaacattcagccagatgtttctggaggttgggactggcatgctaaaccaggaggctttggaatgggaagcaagtcagctgccaccagcccaaccggatcctcgcatggtactcccacccatcaaagcaaaccccagactctggatccttttgccgaccttgggacactaggtagttcttcctttgccagcaaacccaccacaccaactggattgggtggaggattcccgcctctcagctcgccacagaaggcgtctccccagcctatgggtggcgggtggcagcagggaggtgcctacaactggcagcagccacagcctaagcctcagcccagcatgccccactcctctccccagaaccgacccaactacaacgtgagcttctcagccatgcctgggggccagaacgaacgtgggaaaggatcaagtaatttggaagggaaacaaaaagcagctgattttgaagacctactctctggtcaaggtttcaatgctcacaaagacaaaaaggggcctcggacaatagctgagatgagaaaggaggaaatggccaaggaaatggatcctgagaaattaaagattctggaatggattgaaggcaaagaaagaaatatcagagcccttctttccacgatgcataccgtactatgggctggggagaccaagtggaaaccagttggcatggcagacctggtaacaccagagcaggtgaagaaggtgtacaggaaggctgtcctggtggtgcacccagataaagctactgggcaaccctatgaacaatacgcaaagatgattttcatggagctcaatgatgcctggtctgaatttgaaaaccaaggccaaaagcccttatattaatttatgagcttttccatctctgctgcagacctgtgctaatgcttagtgtgtgtcacaattctgaggttttcgcagatgaaccaaaaactccagtaacatgttttcagtactaaaccgttaagttactcatgaattaatttctcattgataaggaatgtggatgtttggtttctccaaagttcccaccataaaagatccaaagcatgagaggaacttctagtcagatgaccttgcagaaccaccgcattccaccctgccctttggggagcctactcagcattctacctggggaaatggaaaacagaggccaccacccatgaaggcataacacccatcacattgtctgagaataggattaatgagcaaaagttatgataatagagttatatgatggtttaatggtttctagatttttcttggaaagatataatttgagcagtggctttatgcagactccaagaacaaaaccaccaggtatttttttttaagtaaaaatttactaaggcctttagcataatactgtaaatgtcttttggtcaagagaactaacaaatataaaggaacttgaaatgtggggagtgataatagtccagtgattaaactacagtccagtgattaccaccaactttctgactaagctaaaaatgaatgaaaatggtggctaaagaaaatagggactctgaagatgtcgaaatctttattcctggttaggaaggtgggccgctacccttctttccctttagaaaactgtgattaattaaataaaaagtcttactactataacaactctaaacctggtttaaatgaaacatctaattttgctgtaaggcttaatgctcttcttttgtttagccaagaaaacattcttagttggaaacaggtggtaaagtagtttggcctgttcacaacttatcaggaccaatatctagtgtggactcagtgttctctaggtttgtgagcagttgtggtaagagaatggaaggcaacactgaataggagttaagggaatggcacgatcacagtgagagagctgcactcacctgcagacccagtcagatggcttgtcagtatctgctctgaggaaccaggtcccacctccccacaaggcaaatctagacccattaaattattacagtgggcttttttgttttaaaagtggttggggatccacaggaacgacattcatacagggacatttgtgaaagcaaagcaagaatgaatgctttcccgatctcagactggctggattcagatcagtgtgttggctggttctcattttaaggggtaagcagtttgctattctgtgactttagtagatctcttttgtgtgcacatatacaatgtgcattatacatatatattaaatatatccacaaagcagatgggcaaaaagattttcatgctaatcttcaaaggttcatgctcaatattgtgaaaagcttttaaaagttgttttgaaaagacaatcattttttgtttttgttttaactttcttgtggcaagctataccggaaaagcggcatgtcaaaaatactttaggttctacatagatctctttctctcttttgttttgtttgtttgtttgttaaagttcattatttattttaccttttactgacaatgtgaaactcgaagaaaatgttctctttttaaatatacagtcataaactgttcaaggtaaccataacaaactaggtgttatttattaacgtattataaaataatgtttgatccagtatgtgcttgtcttatttaaaattggaatgtgagacatgttgctgtgacctgtttttctttctcattcacatttgtagatattgtgtgaactacagtatataatgataacaattaaaaggatattctgtggatgtcacgtattttgaaatgatagaactacattagctttgtatcatgtttggataattcatcaatgttcacagtttaaaacatcattaaacattatgtaattacaatgagaaagaatcttacttaaatttggagattttcccccacatctcttttccggatacattataattctggacccctatttatctcaaaactcttaatatatgcagaccaacaggtctttgcattccttttaaataactggttgtgacaaagcttgttgttgatcagattcactgtttcatcatatttattgtaatatattttttgttttgtaaatatgttacaacaaaatgtgattggtctaaaatatttgtaatgtatattaaaaggttcaaaaatatttgtataaatctaagttatttgggtacttgtaggaatacaatgaggagcttgaatgccaccttctgacatgatttacttttaaggaaagttatgaggagagaatacaaaaagcatgcaccaaaatgtaatctgacaggatttctggatttatacgtaatcactcctgccccaacacacacacacacacacacacacacacacacacacatgcacgcacacatgattttgattatgctacatgatatatgtttcaaaaagaattagcatagaaatcctggtctcctagccaaaaaaatcaaaggattttcaaaaaaacgaatctgtatgttgaggcaaaaggattgaacctggaagtctgggactttatcatagaaacaaagtctcagatattttagttctttggaaacaaatgctgtaattcaaaagcatttgacctgtcactgtactatctacatgtggaagaatgttcaagttgaatcctaatgccgtgaatgaaacacagtctgtgtagggaatgagcaaaaaagttgaattccaattgctttttggccttttggctaaaataaatgtagcatctaattttatcagttt

SEQ ID NO: 6500 - protein, 970 aa, Homo sapiens; identical to SEQ ID NO: 6498

SEQ ID NO: 6501 - DNA, 1892 bp, Homo sapiens
gcgctggtgtgggttagggctgagaaagaacgacaggaacagagacgtcgcgaggattaagtttaagacttcgcgagaacagaatttcttttggcacctcctctccgcgcgttcttgggggttgaaaggaggagcaggaggtactgatggacaaggaggtaccttccggtacacctttcatggcgatcctcatgctacatttgctgcatttttcggagggtccaacccctttgaaattttctttggaagacgaatgggtggtggtagagattctgaagaaatggaaatagatggtgatccttttagtgcctttggtttcagcatgaatggatatccaagagacaggaattctgtggggccatcccgcctcaaacaagatcctccagttattcatgaacttagagtatcacttgaagagatatatagtggttgtaccaaacggatgaagatttctcgaaaaaggctaaacgctgatggaaggagttacagatctgaggacaaaattcttaccattgagattaaaaaagggtggaaagaaggcaccaaaattacttttccaagagaaggagatgaaacaccaaatagtattccagcagacattgtttttatcattaaagacaaagatcatccaaaatttaaaagggatggatcaaatataatttatactgctaaaattagtttacgagaggcattgtgtggctgctcaattaatgtaccaacactggatggaagaaacatacctatgtcagtaaatgatattgtgaaacccggaatgaggagaagaattattggatatgggctgccatttccaaaaaatcctgaccaacgtggtgaccttctaatagaatttgaggtgtccttcccagatactatatcttcttcatccaaagaagtacttaggaaacatcttcctgcctcatagaatgaagaactttgttacacatattttgataaggcactgaaaatataaaaggactggtagtttactgatgtagatgtgaattctgtataaagatgtgtaaattcttttgagggttcattaaattgcatgaatagagacgggtcaaataaataggcaaaagggatttttacagttagagataaaagagaaaaccattcactgtattttatttcatttctcctgattcagatatttttagtaatttgcttatatgtaaaagttgtttttgtggagtcagtggatatatttctaatgaagtgctagactatccaattacttaatttcttatacctttagataatcagtatgaaaagttcccatttataatggaaatgaaaattcttaactaaactatacatgtaatatgtatttctagaagagaataaaaacccaagtcagttattagatttaaatcaccttctgaaatgctgctatagggctggtatctgtaaaagaatatcctgatgcatctgtttcaccattttgatttttaaagtatgctgtagcatttcttaataacatcgttgtgatgttcttaaggcagatctttcttcataaaaaggaaagtaatggcaatttctctcctgtggaaatcccaattgcttgaattactgatattttagaatagactttttaaaatgccatatgtaattttatgcaagttgactatatatcttgtacttaataaattataggctcattttgttctctgctagtttaaagtaattcgtttaataatagatgtgtttttagaggaaatgctgttacttggaattaattttccagttatacagtcttctataacttactaataatattctatatgtactttatgtaatttccctaaaaagaatgaactaccactacactatggtgttaaaccaaaatatagggaaaataaacactaactgctgcttatggataatgttgc

SEQ ID NO: 6502 - protein, 222 aa, Homo sapiens
MGGGRDSEEMEIDGDPFSAFGFSMNGYPRDRNSVGPSRLKQDPPVIHELRVSLEEIYSGCTKRMKISRKRLNADGRSYRSEDKILTIEIKKGWKEGTKITFPREGDETPNSIPADIVFIIKDKDHPKFKRDGSNIIYTAKISLREALCGCSINVPTLDGRNIPMSVNDIVKPGMRRRIIGYGLPFPKNPDQRGDLLIEFEVSFPDTISSSSKEVLRKHLPAS

SEQ ID NO: 6503 - DNA, 1992 bp, Homo sapiens
gcgctggtgtgggttagggctgagaaagaacgacaggaacagagacgtcgcgaggattaagtttaagacttcgcgagaacagaatttcttttggcacctcctctccgcgcgttcttgggggttgaaaggaggagcaggaggtactgatggacaaggaggtaccttccggtacacctttcatggcgatcctcatgctacatttgctgcatttttcggagggtccaacccctttgaaattttctttggaagacgaatgggtggtggtagagattctgaagaaatggaaatagatggtgatccttttagtgcctttggtttcagcatgaatggatatccaagagacaggaattctgtggggccatcccgcctcaaacaagatcctccagttattcatgaacttagagtatcacttgaagagatatatagtggttgtaccaaacggatgaagatttctcgaaaaaggctaaacgctgatggaaggagttacagatctgaggacaaaattcttaccattgagattaaaaaagggtggaaagaaggcaccaaaattacttttccaagagaaggagatgaaacaccaaatagtattccagcagacattgtttttatcattaaagacaaagatcatccaaaatttaaaagggatggatcaaatataatttatactgctaaaattagtttacgagaggcattgtgtggctgctcaattaatgtaccaacactggatggaagaaacatacctatgtcagtaaatgatattgtgaaacccggaatgaggagaagaattattggatatgggctgccatttccaaaaaatcctgaccaacgtggtgaccttctaatagaatttgaggtgtccttcccagatactatatcttcttcatccaaagaagtacttaggaaacatcttcctgcctcatagaatgaagaactttgttacacatattttgataaggcactgaaaatataaaaggactggtagtttactgatgtagatgtgaattctgtataaagatgtgtaaattcttttgagggttcattaaattgcatgaatagagacgggtcaaataaataggcaaaagggatttttacagttagagataaaagagaaaaccattcactgtattttatttcatttctcctgattcagatatttttagtaatttgcttatatgtaaaagttgtttttgtggagtcagtggatatatttctaatgaagtgctagactatccaattacttaatttcttatacctttagataatcagtatgaaaagttcccatttataatggaaatgaaaattcttaactaaactatacatgtaatatgtatttctagaagagaataaaaacccaagtcagttattagatttaaatcaccttctgaaatgctgctatagggctggtatctgtaaaagaatatcctgatgcatctgtttcaccattttgatttttaaagtatgctgtagcatttcttaataacatcgttgtgatgttcttaaggcagatctttcttcataaaaaggaaagtaatggcaatttctctcctgtggaaatcccaattgcttgaattactgatattttagaatagactttttaaaatgccatatgtaattttatgcaagttgactatatatcttgtacttaataaattataggctcattttgttctctgctagtttaaagtaattcgtttaataatagatgtgtttttagaggaaatgctgttacttggaattaattttccagttatacagtcttctataacttactaataatattctatatgtactttatgtaatttccctaaaaagaatgaactaccactacactatggtgttaaaccaaaatatagggaaaataaacactaactgctgcttatggataatgttgcaactacttgttatgcatataaatattttactttttcacatgtatagattgcatttcttaggtgttttaattttttaaatatatttatgttttaaaaattt

SEQ ID NO: 6504 - protein, 222 aa, Homo sapiens; identical to SEQ ID NO: 6502

SEQ ID NO: 6505 - DNA, 2637 bp, Homo sapiens
gcgctggtgtgggttagggctgagaaagaacgacaggaacagagacgtcgcgaggattaagtttaagacttcgcgagaacagaatttcttttggcacctcctctccgcgcgttcttgggggttgaaaggaggagcaggaggtactgatggacaaggaggtaccttccggtacacctttcatggcgatcctcatgctacatttgctgcatttttcggagggtccaacccctttgaaattttctttggaagacgaatgggtggtggtagagattctgaagaaatggaaatagatggtgatccttttagtgcctttggtttcagcatgaatggatatccaagagacaggaattctgtggggccatcccgcctcaaacaagatcctccagttattcatgaacttagagtatcacttgaagagatatatagtggttgtaccaaacggatgaagatttctcgaaaaaggctaaacgctgatggaaggagttacagatctgaggacaaaattcttaccattgagattaaaaaagggtggaaagaaggcaccaaaattacttttccaagagaaggagatgaaacaccaaatagtattccagcagacattgtttttatcattaaagacaaagatcatccaaaatttaaaagggatggatcaaatataatttatactgctaaaattagtttacgagaggcattgtgtggctgctcaattaatgtaccaacactggatggaagaaacatacctatgtcagtaaatgatattgtgaaacccggaatgaggagaagaattattggatatgggctgccatttccaaaaaatcctgaccaacgtggtgaccttctaatagaatttgaggtgtccttcccagatactatatcttcttcatccaaagaagtacttaggaaacatcttcctgcctcatagaatgaagaactttgttacacatattttgataaggcactgaaaatataaaaggactggtagtttactgatgtagatgtgaattctgtataaagatgtgtaaattcttttgagggttcattaaattgcatgaatagagacgggtcaaataaataggcaaaagggatttttacagttagagataaaagagaaaaccattcactgtattttatttcatttctcctgattcagatatttttagtaatttgcttatatgtaaaagttgtttttgtggagtcagtggatatatttctaatgaagtgctagactatccaattacttaatttcttatacctttagataatcagtatgaaaagttcccatttataatggaaatgaaaattcttaactaaactatacatgtaatatgtatttctagaagagaataaaaacccaagtcagttattagatttaaatcaccttctgaaatgctgctatagggctggtatctgtaaaagaatatcctgatgcatctgtttcaccattttgatttttaaagtatgctgtagcatttcttaataacatcgttgtgatgttcttaaggcagatctttcttcataaaaaggaaagtaatggcaatttctctcctgtggaaatcccaattgcttgaattactgatattttagaatagactttttaaaatgccatatgtaattttatgcaagttgactatatatcttgtacttaataaattataggctcattttgttctctgctagtttaaagtaattcgtttaataatagatgtgtttttagaggaaatgctgttacttggaattaattttccagttatacagtcttctataacttactaataatattctatatgtactttatgtaatttccctaaaaagaatgaactaccactacactatggtgttaaaccaaaatatagggaaaataaacactaactgctgcttatggataatgttgcaactacttgttatgcatataaatattttactttttcacatgtatagattgcatttcttaggtgttttaattttttaaatatatttatgttttaaaaatttagttttgttttctgttttataactatagtgagaatgatgttttgaagcaaaatttttggttataaaatagttttcaggattatatatatatatactggatcctatcgccttttagtagaatatgaaatattcttttagaaatccaatataaataggttataatagccatattctttattactttattgagatataatttacatgccataaagtttacccttaaaatatataattcagtggtttttagtgatatttacaaagtggtacaatcatcatcactttctaattccagaatattttcatcaccccaaaaagaaatcctaaatccattagcagttacttcccattcttcccttcctccagcccctgaaaacactaccatctacttttcatctgtatggatttgtctgttctggacatttcacataaatagactcaaacaatatatggctttttttttttttggtctggcctctttcatttagcttaatgttttcaaggttcatctatgttgtatcacgtatcagtactttattttttgtgtggcacgtcatatggatataccacaatttgtttatcttttcattaattatgggcatttggcttatttctacttttttggctattataaataatgctgctgtg

SEQ ID NO: 6506 - protein, 222 aa, Homo sapiens; identical to SEQ ID NO: 6502

SEQ ID NO: 6507 - DNA, 845 bp, Homo sapiens
aagtttaagacttcgcgagaacagaatttcttttggcacctcctctccgcgcgttcttggggctggagtgcagtggcacgatcttggctcactgaaacctcagcctcccaggttcaagagattctcccacctcagcctctggagtagctgggatcacagttttgctcctgttgcccaggccggagtgcaatggtgcagtcttggctcactgtaacctctgcctcccaggttcaagcgattctcctgcctcagcctcccaagtactcttcaattagggttgaaaggaggagcaggaggtactgatggacaaggaggtaccttccggtacacctttcatggcgatcctcatgctacatttgctgcatttttcggagggtccaacccctttgaaattttctttggaagacgaatgggtggtggtagagattctgaagaaatggaaatagatggtgatccttttagtgcctttggtttcagcatgaatggatatccaagagacaggaattctgtggggccatcccgcctcaaacaagatcctccagttattcatgaacttagagtatcacttgaagagatatatagtggttgtaccaaacggatgaagatttctcgaaaaaggctaaacgctgatggaaggagttacagatctgaggacaaaattcttaccattgagattaaaaaagggtggaaagaaggcaccaaaattacttttccaagagaaggagatgaaacaccaaatagtattccagcagacattgtttttatcattaaagacaaagatcatccaaaatttaaaagggatggatcaaatataatttatactgctaaaattagtttacgagagg

SEQ ID NO: 6508 - protein, 37 aa, Homo sapiens
MVQSWLTVTSASQVQAILLPQPPKYSSIRVERRSRRY

SEQ ID NO: 6509 - DNA, 2023 bp, Homo sapiens
gttttggtattatatacttaacagacaaatagcttaaaattaaaaaatccctaaagtagaattgtcgttccttttatctgtatattaactttaacttcttttaacatagggtgtttaatgactgtgatgattttcacctagtatggagtacataaatatatagttgtgacattctgtgttgaaatattggcatgttaacccatttgtcctgtttaattaggaaataaagacggtagagctagtcggaaaatgaatagttaatcgtggaggaggagaaaacatagctcagtactttgactagaggcagctgggaaagtgacgtcctgtagcatttgctgttctagaaagtacagagacacgtagtgaaaatgggaggatctagaaggaggctgtctcctgtgtagtgtatatttatctgtaagtgagccgttggggaaggattgaatacagagacgctgtctgcttgctgccttaagacagctagctgaattgctgattaacttttaaaatacccagcttggtttatttttcttagaatctgttgctaagactggggacgctgttttcttttacaaagggaaatctaagttaatttcaaggcattcgaaatggggaaagactattattgcattttgggaattgagaaaggagcttcagatgaagatattaaaaaggcttaccgaaaacaagccctcaaatttcatccggacaagaacaaatctcctcaggcagaggaaaaatttaaagaggtcgcagaagcttatgaagtattgagtgatcctaaaaagagagaaatatatgatcagtttggggaggaaggcattgtgtggctgctcaattaatgtaccaacactggatggaagaaacatacctatgtcagtaaatgatattgtgaaacccggaatgaggagaagaattattggatatgggctgccatttccaaaaaatcctgaccaacgtggtgaccttctaatagaatttgaggtgtccttcccagatactatatcttcttcatccaaagaagtacttaggaaacatcttcctgcctcatagaatgaagaactttgttacacatattttgataaggcactgaaaatataaaaggactggtagtttactgatgtagatgtgaattctgtataaagatgtgtaaattcttttgagggttcattaaattgcatgaatagagacgggtcaaataaataggcaaaagggatttttacagttagagataaaagagaaaaccattcactgtattttatttcatttctcctgattcagatatttttagtaatttgcttatatgtaaaagttgtttttgtggagtcagtggatatatttctaatgaagtgctagactatccaattacttaatttcttatacctttagataatcagtatgaaaagttcccatttataatggaaatgaaaattcttaactaaactatacatgtaatatgtatttctagaagagaataaaaacccaagtcagttattagatttaaatcaccttctgaaatgctgctatagggctggtatctgtaaaagaatatcctgatgcatctgtttcaccattttgatttttaaagtatgctgtagcatttcttaataacatcgttgtgatgttcttaaggcagatctttcttcataaaaaggaaagtaatggcaatttctctcctgtggaaatcccaattgcttgaattactgatattttagaatagactttttaaaatgccatatgtaattttatgcaagttgactatatatcttgtacttaataaattataggctcattttgttctctgctagtttaaagtaattcgtttaataatagatgtgtttttagaggaaatgctgttacttggaattaattttccagttatacagtcttctataacttactaataatattctatatgtactttatgtaatttccctaaaaagaatgaactaccactacactatggtgttaaaccaaaatatagggaaaataaacactaactgctgcttatggataatgttgc

SEQ ID NO: 6510 - protein, 84 aa, Homo sapiens
MISLGRKALCGCSINVPTLDGRNIPMSVNDIVKPGMRRRIIGYGLPFPKNPDQRGDLLIEFEVSFPDTISSSSKEVLRKHLPAS

SEQ ID NO: 6511 - DNA, 2592 bp, Homo sapiens
gttttggtattatatacttaacagacaaatagcttaaaattaaaaaatccctaaagtagaattgtcgttccttttatctgtatattaactttaacttcttttaacatagggtgtttaatgactgtgatgattttcacctagtatggagtacataaatatatagttgtgacattctgtgttgaaatattggcatgttaacccatttgtcctgtttaattaggaaataaagacggtagagctagtcggaaaatgaatagttaatcgtggaggaggagaaaacatagctcagtactttgactagaggcagctgggaaagtgacgtcctgtagcatttgctgttctagaaagtacagagacacgtagtgaaaatgggaggatctagaaggaggctgtctcctgtgtagtgtatatttatctgtaagtgagccgttggggaaggattgaatacagagacgctgtctgcttgctgccttaagacagctagctgaattgctgattaacttttaaaatacccagcttggtttatttttcttagaatctgttgctaagactggggacgctgttttcttttacaaagggaaatctaagttaatttcaaggcattcgaaatggggaaagactattattgcattttgggaattgagaaaggagcttcagatgaagatattaaaaaggcttaccgaaaacaagccctcaaatttcatccggacaagaacaaatctcctcaggcagaggaaaaatttaaagaggtcgcagaagcttatgaagtattgagtgatcctaaaaagagagaaatatatgatcagtttggggaggaagggttgaaaggaggagcaggaggtactgatggacaaggaggtaccttccggtacacctttcatggcgatcctcatgctacatttgctgcatttttcggagggtccaacccctttgaaattttctttggaagacgaatgggtggtggtagagattctgaagaaatggaaatagatggtgatccttttagtgcctttggtttcagcatgaatggatatccaagagacaggaattctgtggggccatcccgcctcaaacaagatcctccagttattcatgaacttagagtatcacttgaagagatatatagtggttgtaccaaacggatgaagatttctcgaaaaaggctaaacgctgatggaaggagttacagatctgaggacaaaattcttaccattgagattaaaaaagggtggaaagaaggcaccaaaattacttttccaagagaaggagatgaaacaccaaatagtattccagcagacattgtttttatcattaaagacaaagatcatccaaaatttaaaagggatggatcaaatataatttatactgctaaaattagtttacgagaggcattgtgtggctgctcaattaatgtaccaacactggatggaagaaacatacctatgtcagtaaatgatattgtgaaacccggaatgaggagaagaattattggatatgggctgccatttccaaaaaatcctgaccaacgtggtgaccttctaatagaatttgaggtgtccttcccagatactatatcttcttcatccaaagaagtacttaggaaacatcttcctgcctcatagaatgaagaactttgttacacatattttgataaggcactgaaaatataaaaggactggtagtttactgatgtagatgtgaattctgtataaagatgtgtaaattcttttgagggttcattaaattgcatgaatagagacgggtcaaataaataggcaaaagggatttttacagttagagataaaagagaaaaccattcactgtattttatttcatttctcctgattcagatatttttagtaatttgcttatatgtaaaagttgtttttgtggagtcagtggatatatttctaatgaagtgctagactatccaattacttaatttcttatacctttagataatcagtatgaaaagttcccatttataatggaaatgaaaattcttaactaaactatacatgtaatatgtatttctagaagagaataaaaacccaagtcagttattagatttaaatcaccttctgaaatgctgctatagggctggtatctgtaaaagaatatcctgatgcatctgtttcaccattttgatttttaaagtatgctgtagcatttcttaataacatcgttgtgatgttcttaaggcagatctttcttcataaaaaggaaagtaatggcaatttctctcctgtggaaatcccaattgcttgaattactgatattttagaatagactttttaaaatgccatatgtaattttatgcaagttgactatatatcttgtacttaataaattataggctcattttgttctctgctagtttaaagtaattcgtttaataatagatgtgtttttagaggaaatgctgttacttggaattaattttccagttatacagtcttctataacttactaataatattctatatgtactttatgtaatttccctaaaaagaatgaactaccactacactatggtgttaaaccaaaatatagggaaaataaacactaactgctgcttatggataatgttgc

SEQ ID NO: 6512 - protein, 337 aa, Homo sapiens; identical to SEQ ID NO: 262

SEQ ID NO: 6513 - DNA, 2123 bp, Homo sapiens
gttttggtattatatacttaacagacaaatagcttaaaattaaaaaatccctaaagtagaattgtcgttccttttatctgtatattaactttaacttcttttaacatagggtgtttaatgactgtgatgattttcacctagtatggagtacataaatatatagttgtgacattctgtgttgaaatattggcatgttaacccatttgtcctgtttaattaggaaataaagacggtagagctagtcggaaaatgaatagttaatcgtggaggaggagaaaacatagctcagtactttgactagaggcagctgggaaagtgacgtcctgtagcatttgctgttctagaaagtacagagacacgtagtgaaaatgggaggatctagaaggaggctgtctcctgtgtagtgtatatttatctgtaagtgagccgttggggaaggattgaatacagagacgctgtctgcttgctgccttaagacagctagctgaattgctgattaacttttaaaatacccagcttggtttatttttcttagaatctgttgctaagactggggacgctgttttcttttacaaagggaaatctaagttaatttcaaggcattcgaaatggggaaagactattattgcattttgggaattgagaaaggagcttcagatgaagatattaaaaaggcttaccgaaaacaagccctcaaatttcatccggacaagaacaaatctcctcaggcagaggaaaaatttaaagaggtcgcagaagcttatgaagtattgagtgatcctaaaaagagagaaatatatgatcagtttggggaggaaggcattgtgtggctgctcaattaatgtaccaacactggatggaagaaacatacctatgtcagtaaatgatattgtgaaacccggaatgaggagaagaattattggatatgggctgccatttccaaaaaatcctgaccaacgtggtgaccttctaatagaatttgaggtgtccttcccagatactatatcttcttcatccaaagaagtacttaggaaacatcttcctgcctcatagaatgaagaactttgttacacatattttgataaggcactgaaaatataaaaggactggtagtttactgatgtagatgtgaattctgtataaagatgtgtaaattcttttgagggttcattaaattgcatgaatagagacgggtcaaataaataggcaaaagggatttttacagttagagataaaagagaaaaccattcactgtattttatttcatttctcctgattcagatatttttagtaatttgcttatatgtaaaagttgtttttgtggagtcagtggatatatttctaatgaagtgctagactatccaattacttaatttcttatacctttagataatcagtatgaaaagttcccatttataatggaaatgaaaattcttaactaaactatacatgtaatatgtatttctagaagagaataaaaacccaagtcagttattagatttaaatcaccttctgaaatgctgctatagggctggtatctgtaaaagaatatcctgatgcatctgtttcaccattttgatttttaaagtatgctgtagcatttcttaataacatcgttgtgatgttcttaaggcagatctttcttcataaaaaggaaagtaatggcaatttctctcctgtggaaatcccaattgcttgaattactgatattttagaatagactttttaaaatgccatatgtaattttatgcaagttgactatatatcttgtacttaataaattataggctcattttgttctctgctagtttaaagtaattcgtttaataatagatgtgtttttagaggaaatgctgttacttggaattaattttccagttatacagtcttctataacttactaataatattctatatgtactttatgtaatttccctaaaaagaatgaactaccactacactatggtgttaaaccaaaatatagggaaaataaacactaactgctgcttatggataatgttgcaactacttgttatgcatataaatattttactttttcacatgtatagattgcatttcttaggtgttttaattttttaaatatatttatgttttaaaaattt

SEQ ID NO: 6514 - protein, 84 aa, Homo sapiens; identical to SEQ ID NO: 6510

SEQ ID NO: 6515 - DNA, 2692 bp, Homo sapiens
gttttggtattatatacttaacagacaaatagcttaaaattaaaaaatccctaaagtagaattgtcgttccttttatctgtatattaactttaacttcttttaacatagggtgtttaatgactgtgatgattttcacctagtatggagtacataaatatatagttgtgacattctgtgttgaaatattggcatgttaacccatttgtcctgtttaattaggaaataaagacggtagagctagtcggaaaatgaatagttaatcgtggaggaggagaaaacatagctcagtactttgactagaggcagctgggaaagtgacgtcctgtagcatttgctgttctagaaagtacagagacacgtagtgaaaatgggaggatctagaaggaggctgtctcctgtgtagtgtatatttatctgtaagtgagccgttggggaaggattgaatacagagacgctgtctgcttgctgccttaagacagctagctgaattgctgattaacttttaaaatacccagcttggtttatttttcttagaatctgttgctaagactggggacgctgttttcttttacaaagggaaatctaagttaatttcaaggcattcgaaatggggaaagactattattgcattttgggaattgagaaaggagcttcagatgaagatattaaaaaggcttaccgaaaacaagccctcaaatttcatccggacaagaacaaatctcctcaggcagaggaaaaatttaaagaggtcgcagaagcttatgaagtattgagtgatcctaaaaagagagaaatatatgatcagtttggggaggaagggttgaaaggaggagcaggaggtactgatggacaaggaggtaccttccggtacacctttcatggcgatcctcatgctacatttgctgcatttttcggagggtccaacccctttgaaattttctttggaagacgaatgggtggtggtagagattctgaagaaatggaaatagatggtgatccttttagtgcctttggtttcagcatgaatggatatccaagagacaggaattctgtggggccatcccgcctcaaacaagatcctccagttattcatgaacttagagtatcacttgaagagatatatagtggttgtaccaaacggatgaagatttctcgaaaaaggctaaacgctgatggaaggagttacagatctgaggacaaaattcttaccattgagattaaaaaagggtggaaagaaggcaccaaaattacttttccaagagaaggagatgaaacaccaaatagtattccagcagacattgtttttatcattaaagacaaagatcatccaaaatttaaaagggatggatcaaatataatttatactgctaaaattagtttacgagaggcattgtgtggctgctcaattaatgtaccaacactggatggaagaaacatacctatgtcagtaaatgatattgtgaaacccggaatgaggagaagaattattggatatgggctgccatttccaaaaaatcctgaccaacgtggtgaccttctaatagaatttgaggtgtccttcccagatactatatcttcttcatccaaagaagtacttaggaaacatcttcctgcctcatagaatgaagaactttgttacacatattttgataaggcactgaaaatataaaaggactggtagtttactgatgtagatgtgaattctgtataaagatgtgtaaattcttttgagggttcattaaattgcatgaatagagacgggtcaaataaataggcaaaagggatttttacagttagagataaaagagaaaaccattcactgtattttatttcatttctcctgattcagatatttttagtaatttgcttatatgtaaaagttgtttttgtggagtcagtggatatatttctaatgaagtgctagactatccaattacttaatttcttatacctttagataatcagtatgaaaagttcccatttataatggaaatgaaaattcttaactaaactatacatgtaatatgtatttctagaagagaataaaaacccaagtcagttattagatttaaatcaccttctgaaatgctgctatagggctggtatctgtaaaagaatatcctgatgcatctgtttcaccattttgatttttaaagtatgctgtagcatttcttaataacatcgttgtgatgttcttaaggcagatctttcttcataaaaaggaaagtaatggcaatttctctcctgtggaaatcccaattgcttgaattactgatattttagaatagactttttaaaatgccatatgtaattttatgcaagttgactatatatcttgtacttaataaattataggctcattttgttctctgctagtttaaagtaattcgtttaataatagatgtgtttttagaggaaatgctgttacttggaattaattttccagttatacagtcttctataacttactaataatattctatatgtactttatgtaatttccctaaaaagaatgaactaccactacactatggtgttaaaccaaaatatagggaaaataaacactaactgctgcttatggataatgttgcaactacttgttatgcatataaatattttactttttcacatgtatagattgcatttcttaggtgttttaattttttaaatatatttatgttttaaaaattt

SEQ ID NO: 6516 - protein, 337 aa, Homo sapiens; identical to SEQ ID NO: 262

SEQ ID NO: 6517 - DNA, 3337 bp, Homo sapiens
gttttggtattatatacttaacagacaaatagcttaaaattaaaaaatccctaaagtagaattgtcgttccttttatctgtatattaactttaacttcttttaacatagggtgtttaatgactgtgatgattttcacctagtatggagtacataaatatatagttgtgacattctgtgttgaaatattggcatgttaacccatttgtcctgtttaattaggaaataaagacggtagagctagtcggaaaatgaatagttaatcgtggaggaggagaaaacatagctcagtactttgactagaggcagctgggaaagtgacgtcctgtagcatttgctgttctagaaagtacagagacacgtagtgaaaatgggaggatctagaaggaggctgtctcctgtgtagtgtatatttatctgtaagtgagccgttggggaaggattgaatacagagacgctgtctgcttgctgccttaagacagctagctgaattgctgattaacttttaaaatacccagcttggtttatttttcttagaatctgttgctaagactggggacgctgttttcttttacaaagggaaatctaagttaatttcaaggcattcgaaatggggaaagactattattgcattttgggaattgagaaaggagcttcagatgaagatattaaaaaggcttaccgaaaacaagccctcaaatttcatccggacaagaacaaatctcctcaggcagaggaaaaatttaaagaggtcgcagaagcttatgaagtattgagtgatcctaaaaagagagaaatatatgatcagtttggggaggaagggttgaaaggaggagcaggaggtactgatggacaaggaggtaccttccggtacacctttcatggcgatcctcatgctacatttgctgcatttttcggagggtccaacccctttgaaattttctttggaagacgaatgggtggtggtagagattctgaagaaatggaaatagatggtgatccttttagtgcctttggtttcagcatgaatggatatccaagagacaggaattctgtggggccatcccgcctcaaacaagatcctccagttattcatgaacttagagtatcacttgaagagatatatagtggttgtaccaaacggatgaagatttctcgaaaaaggctaaacgctgatggaaggagttacagatctgaggacaaaattcttaccattgagattaaaaaagggtggaaagaaggcaccaaaattacttttccaagagaaggagatgaaacaccaaatagtattccagcagacattgtttttatcattaaagacaaagatcatccaaaatttaaaagggatggatcaaatataatttatactgctaaaattagtttacgagaggcattgtgtggctgctcaattaatgtaccaacactggatggaagaaacatacctatgtcagtaaatgatattgtgaaacccggaatgaggagaagaattattggatatgggctgccatttccaaaaaatcctgaccaacgtggtgaccttctaatagaatttgaggtgtccttcccagatactatatcttcttcatccaaagaagtacttaggaaacatcttcctgcctcatagaatgaagaactttgttacacatattttgataaggcactgaaaatataaaaggactggtagtttactgatgtagatgtgaattctgtataaagatgtgtaaattcttttgagggttcattaaattgcatgaatagagacgggtcaaataaataggcaaaagggatttttacagttagagataaaagagaaaaccattcactgtattttatttcatttctcctgattcagatatttttagtaatttgcttatatgtaaaagttgtttttgtggagtcagtggatatatttctaatgaagtgctagactatccaattacttaatttcttatacctttagataatcagtatgaaaagttcccatttataatggaaatgaaaattcttaactaaactatacatgtaatatgtatttctagaagagaataaaaacccaagtcagttattagatttaaatcaccttctgaaatgctgctatagggctggtatctgtaaaagaatatcctgatgcatctgtttcaccattttgatttttaaagtatgctgtagcatttcttaataacatcgttgtgatgttcttaaggcagatctttcttcataaaaaggaaagtaatggcaatttctctcctgtggaaatcccaattgcttgaattactgatattttagaatagactttttaaaatgccatatgtaattttatgcaagttgactatatatcttgtacttaataaattataggctcattttgttctctgctagtttaaagtaattcgtttaataatagatgtgtttttagaggaaatgctgttacttggaattaattttccagttatacagtcttctataacttactaataatattctatatgtactttatgtaatttccctaaaaagaatgaactaccactacactatggtgttaaaccaaaatatagggaaaataaacactaactgctgcttatggataatgttgcaactacttgttatgcatataaatattttactttttcacatgtatagattgcatttcttaggtgttttaattttttaaatatatttatgttttaaaaatttagttttgttttctgttttataactatagtgagaatgatgttttgaagcaaaatttttggttataaaatagttttcaggattatatatatatatactggatcctatcgccttttagtagaatatgaaatattcttttagaaatccaatataaataggttataatagccatattctttattactttattgagatataatttacatgccataaagtttacccttaaaatatataattcagtggtttttagtgatatttacaaagtggtacaatcatcatcactttctaattccagaatattttcatcaccccaaaaagaaatcctaaatccattagcagttacttcccattcttcccttcctccagcccctgaaaacactaccatctacttttcatctgtatggatttgtctgttctggacatttcacataaatagactcaaacaatatatggctttttttttttttggtctggcctctttcatttagcttaatgttttcaaggttcatctatgttgtatcacgtatcagtactttattttttgtgtggcacgtcatatggatataccacaatttgtttatcttttcattaattatgggcatttggcttatttctacttttttggctattataaataatgctgctgtg

SEQ ID NO: 6518 - protein, 337 aa, Homo sapiens; identical to SEQ ID NO: 262

SEQ ID NO: 6519 - DNA, 2768 bp, Homo sapiens
gttttggtattatatacttaacagacaaatagcttaaaattaaaaaatccctaaagtagaattgtcgttccttttatctgtatattaactttaacttcttttaacatagggtgtttaatgactgtgatgattttcacctagtatggagtacataaatatatagttgtgacattctgtgttgaaatattggcatgttaacccatttgtcctgtttaattaggaaataaagacggtagagctagtcggaaaatgaatagttaatcgtggaggaggagaaaacatagctcagtactttgactagaggcagctgggaaagtgacgtcctgtagcatttgctgttctagaaagtacagagacacgtagtgaaaatgggaggatctagaaggaggctgtctcctgtgtagtgtatatttatctgtaagtgagccgttggggaaggattgaatacagagacgctgtctgcttgctgccttaagacagctagctgaattgctgattaacttttaaaatacccagcttggtttatttttcttagaatctgttgctaagactggggacgctgttttcttttacaaagggaaatctaagttaatttcaaggcattcgaaatggggaaagactattattgcattttgggaattgagaaaggagcttcagatgaagatattaaaaaggcttaccgaaaacaagccctcaaatttcatccggacaagaacaaatctcctcaggcagaggaaaaatttaaagaggtcgcagaagcttatgaagtattgagtgatcctaaaaagagagaaatatatgatcagtttggggaggaaggcattgtgtggctgctcaattaatgtaccaacactggatggaagaaacatacctatgtcagtaaatgatattgtgaaacccggaatgaggagaagaattattggatatgggctgccatttccaaaaaatcctgaccaacgtggtgaccttctaatagaatttgaggtgtccttcccagatactatatcttcttcatccaaagaagtacttaggaaacatcttcctgcctcatagaatgaagaactttgttacacatattttgataaggcactgaaaatataaaaggactggtagtttactgatgtagatgtgaattctgtataaagatgtgtaaattcttttgagggttcattaaattgcatgaatagagacgggtcaaataaataggcaaaagggatttttacagttagagataaaagagaaaaccattcactgtattttatttcatttctcctgattcagatatttttagtaatttgcttatatgtaaaagttgtttttgtggagtcagtggatatatttctaatgaagtgctagactatccaattacttaatttcttatacctttagataatcagtatgaaaagttcccatttataatggaaatgaaaattcttaactaaactatacatgtaatatgtatttctagaagagaataaaaacccaagtcagttattagatttaaatcaccttctgaaatgctgctatagggctggtatctgtaaaagaatatcctgatgcatctgtttcaccattttgatttttaaagtatgctgtagcatttcttaataacatcgttgtgatgttcttaaggcagatctttcttcataaaaaggaaagtaatggcaatttctctcctgtggaaatcccaattgcttgaattactgatattttagaatagactttttaaaatgccatatgtaattttatgcaagttgactatatatcttgtacttaataaattataggctcattttgttctctgctagtttaaagtaattcgtttaataatagatgtgtttttagaggaaatgctgttacttggaattaattttccagttatacagtcttctataacttactaataatattctatatgtactttatgtaatttccctaaaaagaatgaactaccactacactatggtgttaaaccaaaatatagggaaaataaacactaactgctgcttatggataatgttgcaactacttgttatgcatataaatattttactttttcacatgtatagattgcatttcttaggtgttttaattttttaaatatatttatgttttaaaaatttagttttgttttctgttttataactatagtgagaatgatgttttgaagcaaaatttttggttataaaatagttttcaggattatatatatatatactggatcctatcgccttttagtagaatatgaaatattcttttagaaatccaatataaataggttataatagccatattctttattactttattgagatataatttacatgccataaagtttacccttaaaatatataattcagtggtttttagtgatatttacaaagtggtacaatcatcatcactttctaattccagaatattttcatcaccccaaaaagaaatcctaaatccattagcagttacttcccattcttcccttcctccagcccctgaaaacactaccatctacttttcatctgtatggatttgtctgttctggacatttcacataaatagactcaaacaatatatggctttttttttttttggtctggcctctttcatttagcttaatgttttcaaggttcatctatgttgtatcacgtatcagtactttattttttgtgtggcacgtcatatggatataccacaatttgtttatcttttcattaattatgggcatttggcttatttctacttttttggctattataaataatgctgctgtg

SEQ ID NO: 6520 - protein, 84 aa, Homo sapiens; identical to SEQ ID NO: 6510

SEQ ID NO: 6521 - DNA, 453 bp, Homo sapiens
gaaaaatgcagcaaatgtagcatgaggatcgccatgaaaggtgtaccggaaggtacctccttgtccatcagtacctcctggatcactcaatacttcataagcttctgcgacctctttaaatttttcctctgcctgaggagatttgttcttgtccggatgaaatttgagggcttgttttcggtaagcctttttaatatcttcatctgaagctcctttctcaattcccaaaatgcaataatagtctttccccatttcgaatgccttgaaattaacttagatttccctttgtaaaagaaaacagcgtccccagtcttagcaacagattctaagaaaaataaaccaagctgggtattttaaaagttaatcagcaattcagctagctgtcttaaggcagcaagcagacagcgtctctgtattcaatccttccccaacggctcacttacagataaatat

SEQ ID NO: 6522 - protein, 61 aa, Homo sapiens [sequence omitted]

SEQ ID NO: 6523 - DNA, 2822 bp, Homo sapiens
gggcgggcgggcggctgctccggtccaggggtggaggtcggggccctgacccgacgcagccaggcggaagcgcggctgccattggaggctgcttttacctgcgcggggcccggggcgcaaagtccgaggcgccggggggaggaggcggcggacggcagcgcaggtgggcccgcgctctcggccctgcaagatgcccctgaagctgcgggggaagaagaaggccaagtccaaggagaccgccgggctggtggagggcgagccgacgggcgcgggcggcgggagcctctcagcgtcccgggctcccgcacgcaggctggtcttccacgcgcagctggcgcacggtagtgccacgggccgagtggagggcttctccagcatccaggagctctacgcccagatcgcgggcgcgtttgaaatctcgccgtcggagatcttatattgcactttaaacacacctaaaattgacatggaaagactcttaggaggacaactaggactagaagatttcatatttgcccatgtgaaaggaatcgaaaaagaagtgaatgtgtataaatctgaggattcacttggtctcaccattacagataatggtgttggctatgcttttataaagagaattaaagatggtggtgttattgactcagttaaaacaatctgtgttggggatcatattgaatccataaatggagaaaatattgttgggtggcgtcactatgatgttgctaagaagttaaaggaattaaaaaaggaggaactctttactatgaagttaatagaacctaagaaggcatttgaaatagagctgaggtcaaaggctggaaagtcatcaggagaaaaaattggttgtggaagggcaacacttcgcctgagatcaaaaggtcctgccaccgtggaagaaatgccttctgaaaccaaagcaaaggcaattgaaaagattgatgatgttcttgagttgtacatgggaattcgagatattgatttagccaccacaatgtttgaagctggaaaggacaaagtaaatccagatgaatttgctgtggcacttgacgaaactcttggagactttgcgttcccagacgaatttgtctttgatgtttggggagtcattggtgatgccaaacgaagaggattatgatgtgtacactccatctctgaagaaacaacccatcgttcttttttttctcttttttaaaaagtcctataagatctgtttttggacacctttactaactctggtttaatttcatgtgtatggaatatattctttgaaatataattttggtaattttgatttctgggcactttttaacattgctgatgtagtatgcttaagagaaatgacctaaataaggatcaattgtaatattcattcaaaaggtttttaaaagtaagttttaaggagtatttctcgacagatgattttcttctccattaatacccatgctttgtttttcacatataaatagatgatttcaatagctttgtagttttttttcaaaatcttaatgtaaactaggattggagtatgatttacctcatagtatcttcactgtgttatcctagtttgaacaggatatgttcaggaaatgaaaggtgaattatgccccttattggtctagaagcattggtttttttttgatcctctgagtaagggaaggaagattcctgtggcatgttgatttctatggccaactttctctctttgtaaaacaaagattgattgattttcttgtatgcttctttatacatgctcttaaaacttgtggttgaaatctgtgctgtgtgtgtgtgtctctgcatgtgtaaaagaagggtaaaaaagagatgggtagggtagaactacttgcatttgatttttttttcagtccttaaaacattatttctttttttcactcatagccacttttatgttaccttttataagcactccagggaagattttatatttttttgtagagtttttggaaagatatttactcaaaataactatgctttagaactttttttttttttttttttttggttaaacagcagcactttttagttccctaaactttagaagaaatgctatcagaaatagatttccttccagtggaaagaaaggaggaagggagaattgagaaaatatattagtctattattttagagttctaatacactctaaattaaagagaaaattgagagtaaatgactgtcttatcactcttatttgacatttcgtaggtgtaagagaaatggaaatgaatggtttcaacaaagatcatttaatacagcagagcatggcatgaccaagcatctttgtaaagtgttagatggaaaatgctgtgtgctgccatggtaatcagaaataataacctgttagggatgtattctaggaaatcagaagtagttctcttttcttgctggattattgcttagataactcttgttttctggtaaaactttagttgtattgccatccactcctttttcaaatgagtttaatgccataaagctgatattctttgtccgattaatttgaaatctgcacagaagctgttttagtcattaatgtgtaacaaaagtagcttatagaatatggactgccttattgctgttgcttatcatttgaaaataaaatccagctcaggttgtaacttgttggtactcgtttagtgagttcgttttggaggttctgaaatacctattaattcttaatattacctctcttggaaagacacaaaaaaagagctgttatttttaggcataagatgacttaggaggcccatagaaacattctcgtttaaacaacaacaacaaaataaatttatcagcactag

SEQ ID NO: 6524 - protein, 315 aa, Homo sapiens; identical to SEQ ID NO: 264

SEQ ID NO: 6525 - DNA, 2633 bp, Homo sapiens
gggcgggcggctgctccggtccaggggtggaggtcggggccctgacccgacgcagccaggcggaagcgcggctgccattggaggctgcttttacctgcgcggggcccggggcgcaaagtccgaggcgccggggggaggaggcggcggacggcagcgcaggtgggcccgcgctctcggccctgcaagatgcccctgaagctgcgggggaagaagaaggccaagtccaaggagaccgccgggctggtggagggcgagccgacgggcgcgggcggcgggagcctctcagcgtcccgggctcccgcacgcaggctggtcttccacgcgcagctggcgcacggtagtgccacgggccgagtggagggcttctccagcatccaggagctctacgcccagatcgcgggcgcgtttgaaatctcgccgtcggagatcttatattgcactttaaacacacctaaaattgacatggaaagactcttaggaggacaactaggactagaagatttcatatttgcccatgtgaaaggaatcgaaaaagaagtgaatgtgtataaatctgaggattcacttggtctcaccattacagataatggtgttggctatgcttttataaagagaattaaagatggtggtgttattgactcagttaaaacaatctgtgttggggatcatattgaatccataaatggagaaaatattgttgggtggcgtcactatgatgttgctaagaagttaaaggaattaaaaaaggaggaactctttactatgaagttaatagaacctaagaaggcatttgaaatagagctgaggtcaaaggctggaaagtcatcaggagaaaaaattggttgtggaagggcaacacttcgcctgagatcaaaaggtcctgccaccgtggaagaaatgccttctgaaaccaaagcaaaggcaattgaaaagattgatgatgttcttgagttgtacatgggaattcgagatattgatttagccaccacaatgtttgaagctggaaaggacaaagtaaatccagatgaatttgctgtggcacttgacgaaactcttggagactttgcgttcccagacgaatttgtctttgatgtttggggagtcattggtgatgccaaacgaagaggattatgatgtgtacactccatctctgaagaaacaacccatcgttcttttttttctcttttttaaaaagtcctataagatctgtttttggacacctttactaactctggtttaatttcatgtgtatggaatatattctttgaaatataattttggtaattttgatttctgggcactttttaacattgctgatgtagtatgcttaagagaaatgacctaaataaggatcaattgtaatattcattcaaaaggtttttaaaagtaagttttaaggagtatttctcgacagatgattttcttctccattaatacccatgctttgtttttcacatataaatagatgatttcaatagctttgtagttttttttcaaaatcttaatgtaaactaggattggagtatgatttacctcatagtatcttcactgtgttatcctagtttgaacaggatatgttcaggaaatgaaaggtgaattatgccccttattggtctagaagcattggtttttttttgatcctctgagtaagggaaggaagattcctgtggcatgttgatttctatggccaactttctctctttgtaaaacaaagattgattgattttcttgtatgcttctttatacatgctcttaaaacttgtggttgaaatctgtgctgtgtgtgtgtgtctctgcatgtgtaaaagaagggtaaaaaagagatgggtagggtagaactacttgcatttgatttttttttcagtccttaaaacattatttctttttttcactcatagccacttttatgttaccttttataagcactccagggaagattttatatttttttgtagagtttttggaaagatatttactcaaaataactatgctttagaactttttttttttttttttttttggttaaacagcagcactttttagttccctaaactttagaagaaatgctatcagaaatagatttccttccagtggaaagaaaggaggaagggagaattgagaaaatatattagtctattattttagagttctaatacactctaaattaaagagaaaattgagagtaaatgactgtcttatcactcttatttgacatttcgtaggtgtaagagaaatggaaatgaatggtttcaacaaagatcatttaatacagcagagcatggcatgaccaagcatctttgtaaagtgttagatggaaaatgctgtgtgctgccatggtaatcagaaataataacctgttagggatgtattctaggaaatcagaagtagttctcttttcttgctggattattgcttagataactcttgttttctggtaaaactttagttgtattgccatccactcctttttcaaatgagtttaatgccataaagctgatattctttgtccgattaatttgaaatctgcacagaagctgttttagtcattaatgtgtaacaaaagtagcttatagaatatggactgccttattgctgttgcttatcatttgaaaataaaatccagctcaggttgt

SEQ ID NO: 6526 - protein, 315 aa, Homo sapiens; identical to SEQ ID NO: 264

SEQ ID NO: 6527 - DNA, 241 bp, Homo sapiens
tttgcagatcttatattgcactttaaacacacctaaaattgacatggaaagactcttaggaggacaactaggactagaagatttcatatttgcccatgtgaaaggaatcgaaaaagaagtgaatgtgtataaatctgaggattcacttggtctcaccattacagataatggtgttggctatgcttttataaagattcttatctgctgcctctgatagtgaaatgtgctgtgacttttctct

SEQ ID NO: 6528 - protein, 56 aa, Homo sapiens
MERLLGGQLGLEDFIFAHVKGIEKEVNVYKSEDSLGLTITDNGVGYAFIKILICCL

SEQ ID NO: 6529 - DNA, 455 bp, Homo sapiens
gttggagcaggctggaaggcgtaggcctcagggtcagtggagtctcaagttctcctttcttgcagcctcctgtgacactcgtggactggcacagaactagatgtaccctagagctatgctcatgctatgggaccccacccatgtctctccttttatgggacaagcataagcatatccttaatagggaaaatgaacaccaaggctctggcagcaggcaggatgagcataggtgccagctggttggaagcttgtgagaaaacagtggctgcccagaacacttggaaacctgggaggactgtgtattagtccattctttcactgctataaatatgctacctgaaactgggtaatttataaagaaaggatgcttaattgagtcacagttttgctggctagggaggcctcaggaaaatgtgagtcaattaaacctctttactttataaattacccagtct

SEQ ID NO: 6530 - protein, 59 aa, Homo sapiens [sequence omitted]

SEQ ID NO: 6531 - DNA, 1993 bp, Homo sapiens
attgctgatttggtaaccacctcagagcctaccctatttattcccagcatggacctaaatccacttcagccaaaaatgaacaaagaaatgatgaagaacagagcctgtttctttctcagtggtgtactcagaaaatggatgcaagagtagaagctgatcctcgaggcttgcaaaagtggggttctttctgaaagtgaagccagcagccaagagccacccttcagaagatagaaggaagagcagctgcatgagtgatggccacagcaatgcatgggtcctgtctgtccacgtagtcctctccatctgcccgtagcttgccaggtctcctacccacactggggaaattccagctgccggccctctttgggttgcacctcccctttttgcacagggctctattgggaaagcagctgtcatgtgtctatttgaaagacaagaaaccagtctagttatagaaaagagatttagattacatcagaataacaatgcaaatcatttgtgcagttcttagtacagaaaacagatttaggaacaaaaattgggagggttaaagaaagtggttttttattctgtcatcaaaattgttttttaaaaacacatctgtagtaagataaataattgtgtgccgacttcataaacagaatgaatgactgaattcacacaatgttatttactgtttcagggcacacacacatggtttccaagtggtttcttgccactttggccttcaactggccttgctattttccattgaggggtgtctgattgtctcctccacagccctgagtctaagcaaaagcccatgggttggttgactggtgttcttgttgtccttggaagtggacagactggcagatgtggggctagtggggaagattctcgtaaacactttatttgttgtaagaactccagttggaatgtggcttccaatcatgggaggaggactgctttagaacaggaaactttctataataataccaatacaaccaaagactattattctgaacagaaaacaagaaatacagctggagctatttcctatctacctgatgaagggcactaccaggcggtcactctggctctgtccaccgatgcctgtgcccactttgtgcgacgtagcttccatggagacaagagcaatggtaatggaagaagaaagtctggatgtactcttgcagaagcagaaagcttcatggaacaatattaatcttctggtcatctctgtgctggtctagttgcccataaagttgtcagattgactttggatttaaagcctgaaaatgagtcccaaggaaatccgttgacatgaggcccaaggaagacagtttttggaaggggcaaggagggacagttctctgctccactgaagctaggtatggccatgtgacccatgttgccagtgaaacaggaggagaagggacatctgggtggaaacatttaagagtcaagtgtatttctccatactctctttctttggctttggcagtgatgaaggtcaatccaattacagttgattcttgaacaacagaggtttgaactgtgtgggtcaacctatacgtggattttcttctgcctctgccacctctgagacagcaagaccaatccttccttttcctccttctcctcagcctatacaatgtaaaaatgacaaggatgaagacctttatgatgattcacgtccacttaatgaacaacgtacctttcacttcccaccatgattctgaggcctcccgagccatgtggaactgtaagtgcaattaaacctctttttcttcccagtcttgggtatgtctttatcagcagtgtgaaaatggactaatacagtaaataggtaccagtagagtggggcattgctgaaaagatatctgaaaatgtggaagcaacttttgaactgggtaacaggcagaggttggaagagtttggagggctcagaagaagacaggaaaatgtgggaaagtttggaacttctagagatttgttgaatggctttgac

SEQ ID NO: 6532 - protein, 134 aa, Homo sapiens; identical to SEQ ID NO: 266

SEQ ID NO: 6533 - DNA, 1166 bp, Homo sapiens
agagcctaccctatttattcccagcatggacctaaatccacttcagccaaaaatgaacaaagaaatgatgaagaacagagcctgtttctttctcagtggtgtactcagaaaatggatgcaagagtagaagctgatcctcgaggcttgcaaaagtggggttctttctgaaagtgaagccagcagccaagagccacccttcagaagatagaaggaagagcagctgcatgagtgatggccacagcaatgcatgggtcctgtctgtccacgtagtcctctccatctgcccgtagcttgccaggaaactttctataataataccaatacaaccaaagactattattctgaacagaaaacaagaaatacagctggagctatttcctatctacctgatgaagggcactaccaggcggtcactctggctctgtccaccgatgcctgtgcccactttgtgcgacgtagcttccatggagacaagagcaatggtaatggaagaagaaagtctggatgtactcttgcagaagcagaaagcttcatggaacaatattaatcttctggtcatctctgtgctggtctagttgcccataaagttgtcagattgactttggatttaaagcctgaaaatgagtcccaaggaaatccgttgacatgaggcccaaggaagacagtttttggaaggggcaagcataatgatttggaatgatgcctaataaaataaatggttgaccagaagattaataatgtgttggtttctcaatagaagaggaggaaaacatgtttttaagattcttaccaataaggctcactccacccagtcctgtgactcatgactcacctccaatcaagagatggactcagctcatgaggaccattttccatacccctatgactgcctccgcaaccaaccagcaacacccatcacctagtcacctgcccaccatactatccttgaaaatctctaatcttcaagccttcagggagactgatttgaaacaaaagggaccctagaaatcttcagccatccaaaagaaggcaaaaaaaagagtatcaaggaaagaggatggcaaacagaaaatgtaaaagaagatggtagaaatcacttcaagttggtaatcacaatatatgtaaatatattaaacacatccattaaaaggctatgtgattagatt

SEQ ID NO: 6534 - protein, 99 aa, Homo sapiens
MGPVCPRSPLHLPVACQETFYNNTNTTKDYYSEQKTRNTAGAISYLPDEGHYQAVTLALSTDACAHFVRRSFHGDKSNGNGRRKSGCTLAEAESFMEQY

SEQ ID NO: 6535 - DNA, 1711 bp, Homo sapiens
catgaggaaatgtagctgtatgcctggagggatctacagccagaccagccaactcagcctggttaagaacacctgttgaagaactagtgcaggcgtttggaggacataggacactctggccatatgtctggactgcaatcctgcacagttttgagagggagatgacttgagtggttggcttttatctccacaacaatgtccatgaacaattccaaacagctagtgtctcctgcagctgcgcttctttcaaacacaacctgccagacggaaaaccggctttccgtatttttttcagtaatcttcatgacagtgggaatcttgtcaaacagccttgccatcgccattctcatgaaggcatatcagagatttagacagaagtccaaggcatcgtttctgcttttggccagtggcctggtaatcactgatttctttggccatctcatcaatggagccatagcagtatttgtatatgcttctgataaagaatggatccgctttgaccaatcaaatgtcctttgcagtatttttggtatctgcatggtgttttctggtctgtgcccacttcttctaggcagtgtgatggccattgagcggtgtattggagtcacaaaaccaatatttcattctacgaaaattacatccaaacatgtgaaaatgatgttaagtggtgtgtgcttgtttgctgttttcatagctttgctgcccatccttggacatcgagactataaaattcaggcgtcgaggacctggtgtttctacaacacagaagacatcaaagactgggaagatagattttatcttctacttttttcttttctggggctcttagcccttggtgtttcattgttgtgcaatgcaatcacaggaattacacttttaagagttaaatttaaaagtcagcagcacagacaaggcagatctcatcatttggaaatggtaatccagctcctggcgataatgtgtgtctcctgtatttgttggagcccatttctggttacaatggccaacattggaataaatggaaatcattctctggaaacctgtgaaacaacactttttgctctccgaatggcaacatggaatcaaatcttagatccttgggtatatattcttctacgaaaggctgtccttaagaatctctataagcttgccagtcaatgctgtggagtgcatgtcatcagcttacatatttgggagcttagttccattaaaaattccttaaaggttgctgctatttctgagtcaccagttgcagagaaatcagcaagcacctagcttaataggacagtaaatctgtgtggggctagaacaaaattaagacatgtttggcaatatttcagttagttaaatacctgtagcctaactggaaaattcaggcttcatcatgtagtttgaagatactattgtcagattcaggttttgaaatttgtcaaataaacaggataactgtacatttttcacttgtttttgccaatgggaggtagacacaataaaataatgccatgggagtcacactgaaagcaattttgagcttatctgtcttatttatgctttgagtgaatcatctgttgaggtctaatgcctttacttggcctatttgccagagaacatcttaatgcagcctgcatagtgaaatggttattttgagatcaccgctctgtagctaacccttataaactaggctcagtaaaataaagcactcttatttttt

SEQ ID NO: 6536 - protein, 359 aa, Homo sapiens
MSMNNSKQLVSPAAALLSNTTCQTENRLSVFFSVIFMTVGILSNSLAIAILMKAYQRFRQKSKASFLLLASGLVITDFFGHLINGAIAVFVYASDKEWIRFDQSNVLCSIFGICMVFSGLCPLLLGSVMAIERCIGVTKPIFHSTKITSKHVKMMLSGVCLFAVFIALLPILGHRDYKIQASRTWCFYNTEDIKDWEDRFYLLLFSFLGLLALGVSLLCNAITGITLLRVKFKSQQHRQGRSHHLEMVIQLLAIMCVSCICWSPFLVTMANIGINGNHSLETCETTLFALRMATWNQILDPWVYILLRKAVLKNLYKLASQCCGVHVISLHIWELSSIKNSLKVAAISESPVAEKSAST

SEQ ID NO: 6537 - DNA, 580 bp, Homo sapiens
acaggttcaagtgatcttcccacctcagcctcccaggtagctgggactataagcgaagaccaccacacttggctattttttttttcagtagagatggggtttcactatgttgcccaggcttgtctccaactcatgagttcaagcaatctgcccatcttggcctccaaaagtgctgagatttacagataacaaaatcctggaaaagagatgccaagtaacttttccaagatcaatgatctagtaactggcagagctgggtgcaaaccaaagtggtctgactttggaactaatatatgaaatataaatcatcttttaagtggagtggcccaagaacactttatatatgacctatagaaagaacactcaactctttcctgaaaaacagtaccaagttgaaggctgaagagggagtgaataaatggaaaagtatttttttcttaggtaagaagactatattgcacatgtacacaaattatgttatgtaccatttgttacacaaacattttcaatagcaatgactgagaataccctgagattccatctgtaaatggacagtataaataaatgtggtatattcata

SEQ ID NO: 6538 - protein, 31 aa, Homo sapiens
MGFHYVAQACLQLMSSSNLPILASKSAEIYR

SEQ ID NO: 6539 - DNA, 1616 bp, Homo sapiens
ggcgcgcgtcgagaggcgacggcgggctggcctggcgcgctgcggcgctcgctcacccgctcccgaggaagggcagtgggccccgccgccgcctcccaatggcgaggctgcgggattgcctgccccgcctgatgctcacgctccggtccctgctcttctggtccctggtctactgctactgcgggctctgcgcctccatccacctgctcaaacttttgtggagcctcggcaaggggccggcgcagaccttccggcggcccgcccgggagcaccctcccgcgtgcctgagcgacccctccttgggcacccactgctacgtgcggatcaaggattcagggttaagatttcactatgttgctgctggagaaagaggcaaaccacttatgctgctgcttcatggatttccagaattctggtattcttggcgttaccaactgagagaatttaaaagtgaatatcgagttgtagcactggatttgagaggttatggagaaacagatgctcccattcatcgacagaattataaattggattgtctaattacagatataaaggatattttagattctttagggtatagcaaatgtgttcttattggccatgactgggggggcatgattgcttggctaattgccatctgttatcctgaaatggtgatgaagcttattgttattaacttccctcatccaaatgtatttacagaatatattttacgacaccctgctcagctgttgaaatccagttattattacttcttccaaataccatggttcccagaatttatgttctcaataaatgatttcaaggttttgaaacatctgtttaccagtcacagcactggcattggaagaaaaggatgccaattaacaacagaggatcttgaagcttatatttatgtcttttctcagcctggagcattaagtggcccaattaaccattaccgaaatatcttcagctgcctgcctctcaaacatcacatggtgaccactccaacactactactgtggggagagaatgacgcattcatggaggttgagatggctgaagtcacaaagatttatgttaaaaactatttcaggctaactattttgtcagaagccagtcattggcttcagcaagaccaacctgacatagtgaacaaattgatatggacatttctaaaagaagaaacaagaaaaaaagattgacttttctttatcttctatgaagggtctgtaatgaaatctctaaataatttttaaaaattgttcatcaacttctttatgttttattagaaaaaaactgttttaatgtgctttatcataaataaatatcctgacaaatggtattgaaaaaaatctgagatcatgtgaacatataatacaatgttgattttcttctggtgtattttgcacagacaagcatctgccttaaaatatatacacttgtacaaaaaggaagtttggagtaagtgcttccattttggtttcttgcttttttttactctgttaacatatggtgccttttacaaatgtatattaaagattagctgtgccatattataaggcaaacctgaaataatataaattttcattctattgttcaaaaattctttttactatttttaaccattaaaa

SEQ ID NO: 6540 - protein, 362 aa, Homo sapiens
MARLRDCLPRLMLTLRSLLFWSLVYCYCGLCASIHLLKLLWSLGKGPAQTFRRPAREHPPACLSDPSLGTHCYVRIKDSGLRFHYVAAGERGKPLMLLLHGFPEFWYSWRYQLREFKSEYRVVALDLRGYGETDAPIHRQNYKLDCLITDIKDILDSLGYSKCVLIGHDWGGMIAWLIAICYPEMVMKLIVINFPHPNVFTEYILRHPAQLLKSSYYYFFQIPWFPEFMFSINDFKVLKHLFTSHSTGIGRKGCQLTTEDLEAYIYVFSQPGALSGPINHYRNIFSCLPLKHHMVTTPTLLLWGENDAFMEVEMAEVTKIYVKNYFRLTILSEASHWLQQDQPDIVNKLIWTFLKEETRKKD

SEQ ID NO: 6541 - DNA, 666 bp, Homo sapiens
gctgctgcttcatggatttccagaattctggtattcttggcgttaccaactgagagaatttaaaagtgaatatcgagttgtagcactggatttgagaggttatggagaaacagatgctcccattcatcgacagaattataaattggattgtctaattacagatataaaggatattttagattctttaggtaggttagtttgaaacaaaacaactctttttaagggacaaacattcaacaaattgtgaatcaatgacttcttttcttgggaggatgcatattccatctacccaaattatctggatcctgtcactatggtttcagttagtcagcccaaaatatctgtacaggaaatttaaaatgatgcatctagagcaactattctgtctaccagccaagaatgacttttcagatttgtttttaaacatagacctaatggcccgggtgctgtggcttgcgcctataatcccagcactttgagaggctgaggcgggcagatcacctgaggtcagagtttaagaccagcctgaccaacatgttgaaaccctgtctctactaaaaatacaaaaattagccaggcgtgaacccaggagatggaggttgcagtgagctaagatcgtgccgttgcactccaacctgggcaacaagaatgagactctgtttaaaa

SEQ ID NO: 6542 - protein, 75 aa, Homo sapiens
MTSFLGRMHIPSTQIIWILSLWFQLVSPKYLYRKFKMMHLEQLFCLPAKNDFSDLFLNIDLMARVLWLAPIIPAL

SEQ ID NO: 6543 - DNA, 949 bp, Homo sapiens
atggcccctaaacgccagtctccactcccacttcaaaagaagaaaccaagaccacctcctgctctgggactggaggagacatcggcctctgcaggcttgccgaagaagggagaaaaagaacagcaagaagcaattgaacacattgatgaagtacaaaatgaaatagacagacttaatgaacaagacagtgaggagattttgaaagtagaacagaaatataacaaactccgccaaccattttttcagaagaggtcagaattgatcgccaaaatcccaaattttggggtaacaacatttgtcaaccatccacaagtgtcttcactgcttggggaggaggacgaagaggcactgcattatttgactaaagttgaagtgacagaatttgaagatattaaatcaggttacagaatagatttttattttgatgaaaatccttactttgaaaataaagttttctccaaagaatttcatctgaatgagagtggtgatccatcttcaaagtccaccaaaatcaaatggaaatctggaaaggatgtgacgaaacgttcaagtcaaacgcagaataaagccagcaggaagaggcagcatgaggaaccagagagcttctttacctggtttactgatcattctgatgcaggtgctgatgagttagaagaggtcatcaaagatgatatttggccaaacccattacagtattacttggttcctgatatggatgatgaagaaggaggagaagatgatgatgatgatgatgatgatggtgatgaaggggaggaagaattagaagatattgatgaaggggatgaggatgaaggtgaagaagatgaagatgatgatgaaggggaggaaggagaggaggatgaaggagaagatgactaatagaacactgatggactccaaccttccttttttaaaattttctccagccctgggagcaagttgcagtctt

SEQ ID NO: 6544 - protein, 292 aa, Homo sapiens; identical to SEQ ID NO: 4311

SEQ ID NO: 6545 - DNA, 1594 bp, Homo sapiens
gccggcagaagtaaacagagcgagtacgcctgcgcacgctcttcctgggtcaagagccggctcggttctgggattctgaggctccccaccgcggtccggcttctctgggagactgtctacaaaccgacgagaggcgtcaaccttttaccctagggggcggatttgggtaggagccgagcgttcggtcggaaacgcccccttcttcctcctgggcggggcaagtgaggccaagtactgggcctccagggcgtcgtacctctgtgagacatggctcgctgtggggaaggcagtgcggcccccatggtacttctggggtccgctggagtttgcagtaaggggttgcaaaggaaggggccgtgtgagcggcgccggctgaaggcgacggtgtcggagcagctcagccaggatttgctcaggcttctaagggaagaattccatacagatgttaccttctctgtgggttgtactttgttcaaagcacacaaagcagtccttttagcaagagttcctgacttctattttcatactattggacagacatcaaatagtttaacaaatcaggagcctattgctgtggagaatgttgaagctttagaatttagaacgtttttacagattatatattcatcaaacagaaacataaaaaactatgaagaggaaattcttaggaaaaagataatggagattgggatatcacaaaagcaacttgacatcagttttccaaagtgtgaaaactcatctgattgttctcttcagaagcatgaaattccagaggatatcagtgacagagatgatgatttcatttccaatgataattatgacttggagcctgcatctgaattaggagaagatttattgaagctttatgtgaaaccttgttgcccagatattgatatttttgttgatggaaaacgttttaaagctcacagggccattttgagtgccagatctagttattttgctgcaatgctgagtggctgttgggctgaaagctcccaagagtacgttactcttcaaggtataagccatgtagaactgaatgttatgatgcattttatatatggaggaactctggacattccagacaaaactaatgttgggtatgtattcctttttaataatttaaaatataaaagagttaggttctgctttgttgagctgtgttgcaaagtgttaatgaagtagaaactttgctttttatagtctattatactatatcttcagtaggttttgagaacatctaaaaacaataagcaaatcatcttatttagaagaaaaggtgacttatcaactcacagtaataagattgagaacagtctttattagacttaaatttagaagaagctataaattatggtttatagatcaataaattgattaaacttttatcaaactttaaaaattactactttttaaattttaggatatcttttctaaacagcaaaagaaaagaaaaaacatagttaagaatataggggctgggtgcggtggctctcgcctgtaatcccagcactttgtgaggctgaggcggacggatcacaagatcaagagatcgagaccatcctggctaacatggtgaaacctcgtctctact

SEQ ID NO: 6546 - protein, 305 aa, Homo sapiens
MARCGEGSAAPMVLLGSAGVCSKGLQRKGPCERRRLKATVSEQLSQDLLRLLREEFHTDVTFSVGCTLFKAHKAVLLARVPDFYFHTIGQTSNSLTNQEPIAVENVEALEFRTFLQIIYSSNRNIKNYEEEILRKKIMEIGISQKQLDISFPKCENSSDCSLQKHEIPEDISDRDDDFISNDNYDLEPASELGEDLLKLYVKPCCPDIDIFVDGKRFKAHRAILSARSSYFAAMLSGCWAESSQEYVTLQGISHVELNVMMHFIYGGTLDIPDKTNVGYVFLFNNLKYKRVRFCFVELCCKVLMK

SEQ ID NO: 6547 - DNA, 1410 bp, Homo sapiens
gcgcacgctcttcctgggtcaagagccggctcggttctgggattctgaggctccccaccgcggtccggcttctctgggagactgtctacaaaccgacgagaggcgtcaaccttttaccctagggggcggatttgggtaggagccgagcgttcggtcggaaacgcccccttcttcctcctgggcggggcaagtgaggccaagtactgggcctccagggcgtcgtacctctgtgagacatggctcgctgtggggaaggcagtgcggcccccatggtacttctggggtccgctggagtttgcagtaaggggttgcaaaggaaggggccgtgtgagcggcgccggctgaaggcgacggtgtcggagcagctcagccaggatttgctcaggcttctaagggaagaattccatacagatgttaccttctctgtgggttgtactttgttcaaagcacacaaagcagtccttttagcaagagttcctgacttctattttcatactattggacagacatcaaatagtttaacaaatcaggagcctattgctgtggagaatgttgaagctttagaatttagaacgtttttacagattatatattcatcaaacagaaacataaaaaactatgaagaggaaattcttaggaaaaagataatggagattgggatatcacaaaagcaacttgacatcagttttccaaagtgtgaaaactcatctgattgttctcttcagaagcatgaaattccagaggatatcagtgacagagatgatgatttcatttccaatgataattatgacttggagcctgcatctgaattaggagaagatttattgaagctttatgtgaaaccttgttgcccagatattgatatttttgttgatggaaaacgttttaaagctcacagggccattttgagtgccagatctagttattttgctgcaatgctgagtggctgttgggctgaaagctcccaagagtacgttactcttcaaggtataagccatgtagaactgaatgttatgatgcattttatatatggaggaactctggacattccagacaaaactaatgttggtcagatactcaatatggctgatatgtatggactagaaggattaaaagaagtagcaatctatattttaagaagagattactgtaatttctttcagaagcctgttcccagaacattgacgtctatactagaatgcctgattattgctcattcagttggagtggaaagtctttttgctgactgcatgaagtggattgtaaagcattttgcaaggttttggtctgagagaagctttgcaaatatacctcctgagattcagaaaagttgtcttaatatgttgattcagtccttagtaagtataacctgaatactcttttgtgtgtttgccattaaaaagtttattc

SEQ ID NO: 6548 - protein, 378 aa, Homo sapiens
MARCGEGSAAPMVLLGSAGVCSKGLQRKGPCERRRLKATVSEQLSQDLLRLLREEFHTDVTFSVGCTLFKAHKAVLLARVPDFYFHTIGQTSNSLTNQEPIAVENVEALEFRTFLQIIYSSNRNIKNYEEEILRKKIMEIGISQKQLDISFPKCENSSDCSLQKHEIPEDISDRDDDFISNDNYDLEPASELGEDLLKLYVKPCCPDIDIFVDGKRFKAHRAILSARSSYFAAMLSGCWAESSQEYVTLQGISHVELNVMMHFIYGGTLDIPDKTNVGQILNMADMYGLEGLKEVAIYILRRDYCNFFQKPVPRTLTSILECLIIAHSVGVESLFADCMKWIVKHFARFWSERSFANIPPEIQKSCLNMLIQSLVSIT

SEQ ID NO: 6549 - DNA, 681 bp, Homo sapiens
ggaaaacgttttaaagctcacagggccattttgagtgccagatctagttattttgctgcaatgctgagtggctgttgggctgaaagctcccaagagtacgttactcttcaaggtataagccatgtagaactgaatgttatgatgcattttatatatggaggaactctggacattccagacaaaactaatgttggtcagatactcaatatggctgatatgtatggactagaaggattaaaagaagtagcaatctatattttaagaagagattactgtaatttctttcagaagcctgttcccagaacattgacgtctatactagaatgcctgattattgctcattcagttggagtggaaagtctttttgctgactgcatgaagtggattgtaaagcattttgcaaggttttggtctgagagaagctttgcaaatatacctcctgagattcagaaaagttgtcttaatatgttgattcagtccttattgtgggtggctggagcctgtctgcagctaaggacccaaggttggaaccaaccctggacaggataccattccagcgcagggtgcactcacagcacagaacactcacttatactgggacattgtagagatgccagttcactaaatgtgcacatctttgggatgtgggaggaaactggagtgtccagagaaaacccatgc

SEQ ID NO: 6550 - protein, 206 aa, Homo sapiens
MLSGCWAESSQEYVTLQGISHVELNVMMHFIYGGTLDIPDKTNVGQILNMADMYGLEGLKEVAIYILRRDYCNFFQKPVPRTLTSILECLIIAHSVGVESLFADCMKWIVKHFARFWSERSFANIPPEIQKSCLNMLIQSLLWVAGACLQLRTQGWNQPWTGYHSSAGCTHSTEHSLILGHCRDASSLNVHIFGMWEETGVSRENP

SEQ ID NO: 6551 - DNA, 4562 bp, Homo sapiens
atggcgtctcagcttcaagaaaaatgtattgcatttattgtagacaacttctccaagattattcagagtgaaaattttgctcttcttttacagtcacaagcaatgagcagcacagccgatctgttggacacaattttaaaagcaattgaagaaaatatcaccactgaaaatagctgctctcttcttatggctctggacacactgctgaactctgacagtacaaaggaaatgggttttacgtgcaagatccaggctctgcgtgataagctgtggatcttcctggttcagtctttctatgctgttcgtcacacagaaagctggaagctgatgagcacagatgatcaacagaaaatccaagcagctgcatttgacaaaggtgatgatcgaagacttggcaaaaagcctatattcagtagctcgcagcaaaggaaacaagtttctgactctggtgatataaaaatcaaatcttggaggggaaataacaagaaagagtgttggagttatctctctactaataaaaagatgaaatctgatggattaggagcatctggacattcgtcaagtaccaatagaaatagtataaataaaactctgaagcaagatgatgtaaaggaaaaagatggtacaaaaatagcatctaagattacaaaagaactaaaaactgggggaaaaaatgtttctggaaagcccaaaactgtaacaaaatccaaaacagaaaatggtgataaggcacggttggaaaacatgtcacctagacaagttgtagaaagatcagcaacagcagcagcagcagcaactggacagaagaatttactaaatggaaaaggagtgagaaatcaggaagggcaaatttcaggtgccagacccaaggtactcacaggaaacttaaatgtgcaagccaaagcaaagcctttgaagaaagctacagggaaggattcaccatgcctcagcatcgcaggaccctccagcagatccacagattcaagtatggaattctcaatttccactgaatgtctggatgaaccgaaagaaaatggatcaacagaagaagaaaagccttctggacataaactatccttttgtgattctccaggacagatgatgaaaaacagtgtagatagtgtcaaaaattccactgtagccataaaatctcgacctgtttcaagagttaccaatggaacttccaataaaaaaagtattcatgaacaagacactaatgtaaataacagtgtactaaagaaagtcagtggcaaaggatgtagtgagccagtaccacaggcaattttgaagaaaagaggaactagcaatggatgtactgcagctcagcagaggacaaagagtaccccatctaatcttactaaaactcaaggatcccaaggagagtcaccaaactcagtaaaatcttcagtctcttcaaggcagtctgatgaaaatgtggcaaagttggaccacaatacaactacagagaaacaagcacctaagagaaaaatggtcaagcaagtacacacagctttgcctaaggttaatgcaaaaatagtggcaatgcctaaaaatctaaatcagtcaaagaaaggtgaaactttgaataataaagattcaaaacagaaaatgcctcctggacaggttatatcaaaaactcagccttcctcccaaagacctttaaaacatgaaacatctactgtccaaaaaagtatgtttcatgatgtgcgtgataataacaacaaggacagtgtttctgaacagaagcctcacaaacctctcattaatcttgcatctgaaataagtgatgcagaagcactccagtcatcctgcaggcctgacccacaaaagccattaaacgatcaagaaaaagagaagttggcgttagaatgccaaaatatttcaaagctggataaatcattaaaacacgaactggaatcaaaacagatttgtttagataaaagtgaaacaaaatttcccaatcacaaagaaacagatgattgcgatgcagctaacatatgttgtcattctgttgggagtgataatgtaaattcaaaattttatagcaccacagccctaaaatacatggtttcaaatccaaatgaaaactccttgaactctaatccagtttgtgatttagactcaacaagtgcagggcaaatccatttgatatcagatagggagaaccaagtagggagaaaagatacaaacaaacaatcaagtattaaatgtgtggaagatgtttcactgtgtaatcctgaaaggacaaatggtaccttaaattctgctcaagaagacaaaaaatcgaaagttcctgtggaaggactgacaattcctagtaagttgtcagatgaatctgctatggatgaagacaaacatgctacagcagactcagatgtatcttccaagtgtttttcgggacagctatcagaaaaaaattctcctaaaaatatggaaacatcagaatctccagagagccatgaaactccagaaactccatttgtgggtcactggaatttgagtactggtgttctgcatcagcgagagagtcctgaatctgacactggcagtgctaccacctcctccgatgacataaagcccagatctgaagactatgatgctggagggtctcaggatgatgatgggtcaaatgacagaggtatctctaaatgtggcactatgctgtgccatgattttcttggaagaagtagcagtgataccagtactcctgaagaattaaaaatttatgatagtaatttaagaattgaagtaaaaatgaaaaagcaaagtaataatgatcttttccaagttaattcaacgagtgatgatgaaatccctaggaaaaggccagaaatttggtctcgatctgcaatagttcactctagggaaagagaaaatattccacgaggcagtgtccagtttgctcaggaaatagatcaggtatcttcttcagcagatgaaacagaagatgaaagatctgaagctgaaaacgttgcagaaaatttctctatatctaacccagctcctcagcagtttcagggaataattaatttagcttttgaagatgcaactgaaaatgaatgtcgtgaattttctgcaactaaaaagtttaaaaggtcagttttactttcagtcgatgaatgtgaagagctgggatcagatgaaggagaagtccatactccctttcaggcttctgtagattctttttcaccttctgatgtttttgatggcatttctcatgaacatcatggaaggacctgctattccagattctcacgagaaagtgaagataatattttagaatgtaaacaaaataaaggcaatagtgtatgtaaaaatgaaagcactgtcttggatcttagtagcattgactcttcaagaaaaaataaacagagtgtttcagccacagaaaaaaagaacacaatagacgtcctatccagtagaagcagacagcttcttcgagaagataaaaaagtaaacaatggaagcaatgtggaaaatgacattcagcaacgcagcaaattcttggatagtgatgtaaaatctcaagaaagaccatgtcacttggatcttcatcaaagagaacccaattctgacataccaaagaacagctctacaaaatctctagactcctttcggagtcaagttctgcctcaggaaggtccagtgaaagagagccattctacaactactgaaaaagctaatattgctttatctgcaggagacatagatgattgtgacacactggcacaaacccgcatgtatgaccatcggccttcaaaaaccctgtctccaatatatgagatggatgtaatagaagcatttgagcagaaagtggaatcagaaacacatgttacagatatggattttgaagatgaccaacattttgcaaaacaagattggacactactaaagcaactgctctctgaacaggattcaaacttagatgttacaaattccgttcctgaagacttaagtttagcacagtatctaatcaatcagacactacttttagcacgagatagctcaaaacctcagggtataacacatattgacactttgaacagatggagtgaactaacatctccacttgattcctcagcgagcatcaccatggctagtttttcctctgaagattgttcgcctcaaggcgagtggacaattctggaactggaaactcagcattaagtgttaacattttggaaaaatttatgccactcctttattttttgatgcctatattatatccaaatgataattgcattagccggatataaactttctttaatattgagtctttccaatttaatgaggtaaacatagtttatttattaatatatcacatatagaaaaatgtttttctaaagtttttgagcatgttttctctaattattagagaaattagaagacttataaggaaaccctagcttcagttttcctttcctagctgatgatttgttcacttaatcattattcaagaatttaaaatgtgaatgcagaagtagatcagtccctttactttttgctctgcatagggtaacatagtaatttaacaataaaaacttaccgtgcttgtgtccatt

SEQ ID NO: 6552 - protein, 1388 aa, Homo sapiens; identical to SEQ ID NO: 272

SEQ ID NO: 6553 - DNA, 1315 bp, Homo sapiens
tcctgcctcagcctctcaaagtggtgggataacaaaagttttttttttgctttttaaaaaattcaatgttagcaagagaatgataagtttgggagcttcatatgatgctttagaagtgtaaatttcctttctgataagcagctaagcaagctatatcaggaatgtagctttttggttgttttttgagatggtcttgcgttgttgcccaggctttgagtgcagtggcatgatcatggctcactgcagcctcaacctccctgactcaagcgatcctcccacctcagcctcccaggtagctgcgactacaggcacgcaccactccactcggctaattttttattttttatttttgtagagacagggtcttcctatgttgcccaggccagtctctgaactcctgggctcaagtgatccttctgcatggtggctcacacctataatcccagcctcccaagtagctgggactacaaggcacctactgctgcacttagctttatcttttaactcatattttaaatgtcttctacaaggcacagaaaaataagtagttgtgttcatttttaagtaaatagtagtaaacagtttcaaatgctgtttgagatgttaattaaggcacacacttagactagtccatttgatttgaaaattaggattttatttgtgctttttgttaattactggcttttaaaagatcagtagtggggcagaaactagactagtgggttgaagggtgaataggaaataagtaatacttattctttcaaggagcttgactgaaaaggagacagtggtagtttgaagatattgctgtttttaagataaaaatgatttcagcactttaaaaataaaaagttggaaatgatcaatgaatcaaggatcatcaagaaagaggcaagaggaagtaagattaagcacaaagagtatcaactgataggtggcatttcaaggaacttcaggtgttgaatatctaaagcaccaaatgcgtgtggacagcagtgaagataaagctggaaatgcgccggcagaccaacacatgatgagccctgtaggtggtggacaaagactatgagcaagccatttaggcaaacatctgaagaatttaaaaatcaaaggcaaacaaataggactgtttcattaagatcacttgcattctaacaggttatgatgaatggaaagctgatggttcctggttggaaaaaagataattttcaatttggacatgtcacatttgagatgcagttgacacacccaagatacataatatattgtctttcaaaattcagaaacctaataaaccatgatcttaataaccgcc

SEQ ID NO: 6554 - protein, 57 aa, Homo sapiens
MLPRPVSELLGSSDPSAWWLTPIIPASQVAGTTRHLLLHLALSFNSYFKCLLQGTEK

SEQ ID NO: 6555 - DNA, 830 bp, Homo sapiens
gccccaggcaccctgggcgctctgccctaccggcggcgcctctcactgctcacggaacgttctggaagtttgggaaaccctgagcggtctctgaggacctggtgagcagattgttgcaccattagaagctaggttgatccacagacagatggctgaaagtggaaaagaaaaaataaaatggacaaccaccattattattagctcatctcttaagagttatgaagttgcaactgccctagaaaatcgaagccacaaagttcgatattcagattcagtggaaaatggatcaattatattttctctttctggagttgcatttttattaatggatactaaggaatgtcttctgtcaactgaagaaatatttctagccaaaattgagaaatttattaacattcaccaaaatagttttttggttttgtctgctgccctccatgggcctgaagaatggaaactgatgttcaggattcagcagagattcctgggttgtaacttacgaatacttccagtacacaacacagtaaatgctattaatcttatgtgcactatagcaaagactacctccaaaccatacatagatagcatttgctacagaatgataacagctaaagcttacatcattgagcaaagtcctgtttggaaaacacttcagaagataaaactgaatagtgattcagttaacccaaattagagtaccaacttaatgtttttctcgaagaatgtgaaaataattagacctgttaaattataatattcaaatatctatttaaagacatttatattaatttgaaataataacatatacaattaaaagtgattttattttagga

SEQ ID NO: 6556 - protein, 180 aa, Homo sapiens; identical to SEQ ID NO: 274

SEQ ID NO: 6557 - DNA, 428 bp, Homo sapiens
gaaaccctgagcggtctctgaggacctggtgagcagattgttgcaccattagaagctaggttgatccacagacagatggctgaaagtggaaaagaaaaaataaaatggacaaccaccattattattagctcatctcttaagattcctgggttgtaacttacgaatacttccagtacacaacacagtaaatgctattaatcttatgtgcactatagcaaagactacctccaaaccatacatagatagcatttgctacagaatgataacagctaaagcttacatcattgagcaaagtcctgtttggaaaacacttcagaagataaaactgaatagtgattcagttaacccaaattagagtaccaacttaatgtttttctcgaagaatgtgaaaataattagacctgttaaattataatattcaaatatct

SEQ ID NO: 6558 - protein, 50 aa, Homo sapiens
MCTIAKTTSKPYIDSICYRMITAKAYIIEQSPVWKTLQKIKLNSDSVNPN

SEQ ID NO: 6559 - DNA, 459 bp, Homo sapiens; identical to SEQ ID NO: 4314

SEQ ID NO: 6560 - protein, 152 aa, Homo sapiens [sequence omitted]

SEQ ID NO: 6561 - DNA, 955 bp, Homo sapiens
cagattgttgcaccattagaagctaggttgatccacagacagatggctgaaagtggaaaagaaaaaataaaatggacaaccaccattattattagctcatctcttaagtagaaagaaggtctcgctacattgcccaggctgttctcaaactcctgggctgaagtgattctctcacctcagcctcccaaagtgctaggattacaggtgtgagccattgtgcctggccaagtttaaattttaacctatcaggaaaaactattaaccacctagattttagtattgtgggtaatatgatttaattgcctgggtggaataggaaatcaggtgatatttgaaatgagttatgaagttgcaactgccctagaaaatcgaagccacaaagttcgatattcagattcagtggaaaatggatcaattatattttctctttctggagttgcatttttattaatggatactaaggaatgtcttctgtcaactgaagaaatatttctagccaaaattgagaaatttattaacattcaccaaaatagttttttggttttgtctgctgccctccatgggcctgaagaatggaaactgatgttcaggattcagcagagattcctgggttgtaacttacgaatacttccagtacacaacacagtaaatgctattaatcttatgtgcactatagcaaagactacctccaaaccatacatagatagcatttgctacagaatgataacagctaaagcttacatcattgagcaaagtcctgtttggaaaacacttcagaagataaaactgaatagtgattcagttaacccaaattagagtaccaacttaatgtttttctcgaagaatgtgaaaataattagacctgttaaattataatattcaaatatctatttaaagacatttatattaatttgaaataataacatatacaattaaaagtgattttattttagga

SEQ ID NO: 6562 - protein, 159 aa, Homo sapiens
MSYEVATALENRSHKVRYSDSVENGSIIFSLSGVAFLLMDTKECLLSTEEIFLAKIEKFINIHQNSFLVLSAALHGPEEWKLMFRIQQRFLGCNLRILPVHNTVNAINLMCTIAKTTSKPYIDSICYRMITAKAYIIEQSPVWKTLQKIKLNSDSVNPN

SEQ ID NO: 6563 - DNA, 1467 bp, Homo sapiens
gggaaagcatcctctagaactagatccgtggtgtggatatcaattgaaaggccatacttgggatgaaggcataaataaggtagagtcattgtggagatggctcatagaggaagagacgtctgtgaatttatcctcaaataattttctcataaataaaacttaacaagttaatagatctcaaaacctggagctatccaaatggtgcagtgataagcgtagtgccccaagtacatttttcttttaattggtattcacataactagctatagtaataattattaaatagtgaagtccattgtgaaaagcaagggccatgtttcatttatttttgttttttgagcttttatcgcgtttaatagtaggcaatcaatcattgttgaactaaataactcattctttcattcttaacagactggattatggacagaacttggaaatattgagaataatttcttaaagccacttcatataggacttaatatgtcaaaagcacattatgaagcagaaattaaaaatagccaagaggcccagaaatctaaagatctttgttctataactgtaagtggagaagagatccctaatatgcctcctgaaatgcagcttaaggtcctgcattcagctcttttcacatttgatttgattgaaagtgttctagctcgagtggaagaactcattgaaataaaaacaaagtctacctctgaagaaaatattgggataaagtgaaagttccatttcctaaataaaaactaataaaatatagtactttccattatgattcatttaatacctttataaaaaatttttctgtaaaaatttactgcttgaaaaataaatgtagcttttctcatttatcaatttctataatgatacactatagaacaggtttttttggttttaaagttatctaatggtaaataatgcccacatatgtcctaaatactacttttgaaaatccaatacaaactaataattttataacttcataaaatgtagctgaattgtctatattcattcctacagttttagtgagcttataaaaatactgatacactttctgctgcagttagatgctatgtaacatttcggaactcctagtgtcaagttggctatcataccagtgtaaagaggccagttgacttttcttagcttctcttttcctggctcaggtggagtctttgggagcagagtcccatcaccacctctccagcagaagttataataggaaaacatctgcaaagattaattttagaaatacttgctacctttatggaaaaaaactaaaaaatatatatgactttaagaaactgattagaaaattctgtatttttatttcctactaaagatttgtccatttaactcactaagaagctacacctgagttttatggtatatgtatgtatcagtcctttgctaaagagcgttaaatcttgcagcgaaactcctaaaataaaatcacttttaattgta

SEQ ID NO: 6564 - protein, 80 aa, Homo sapiens [sequence omitted]

SEQ ID NO: 6565 - DNA, 1235 bp, Homo sapiens
atttactgaattatcttggcaactttatcaaaaatcattttataagtatgggtctatttttggactctattccatttacctgtatctattcttttaccaataccacactgtcttgattcctttataggaagaaattattctgttttattcctttataggaagtcttgacctcaagtaatactggattatggacagaacttggaaatattgagaataatttcttaaagccacttcatataggacttaatatgtcaaaagcacattatgaagcagaaattaaaaatagccaagaggcccagaaatctaaagatctttgttctataactgtaagtggagaagagatccctaatatgcctcctgaaatgcagcttaaggtcctgcattcagctcttttcacatttgatttgattgaaagtgttctagctcgagtggaagaactcattgaaataaaaacaaagtctacctctgaagaaaatattgggataaagtgaaagttccatttcctaaataaaaactaataaaatatagtactttccattatgattcatttaatacctttataaaaaatttttctgtaaaaatttactgcttgaaaaataaatgtagcttttctcatttatcaatttctataatgatacactatagaacaggtttttttggttttaaagttatctaatggtaaataatgcccacatatgtcctaaatactacttttgaaaatccaatacaaactaataattttataacttcataaaatgtagctgaattgtctatattcattcctacagttttagtgagcttataaaaatactgatacactttctgctgcagttagatgctatgtaacatttcggaactcctagtgtcaagttggctatcataccagtgtaaagaggccagttgacttttcttagcttctcttttcctggctcaggtggagtctttgggagcagagtcccatcaccacctctccagcagaagttataataggaaaacatctgcaaagattaattttagaaatacttgctacctttatggaaaaaaactaaaaaatatatatgactttaagaaactgattagaaaattctgtatttttatttcctactaaagatttgtccatttaactcactaagaagctacacctgagttttatggtatatgtatgtatcagtcctttgctaaagagcgttaaatcttgcagcgaaactcctaaaataaaatcacttttaattgta

SEQ ID NO: 6566 - protein, 80 aa, Homo sapiens [sequence omitted]

SEQ ID NO: 6567 - DNA, 2629 bp, Homo sapiens
cggggccagaagagcgggctaagacgccggaggaggtggcggcggctgggagaggcgagggttctggccgattttagcatcgaaactaggagaaataagaatggctgtagaggaacttcagtctataataaagagatgtcaaatcctagaagagcaagactttaaagaagaggattttggcctatttcagttagctgggcaaagatgcatagaagaagggcacacagaccagctattagaaattattcaaaatgaaaagaataaggtcatcatcaagaatatgggctggaatctcgttggtcctgttgttcgatgccttttgtgtaaagataaagaggatagtaaaagaaaagtttattttttgatctttgatttattggtaaagttatgcaatccaaaggaattattgttgggtttgcttgaactgattgaagagccctctggaaaacagatatcccaaagtattcttcttttgcttcagccattacaaacagtgattcagaaacttcataacaaggcatattcaattggattagcattgtctaccctttggaatcagctatctcttcttcctgttccatactcaaaagaacaaatacaaatggatgactatggcctttgtcagtgttgcaaggccttaatagagttcactaagccttttgtggaagaagtcattgataacaaagaaaactcactggaaaatgaaaagttaaaggatgaattactgaaattttgtttcaaaagcttgaaatgccctttgctgacagcacaattctttgaacagtctgaagaaggtggaaatgatcctttcaggtattttgcatcagaaataataggttttttatcagcaattggacaccctttccccaaaatgatttttaatcatggaaggaaaaagagaacttggaattaccttgaatttgaagaagaagaaaataaacagttagcagactcaatggcttctctggcatatctagtatttgtacagggcatccatattgatcagcttccaatggtcttaagcccattgtaccttttgcagtttaatatggggcacattgaagtctttttgcaaagaacagaagagtctgttatctccaaaggattggagctgctggagaatagtttattgagaatagaagacaatagtctactttaccagtacttagaaatcaagagttttcttactgtacctcagggcttagtgaaagtaatgacactttgccccattgagacactgaggaaaaagagtttagctatgcttcagctgtatattaacaagttggattcacaaggcaaatatacattatttaggtgcttattgaatacaagtaatcactcaggtgtggaggcttttattattcaaaatatcaaaaatcaaattgacatgtcattaaagagaacacgtaacaacaaatggtttacaggaccacagttgatttcccttcttgatttggtactttttctcccagagggtgcagaaacagatttactgcaaaactcagataggattatggcttcattaaatttattgaggtatttggttatcaaagataatgaaaatgacaatcaaactggattatggacagaacttggaaatattgagaataatttcttaaagccacttcatataggacttaatatgtcaaaagcacattatgaagcagaaattaaaaatagccaagaggcccagaaatctaaagatctttgttctataactgtaagtggagaagagatccctaatatgcctcctgaaatgcagcttaaggtcctgcattcagctcttttcacatttgatttgattgaaagtgttctagctcgagtggaagaactcattgaaataaaaacaaagtctacctctgaagaaaatattgggataaagtgaaagttccatttcctaaataaaaactaataaaatatagtactttccattatgattcatttaatacctttataaaaaatttttctgtaaaaatttactgcttgaaaaataaatgtagcttttctcatttatcaatttctataatgatacactatagaacaggtttttttggttttaaagttatctaatggtaaataatgcccacatatgtcctaaatactacttttgaaaatccaatacaaactaataattttataacttcataaaatgtagctgaattgtctatattcattcctacagttttagtgagcttataaaaatactgatacactttctgctgcagttagatgctatgtaacatttcggaactcctagtgtcaagttggctatcataccagtgtaaagaggccagttgacttttcttagcttctcttttcctggctcaggtggagtctttgggagcagagtcccatcaccacctctccagcagaagttataataggaaaacatctgcaaagattaattttagaaatacttgctacctttatggaaaaaaactaaaaaatatatatgactttaagaaactgattagaaaattctgtatttttatttcctactaaagatttgtccatttaactcactaagaagctacacctgagttttatggtatatgtatgtatcagtcctttgctaaagagcgttaaatcttgcagcgaaactcctaaaataaaatcacttttaattgta

SEQ ID NO: 6568 - protein, 594 aa, Homo sapiens; identical to SEQ ID NO: 276

SEQ ID NO: 6569 - DNA, 2544 bp, Homo sapiens
cggggccagaagagcgggctaagacgccggaggaggtggcggcggctgggagaggcgagggttctggccgattttagcatcgaaactaggagaaataagaatggctgtagaggaacttcagtctataataaagagatgtcaaatcctagaagagcaagactttaaagaagaggattttggcctatttcagttagctgggcaaagatgcatagaagaagggcacacagaccagctattagaaattattcaaaatgaaaagaataaggtcatcatcaagaatatgggctggaatctcgttggtcctgttgttcgatgccttttgtgtaaagataaagaggatagtaaaagaaaagtttattttttgatctttgatttattggtaaagttatgcaatccaaaggaattattgttgggtttgcttgaactgattgaagagccctctggaaaacagatatcccaaagtattcttcttttgcttcagccattacaaacagtgattcagaaacttcataacaaggcatattcaattggattagcattgtctaccctttggaatcagctatctcttcttcctgttccatactcaaaagaacaaatacaaatggatgactatggcctttgtcagtgttgcaaggccttaatagagttcactaagccttttgtggaagaagtcattgataacaaagaaaactcactggaaaatgaaaagttaaaggatgaattactgaaattttgtttcaaaagcttgaaatgccctttgctgacagcacaattctttgaacagtctgaagaaggtggaaatgatcctttcaggtattttgcatcagaaataataggttttttatcagcaattggacaccctttccccaaaatgatttttaatcatggaaggaaaaagagaacttggaattaccttgaatttgaagaagaagaaaataaacagttagcagactcaatggcttctctggcatatctagtatttgtacagggcatccatattgatcagcttccaatggtcttaagcccattgtaccttttgcagtttaatatggggcacattgaagtctttttgcaaagaacagaagagtctgttatctccaaaggattggagctgctggagaatagtttattgagaatagaagacaatagtctactttaccagtacttagaaatcaagagttttcttactgtacctcagggcttagtgaaagtaatgacactttgccccattgagacactgaggaaaaagagtttagctatgcttcagctgtatattaacaagttggattcacaaggcaaatatacattatttagagaacacgtaacaacaaatggtttacaggaccacagttgatttcccttcttgatttggtactttttctcccagagggtgcagaaacagatttactgcaaaactcagataggattatggcttcattaaatttattgaggtatttggttatcaaagataatgaaaatgacaatcaaactggattatggacagaacttggaaatattgagaataatttcttaaagccacttcatataggacttaatatgtcaaaagcacattatgaagcagaaattaaaaatagccaagaggcccagaaatctaaagatctttgttctataactgtaagtggagaagagatccctaatatgcctcctgaaatgcagcttaaggtcctgcattcagctcttttcacatttgatttgattgaaagtgttctagctcgagtggaagaactcattgaaataaaaacaaagtctacctctgaagaaaatattgggataaagtgaaagttccatttcctaaataaaaactaataaaatatagtactttccattatgattcatttaatacctttataaaaaatttttctgtaaaaatttactgcttgaaaaataaatgtagcttttctcatttatcaatttctataatgatacactatagaacaggtttttttggttttaaagttatctaatggtaaataatgcccacatatgtcctaaatactacttttgaaaatccaatacaaactaataattttataacttcataaaatgtagctgaattgtctatattcattcctacagttttagtgagcttataaaaatactgatacactttctgctgcagttagatgctatgtaacatttcggaactcctagtgtcaagttggctatcataccagtgtaaagaggccagttgacttttcttagcttctcttttcctggctcaggtggagtctttgggagcagagtcccatcaccacctctccagcagaagttataataggaaaacatctgcaaagattaattttagaaatacttgctacctttatggaaaaaaactaaaaaatatatatgactttaagaaactgattagaaaattctgtatttttatttcctactaaagatttgtccatttaactcactaagaagctacacctgagttttatggtatatgtatgtatcagtcctttgctaaagagcgttaaatcttgcagcgaaactcctaaaataaaatcacttttaattgta

SEQ ID NO: 6570 - protein, 417 aa, Homo sapiens
MAVEELQSIIKRCQILEEQDFKEEDFGLFQLAGQRCIEEGHTDQLLEIIQNEKNKVIIKNMGWNLVGPVVRCLLCKDKEDSKRKVYFLIFDLLVKLCNPKELLLGLLELIEEPSGKQISQSILLLLQPLQTVIQKLHNKAYSIGLALSTLWNQLSLLPVPYSKEQIQMDDYGLCQCCKALIEFTKPFVEEVIDNKENSLENEKLKDELLKFCFKSLKCPLLTAQFFEQSEEGGNDPFRYFASEIIGFLSAIGHPFPKMIFNHGRKKRTWNYLEFEEEENKQLADSMASLAYLVFVQGIHIDQLPMVLSPLYLLQFNMGHIEVFLQRTEESVISKGLELLENSLLRIEDNSLLYQYLEIKSFLTVPQGLVKVMTLCPIETLRKKSLAMLQLYINKLDSQGKYTLFREHVTTNGLQDHS

SEQ ID NO: 6571 - DNA, 621 bp, Homo sapiens
atttactgaattatcttggcaactttatcaaaaatcattttataagtatgggtctatttttggactctattccatttacctgtatctattcttttaccaataccacactgtcttgattcctttataggaagaaattattctgttttattcctttataggaagtcttgacctcaagtaatactggattatggacagaacttggaaatattgagaataatttcttaaagccacttcatataggacttaatatgtcaaaagcacattatgaagcagaaattaaaaatagccaagaggcccagaaatctaaagatctttgttctataactgtaagtggagaagagatccctaatatgcctcctgaaatgcagcttaaggtcctgcattcagctcttttcacatttgatttgattgaaagtgttctagctcgagtggaagaactcattgaaataaaaacaaagtctacctctgaagaaaatattgggataaagtgaaagttccatttcctaaataaaaactaataaaatatagtactttccattatgattcatttaatacctttataaaaaatttttctgtaaaaatttactgcttgaaaaataaatgtagcttttctcatttatc

SEQ ID NO: 6572 - protein, 80 aa, Homo sapiens [sequence omitted]

SEQ ID NO: 6573 - DNA, 2015 bp, Homo sapiens
cggggccagaagagcgggctaagacgccggaggaggtggcggcggctgggagaggcgagggttctggccgattttagcatcgaaactaggagaaataagaatggctgtagaggaacttcagtctataataaagagatgtcaaatcctagaagagcaagactttaaagaagaggattttggcctatttcagttagctgggcaaagatgcatagaagaagggcacacagaccagctattagaaattattcaaaatgaaaagaataaggtcatcatcaagaatatgggctggaatctcgttggtcctgttgttcgatgccttttgtgtaaagataaagaggatagtaaaagaaaagtttattttttgatctttgatttattggtaaagttatgcaatccaaaggaattattgttgggtttgcttgaactgattgaagagccctctggaaaacagatatcccaaagtattcttcttttgcttcagccattacaaacagtgattcagaaacttcataacaaggcatattcaattggattagcattgtctaccctttggaatcagctatctcttcttcctgttccatactcaaaagaacaaatacaaatggatgactatggcctttgtcagtgttgcaaggccttaatagagttcactaagccttttgtggaagaagtcattgataacaaagaaaactcactggaaaatgaaaagttaaaggatgaattactgaaattttgtttcaaaagcttgaaatgccctttgctgacagcacaattctttgaacagtctgaagaaggtggaaatgatcctttcaggtattttgcatcagaaataataggttttttatcagcaattggacaccctttccccaaaatgatttttaatcatggaaggaaaaagagaacttggaattaccttgaatttgaagaagaagaaaataaacagttagcagactcaatggcttctctggcatatctagtatttgtacagggcatccatattgatcagcttccaatggtcttaagcccattgtaccttttgcagtttaatatggggcacattgaagtctttttgcaaagaacagaagagtctgttatctccaaaggattggagctgctggagaatagtttattgagaatagaagacaatagtctactttaccagtacttagaaatcaagagttttcttactgtacctcagggcttagtgaaagtaatgacactttgccccattgagacactgaggaaaaagagtttagctatgcttcagctgtatattaacaagttggattcacaaggcaaatatacattatttaggtgcttattgaatacaagtaatcactcaggtgtggaggcttttattattcaaaatatcaaaaatcaaattgacatgtcattaaagagaacacgtaacaacaaatggtttacaggaccacagttgatttcccttcttgatttggtactttttctcccagagggtgcagaaacagatttactgcaaaactcagataggattatggcttcattaaatttattgaggtatttggttatcaaagataatgaaaatgacaatcaaactggattatggacagaacttggaaatattgagaataatttcttaaagccacttcatataggacttaatatgtcaaaagcacattatgaagcagaaattaaaaatagccaagaggcccagaaatctaaagatctttgttctataactgtaagtggagaagagatccctaatatgcctcctgaaatgcagcttaaggtcctgcattcagctcttttcacatttgatttgattgaaagtgttctagctcgagtggaagaactcattgaaataaaaacaaagtctacctctgaagaaaatattgggataaagtgaaagttccatttcctaaataaaaactaataaaatatagtactttccattatgattcatttaatacctttataaaaaatttttctgtaaaaatttactgcttgaaaaataaatgtagcttttctcatttatc

SEQ ID NO: 6574 - protein, 594 aa, Homo sapiens; identical to SEQ ID NO: 276

SEQ ID NO: 6575 - DNA, 1930 bp, Homo sapiens
cggggccagaagagcgggctaagacgccggaggaggtggcggcggctgggagaggcgagggttctggccgattttagcatcgaaactaggagaaataagaatggctgtagaggaacttcagtctataataaagagatgtcaaatcctagaagagcaagactttaaagaagaggattttggcctatttcagttagctgggcaaagatgcatagaagaagggcacacagaccagctattagaaattattcaaaatgaaaagaataaggtcatcatcaagaatatgggctggaatctcgttggtcctgttgttcgatgccttttgtgtaaagataaagaggatagtaaaagaaaagtttattttttgatctttgatttattggtaaagttatgcaatccaaaggaattattgttgggtttgcttgaactgattgaagagccctctggaaaacagatatcccaaagtattcttcttttgcttcagccattacaaacagtgattcagaaacttcataacaaggcatattcaattggattagcattgtctaccctttggaatcagctatctcttcttcctgttccatactcaaaagaacaaatacaaatggatgactatggcctttgtcagtgttgcaaggccttaatagagttcactaagccttttgtggaagaagtcattgataacaaagaaaactcactggaaaatgaaaagttaaaggatgaattactgaaattttgtttcaaaagcttgaaatgccctttgctgacagcacaattctttgaacagtctgaagaaggtggaaatgatcctttcaggtattttgcatcagaaataataggttttttatcagcaattggacaccctttccccaaaatgatttttaatcatggaaggaaaaagagaacttggaattaccttgaatttgaagaagaagaaaataaacagttagcagactcaatggcttctctggcatatctagtatttgtacagggcatccatattgatcagcttccaatggtcttaagcccattgtaccttttgcagtttaatatggggcacattgaagtctttttgcaaagaacagaagagtctgttatctccaaaggattggagctgctggagaatagtttattgagaatagaagacaatagtctactttaccagtacttagaaatcaagagttttcttactgtacctcagggcttagtgaaagtaatgacactttgccccattgagacactgaggaaaaagagtttagctatgcttcagctgtatattaacaagttggattcacaaggcaaatatacattatttagagaacacgtaacaacaaatggtttacaggaccacagttgatttcccttcttgatttggtactttttctcccagagggtgcagaaacagatttactgcaaaactcagataggattatggcttcattaaatttattgaggtatttggttatcaaagataatgaaaatgacaatcaaactggattatggacagaacttggaaatattgagaataatttcttaaagccacttcatataggacttaatatgtcaaaagcacattatgaagcagaaattaaaaatagccaagaggcccagaaatctaaagatctttgttctataactgtaagtggagaagagatccctaatatgcctcctgaaatgcagcttaaggtcctgcattcagctcttttcacatttgatttgattgaaagtgttctagctcgagtggaagaactcattgaaataaaaacaaagtctacctctgaagaaaatattgggataaagtgaaagttccatttcctaaataaaaactaataaaatatagtactttccattatgattcatttaatacctttataaaaaatttttctgtaaaaatttactgcttgaaaaataaatgtagcttttctcatttatc

SEQ ID NO: 6576 - protein, 417 aa, Homo sapiens; identical to SEQ ID NO: 6570

SEQ ID NO: 6577 - DNA, 850 bp, Homo sapiens
gggaaagcatcctctagaactagatccgtggtgtggatatcaattgaaaggccatacttgggatgaaggcataaataaggtagagtcattgtggagatggctcatagaggaagagacgtctgtgaatttatcctcaaataattttctcataaataaaacttaacaagttaatagatctcaaaacctggagctatccaaatggtgcagtgataagcgtagtgccccaagtacatttttcttttaattggtattcacataactagctatagtaataattattaaatagtgaagtccattgtgaaaagcaagggccatgtttcatttatttttgttttttgagcttttatcgcgtttaatagtaggcaatcaatcattgttgaactaaataactcattctttcattcttaacagactggattatggacagaacttggaaatattgagaataatttcttaaagccacttcatataggacttaatatgtcaaaagcacattatgaagcagaaattaaaaatagccaagaggcccagaaatctaaagatctttgttctataactgtaagtggagaagagatccctaatatgcctcctgaaatgcagcttaaggtcctgcattcagctcttttcacatttgatttgattgaaagtgttctagctcgagtggaagaactcattgaaataaaaacaaagtctacctctgaagaaaatattgggataaagtgaaagttccatttcctaaataaaaactaataaaatatagtactttccattatgattcatttaatacctttataaaaaatttttctgtaaaaatttactgcttgaaaaataaatgtagcttttctcattt

SEQ ID NO: 6578 - protein, 80 aa, Homo sapiens [sequence omitted]

SEQ ID NO: 6579 - DNA, 536 bp, Homo sapiens
atttactgaattatcttggcaactttatcaaaaatcattttataagtatgggtctatttttggactctattccatttacctgtatctattcttttaccaataccacactgtcttgattcctttataggaagaaattattctgttttattcctttataggaagtcttgacctcaagtaatactggattatggacagaacttggaaatattgagaataatttcttaaagccacttcatataggacttaatatgtcaaaagcacattatgaagcagaaattaaaaatagccaagaggcccagaaatctaaagatctttgttctataactgtaagtggagaagagatccctaatatgcctcctgaaatgcagcttaaggtcctgcattcagctcttttcacatttgatttgattgaaagtgttctagctcgagtggaagaactcattgaaataaaaacaaagtctacctctgaagaaaatattgggataaagtgaaagttccatttcctaaataaaaactaataaaatatagtactttcc

SEQ ID NO: 6580 - protein, 80 aa, Homo sapiens [sequence omitted]

SEQ ID NO: 6581 - DNA, 1930 bp, Homo sapiens
cggggccagaagagcgggctaagacgccggaggaggtggcggcggctgggagaggcgagggttctggccgattttagcatcgaaactaggagaaataagaatggctgtagaggaacttcagtctataataaagagatgtcaaatcctagaagagcaagactttaaagaagaggattttggcctatttcagttagctgggcaaagatgcatagaagaagggcacacagaccagctattagaaattattcaaaatgaaaagaataaggtcatcatcaagaatatgggctggaatctcgttggtcctgttgttcgatgccttttgtgtaaagataaagaggatagtaaaagaaaagtttattttttgatctttgatttattggtaaagttatgcaatccaaaggaattattgttgggtttgcttgaactgattgaagagccctctggaaaacagatatcccaaagtattcttcttttgcttcagccattacaaacagtgattcagaaacttcataacaaggcatattcaattggattagcattgtctaccctttggaatcagctatctcttcttcctgttccatactcaaaagaacaaatacaaatggatgactatggcctttgtcagtgttgcaaggccttaatagagttcactaagccttttgtggaagaagtcattgataacaaagaaaactcactggaaaatgaaaagttaaaggatgaattactgaaattttgtttcaaaagcttgaaatgccctttgctgacagcacaattctttgaacagtctgaagaaggtggaaatgatcctttcaggtattttgcatcagaaataataggttttttatcagcaattggacaccctttccccaaaatgatttttaatcatggaaggaaaaagagaacttggaattaccttgaatttgaagaagaagaaaataaacagttagcagactcaatggcttctctggcatatctagtatttgtacagggcatccatattgatcagcttccaatggtcttaagcccattgtaccttttgcagtttaatatggggcacattgaagtctttttgcaaagaacagaagagtctgttatctccaaaggattggagctgctggagaatagtttattgagaatagaagacaatagtctactttaccagtacttagaaatcaagagttttcttactgtacctcagggcttagtgaaagtaatgacactttgccccattgagacactgaggaaaaagagtttagctatgcttcagctgtatattaacaagttggattcacaaggcaaatatacattatttaggtgcttattgaatacaagtaatcactcaggtgtggaggcttttattattcaaaatatcaaaaatcaaattgacatgtcattaaagagaacacgtaacaacaaatggtttacaggaccacagttgatttcccttcttgatttggtactttttctcccagagggtgcagaaacagatttactgcaaaactcagataggattatggcttcattaaatttattgaggtatttggttatcaaagataatgaaaatgacaatcaaactggattatggacagaacttggaaatattgagaataatttcttaaagccacttcatataggacttaatatgtcaaaagcacattatgaagcagaaattaaaaatagccaagaggcccagaaatctaaagatctttgttctataactgtaagtggagaagagatccctaatatgcctcctgaaatgcagcttaaggtcctgcattcagctcttttcacatttgatttgattgaaagtgttctagctcgagtggaagaactcattgaaataaaaacaaagtctacctctgaagaaaatattgggataaagtgaaagttccatttcctaaataaaaactaataaaatatagtactttcc

SEQ ID NO: 6582 - protein, 594 aa, Homo sapiens; identical to SEQ ID NO: 276

SEQ ID NO: 6583 - DNA, 1845 bp, Homo sapiens
cggggccagaagagcgggctaagacgccggaggaggtggcggcggctgggagaggcgagggttctggccgattttagcatcgaaactaggagaaataagaatggctgtagaggaacttcagtctataataaagagatgtcaaatcctagaagagcaagactttaaagaagaggattttggcctatttcagttagctgggcaaagatgcatagaagaagggcacacagaccagctattagaaattattcaaaatgaaaagaataaggtcatcatcaagaatatgggctggaatctcgttggtcctgttgttcgatgccttttgtgtaaagataaagaggatagtaaaagaaaagtttattttttgatctttgatttattggtaaagttatgcaatccaaaggaattattgttgggtttgcttgaactgattgaagagccctctggaaaacagatatcccaaagtattcttcttttgcttcagccattacaaacagtgattcagaaacttcataacaaggcatattcaattggattagcattgtctaccctttggaatcagctatctcttcttcctgttccatactcaaaagaacaaatacaaatggatgactatggcctttgtcagtgttgcaaggccttaatagagttcactaagccttttgtggaagaagtcattgataacaaagaaaactcactggaaaatgaaaagttaaaggatgaattactgaaattttgtttcaaaagcttgaaatgccctttgctgacagcacaattctttgaacagtctgaagaaggtggaaatgatcctttcaggtattttgcatcagaaataataggttttttatcagcaattggacaccctttccccaaaatgatttttaatcatggaaggaaaaagagaacttggaattaccttgaatttgaagaagaagaaaataaacagttagcagactcaatggcttctctggcatatctagtatttgtacagggcatccatattgatcagcttccaatggtcttaagcccattgtaccttttgcagtttaatatggggcacattgaagtctttttgcaaagaacagaagagtctgttatctccaaaggattggagctgctggagaatagtttattgagaatagaagacaatagtctactttaccagtacttagaaatcaagagttttcttactgtacctcagggcttagtgaaagtaatgacactttgccccattgagacactgaggaaaaagagtttagctatgcttcagctgtatattaacaagttggattcacaaggcaaatatacattatttagagaacacgtaacaacaaatggtttacaggaccacagttgatttcccttcttgatttggtactttttctcccagagggtgcagaaacagatttactgcaaaactcagataggattatggcttcattaaatttattgaggtatttggttatcaaagataatgaaaatgacaatcaaactggattatggacagaacttggaaatattgagaataatttcttaaagccacttcatataggacttaatatgtcaaaagcacattatgaagcagaaattaaaaatagccaagaggcccagaaatctaaagatctttgttctataactgtaagtggagaagagatccctaatatgcctcctgaaatgcagcttaaggtcctgcattcagctcttttcacatttgatttgattgaaagtgttctagctcgagtggaagaactcattgaaataaaaacaaagtctacctctgaagaaaatattgggataaagtgaaagttccatttcctaaataaaaactaataaaatatagtactttcc

SEQ ID NO: 6584 - protein, 417 aa, Homo sapiens; identical to SEQ ID NO: 6570

SEQ ID NO: 6585 - DNA, 767 bp, Homo sapiens
gggaaagcatcctctagaactagatccgtggtgtggatatcaattgaaaggccatacttgggatgaaggcataaataaggtagagtcattgtggagatggctcatagaggaagagacgtctgtgaatttatcctcaaataattttctcataaataaaacttaacaagttaatagatctcaaaacctggagctatccaaatggtgcagtgataagcgtagtgccccaagtacatttttcttttaattggtattcacataactagctatagtaataattattaaatagtgaagtccattgtgaaaagcaagggccatgtttcatttatttttgttttttgagcttttatcgcgtttaatagtaggcaatcaatcattgttgaactaaataactcattctttcattcttaacagactggattatggacagaacttggaaatattgagaataatttcttaaagccacttcatataggacttaatatgtcaaaagcacattatgaagcagaaattaaaaatagccaagaggcccagaaatctaaagatctttgttctataactgtaagtggagaagagatccctaatatgcctcctgaaatgcagcttaaggtcctgcattcagctcttttcacatttgatttgattgaaagtgttctagctcgagtggaagaactcattgaaataaaaacaaagtctacctctgaagaaaatattgggataaagtgaaagttccatttcctaaataaaaactaataaaatatagtactttc

SEQ ID NO: 6586 - protein, 80 aa, Homo sapiens [sequence omitted]

SEQ ID NO: 6587 - DNA, 912 bp, Homo sapiens
ggaggaggtggcggcggctgggagaggcgagggttctggccgattttagcatcgaaactaggagaaataagaatggctgtagaggaacttcagtctataataaagagatgtcaaatcctagaagagcaagactttaaagaagaggattttggcctatttcagttagctgggcaaagatgcatagaagaagggcacacagaccagctattagaaattattcaaaatgaaaagaataaggtgcgtacaatcttggtgtttacttttcagtcttgggaagagaataatcacatgatgctattcatccagtcatttatccatcaaacatttaagaatctacttaaattttcacagtagggaactgaaaacaaaaaaagaattagaaatatttaggccaggcgcagtggctcacgttcgtaatcacagcgttatgggaggccaaggcaggcagatcacttgagcccaggagtttgagaccagcctgggcaacagagtaagaccctgtctcagaaaaaaaaaaaaaaaaaagaaaagaaacagtcatatacttgaaggtttttaccatctggtcaaacataaacatgtaaacaactaacaataatgaggcaaaataaataattgctatagttgaagtaaagagtttttagaagaaacagaattacttctggtttagggagtccaaaaatggtgtttgagtcattaatttacaatgagaaatatacatatcaagcaggctaaatattcattttgggtgatcagcccattctcctccagccaaatgtgtatggaaaaccaaattttaattaaaacagtattttatgtgcatagaatcagaacaggaggaaaacgatatgtcattatactagccagtatcatccagttacaatggtttgagaaatcatcctccacaatgga

SEQ ID NO: 6588 - protein, 93 aa, Homo sapiens
MAVEELQSIIKRCQILEEQDFKEEDFGLFQLAGQRCIEEGHTDQLLEIIQNEKNKVRTILVFTFQSWEENNHMMLFIQSFIHQTFKNLLKFSQ

SEQ ID NO: 6589 - DNA, 1364 bp, Homo sapiens
agaagagcgggctaagacgccggaggaggtggcggcggctgggagaggcgagggttctggccgattttagcatcgaaactaggagaaataagaatggctgtagaggaacttcagtctataataaagagatgtgtaagtattaatttttgtaaaattaaatacctttcaaaatatgggaagggcacagattgtttttaattatatttgtggtcactcaaattgtttatcttctttaatccttgctttttttgacctgtaaagagcatgagtgggggaggcagattggattatttctccaggtgacatacttatctaaataaccttttacattttaatcctgatccttttcatagatttcactggtacagtagatttcaaggtcacttattaaagtatttattagggtaatcctaattttgatacgtgtgttatttacgttacatttatctagaatttaaacagatttccttttttcatagataaatcaagaagttattgtatttaatttttatttgcatatacttttttttgtttgttttttgggttttttttttttttgccagcaaatcctagaagagcaagactttaaagaagaggattttggcctatttcagttagctgggcaaagatgcatagaagaagggcacacagaccagctattagaaattattcaaaatgaaaagaataaggtgcgtacaatcttggtgtttacttttcagtcttgggaagagaataatcacatgatgctattcatccagtcatttatccatcaaacatttaagaatctacttaaattttcacagtagggaactgaaaacaaaaaaagaattagaaatatttaggccaggcgcagtggctcacgttcgtaatcacagcgttatgggaggccaaggcaggcagatcacttgagcccaggagtttgagaccagcctgggcaacagagtaagaccctgtctcagaaaaaaaaaaaaaaaaaagaaaagaaacagtcatatacttgaaggtttttaccatctggtcaaacataaacatgtaaacaactaacaataatgaggcaaaataaataattgctatagttgaagtaaagagtttttagaagaaacagaattacttctggtttagggagtccaaaaatggtgtttgagtcattaatttacaatgagaaatatacatatcaagcaggctaaatattcattttgggtgatcagcccattctcctccagccaaatgtgtatggaaaaccaaattttaattaaaacagtattttatgtgcatagaatcagaacaggaggaaaacgatatgtcattatactagccagtatcatccagttacaatggtttgagaaatcatcctccacaatgga

SEQ ID NO: 6590 - protein, 67 aa, Homo sapiens
MRNIHIKQAKYSFWVISPFSSSQMCMENQILIKTVFYVHRIRTGGKRYVIILASIIQLQWFEKSSST

SEQ ID NO: 6591 - DNA, 2255 bp, Homo sapiens
ccggcgtcttagcccgctcttctggccccgccccgcgctacgcgtagggaggcggggcctcggggcgagacgccggagcgtgtccccgtccggcagactactctcccccatggcggacttcgctgggccgtcttctgccggccgcaaggccggggctccccgctgctctcgaaaagccgcaggtactaaacagacaagtactttgaaacaagaagatgcttctaaaaggaaagctgaactagaagcagctgtgagaaagaagattgaatttgagagaaaagctctacatattgttgaacagcttttagaggagaatattacagaagagttcctaatggagtgtgggaggttcattacacctgctcactacagtgatgtcgtggatgaacgttctattgtcaaactctgtggttatcctttatgtcagaagaagctgggaattgtaccaaaacagaaatataaaatttctaccaaaaccaataaagtctatgatattactgaaagaaagtctttttgcagcaatttttgttatcaagcatctaagttttttgaagcacaaattcccaaaactccagtatgggttcgagaagaagagaggcatcctgattttcaactgctaaaggaagaacaaagtggccattctggagaagaagtacagttatgcagtaaagccattaaaacatcagatatcgacaatcctagccactttgaaaagcaatatgaatctagttcttctagcactcacagtgatagtagcagtgacaatgagcaagactttgtttcctccattctaccaggaaacagaccaaattcaacaaatattagaccacagctgcaccaaaaaagcataatgaaaaagaaagctggtcacaaagctaactccaaacacaaagacaaagaacagacagtagtagatgtcactgagcagttaggcgattgcaaattagatagtcaggagaaagatgctacatgtgaacttcctttacagaaagtaaatactcagagttcttcaaatagcactttgcctgaaagattaaaagcgtcagaaaattctgaaagtgaatacagtaggtcagaaataactctagtaggcataagtaagaaaagtgcagagcattttaagagaaaatttgccaaatcaaaccaagtgtctaggtcagtgtctagttcagtgcaggtgtgtcctgaagttggaaagagaaacttacttaaagttttgaaggagactttgattgagtggaagacagaagaaacattgaggtttttgtatggccagaattatgcttctgtgtgtctgaaacccgaagcctctctggttaaagaagaacttgatgaagatgacataatctcagatccagatagtcatttccctgcctggagggaatctcagaacagcttggatgagtctttaccttttaggggctcaggtacagccattaaaccactgccaagttacgagaatttgaaaaaagaaactgaaaagttaaatctgaggatcagggagttttacagaggacggtatgttttgggtgaagaaaccaccaaatcacaagactcagaagagcatgattccacctttccactgatagactcaagttcccagaaccagattagaaaacgcatcgtacttgaaaagttgagtaaagtgttgcctgggcttctggttcctcttcagattacattgggagatatttacacacaacttaaaaatcttgttcgaactttcaggttaacaaatagaaatattatacacaaacctgcggaatggactttaattgctatggtgttgctgtcattactgaccccaattcttggcattcagaaacattctcaggaaggtatggtgtttacacggtttctagacaccctccttgaagaattacatctaaaaaatgaagaccttgaaagtctaaccatcatatttagaaccagctgtttaccagagtgatatattccatgaagacaaaatagaagatgaacttctattcaccgtttctggaattctagccgccatgatggtctggtggtgactgataactagttttattccaagacatacctttacctctttaagtttcaatctcccatctcccagtccttcagtccccaactgcagaggatgacctccccagatagaggagaatcattactccaacaagaataaccaagtctttgtatccctagtacaagacatagtatttttattcgaaaatgaatgtttaagtattaaattgaaacttgaatgaatattcaag

SEQ ID NO: 6592 - protein, 612 aa, Homo sapiens
MADFAGPSSAGRKAGAPRCSRKAAGTKQTSTLKQEDASKRKAELEAAVRKKIEFERKALHIVEQLLEENITEEFLMECGRFITPAHYSDVVDERSIVKLCGYPLCQKKLGIVPKQKYKISTKTNKVYDITERKSFCSNFCYQASKFFEAQIPKTPVWVREEERHPDFQLLKEEQSGHSGEEVQLCSKAIKTSDIDNPSHFEKQYESSSSSTHSDSSSDNEQDFVSSILPGNRPNSTNIRPQLHQKSIMKKKAGHKANSKHKDKEQTVVDVTEQLGDCKLDSQEKDATCELPLQKVNTQSSSNSTLPERLKASENSESEYSRSEITLVGISKKSAEHFKRKFAKSNQVSRSVSSSVQVCPEVGKRNLLKVLKETLIEWKTEETLRFLYGQNYASVCLKPEASLVKEELDEDDIISDPDSHFPAWRESQNSLDESLPFRGSGTAIKPLPSYENLKKETEKLNLRIREFYRGRYVLGEETTKSQDSEEHDSTFPLIDSSSQNQIRKRIVLEKLSKVLPGLLVPLQITLGDIYTQLKNLVRTFRLTNRNIIHKPAEWTLIAMVLLSLLTPILGIQKHSQEGMVFTRFLDTLLEELHLKNEDLESLTIIFRTSCLPE

SEQ ID NO: 6593 - DNA, 2317 bp, Homo sapiens
ccggcgtcttagcccgctcttctggccccgccccgcgctacgcgtagggaggcggggcctcggggcgagacgccggagcgtgtccccgtccggcagactactctcccccatggcggacttcgctgggccgtcttctgccggccgcaaggccggggctccccgctgctctcgaaaagccgcaggtactaaacagacaagtactttgaaacaagaagatgcttctaaaaggaaagctgaactagaagcagctgtgagaaagaagattgaatttgagagaaaagctctacatattgttgaacagcttttagaggagaatattacagaagagttcctaatggagtgtgggaggttcattacacctgctcactacagtgatgtcgtggatgaacgttctattgtcaaactctgtggttatcctttatgtcagaagaagctgggaattgtaccaaaacagaaatataaaatttctaccaaaaccaataaagtctatgatattactgaaagaaagtctttttgcagcaatttttgttatcaagcatctaagttttttgaagcacaaattcccaaaactccagtatgggttcgagaagaagagaggcatcctgattttcaactgctaaaggaagaacaaagtggccattctggagaagaagtacagttatgcagtaaagccattaaaacatcagatatcgacaatcctagccactttgaaaagcaatatgaatctagttcttctagcactcacagtgatagtagcagtgacaatgagcaagactttgtttcctccattctaccaggaaacagaccaaattcaacaaatattagaccacagctgcaccaaaaaagcataatgaaaaagaaagctggtcacaaagctaactccaaacacaaagacaaagaacagacagtagtagatgtcactgagcagttaggcgattgcaaattagatagtcaggagaaagatgctacatgtgaacttcctttacagaaagtaaatactcagagttcttcaaatagcactttgcctgaaagattaaaagcgtcagaaaattctgaaagtgaatacagtaggtcagaaataactctagtaggcataagtaagaaaagtgcagagcattttaagagaaaatttgccaaatcaaaccaagtgtctaggtcagtgtctagttcagtgcaggtgtgtcctgaagttggaaagagaaacttacttaaagttttgaaggagactttgattgagtggaagacagaagaaacattgaggtttttgtatggccagaattatgcttctgtgtgtctgaaacccgaagcctctctggttaaagaagaacttgatgaagatgacataatctcagatccagatagtcatttccctgcctggagggaatctcagaacagcttggatgagtctttaccttttaggggctcaggtacagccattaaaccactgccaagttacgagaatttgaaaaaagaaactgaaaagttaaatctgaggatcagggagttttacagaggacggtatgttttgggtgaagaaaccaccaaatcacaagactcagaagagcatgattccacctttccactgatagactcaagttcccagaaccagattagaaaacgcatcgtacttgaaaagttgagtaaagtgttgcctgggcttctggttcctcttcagattacattgggagatatttacacacaacttaaaaatcttgttcgaactttcaggttaacaaatagaaatattatacacaaacctgcggaatggactttaattgctatggtgttgctgtcattcctactcaatgtgaagacaaggataaagacctttatgatgatctacttccacttaatgaataactgaccccaattcttggcattcagaaacattctcaggaaggtatggtgtttacacggtttctagacaccctccttgaagaattacatctaaaaaatgaagaccttgaaagtctaaccatcatatttagaaccagctgtttaccagagtgatatattccatgaagacaaaatagaagatgaacttctattcaccgtttctggaattctagccgccatgatggtctggtggtgactgataactagttttattccaagacatacctttacctctttaagtttcaatctcccatctcccagtccttcagtccccaactgcagaggatgacctccccagatagaggagaatcattactccaacaagaataaccaagtctttgtatccctagtacaagacatagtatttttattcgaaaatgaatgtttaagtattaaattgaaacttgaatgaatattcaag

SEQ ID NO: 6594 - protein, 584 aa, Homo sapiens
MADFAGPSSAGRKAGAPRCSRKAAGTKQTSTLKQEDASKRKAELEAAVRKKIEFERKALHIVEQLLEENITEEFLMECGRFITPAHYSDVVDERSIVKLCGYPLCQKKLGIVPKQKYKISTKTNKVYDITERKSFCSNFCYQASKFFEAQIPKTPVWVREEERHPDFQLLKEEQSGHSGEEVQLCSKAIKTSDIDNPSHFEKQYESSSSSTHSDSSSDNEQDFVSSILPGNRPNSTNIRPQLHQKSIMKKKAGHKANSKHKDKEQTVVDVTEQLGDCKLDSQEKDATCELPLQKVNTQSSSNSTLPERLKASENSESEYSRSEITLVGISKKSAEHFKRKFAKSNQVSRSVSSSVQVCPEVGKRNLLKVLKETLIEWKTEETLRFLYGQNYASVCLKPEASLVKEELDEDDIISDPDSHFPAWRESQNSLDESLPFRGSGTAIKPLPSYENLKKETEKLNLRIREFYRGRYVLGEETTKSQDSEEHDSTFPLIDSSSQNQIRKRIVLEKLSKVLPGLLVPLQITLGDIYTQLKNLVRTFRLTNRNIIHKPAEWTLIAMVLLSFLLNVKTRIKTFMMIYFHLMNN

SEQ ID NO: 6595 - DNA, 3123 bp, Homo sapiens
ccggcgtcttagcccgctcttctggccccgccccgcgctacgcgtagggaggcggggcctcggggcgagacgccggagcgtgtccccgtccggcagactactctcccccatggcggacttcgctgggccgtcttctgccggccgcaaggccggggctccccgctgctctcgaaaagccgcaggtactaaacagacaagtactttgaaacaagaagatgcttctaaaaggaaagctgaactagaagcagctgtgagaaagaagattgaatttgagagaaaagctctacatattgttgaacagcttttagaggagaatattacagaagagttcctaatggagtgtgggaggttcattacacctgctcactacagtgatgtcgtggatgaacgttctattgtcaaactctgtggttatcctttatgtcagaagaagctgggaattgtaccaaaacagaaatataaaatttctaccaaaaccaataaagtctatgatattactgaaagaaagtctttttgcagcaatttttgttatcaagcatctaagttttttgaagcacaaattcccaaaactccagtatgggttcgagaagaagagaggcatcctgattttcaactgctaaaggaagaacaaagtggccattctggagaagaagtacagttatgcagtaaagccattaaaacatcagatatcgacaatcctagccactttgaaaagcaatatgaatctagttcttctagcactcacagtgatagtagcagtgacaatgagcaagactttgtttcctccattctaccaggaaacagaccaaattcaacaaatattagaccacagctgcaccaaaaaagcataatgaaaaagaaagctggtcacaaagctaactccaaacacaaagacaaagaacagacagtagtagatgtcactgagcagttaggcgattgcaaattagatagtcaggagaaagatgctacatgtgaacttcctttacagaaagtaaatactcagagttcttcaaatagcactttgcctgaaagattaaaagcgtcagaaaattctgaaagtgaatacagtaggtcagaaataactctagtaggcataagtaagaaaagtgcagagcattttaagagaaaatttgccaaatcaaaccaagtgtctaggtcagtgtctagttcagtgcaggtgtgtcctgaagttggaaagagaaacttacttaaagttttgaaggagactttgattgagtggaagacagaagaaacattgaggtttttgtatggccagaattatgcttctgtgtgtctgaaacccgaagcctctctggttaaagaagaacttgatgaagatgacataatctcagatccagatagtcatttccctgcctggagggaatctcagaacagcttggatgagtctttaccttttaggggctcaggtacagccattaaaccactgccaagttacgagaatttgaaaaaagaaactgaaaagttaaatctgaggatcagggagttttacagaggacggtatgttttgggtgaagaaaccaccaaatcacaagactcagaagagcatgattccacctttccactgatagactcaagttcccagaaccagattagaaaacgcatcgtacttgaaaagttgagtaaagtgttgcctgggcttctggttcctcttcagattacattgggagatatttacacacaacttaaaaatcttgttcgaactttcaggttaacaaatagaaatattatacacaaacctgcggaatggactttaattgctatggtgttgctgtcattactgaccccaattcttggcattcagaaacattctcaggaaggtatggtgtttacacggtttctagacaccctccttgaagaattacatctaaaaaatgaagaccttgaaagtctaaccatcatatttagaaccagctgtttaccagagtgatatattccatgaagacaaaatagaagatgaacttctattcaccgtttctggaattctagccgccatgatggtctggtggtgactgataactagttttattccaagacatacctttacctctttaagtttcaatctcccatctcccagtccttcagtccccaactgcagaggatgacctccccagatagaggagaatcattactccaacaagaataaccaagtctttgtatccctagtacaagacatagtatttttattcgaaaatgaatgtttaagtattaaattgaaacttgaatgaatattcaagaaaatataatgatctctactttttctggatgatttccagccatcatatcagtttgccaaaaaaattgagaaagttatgattttgacctcccaacctaaactctaaattctaaagatcagtaaacaattaggtcaataaatacatacaatttaagatgaagccctttggaagtctagtccaaaacaggaaaatctcagaactttctggactcaaggaaatgctttaaatggaatctgtagtttgtttgcaggagagacaatttctagaatttagattgcttttcaaaatgtttatcaggtaggcaagttagcagttgaggcggaacacagacaacttggggagctttactggaaggccaagaaaatactcttggacactggaggaaatgacagctactaaagcccaatcatggaaaaggaccagaaagcagcccactggaatggggagcttagtgggcaaggaggtagggatataatttctcttcttggctccaccagtaattagctctgtggcccagtcacctaaactttctggacttcagttcaggttgtatggcagtaggccatagaattggctactgccatacaatctctatgggaaaggactgcaaaaactaaattttatctctgtatgggcaaaggctactgtcatcctgttgttggtctggggccactctgacaattttttttaacctcatttgattgtgtaagggtctaaccacaacaaaaaatcatagtgtaatagaattaatcaagttcagcaaggtcacaggctagatcaatatacagaaaatcaattgtatttttctgttcagaaaactccaaaaatgaaataaagaaaattgtgttcacaatatcaccaaagagaa

SEQ ID NO: 6596 - protein, 612 aa, Homo sapiens; identical to SEQ ID NO: 6592

SEQ ID NO: 6597 - DNA, 1954 bp, Homo sapiens
cattaaaacatcagatatcgacaatcctagccactttgaaaagcaatatgaatctagttcttctagcactcacagtgatagtagcagtgacaatgagcaagactttgtttcctccattctaccaggaaacagaccaaattcaacaaatattagaccacagctgcaccaaaaaagcataatgaaaaagaaagctggtcacaaagctaactccaaacacaaagacaaagaacagacagtagtagatgtcactgagcagttaggcgattgcaaattagatagtcaggagaaagatgctacatgtgaacttcctttacagaaagtaaatactcagagttcttcaaatagcactttgcctgaaagattaaaagcgtcagaaaattctgaaagtgaatacagtaggtcagaaataactctagtaggcataagtaagaaaagtgcagagcattttaagagaaaatttgccaaatcaaaccaagtgtctaggtcagtgtctagttcagtgcaggtgtgtcctgaagttggaaagagaaacttacttaaagttttgaaggagactttgattgagtggaagacagaagaaacattgaggtttttgtatggccagaattatgcttctgtgtgtctgaaacccgaagcctctctggttaaagaagaacttgatgaagatgacataatctcagatccagatagtcatttccctgcctggagggaatctcagaacagcttggatgagtctttaccttttaggggctcaggtacagccattaaaccactgccaagttacgagaatttgaaaaaagaaactgaaaagttaaatctgaggatcagggagttttacagaggacggtatgttttgggtgactgataactagttttattccaagacatacctttacctctttaagtttcaatctcccatctcccagtccttcagtccccaactgcagaggatgacctccccagatagaggagaatcattactccaacaagaataaccaagtctttgtatccctagtacaagacatagtatttttattcgaaaatgaatgtttaagtattaaattgaaacttgaatgaatattcaagaaaatataatgatctctactttttctggatgatttccagccatcatatcagtttgccaaaaaaattgagaaagttatgattttgacctcccaacctaaactctaaattctaaagatcagtaaacaattaggtcaataaatacatacaatttaagatgaagccctttggaagtctagtccaaaacaggaaaatctcagaactttctggactcaaggaaatgctttaaatggaatctgtagtttgtttgcaggagagacaatttctagaatttagattgcttttcaaaatgtttatcaggtaggcaagttagcagttgaggcggaacacagacaacttggggagctttactggaaggccaagaaaatactcttggacactggaggaaatgacagctactaaagcccaatcatggaaaaggaccagaaagcagcccactggaatggggagcttagtgggcaaggaggtagggatataatttctcttcttggctccaccagtaattagctctgtggcccagtcacctaaactttctggacttcagttcaggttgtatggcagtaggccatagaattggctactgccatacaatctctatgggaaaggactgcaaaaactaaattttatctctgtatgggcaaaggctactgtcatcctgttgttggtctggggccactctgacaattttttttaacctcatttgattgtgtaagggtctaaccacaacaaaaaatcatagtgtaatagaattaatcaagttcagcaaggtcacaggctagatcaatatacagaaaatcaattgtatttttctgttcagaaaactccaaaaatgaaataaagaaaattgtgttcacaatatcaccaaagagaa

SEQ ID NO: 6598 - protein, 228 aa, Homo sapiens
MKKKAGHKANSKHKDKEQTVVDVTEQLGDCKLDSQEKDATCELPLQKVNTQSSSNSTLPERLKASENSESEYSRSEITLVGISKKSAEHFKRKFAKSNQVSRSVSSSVQVCPEVGKRNLLKVLKETLIEWKTEETLRFLYGQNYASVCLKPEASLVKEELDEDDIISDPDSHFPAWRESQNSLDESLPFRGSGTAIKPLPSYENLKKETEKLNLRIREFYRGRYVLGD

SEQ ID NO: 6599 - DNA, 840 bp, Homo sapiens
ctcaaatttaaatctaattctcaagtctagttattttcctactgtgccacagatacaaacttttgtgttttaatgtttattgttctgcttatcaaagaaagaatgtaaacttatgattctgttttgctttgtttaaaaatgtgattcagcatgattccacctttccactgatagactcaagttcccagaaccagattagaaaacgcatcgtacttgaaaagttgagtaaagtgttgcctgggcttctggttcctcttcagattacattgggagatatttacacacaacttaaaaatcttgttcgaactttcaggttaacaaatagaaatattatacacaaacctgcggaatggactttaattgctatggtgttgctgtcattactgaccccaattcttggcattcagaaacattctcaggaaggtatggtgtttacacggtttctagacaccctccttgaagaattacatctaaaaaatgaagaccttgaaagtctaaccatcatatttagaaccagctgtttaccagagtgatatattccatgaagacaaaatagaagatgaacttctattcaccgtttctggaattctagccgccatgatggtctggtggtgactgataactagttttattccaagacatacctttacctctttaagtttcaatctcccatctcccagtccttcagtccccaactgcagaggatgacctccccagatagaggagaatcattactccaacaagaataaccaagtctttgtatccctagtacaagacatagtatttttattcgaaaatgaatgtttaagtattaaattgaaacttgaatgaatattcaag

SEQ ID NO: 6600 - protein, 55 aa, Homo sapiens
MVLLSLLTPILGIQKHSQEGMVFTRFLDTLLEELHLKNEDLESLTIIFRTSCLPE

SEQ ID NO: 6601 - DNA, 1708 bp, Homo sapiens
ctcaaatttaaatctaattctcaagtctagttattttcctactgtgccacagatacaaacttttgtgttttaatgtttattgttctgcttatcaaagaaagaatgtaaacttatgattctgttttgctttgtttaaaaatgtgattcagcatgattccacctttccactgatagactcaagttcccagaaccagattagaaaacgcatcgtacttgaaaagttgagtaaagtgttgcctgggcttctggttcctcttcagattacattgggagatatttacacacaacttaaaaatcttgttcgaactttcaggttaacaaatagaaatattatacacaaacctgcggaatggactttaattgctatggtgttgctgtcattactgaccccaattcttggcattcagaaacattctcaggaaggtatggtgtttacacggtttctagacaccctccttgaagaattacatctaaaaaatgaagaccttgaaagtctaaccatcatatttagaaccagctgtttaccagagtgatatattccatgaagacaaaatagaagatgaacttctattcaccgtttctggaattctagccgccatgatggtctggtggtgactgataactagttttattccaagacatacctttacctctttaagtttcaatctcccatctcccagtccttcagtccccaactgcagaggatgacctccccagatagaggagaatcattactccaacaagaataaccaagtctttgtatccctagtacaagacatagtatttttattcgaaaatgaatgtttaagtattaaattgaaacttgaatgaatattcaagaaaatataatgatctctactttttctggatgatttccagccatcatatcagtttgccaaaaaaattgagaaagttatgattttgacctcccaacctaaactctaaattctaaagatcagtaaacaattaggtcaataaatacatacaatttaagatgaagccctttggaagtctagtccaaaacaggaaaatctcagaactttctggactcaaggaaatgctttaaatggaatctgtagtttgtttgcaggagagacaatttctagaatttagattgcttttcaaaatgtttatcaggtaggcaagttagcagttgaggcggaacacagacaacttggggagctttactggaaggccaagaaaatactcttggacactggaggaaatgacagctactaaagcccaatcatggaaaaggaccagaaagcagcccactggaatggggagcttagtgggcaaggaggtagggatataatttctcttcttggctccaccagtaattagctctgtggcccagtcacctaaactttctggacttcagttcaggttgtatggcagtaggccatagaattggctactgccatacaatctctatgggaaaggactgcaaaaactaaattttatctctgtatgggcaaaggctactgtcatcctgttgttggtctggggccactctgacaattttttttaacctcatttgattgtgtaagggtctaaccacaacaaaaaatcatagtgtaatagaattaatcaagttcagcaaggtcacaggctagatcaatatacagaaaatcaattgtatttttctgttcagaaaactccaaaaatgaaataaagaaaattgtgttcacaatatcaccaaagagaa

SEQ ID NO: 6602 - protein, 55 aa, Homo sapiens; identical to SEQ ID NO: 6600

SEQ ID NO: 6603 - DNA, 1382 bp, Homo sapiens
gctggcactggacggagtagggaaccctagccgttatcccaccaaagggtcccagcgcctagaggggctgcggaaagctcctacaatacgaggagcccttggagcccagagcgggatcctgcgagccgaggccccgttctctgttaggatcacggggactgccccaggcagctgctgggcccggtcgcggacctcggccagaacatcctcccagaacacagaggaatctgacatcagtggcctcccttggtagaggtggggagccgaggggcggcagtgtggaagggccatcggcctaggtctttcgtatcccctccggcctctcggggctgtgcgttcggaaacagcgaaaggaacggcctcaggaatctggcctcagccggagcactggtgaacacaggctcccgtcgcgccaagggaagtaggaaaagctgcttccgggcggaggggctgcacttccggggcccgcgtcccccggcggcttcgccgagaaggggctttgggagcttaagggcgccggcacgcgttcccctggcgcagagctcgctagccggggcgcgggctgcctccttgttctggtgtgatccgaatgtaacggagcggactttgggatccagaaccccggactgaggttgtgcttggcttgaggggcgggctggatttttcctcttaggatttatttccctggagacctcatgaagaatgatgtgggttctatagggtacagtgtgatctgggtcctgcctaatctcctttctaaacttcagaaaatcatgtaccttggagttgtggaggcatgtttataagcagatctgagttttgccacactggaatttatttattcattgaacaaatatttaatacctactacaattcttagccgatatatcagcacaacttctctgctccaactagtctacattgcaaagcatctcctagtgtctttggaagaaggatctatggtgttatatgtgaacaaagatgtagactagtaaggtatcaagatttgatggggatatccagacaacttggagccaagtccccacagctggatcagacaacttttggtgacatctcacagtgtggattatcaagccagtgtatcagtctggagcctaggttttttgcctttagctttgctcaggatgacttctgctcttctatggcaatacttgagaagctacagctttgattagacgagaggctatttcaataactttctcctgataagaagaccaccgaccgtggacggattctggccagtttacaaaggctgcataccatagggcagggcaccccactatggcaaacactaataatgatattgctcctgattttgtttctgaagggaatgcctctaagatttcttcattaattataag

SEQ ID NO: 6604 - protein, 60 aa, Homo sapiens
MGISRQLGAKSPQLDQTTFGDISQCGLSSQCISLEPRFFAFSFAQDDFCSSMAILEKLQL

SEQ ID NO: 6605 - DNA, 3191 bp, Homo sapiens
agggtcgcgtcaccatgaagcttcctctcgggccgacagctctagacactcgcaggtgggccagggacaatcatcagggcccaggacaagcaggaaccagggatccagtgttagccaggacagtgacagtcagggacactcagaagactctgagaggtggtctgggtctgcttccagaaaccatcttggatctgcttgggagcagtcaagagatggctccagacaccctgggtcccatcacgaagacagagccggtcacgggcactctgcagacagctccagacaatcaggcactcgtcacacagagtcttcctctcgtggacaggctgcgtcatcccatgaacaggcaagatcaagtgcaggagaaagacatggatcccaccaccagctccagtcagcagacagctccagacactcaggcattgggcatggacaagcttcatctgcagtcagagacagtggacaccgagggtacagtggtagtcaggccagtgacagtgagggacattcagaagactcagacacacagtcagtgtcagcacagggaaaagctgggccccatcagcagagccacaaagagtccgcacgtggccagtcaggggaaagtctggacgttcagggtctttcctctaccaggtgagcactcatgaacagtctgagtctgcccatgggcggaccaggaccagcactggacgaagacaaggatcccaccacgagcaggcacgagacagctccaggcactcagcgtcccaagagggtcaggacaccattcgtggacacccggggtcaagcagaagaggaaggcagggatcccactacgagcaatcggtagataggtctggacactcagggtcccatcacagccacaccacatcccagggaaggtctgatgcctcccgtgggcagtcaggatccagaagtgccagcagacaaactcgtaatgacgaacaatcaggagatggctccaggcactcatggtcgcatcaccatgaagcttccactcaggcggacagctctagacactcacagtccggccagggacaatcagcggggcccaggacaagcaggaaccagggatccagtgttagccaggacagtgacagtcagggacactcagaagactctgagaggtggtctgggtctgcttccagaaaccatcgtggatctgctcaggagcagtcaagagatggctccagacaccccacgtcccatcacgaagacagagccggtcacgggcactctgcagagagctccagacaatcaggcactcatcatgcagagaattcctctggtggacaggctgcatcatcccatgaacaggcaagatcaagtgcaggagagagacatggatcccaccaccagcagtcagcagacagctccagacactcaggcattgggcacggacaagcttcatctgcagtcagagacagtggacaccgagggtccagtggtagtcaggccagtgacagtgagggacattcagaagactcagacacacagtcagtgtcagcccacggacaggctgggccccatcagcagagccaccaagagtccacacgtggccggtcagcaggaaggtctggacgttcagggtctttcctctaccaggtgagcactcatgaacagtctgagtctgcccatggacgggctgggcccagtactggaggaagacaaggatcccgccacgagcaggcacgagacagctccaggcactcagcgtcccaagagggtcaggacaccattcgtggacacccggggtcaaggagaggaggaagacagggatcctaccacgagcaatcggtagataggtctggacactcagggtcccatcacagccacaccacatcccagggaaggtctgatgcctcccatgggcagtcaggatccagaagtgcaagcagagaaacacgtaatgaggaacagtcaggagacggctccaggcactcagggtcgcgtcaccatgaagcttccactcaggctgacagctctagacactcacagtccggccagggtgaatcagcggggtccaggagaagcaggcgccagggatccagtgttagccaggacagtgacagtgaggcatacccagaggactctgagaggcgatctgagtctgcttccagaaaccatcatggatcttctcgggagcagtcaagagatggctccagacaccccggatcctctcaccgcgatacagccagtcatgtacagtcttcacctgtacagtcagactctagtaccgctaaggaacatggtcactttagtagtctttcacaagattctgcgtatcactcaggaatacagtcacgtggcagtcctcacagttctagttcttatcattatcaatctgagggcactgaaaggcaaaaaggtcaatcaggtttagtttggagacatggcagctatggtagtgcagattatgattatggtgaatccgggtttagacactctcagcacggaagtgttagttacaattccaatcctgttgttttcaaggaaagatctgatatctgtaaagcaagtgcgtttggtaaagatcatccaaggtattatgcaacgtatattaataaggacccaggtttatgtggccattctagtgatatatcgaaacaactgggatttagtcagtcacagagatactattactatgagtaagaaattaatggcaaaggaattaatccaagaatagaagaatgaagcaagttcactttcaatcaagaaacttcataatactttcagggaagttatcttttcctgtcaatctgtttaaaatatgctatagtatttcattagtttggtggtagcttatttttattgtgtaatgatctttaaacgctatatttcagaaatattaaatggaagaaatcaatatcatggagagctaactttagaaaactagctggagtattttaggagattctgggtcaagtaatgttttatgtttttgaaagtttaagttttagacactccccaaatttctaaattaatctttttcagaaatatcgaaggagccaaaaatataaaacagttctgtataccaaagtggctatatcaacatcagggctagcacatctttctctattatccttctattggaattctagtattctgtattcaaaaaatcatcttggacataattaatattatagtaagctgcatctaaattaaaaataaactattcatcatataat

SEQ ID NO: 6606 - protein, 211 aa, Homo sapiens
MKLPLGPTALDTRRWARDNHQGPGQAGTRDPVLARTVTVRDTQKTLRGGLGLLPETILDLLGSSQEMAPDTLGPITKTEPVTGTLQTAPDNQALVTQSLPLVDRLRHPMNRQDQVQEKDMDPTTSSSQQTAPDTQALGMDKLHLQSETVDTEGTVVVRPVTVRDIQKTQTHSQCQHREKLGPISRATKSPHVASQGKVWTFRVFPLPGEHS

SEQ ID NO: 6607 - DNA, 3191 bp, Homo sapiens
agggtcgcgtcaccatgaagcttcctctcgggccgacagctctagacactcgcaggtgggccagggacaatcatcagggcccaggacaagcaggaaccagggatccagtgttagccaggacagtgacagtcagggacactcagaagactctgagaggtggtctgggtctgcttccagaaaccatcttggatctgcttgggagcagtcaagagatggctccagacaccctgggtcccatcacgaagacagagccggtcacgggcactctgcagacagctccagacaatcaggcactcgtcacacagagtcttcctctcgtggacaggctgcgtcatcccatgaacaggcaagatcaagtgcaggagaaagacatggatcccaccaccagctccagtcagcagacagctccagacactcaggcattgggcatggacaagcttcatctgcagtcagagacagtggacaccgagggtacagtggtagtcaggccagtgacagtgagggacattcagaagactcagacacacagtcagtgtcagcacagggaaaagctgggccccatcagcagagccacaaagagtccgcacgtggccagtcaggggaaagctctggacgttcagggtctttcctctaccaggtgagcactcatgaacagtctgagtccacccatggacagtctgcgcccagcactggaggaagacaaggatcccattatgatcaggcacaagacagctccaggcactcagcatcccaagagggtcaggacaccattcgtggacacccggggccaagcagaggaggaagacaggggtcccaccaagagcaatcggtagataggtctggacactcagggtctcatcacagccacaccacatcccagggaaggtctgatgcctcccgtgggcagtcaggatccagaagtgcaagcagaaaaacatatgacaaggaacaatcaggagatggctctaggcactcagggtcgcatcatcatgaagcttcctcttgggccgacagctctagacactcaagtccggccagggacaatcagcggggcccaggacaagcaggaaccagggatccagtgttagccaggacagtgacagtcagggacactcagaagactctgagaggtggtctgggtctgcttccagaaaccatcgtggatctgctcaggagcagtcaagagatggctccagacaccccacgtcccatcacgaagacagagccggtcacgggcactctgcagagagctccagacaatcaggcactcatcatgcagagaattcctctggtggacaggctgcatcatcccatgaacaggcaagatcaagtgcaggagagagacatggatcccaccaccagcagtcagcagacagctccagacactcaggcattgggcacggacaagcttcatctgcagtcagagacagtggacaccgagggtccagtggtagtcaggccagtgacagtgagggacattcagaagactcagacacacagtcagtgtcagcccacggacaggctgggccccatcagcagagccaccaagagtccacacgtggccggtcagcaggaaggtctggacgttcagggtctttcctctaccaggtgagcactcatgaacagtctgagtctgcccatggacgggctgggcccagtactggaggaagacaaggatcccgccacgagcaggcacgagacagctccaggcactcagcgtcccaagagggtcaggacaccattcgtggacacccggggtcaaggagaggaggaagacagggatcctaccacgagcaatcggtagataggtctggacactcagggtcccatcacagccacaccacatcccagggaaggtctgatgcctcccatgggcagtcaggatccagaagtgcaagcagagaaacacgtaatgaggaacagtcaggagacggctccaggcactcagggtcgcgtcaccatgaagcttccactcaggctgacagctctagacactcacagtccggccagggtgaatcagcggggtccaggagaagcaggcgccagggatccagtgttagccaggacagtgacagtgaggcatacccagaggactctgagaggcgatctgagtctgcttccagaaaccatcatggatcttctcgggagcagtcaagagatggctccagacaccccggatcctctcaccgcgatacagccagtcatgtacagtcttcacctgtacagtcagactctagtaccgctaaggaacatggtcactttagtagtctttcacaagattctgcgtatcactcaggaatacagtcacgtggcagtcctcacagttctagttcttatcattatcaatctgagggcactgaaaggcaaaaaggtcaatcaggtttagtttggagacatggcagctatggtagtgcagattatgattatggtgaatccgggtttagacactctcagcacggaagtgttagttacaattccaatcctgttgttttcaaggaaagatctgatatctgtaaagcaagtgcgtttggtaaagatcatccaaggtattatgcaacgtatattaataaggacccaggtttatgtggccattctagtgatatatcgaaacaactgggatttagtcagtcacagagatactattactatgagtaagaaattaatggcaaaggaattaatccaagaatagaagaatgaagcaagttcactttcaatcaagaaacttcataatactttcagggaagttatcttttcctgtcaatctgtttaaaatatgctatagtatttcattagtttggtggtagcttatttttattgtgtaatgatctttaaacgctatatttcagaaatattaaatggaagaaatcaatatcatggagagctaactttagaaaactagctggagtattttaggagattctgggtcaagtaatgttttatgtttttgaaagtttaagttttagacactccccaaatttctaaattaatctttttcagaaatatcgaaggagccaaaaatataaaacagttctgtataccaaagtggctatatcaacatcagggctagcacatctttctctattatccttctattggaattctagtattctgtattcaaaaaatcatcttggacataattaatattatagtaagctgcatctaaattaaaaataaactattcatcatataat

SEQ ID NO: 6608 - protein, 65 aa, Homo sapiens
MPPVGSQDPEVQAEKHMTRNNQEMALGTQGRIIMKLPLGPTALDTQVRPGTISGAQDKQEPGIQC

SEQ ID NO: 6609 - DNA, 5060 bp, Homo sapiens
aggttcacatttattgccaaaagatgtctactctcctggaaaacatctttgccataattaatcttttcaagcaatattcaaaaaaagataaaaacactgacacattgagtaaaaaagagctgaaggaacttctggaaaaggaatttcggcaaatcctgaagaatccagatgacccagatatggttgatgtcttcatggatcacttggatatagaccacaacaagaaaattgacttcactgagtttcttctgatggtattcaagttggctcaagcatattatgagtctaccagaaaagagaatttaccgatatcaggacacaagcacagaaagcacagtcatcatgataaacatgaagataataaacaggaagaaaacaaagaaaacagaaaaagaccctcaagtctggaaagaagaaacaatagaaaagggaataagggaagatccaagagcccaagagaaacaggggggaaaaggcatgaatctagttctgaaaaaaaagaaagaaaaggatattcacctactcatagagaagaagaatatggaaaaaaccatcataactcaagtaaaaaagagaaaaacaagactgaaaatactagattaggagacaataggaagaggctaagtgaaagacttgaagagaaagaagacaatgaagaaggagtatatgattatgaaaatacaggaagaatgactcaaaaatggatacaatcaggccatattgccacatattacacaatccaggatgaagcctatgacaccactgatagtctattagaagaaaacaaaatatatgaaagatcaaggtcatctgatggcaaatcatcatctcaagtgaacaggtcaagacatgaaaatacaagccaggtaccattgcaggagtccaggacaagaaagcgtaggggatccagagttagccaggacagggacagtgagggacactcagaagactctgagaggcactctgggtcggcttccagaaaccatcatggatctgcgtgggagcagtcaagagatggctccagacaccccaggtcccatgatgaagacagagccagtcatgggcactctgcagacagctccagacaatcaggcactcgtcacgcagagacttcctctcgtggacagactgcatcatcccatgaacaggcaagatcaagtccaggagaaagacatggatccggccaccagcagtcagcagacagctccagacactcagccactgggcgcgggcaagcttcatctgcagtcagcgatcgtggacaccgggggtctagcggtagtcaggccagtgacagtgagggacattcagaaaactcagacacacaatcagtgtcaggccacggaaaggctgggctgagacagcagagccaccaagagtccacacgtggccggtcaggggaacggtctggacgttcagggtcttccctctaccaggtgagcactcatgaacagcctgactctgcccatggacggaccgggaccagcactggaggaagacaaggatcgcaccacgagcaggcacgagacagctccaggcattcagcgtcccaagagggtcaggacaccattcgtggacacccgggggaaggtctgatgcctcccatgggcagtcaggatccagaagtgcaagcagacaaacacgaaatgaggaacaatcaggagacggcaccaggcactcagggtcacgtcatcatgaagcttcctctcaggctgacagctctagacactcacaggtgggccagggacaatcatcggggcccaggacaagtaggaaccagggatccagtgttagccaggacagtgacagtcagggacactcagaagactctgagaggtggtctgggtctgcttccagaaaccatcatggatctgctcaggagcagtcaagagatggctccagacaccccaggtcccatcacgaagacagagctggtcatgggcactctgcagacagctccagaaaatcaggcactcgtcacacacagaattcctctagtggacaggctgcgtcatcccatgaacaggcaagatcaagtgcaggagaaagacatggatcccgccaccagctccagtcagcagacagctccagacactcaggcactgggcacggacaagcttcatctgcagtcagagacagtggacaccgagggtccagtggtagtcaggccactgacagtgagggacattcagaagactcagacacacagtcagtgtcaggccatggacaggctggtcaccatcagcagagccaccaagagtccgcacgtgaccggtcaggggaaaggtctcgacgttcagggtctttcctctaccaggcaggccagggacaatcagaggggtccaggacaagcaggcgccagggatccagtgttagccaggacagtgacagtgagggacattcagaagactctgagaggtggtctgggtctgcttccagaaaccatcgtggatctgctcaggagcagtcaagacatggctccagacaccccaggtcccatcacgaagacagagccggtcacgggcactctgcagacagctccagacaatcaggaactcctcacgcagagacttcctctggtggacaggctgcgtcatcccatgaacaggcaagatcaagtccaggagaaagacacggatcccgccaccagcagtcagcagacagctccagacactcaggcattccgcgcagacaagcttcatctgcagtcagagacagtggacactgggggtccagtggtagtcaggccagtgatagtgagcactcatgaacagtctgagtctgcccatgggcggaccaggaccagcactggacgaagacaaggatcccaccacgagcaggcacgagacagctccaggcactcagcgtcccaagagggtcaggacaccattcgtgcacacccggggtcaaggagaggaggaaggcagggatcccaccatgagcaatcggtagatagatctggacactcagggtcccatcacagccacaccacatcccagggaaggtctgatgcctcccatgggcagtcaggatccagaagtgcaagcagacaaactcgtaaggacaaacaatcaggagacggctccaggcactcagggtcacgtcaccatgaagctgcctcttgggctgacagctctagacactcacaggtgggacaggaacaatcatcggggtccaggacaagcaggcaccagggatccagtgttagccaggacagtgacagtgagagacactcagacgactccgagaggttgtctgggtctgcttccagaaaccatcatggatcttctcgggagcagtcaagagatggctccagacaccctgggttccatcaagaagacagagccagtcacgggcactctgcagacagctccagacaatcaggcactcatcacacagagtcttcctctcatggacaggctgtgtcatcccatgaacaggcaagatcaagtccaggagaaagacatggatcccgccaccagcagtcagcagacagctccagacactcaggcattgggcacagacaagcttcatctgcagtcagagacagtggacaccgagggtccagtggtagtcaggtcactaacagtgagggacattcagaagactcagacacacagtcagtgtcagcccacggacaagctgggccccatcagcagagccacaaagagtccgcacgtggccagtcaggggaaagctctggacgttcaaggtctttcctctaccaggtgagctctcatgaacagtctgagtccacacacggacagactgcacccagcactggaggaagacaaggatcccgccatgagcaggcacgaaacagctctaggcactcagcatcccaagacggtcaggacaccattcgtggacacccggggtcaagcagaggaggaaggcagggatcctaccacgagcaatcagtagataggtctggacactcagggtaccatcacagccacaccacaccccagggaaggtctgatgcctcccatgggcagtcaggacccagaagtgcaagcaggcaaacaagaaatgaggaacaatcaggagacggctccaggcactcagggtcacgtcaccatgaaccttccactcgggccggcagctctagacactcacaggtgggccagggagaatcagcggggtccaagacaagcaggcgccagggatccagtgttagtcaggacagggacagtgagggacactcagaagactctgagaggcggtctgagtcggcttccagaaaccattatggatctgctcgggagcagtcaagacatggctccaggaaccccaggtcccatcaagaagatagagccagtcatgggcactctgcagagagctccagacaatcaggcactcgtcatgcagagacttcctctggtggacaggctgcatcatcccaggaacaggcaaggtcaagtccaggagaaagacatggatcccgccaccagcagtcagcagacagctccacagactcaggcactgggcgcagacaagattcatctgtagtcggagacagtggaaaccgagggtccagtggtagccaggccagtgacagcgagggacactcagaagagtcagacacacagtcagtgtcagcccacggacaggctgggccccatcagcagagccaccaagagtccacacgtggccagtcaggggaaaggtctggacgttcagggtctttcctctaccaggtgagcactcatgaacagtctgagtccgcccatggacgcacagggcccagcactggaggaagacaaagatcccgccacgagcaggcacgagacagctccaggcactcagcgtcccaagagggtcaggacaccattcgtggacacccagggtcaagcagaggaggaaggcagggatcccactatgagcaatcggtagatagttctggacactcagggtctcatcacagccacaccacgtcccaggaaaggtctgatgtctcccgtgggcagtcaggatccagaagtgtcagcagacaaacacgtgggccagggacaatcatcagggcccaggacaagcaggaaccagggatccagtgttag

SEQ ID NO: 6610 - protein, 1678 aa, Homo sapiens
MSTLLENIFAIINLFKQYSKKDKNTDTLSKKELKELLEKEFRQILKNPDDPDMVDVFMDHLDIDHNKKIDFTEFLLMVFKLAQAYYESTRKENLPISGHKHRKHSHHDKHEDNKQEENKENRKRPSSLERRNNRKGNKGRSKSPRETGGKRHESSSEKKERKGYSPTHREEEYGKNHHNSSKKEKNKTENTRLGDNRKRLSERLEEKEDNEEGVYDYENTGRMTQKWIQSGHIATYYTIQDEAYDTTDSLLEENKIYERSRSSDGKSSSQVNRSRHENTSQVPLQESRTRKRRGSRVSQDRDSEGHSEDSERHSGSASRNHHGSAWEQSRDGSRHPRSHDEDRASHGHSADSSRQSGTRHAETSSRGQTASSHEQARSSPGERHGSGHQQSADSSRHSATGRGQASSAVSDRGHRGSSGSQASDSEGHSENSDTQSVSGHGKAGLRQQSHQESTRGRSGERSGRSGSSLYQVSTHEQPDSAHGRTGTSTGGRQGSHHEQARDSSRHSASQEGQDTIRGHPGEGLMPPMGSQDPEVQADKHEMRNNQETAPGTQGHVIMKLPLRLTALDTHRWARDNHRGPGQVGTRDPVLARTVTVRDTQKTLRGGLGLLPETIMDLLRSSQEMAPDTPGPITKTELVMGTLQTAPENQALVTHRIPLVDRLRHPMNRQDQVQEKDMDPATSSSQQTAPDTQALGTDKLHLQSETVDTEGPVVVRPLTVRDIQKTQTHSQCQAMDRLVTISRATKSPHVTGQGKGLDVQGLSSTRQARDNQRGPGQAGARDPVLARTVTVRDIQKTLRGGLGLLPETIVDLLRSSQDMAPDTPGPITKTEPVTGTLQTAPDNQELLTQRLPLVDRLRHPMNRQDQVQEKDTDPATSSQQTAPDTQAFRADKLHLQSETVDTGGPVVVRPVIVSTHEQSESAHGRTRTSTGRRQGSHHEQARDSSRHSASQEGQDTIRAHPGSRRGGRQGSHHEQSVDRSGHSGSHHSHTTSQGRSDASHGQSGSRSASRQTRKDKQSGDGSRHSGSRHHEAASWADSSRHSQVGQEQSSGSRTSRHQGSSVSQDSDSERHSDDSERLSGSASRNHHGSSREQSRDGSRHPGFHQEDRASHGHSADSSRQSGTHHTESSSHGQAVSSHEQARSSPGERHGSRHQQSADSSRHSGIGHRQASSAVRDSGHRGSSGSQVTNSEGHSEDSDTQSVSAHGQAGPHQQSHKESARGQSGESSGRSRSFLYQVSSHEQSESTHGQTAPSTGGRQGSRHEQARNSSRHSASQDGQDTIRGHPGSSRGGRQGSYHEQSVDRSGHSGYHHSHTTPQGRSDASHGQSGPRSASRQTRNEEQSGDGSRHSGSRHHEPSTRAGSSRHSQVGQGESAGSKTSRRQGSSVSQDRDSEGHSEDSERRSESASRNHYGSAREQSRHGSRNPRSHQEDRASHGHSAESSRQSGTRHAETSSGGQAASSQEQARSSPGERHGSRHQQSADSSTDSGTGRRQDSSVVGDSGNRGSSGSQASDSEGHSEESDTQSVSAHGQAGPHQQSHQESTRGQSGERSGRSGSFLYQVSTHEQSESAHGRTGPSTGGRQRSRHEQARDSSRHSASQEGQDTIRGHPGSSRGGRQGSHYEQSVDSSGHSGSHHSHTTSQERSDVSRGQSGSRSVSRQTRGPGTIIRAQDKQEPGIQC

SEQ ID NO: 6611 - DNA, 4178 bp, Homo sapiens
gctcgtggtgcgatccttgtcttcctccagtgctggtcccggtccgtccatgggcagagtcaggctgttcatgagtgctcacctggtagagggaagaccctgaacgtccagaccgttcccctgaccggccacgtgtggactcttggtggctctgctgtctcagcccagcctttccgtggcctgacactgattgtgtgtctgagttttctgaatgtccctcactgtcactggcctgactaccgctagacccccggtgtccacgatcgctgactgcagatgaagcttgcccgcgcccagtggctgagtgtctggagctgtctgctgactgctggtggccggatccatgtctttctcctggacttgatcttgcctgttcatgggatgatgcagtctgtccacgagaggaagtctctgcgtgacgagtgcctgattgtctggagctgtctgcagagtgcccatgactggctctgtcttcatcatgggacctggggtgtctggagccatctcttgactgctcccacgcagatccatgatggtttctggaagccgacccagagtgcctctcagagtcttctgagtgtccctcactgtccctgtcctggctaactctggatcccctacgctttcttgtcctggactcctgcaatgactcataatatgcttgagccaacttgaataccatcagaagaaactcagtgaagtcaattttcttgttgtggtctatatccaagtgatccatgaagacatcaaccatatctgggtcatctggattctgtacagagggaagtcacagagggagactgcatcagacagaatcacattatcagccaattaattcaaagttaatttaaggaacctgatctttgagtattaaaaagtgggacaaaatcttttttttttttaagacttttttgtctcatcctcattcaggtgttatatgtgaacaaagatgtagactagtaaggtatcaagatttgatggggatatccagacaacttggagccaagtccccacagctggatcagacaacttttggtgacatctcacagtgtggattatcaagccagtgtatcagtctggagcctaggttttttgcctttagctttgctcaggatgacttctgctcttctatggcaatacttgagaagctacagctttgattagacgagaggctatttcaataactttctcctgataagaagaccaccgaccgtggacggattctggccagtttacaaaggctgcataccatagggcagggcaccccactatggcaaacactaataatgatattgctcctgattttgtttctgaagggaatgcctctaagatttcttcattaattataagagactgggtctcactctgttgcccaagctggagaacagtggcaccatcatagctcactgcagccttcaacttctgggctcaagtgcttctcccacctcagcctcccaagtagctgggacaacaggtgaaattgaaggccagcttttggaactcaaccttcaaaggaacttaaaatttccattatgtagagtccctgaggaaactggatccactagctacactggctgagaatgctctcaccccaggatttcatttttattttaccacatcattgttggtatcttaagatcaatgtactggagcagcggggtctcacaaagaggatacctggtgacacgcccaggctttcagaatgcactatagggctttagtgacttgtccaggttcagctgaaatgtgccatctgggacctactaatgcttgttgaactttactggatctcagaagctgggtctcagaagctcagatgttcctcagagctacgatatcaacaacctgtgatgacagagagaaggttgctccatgatggatttggaaacttactggctagctaaacctgactgaatgggaaggaatgtggatagctttggaactctagtttcactagatgagctggaatttgtattttgacaaattgcacgttatgattattaagtaatgcaactgatttttttttcccttaaaacaaacaatctagaatctgtgtaatcaaaataatttctctaaaaggctgcaagtatatgcttaaagtgttggggcattcagagcatttggaacattacattcttttgaatgtcaattggtagatgaaaataccagcttttaagtcatacatttgattttttgaaacaatatgcatttagagtttgtaagtcaagtgaataactgataaggtaaaaaaaagggggagttcattgttgagtatgaatttaaagtaaccagactgccttttgtccagtggctgtcagtaatttacttcagcaggcatttttttttttttgaggctgttctatgatatcatgacccttcttgtaggaatgtgcttccagtggtgaggcagtctgagaatgtgtgaagcagtataatgaagccagaccaagatggaagcttggcctgggatttgagcatcaggaaaactgttgaagggttatgtatacatcacacacacacacacacacacacacacacacacacacacacacacactctcttccatactcctataacaacgtatagtatttactatacctggtgacaggtatttactatacattgttgaagatctataacatggaatgcctagtgctaagtgcagtgtccttagtgaaattgtattggtttggaattatttatgagtttgggattatttgtcactacccttaaatgatcttgacactcacctatttgaaaagatattgaggatttgccatttgatattgaccagggtgtattgtgcacaaatattgtgaatatacatctgtctgtccttaaatcactgtaagttttaactggaatagatttgctccacattactcggtagggctgatatttcatgcctcatggatgagaaaagaataggcaaaaattatatctcgggctgcctcacacatcttttaacaggataagggaaaaataaatataagacctatgagttatggcatcaggcttgaactttaatttatgaattaaaccaacaatattattgattattgcaattatctatcttaatttcatttgttctccttttaaaaattaattatgtttattttacctattgtgaataaagtcactcctcccatgtgcttatttcttgactctggcactaattattcttcagtgcctagatttcctgggactgctcagtttaagtaacttctgaacattggtctctgagagaaaagacagtgaagtgggatctgtggaaaaacacatctgcaaatgtctcatttttttcttcaggggtaagttttcttccttggagactcttgtcttgaaaaagtgatactagatcaccatttggcaagataattacaaaaggcagatagagtaattattttacatagctgttatagggtgactaagatctcagggaatgactgtgttctgtaatccacttgccccactcaataccccaagttttatacaagccaaagatgcttggagcagaatctgctacctgaggctccagggccttggcctagggaaactaatacttaactttttaagtggtcattgatgacatcccactcctttctgagatgggtatgatttgaaaggcaggtgtattcatggagagcagggcttgggacctttgctgcaagaggaggaactattagcctagacttttctaataaggactttctcatacctgtttcctagatctggtccacatagaagaaatcagggaacacacagggtaggactcttaaaggagtatgtttcttggctttttcctaaaaactaaaacaaaaacattcatagcaaagcagtttagcccagtgactaagagtatagacattggaatctgaaagatctgggttggaattctgcttcagccatttactaattatgtaacttcacatctctgagaatgggggaaattttctttgcagggttgttacaaagcttaaaagagttaagtcaagtgcctggaacagaacagccattcaataaatcatagaaatttttgtttttacacaaatttttaaaaagtaatattttttgcatttgttagaaagactatattttctgtttagtggatgacatcatcatcataaaaatcactgttacaagttttgttttgagaattaaaatcatatattaatccc

SEQ ID NO: 6612 - protein, 60 aa, Homo sapiens; identical to SEQ ID NO: 6604

SEQ ID NO: 6613 - DNA, 1136 bp, Homo sapiens
ccaggttcacttaaacttgcaaaaagatgaccgacctcttgagaagtgttgtcaccgtaattgatgttttctacaaatacaccaagcaagatggggagtgtggcacactgagcaagggtgaactaaaggaacttctggagaaagagcttcatccagttctgaagaacccagatgatccagacacagtggatgtcatcatgcatatgctggatcgagatcatgacagaagattggactttactgagtttcttttgatgatattcaagctgactatggcctgcaacaaggtcctcagcaaagaatactgcaaagcttcagggtcaaagaagcataggcgtggtcaccgacaccaagaagaagaaagtgaaacagaagaggatgaagaggatacaccaggacataaatcaggttacagacattcaagttggagtgagggagaggagcatggatatagttctgggcactcaaggggaactgtgaaatgtagacatgggtccaactccaggaggctaggaagacaaggtaatttatccagctctgggaaccaagagggatctcagaaaagataccacaggtccagctgtggtcattcatggagtggtggcaaagacagacatggttccagctctgtagaactgagagaaagaataaacaagtcacacattagcccttctagggaatctggggaggagtatgaatctggatctggatcaaacagttgggaaaggaaagatttggagggcaaggaaatcaatttagctatattcagtcaggctgtcagtcaggaattaagggaggacaaggccatggctgtgtctcaggaggtcagccctctggatgtggtcaacctgagtctaacccctgtagtcagtcctatagtcagagaggatatggagctagagaaaatggtcaaccacagaactgtggaggacaatggagaacaggctcaagtcagtcctcttgctgtggacaatatgggtctggaggtagccagtcttgtagtaatggtcaacatgaatatggttcctgtggccgcttttcaaactcttctagttcaaatgaattttccaaatgtgatcaatatgggtctggttcaagtcagtctactagctttgaacaacatggaacaggcttga

SEQ ID NO: 6614 - protein, 369 aa, Homo sapiens
MTDLLRSVVTVIDVFYKYTKQDGECGTLSKGELKELLEKELHPVLKNPDDPDTVDVIMHMLDRDHDRRLDFTEFLLMIFKLTMACNKVLSKEYCKASGSKKHRRGHRHQEEESETEEDEEDTPGHKSGYRHSSWSEGEEHGYSSGHSRGTVKCRHGSNSRRLGRQGNLSSSGNQEGSQKRYHRSSCGHSWSGGKDRHGSSSVELRERINKSHISPSRESGEEYESGSGSNSWERKDLEGKEINLAIFSQAVSQELREDKAMAVSQEVSPLDVVNLSLTPVVSPIVREDMELEKMVNHRTVEDNGEQAQVSPLAVDNMGLEVASLVVMVNMNMVPVAAFQTLLVQMNFPNVINMGLVQVSLLALNNMEQA

SEQ ID NO: 6615 - DNA, 711 bp, Homo sapiens
agatcagtctacgcaaatgtgtttgggtgcaatgtacctggcaatttcatggggcagtcgggaggacagtgtggctgaagcacagtgagtgagaggaaaacagcaatgaagtgaatgcaactgatgcctcctcaaaagtttgctacctgccaagactttcaagcatgaaaatatctttatttttcccttttaaaattgatgggtaggccatatgggagagagggaaatactgacaaagagggcacctcaagaaaagcatgcctataaaaataatgtgacaaacaatgaaacaacacacaaacagtttgacagataagagagcaaaggatcaccacacgcccgtgattctagagcaagtggtgactttagtgtgtggctgtgctcatgcatatggaccttacacaactgcaatcagcatctgcatacctacacccagtaacctgctttctctacctaatatgatataatgagcatttttctatattgctacatagtctttataattactttaaatgactgtataatattccattcattatatcactgctgaatatttaggttgcttgtagtttttcctttgctcatttttatgaattaacaaatgtaaagtatttcacccactaccttcaaattatatatacttggtcggcactttatttccttcccgttctgcccctttatataaataaagaaaagtatgaaagattcata

SEQ ID NO: 6616 - protein, 60 aa, Homo sapiens
MKQHTNSLTDKRAKDHHTPVILEQVVTLVCGCAHAYGPYTTAISICIPTPSNLLSLPNMI

SEQ ID NO: 6617 - DNA, 1902 bp, Homo sapiens
actcctcacaccacttaacagccacttgtttcatcccacctgggcattaggttgacttcaaagatgcctcagttactgcaaaacattaatgggatcatcgaggccttcaggcgctatgcaaggacggagggcaactgcacagcgctcacccgaggggagctgaaaagactcttggagcaagagtttgccgatgtgattgtgaaaccccacgatccagcaactgtggatgaggtcctgcgtctgctggatgaagaccacacagggactgtggaattcaaggaattcctggtcttagtgtttaaagttgcccaggcctgtttcaagacactgagcgagagtgctgagggagcctgcggctctcaagagtctggaagcctccactctggggcctcgcaggagctgggcgaaggacagagaagtggcactgaagtgggaagggcggggaaagggcagcattatgaggggagcagccacagacagagccagcagggttccagagggcagaacaggcctggggttcagacccagggtcaggccactggctctgcgtgggtcagcagctatgacaggcaagctgagtcccagagccaggaaagaataagcccgcagatacaactctctgggcagacagagcagacccagaaagctggagaaggcaagaggaatcagacaacagagatgaggccagagagacagccacagaccagggaacaggacagagcccaccagacaggtgagactgtgactggatctggaactcagacccaggcaggtgccacccagactgtggagcaggacagcagccaccagacaggaagaaccagcaagcagacacaggaggccaccaatgaccagaacagagggactgagacccacggtcaaggcaggagccagaccagccaggctgtgacaggaggacatgctcagatacaggcagggacacacacccagacacccacccagaccgtggagcaggacagcagccaccagacaggaagcaccagcacccagacacaggagtccaccaatggccagaacagagggactgagatccacggtcaaggcaggagccagaccagccaggctgtgacaggaggacacactcagatacaggcagggtcacacaccgagactgtggagcaggacagaagccaaactgtaagccacggaggggctagagaacagggacagacccagacgcagccaggcagtggtcaaagatggatgcaagtgagcaaccctgaggcaggagagacagtaccgggaggacaggcccagactggggcaagcactgagtcaggaaggcaggagtggagcagcactcacccaaggcgctgtgtgacagaagggcagggagacagacagcccacagtggttggtgaggaatgggttgatgaccactcaagggagacagtgatcctcaggctggaccagggcaacttgcataccagtgtttcctcagcacagggccaggatgcagcccagtcagaagagaagcgaggcatcacagctagagagctgtattcctacttgagaagcaccaagccatgacttccccgactccaatgtccagtactggaagaagacagctggagagagtttggcttgtcctgcatggccaatccagtgggtgcatccctggacatcagctcttcattatgcagcttcccttttaggtctttctcaatgagataatttctgcaaggagctttctatcctgaactcttctttcttacctgctttgcggtgcagaccctctcaggagcaggaagactcagagcaagtcacccctttgtactgaattgtcctcatcttgtggggggtttcaggactatttttatctctgacatctctctattgccccatctaccctaatgcatcaataaaaccttaagccactgg

SEQ ID NO: 6618 - protein, 495 aa, Homo sapiens; identical to SEQ ID NO: 284

SEQ ID NO: 6619 - DNA, 818 bp, Homo sapiens
caggtagagtgcttctcaggaccaggatgaactcttggtgctggtgttttgggcagaaagagcccctgggtggaggttgaggccattcttgaagaaagacaaggataaagaaggattttggaggggaaggttcttctggaaggggagggtggaagctttattcagcttctacagagatgtcctgccagcagagccagcagcagtgccagcctcctcccaaatgtacccctaaatgccctcccaagtgtactcctaagtgtcctcccaagtgtcccccaaaatgccctccccagtgttcagccccatgcccacctccagtctcttcctgctgtggttccagctctgggggctgctgcagctctgagggtggtggctgctgcctgagccaccacaggccccgccagtccctccgacgccgacctcagagttccagctgctgtggcagtggcagtggccagcagtctgggggctccagctgctgccacagctctgggggctctggctgctgccacagctctggaggctgctgctgacctgggccatgaggagcacggaggagaaggactggcagatcccaggtgctgaagatgtgtgtcagcctgaggcttcttttctctcatttcccatggaaggacttcggaaatgccttaagttcccctctttatcctgcccatgttcactccattgtagggttgaagtctagcttgtgatattttctggcctggctttccctctcagacatagctctttggagaactaggtgttgtaattcagttatgaagctattttctctgtaacaataaagctttttattcctg

SEQ ID NO: 6620 - protein, 118 aa, Homo sapiens; identical to SEQ ID NO: 286

SEQ ID NO: 6621 - DNA, 357 bp, Homo sapiens
atgtcctgccagcagagccagcagcagtgccagcctcctcccaaatgtacccctaaatgccctcccaagtgtactcctaagtgtcctcccaagtgtcccccaaaatgccctccccagtgttcagccccatgcccacctccagtctcttcctgctgtggttccagctctgggggctgctgcagctctgagggtggtggctgctgcctgagccaccacaggccccgccagtccctccgacgccgacctcagagttccagctgctgtggcagtggcagtggccagcagtctgggggctccagctgctgccacagctctgggggctctggctgctgccacagctctggaggctgctgctga

SEQ ID NO: 6622 - protein, 118 aa, Homo sapiens; identical to SEQ ID NO: 286

SEQ ID NO: 6623 - DNA, 699 bp, Homo sapiens
gcccattccagttggagaacgtagtgagtctttcagtggagccagggtctggtttgtcgtgaggagctccgcgatgtcctctcaacagagcgccgtttccgccaaaggcttttccaaggggtcgtcccagggccccgctccgtgtcccgccccggcgcccaccccggcgcccgcctcctcctcctcctgctgcggctccggcaggggctgctgcggcgactcaggctgctgcggctccagctccaccagttgctgctgcttcccaaggagacgccgccgacagcggagtagtggttgctgctgctgcgggggcggcagccagaggtcccagcgctccaacaaccggagctcaggatgctgctccggctgctgagaggcccgcaacccccagcgctgcgctagagaaacccgcccagcccagagcgggcccgccccgctgcggctcccacgcggggctgggcctcggagtttgccccgtaaagcgaattgcactttgatgttcagaaacccactttgttctcagccacgcaaaactccctgaccccgatgtgatttttctccccggggattcgagagccatgcgtgggacactggaccctactgtctacacgggcttgcacacagcaggtgctcagcaaatgtctattgatttgattgtcttttgaagatgtcataataaagcttctacctcctgagaac

SEQ ID NO: 6624 - protein, 99 aa, Homo sapiens; identical to SEQ ID NO: 288

SEQ ID NO: 6625 - DNA, 510 bp, Homo sapiens
atgtcctgccagcagaaccagaagcagtgccaacccccacccaagtgcccctcacccaagtgtcccccaaagaacccagtacagtgtctgcctccagcttcctctggctgtgccccaagctctgggggctgtggccctagctccgagggcggctgcttcctgaaccaccacaggcgccaccaccgatgccggcgccagaggtccaactcctgtgacaggggcagtggtcagcaaggcgggggctctggctgctgccacggttctgggggctgctgctgatccagatcctgatgctgagacaagcgatctttggaggaaacaagaatcccaagaggccaagaacagccccatctgacgcatgccttcccatataccctcttctgactttcacaggctgagctggaggttttcctgtgggggatctgagctctccccagaaggcacttcttgttttatgtacaggatgtcatatgtccccctacccctgtacctgccaaggattggcagtgc

SEQ ID NO: 6626 - protein, 92 aa, Homo sapiens; identical to SEQ ID NO: 290

SEQ ID NO: 6627 - DNA, 612 bp, Homo sapiens
ctcaggaacagccttctcctgcctcctctgcacctggacaactcaactcctgccaagatgtcctgccagcagaaccagcagcagtgccaacccccacccaagtgtccctcacccaagtgtcccccaaagagcccagtacagtgtctgcctccagcttcctctggctgtgccccaagctctgggggctgtggccctagctccgagggcggctgcttcctgaaccaccacaggcgccaccaccgatgccggcgccagaggcccaactcctgtgacaggggcagtggtcagcaaggcgggggctctggctgcggccatggctctggaggctgctgctgacctggatcctgatgctgagacaagcgattttggaggaaacaagaatcccaagggcccaggaaaaccccatcttgatgcatgagttcccagataccctcttctggctttcacaggctgagctaggggttttcctgtggaaggtctgagctctccccagaaggcacttcctgtctgatgtccaggatgtcacatgttcccttacccctgtacctgtgaaggattggcagtgcttgtgcctgacctcatcaaaaaataaagctccttgtcctcattacc

SEQ ID NO: 6628 - protein, 92 aa, Homo sapiens; identical to SEQ ID NO: 292

SEQ ID NO: 6629 - DNA, 295 bp, Homo sapiens
tcctgcaaagatgtcctgccagcaaaaccagcagcagtgccagccccctcccagttgtccctcacccaagtgtcccccaaagagcccagcacagtgtctgcctccaccctcttctgactgtgctctaagctccgggggctgtggccccagttctgaaagtggctgctgcctgagccaccacaggcacttcaggtcccatcaatgccggcgccagagatccaactcctgtgacaggggcagtggtcagcaaggcgggggctcctgccgtggccatggctctgggggctgctgctga

SEQ ID NO: 6630 - protein, 94 aa, Homo sapiens; identical to SEQ ID NO: 294

SEQ ID NO: 6631 - DNA, 288 bp, Homo sapiens; identical to SEQ ID NO: 295

SEQ ID NO: 6632 - protein, 95 aa, Homo sapiens; identical to SEQ ID NO: 296

SEQ ID NO: 6633 - DNA, 270 bp, Homo sapiens; identical to SEQ ID NO: 297

SEQ ID NO: 6634 - protein, 89 aa, Homo sapiens; identical to SEQ ID NO: 298

SEQ ID NO: 6635 - DNA, 470 bp, Homo sapiens
atgggcaaagtggctccagaactcaagggcagcctagatactgatgaagagctgcaggtactggctgttgaaggtgagaaaacaacagaaggcccagtcaggcgagtgcctgcctataaaatgtgtgtcaggaccccgcttctcatctgccctgacaccctggggactgcctgctccacacctgggtctgaccagggtgagtggatcttttggaacctagacagagcacaactgaaagggttgactgaactcccacaaagatgtcctgcaccagtctcatgcatctcgttcatcagtgcctttcataccttcaagagctcttgcctcagagcattgctatgcctgaggtgtgtctcagaagcagccattggcacagtggcttggggctgggctcaaaaatttgctctcttgaagtttggatgtgattgctctgaacaagctgctttgccacaataaatattttcaagttt

SEQ ID NO: 6636 - protein, 151 aa, Homo sapiens
MGKVAPELKGSLDTDEELQVLAVEGEKTTEGPVRRVPAYKMCVRTPLLICPDTLGTACSTPGSDQGEWIFWNLDRAQLKGLTELPQRCPAPVSCISFISAFHTFKSSCLRALLCLRCVSEAAIGTVAWGWAQKFALLKFGCDCSEQAALPQ

SEQ ID NO: 6637 - DNA, 554 bp, Homo sapiens
atgtcttgccagcaaaaccagcagcagtgccagccccctcccaaatgtcctcccaagtgtaccccaaaatgtccacctaagtgtccccccaaatgcccaccacagtgcccagctccatgttcccctgcagtctcttcctgctgtggtcccagctctgggagctgctgtggtcccagctctgggggctgctgcagctctgggggtggtggctgctgcctgagccaccacaggccccgtctcttccaccggcgccggcaccagagccccgattgctgtgagagtgaaccttctggggcctctggctgctgccacagctctgggggctgctgctgacctgggctgcagaagagctctggtactgaatggtcaaaaacctgctacagcctgatgcttaactatttccccttcctttcattccactcatgggtggacagggaccacaaagactcatggggcttccccagaactttgtgcttgatggagcaccccagatggaagccttctttttctcctttacctcatattgtaataaagctctgatttctgactcttta

SEQ ID NO: 6638 - protein, 110 aa, Homo sapiens; identical to SEQ ID NO: 300

SEQ ID NO: 6639 - DNA, 333 bp, Homo sapiens
atgtcttgccagcaaaaccagcagcagtgccagccccctcccaagtgtcctcccaagtgtaccccaaaatgtccacctaagtgtccccccaaatgcccaccacagtgcccagctccatgtttccctgcagtctcttcttgctgtggtcccagctctgggagctgctgtggtcccagctctgggggctgctgcagctctggggctggtggctgctccctgagccaccacaggccccgtctcttccaccggcgccggcaccagagccccgactgctgtgagagtgaaccttctgggggctctggctgctgccacagctctgggggctgctgctga

SEQ ID NO: 6640 - protein, 110 aa, Homo sapiens; identical to SEQ ID NO: 302

SEQ ID NO: 6641 - DNA, 609 bp, Homo sapiens
cagggacgtgtctgtgctcctgcgtgtgaccagggttgactaaactctgccaggatgtcttgccagcaaaaccagcagcagtgccagccccctcccaagtgtcctcccaagtgtaccccaaaatgtccacctaagtgtccccctaaatgcctgccccagtgcccagctccatgttcccctgcagtctcttcttgctgtggtcccatctctgggggctgctgtggtcccagctctgggggctgctgcaactctggggctggtggctgctgcctgagccaccacaggccccgtctcttccaccggcgccggcaccagagccccgactgctgtgagagtgaaccttctgggggctctggctgctgccacagctctgggggctgctgctgacctgggctaagaagaactctttggacagaatgtttaagaacctcctacagcctgatgcttaaccctttccatttcctctcattccattcatgggtggacagcgaccacaaagactcatggggcttccctgggagaactttgcacttgatggagcacctcaattgcaggttttgttttcctcctttacctcatgttataataaagctctgatttctgactcac

SEQ ID NO: 6642 - protein, 110 aa, Homo sapiens; identical to SEQ ID NO: 304

SEQ ID NO: 6643 - DNA, 561 bp, Homo sapiens
aggttgaaaaagtcgcactgagatgtcctgccagcaaaaccagcagcagtgccagccccctcccaagtgccccccaaaatgcccacccaagtgtcctccaaagtgccgacctcagtgcccagccccatgcccacctccagtctcttcctgctgtggtcccagctctgggggctgctgcggctccagctctgggggctgctgcagctctgggggtggcggctgctgcctgagccaccacaggccccgtctcttccaccggcaccggcaccagagccccgattgttgtgagtgtgaaccttctgggggctctggctgctgccacagctctggggactgctgctgaccagacctcgaacatcacagagcaacccttatggagaaacttgcaaccaggacctgtcccagagtgatgcttctcctgcccctttttctcctttccttgggctgacacaccttgtgaggtgttttgtctgttgtcatggcccaagagcccatcctggatcctgatcttaccttcccactttacctcatacaacaataaagctcttttgcctcttcgtg

SEQ ID NO: 6644 - protein, 106 aa, Homo sapiens; identical to SEQ ID NO: 306

SEQ ID NO: 6645 - DNA, 674 bp, Homo sapiens
agtgccgaagaggctatctgggaagctcatcatccagctcaggaagagatgaaaccaggaggcaggagaatgtcaggcatgaccccacacttgtgcaacagccacgtcctgctcctgccattagcatggctcatccgaggcccagccccaggatccatacaaagtgtgttcctgctgctggcttctcatctgctctgcttcctaagggacgtatctgttgctgcgtctgaacccacggtttatcgaaattccaccaagatgtcctgccagcagaaccaacagcagtgccagccccctcccaagtgtcctatccccaagtatcccccaaaatgtccctcaaagtgtgcatcctcatgcccacctccaatctcttcctgctgtggctccagctctgggggctgtggttgctgcagctctgagggaggtggctgctgcctgagccaccacagacaccataggtcccactgccacagacccaagagctccaattgctatggcagtggcagtggccagcagtctgggggttctggctgctgctctggagggggctgttgctgacctggaccaggagcagcaccaaaggaattagtgggcgaaggacccattgcagcctggtgttttacctccttcactctcttgcctttcctttctgtagccccatcaattgaataaac

SEQ ID NO: 6646 - protein, 169 aa, Homo sapiens
MKPGGRRMSGMTPHLCNSHVLLLPLAWLIRGPAPGSIQSVFLLLASHLLCFLRDVSVAASEPTVYRNSTKMSCQQNQQQCQPPPKCPIPKYPPKCPSKCASSCPPPISSCCGSSSGGCGCCSSEGGGCCLSHHRHHRSHCHRPKSSNCYGSGSGQQSGGSGCCSGGGCC

SEQ ID NO: 6647 - DNA, 300 bp, Homo sapiens; identical to SEQ ID NO: 307

SEQ ID NO: 6648 - protein, 99 aa, Homo sapiens; identical to SEQ ID NO: 308

SEQ ID NO: 6649 - DNA, 730 bp, Homo sapiens
ccagagccacgtccatgcctgcagccctgtgagcacccagagccttgtccacgaccagagccaattcccctgccggcgccctgcccaagcccggagccctgcagggagacttggcgcagccccagcccatgctggggcccaaatccagttccatacccaggagacctaggctgtcatgagtctagtccacaccgcctagacaccgaagctccctactgtggcccatccagttacaaccaggggcaagagagtggtgctggctgtgggcctggtgatgtgtttccagagcggaggggtcaggatggccatggagaccaaggcaatgcctttgctggagtgaaaggggaagcaaagagtgcttatttttaaaggaaaggtgactgagataaccctctctcctgctctgaaaatgttgttcctcctattccacaatttccagtacgctcttgtttgaatctctccaaagatattcagagactccctattacgaaggtgatgtccaaactcctttgcctatcatccaaagatccacacctgggtctcagatgcctctccagcctcacgtgtcactcctcgcccaatctctaaatctcagtgtctatcctggggctggctgttgcttagcaaggcttgtgggttggcagcttgaaccatgttctgtcctgatgctcaactgcaggaactgaggtgagaggaggccatgtgacaataaagatcattatgtactcac

SEQ ID NO: 6650 - protein, 46 aa, Homo sapiens [sequence omitted]

SEQ ID NO: 6651 - DNA, 357 bp, Homo sapiens; identical to SEQ ID NO: 309

SEQ ID NO: 6652 - protein, 118 aa, Homo sapiens; identical to SEQ ID NO: 310

SEQ ID NO: 6653 - DNA, 575 bp, Homo sapiens
gaaacccaggctgggataaaagggctcagggccagagcaccccattcactcacttcctgaggtgccgaaggaccctgtgctgcctgtgactttggtatgtgtcctctgggaacagaagcaggggattccacagagggatgctcagatcagctcctaagtacctactgccgagatgtcctgccagcagagccagcagcagtgccagccccctcccaagtgcactcccaagtgccctcccaagtgtcccacccccaaatgccctccaaagtgtccccctaagtgccctccagtctcttcctgctgcagtgtcagctccggaggctgctgtggctccagctctgggggcagctgtggctccagctctgggggctgctgcagctctgggggaggtggctgctgcctgagccaccacaggcaccacaggtcccaccgtcacagaccccagagctctgactgctgcagccagccctcagggggctccagctgctgtggagggggcagcggccagcactctggaggctgctgctgaagtggaccttgacttcctcttccttctgattctgcctgaatagctg

SEQ ID NO: 6654 - protein, 88 aa, Homo sapiens
MLRSAPKYLLPRCPASRASSSASPLPSALPSALPSVPPPNALQSVPLSALQSLPAAVSAPEAAVAPALGAAVAPALGAAAALGEVAAA

SEQ ID NO: 6655 - DNA, 1177 bp, Homo sapiens
gccgaaggaccctgtgctgcctgtgactttgctcctaagtacctactgccgagatgtcctgccagcagagccagcagcagtgccagccccctcccaagtgcactcccaagtgccctcccaagtgtcccacccccaaatgccctccaaagtgtccccctaagtgccctccagtctcttcctgctgcagtgtcagctccggaggctgctgtggctccagctctgggggcagctgtggctccagctctgggggctgctgcagctctgggggaggtggctgctgcctgagccaccacaggcaccacaggtcccaccgtcacagaccccagagctctgactgctgcagccagccctcagggggctccagctgctgtggagggggcagcggccagcactctggaggctgctgctgaagtggaccttgacttcctcttccttctgattctgcctgaatagctgagaggttccagcaaaagcttgaagtcttgcctggagaatccctctgctctggtgtcaggaaacccaaaatctttctccttaatggcatttagagactttcttctgcagatccatggctgccctgggaactccaaagcacacacctacttcctccccagctcacgctgctgtattctgtgctgcctgaactgaagaaataaaatccagaatctgccccccaacttgctaccagcctgcttgattttcctgtttgtgtcatccttgttctgctcccctgtgtctgctggtggctgctgaggccttggtggacagaggatggggaaaggggtcaggaggaaaaagcttgcatttctgtgtgttttgtgttttttcttctttcggtgttttccttttaaaccaagggactgaaatagcattgagaaatatttttctttcaaattctggttcctttcacctatgtaaccgcatccctcaggcatggccaggaggccgacttcatcctccttcccactatcacctcttcattcttgtgttcctcgttccccactccttccactaacaatctccctggactcctcctccatactgtatgtgcatgcattcacacacacatatgtacatgcacatagatgagatgaatctgcattgtaaaaaaattaaatcacatttagtgctgtataatttgcatgcaataaaattcaataaaattaaatgtaaaatt

SEQ ID NO: 6656 - protein, 118 aa, Homo sapiens; identical to SEQ ID NO: 312

SEQ ID NO: 6657 - DNA, 410 bp, Homo sapiens
gctcctgaacacccaccaccgagatgtcctgccagcagagccagcagcagtgccagccccctcccaagtgcactcccaagtgcactcccaagtgccccgcccctaaatgtccccctaagtgccctccagtctcttcctgctgcagtgtcagctccggaggctgctgtggctccagctctgggggcggctgtggctccaactctgggggctgctgcagctctgggggtggtggctgctgcctgagccaccacaggcgccacaggtcccaccgtcgcagaccccagagctctgactgctgcagccagccctcggggggctccagctgctgcggtgggggcagcagccagcactctggaggctgctgctgaagtggaccttgacttcctcttccttctgattctgcctgaata

SEQ ID NO: 6658 - protein, 114 aa, Homo sapiens; identical to SEQ ID NO: 314

SEQ ID NO: 6659 - DNA, 576 bp, Homo sapiens
gctcctgaatccgccaccaagatgtcctgccagcagagccagcagcagtgccagccccctcccaatgtcagctccggaggctgctgtggctccagctctgggggcagctgtggctccagctctgggggatgctgcagttctgggggaggtggctgctgcctgagccaccacaggcgccgtaggtcccactgccacagaccccagagctctggctgctgcagccagccctcggggggctccagctgctgtggcggggggagtggccagcactctggaggctgctgctgaagtggaccctgagcctagaagagcagaatccaggaccgcaaactgccaaggacatcccccttctcctactaggcctgcctgagaggctcacaggtccaagggaaagctctgaacttgccaagagcatatcttttccctggagtccagaaactcagatcctctcctggatctccattcactggccttggacctcacctttgtggctaccctcccacgctctgtctaagcccctagcttactcaatgtcatttgcagcgtgcatctgctgattaaaggactaaaacaagg

SEQ ID NO: 6660 - protein, 88 aa, Homo sapiens
MSCQQSQQQCQPPPNVSSGGCCGSSSGGSCGSSSGGCCSSGGGGCCLSHHRRRRSHCHRPQSSGCCSQPSGGSSCCGGGSGQHSGGCC

SEQ ID NO: 6661 - DNA, 357 bp, Homo sapiens
atgtcctgccagcagagccagcagcagtgccagccccctcccaagtgcacccccaagtgccctcccaagtgccccaccccaaagtgtcccccaaagtgtccccctaagtgccctcctgtctcttcctgctgcagtgtcagctccggaggctgctgtggctccagctctgggggcagctgtggctccagctctgggggatgctgcagttctgggggaggtggctgctgcctgagccaccacaggcgccgtaggtcccactgccacagaccccagagctctggctgctgcagccagccctcggggggctccagctgctgtggcggggggagtggccagcactctggaggctgctgctga

SEQ ID NO: 6662 - protein, 118 aa, Homo sapiens; identical to SEQ ID NO: 316

SEQ ID NO: 6663 - DNA, 1139 bp, Homo sapiens
gttctgaacttctatgtccttacaacaaggtaatctagaaaattcttccaagagagaatgactgtttccccttgagaaacaattttatttccaaacccctttctagattgttttcatgattcaggtgtgtagttgaagcagaatgtctcctctacatactacatgcttgattttgagaatactttcttaatatcttttggcttcggttttctaattataaaatagttgaaaatgctttatgattttataagtatataaaaagcattaggttcaaaacagaggctataagtgtgtttagccaactattagacacaatgaaacttcccgtgattaattagctacaactacactaagcagttcatcaaaatgtagggattagaaatgatgctgaaagggcaagaataggccggggtggcctctacctgggtctaacttgctgtctgactctctctcagctcctgaacacccgcaccaagatgtcctgccagcagaaccagcagcagtgccagccccctcccaagtgcatccccaagtgccctcccaagtgcctcacccctagatgccccccaaagtgtccccctaagtgtcctccagtctcttcctgctgcagtgtcagctccggaggctgctgtggctccagctctgggggaagctgtggctccagctctgggggttgctgcagttctgggggaggtggctgctgcctgagccaccacaggcgccgtaggtcccactgccacagaccccagagctctggctgctgcagccagccctccgggggctccagctgctgtggaggagggagtggccagcactctggaggctgctgctaaagtggatcctgagcctagaagaacacaaatggccaaatatttcccttccgtcttccttctccttctgggcctgcccatgttgttgagaggtcttggtgagggctcaactcaagcatagaggattcttctgtcttggagttcagaggcccaaaacttctcccccaaagccaagccatttaatgacctcagtttgcgtatgtgtggttgctctgggaagcccaaagcacagacctatatccctttgcagcttgtctttttgcatagctcagcctgatgtgaaacaataaaaccagaaatatgcattcc

SEQ ID NO: 6664 - protein, 118 aa, Homo sapiens; identical to SEQ ID NO: 318

SEQ ID NO: 6665 - DNA, 333 bp, Homo sapiens; identical to SEQ ID NO: 319

SEQ ID NO: 6666 - protein, 110 aa, Homo sapiens; identical to SEQ ID NO: 320

SEQ ID NO: 6667 - DNA, 627 bp, Homo sapiens
gactcctcctgggataacttgtccacacatcttccactagggtaaggctacttctggctgaggagacacttggatgtagctcaagtgctgcttaggcagtcctgatctctcctctcgtctcttcccagggagctgaaaagccagattcgacctggtagccaagcaatgtcacagcagaagcagcaatcttggaagcctccaaatgttcccaaatgctcccctccccaaagatcaaacccctgcctagctccctactcgactccttgtggtgctccccattcagaaggttgtcattccagttcccaaaggcctgaggttcagaagcctaggagggctcgtcaaaagctgcgctgcctaagtaggggcacaacctaccactgcaaagaggaagagtgtgaaggcgactgagcccagaagagttgaggcacaggtgcagttactctctccctgccccacctttgggtactaattcccccttggaaagccaggccctcaacctctcatttggactgagaaacacttcctgatccccagctctagagaagcgagaactaggctgagccacgctgctactgctctcttccattcaccccttcagctcagcaacaataaagctgctttacttgg

SEQ ID NO: 6668 - protein, 80 aa, Homo sapiens
MSQQKQQSWKPPNVPKCSPPQRSNPCLAPYSTPCGAPHSEGCHSSSQRPEVQKPRRARQKLRCLSRGTTYHCKEEECEGD

SEQ ID NO: 6669 - DNA, 776 bp, Homo sapiens
ggttcagaaggctttggcttctgatagtcatggactcactaggctgctgaggaagatcaataatacctactggaatcagtcatgagaagtcaagcatggaaattgtgaattgtgtgtgtggccagaccagtacctccaagtgttcagaagatgtgtgaccagacaaaacacagtaaatgctgcccagcaaaaggcaatcaatgctgcccaccacagcagaaccagtgctgccagtcaaaaggcaatcaatgctgcccaccaaaacagaaccagtgctgccagccaaaaggcagtcaatgctgcccaccaaaacacaatcactgctgccagccaaaacccccatgctgcattcaggccaggtgctgtggtttggagaccaagcctgaagtctcaccccttaacatggagtctgagcccaactcaccgcaaactcaggacaagggctgtcaaacccagcagcagccccatagcccacaaaatgagtccaggccaagcaaatgagagcagaagaagtcaaacaaagaagaagtccctggggccatgcctttcactttgtagggtgggggattactgagagtcaggctagacctgtgtttagagaagcagttttcacagtgactaccatttccacccaatgagaggctcctatttcccatcatagctccctaccctagggaggcctccatctggaaatgggaggatgaagaggctagaatcatctttcctagtgatcctgacatttagacagcacagaaataaagagcaataaaaagaac

SEQ ID NO: 6670 - protein, 116 aa, Homo sapiens; identical to SEQ ID NO: 322

SEQ ID NO: 6671 - DNA, 617 bp, Homo sapiens
cttctgatagtcatggactcactaggctgctgaggaagatcaataatacctactggaatcagtcatgagaagtcaagcatggaaattgtgaattgtgtgtgtggccagaccagtacctccaagtgttcagaagatgtgtgaccagacaaaacacagtaaatgctgcccagcaaaaggcaatcaatgctgcccaccacagcagaaccagtgctgccagtcaaaaggcaatcaatgctgcccaccaaaacagaaccagtgctgccagccaaaaggcagtcaatgctgcccaccaaaacacaatcactgctgccaccccatagcccacaaaatgagtccaggccaagcaaatgagagcagaagaagtcaaacaaagaagaagtccctggggccatgcctttcactttgtagggtgggggattactgagagtcaggctagacctgtgtttagagaagcagttttcacagtgactaccatttccacccaatgagaggctcctatttcccatcatagctccctaccctagggaggcctccatctggaaatgggaggatgaagaggctagaatcatctttcctagtgatcctgacatttagacagcacagaaataaagagcaat

SEQ ID NO: 6672 - protein, 96 aa, Homo sapiens
MCDQTKHSKCCPAKGNQCCPPQQNQCCQSKGNQCCPPKQNQCCQPKGSQCCPPKHNHCCHPIAHKMSPGQANESRRSQTKKKSLGPCLSLCRVGDY

SEQ ID NO: 6673 - DNA, 657 bp, Homo sapiens
tgctctgggagctccagctgcccctcctgctgctctgggagctccagctgcccctcctgctgctccgggtgcttcagctgtccctcctgctgctctaggtgcttcaggtgcccctcctgctgctctgggagctccaacagttgctctttcttcattcccagttgctcatctctcttgactagctcttgatccagttgctggtctaagagcttcttctcttcttccagctgtttgtttagctgctgatccctttgtgttttctcctgcttaagctgctgctctgggttttctgctttctgatattcctcatgctgttcccagtgctgttgctgcagctcctgctcctgtggctccttctgctgttgctcacattcttgctcaggcagtccctttacagcagtcatgtgcttttcctcttgctttgatgggacctccactgggagctcgacaggcaccttctggcatgggggaggcagtggagttggctgtttcatttgctcctgatgggtattgactggaggaggaacagtcttgaggagctcctgactgagggcaggggagagggtcactggcagtgtgtgttgctgggacatcttagaagctactgtcaaccagactcacagtaaggctgaggcagaggctttggtggagtgctga

SEQ ID NO: 6674 - protein, 40 aa, Homo sapiens
MGIDWRRNSLEELLTEGRGEGHWQCVLLGHLRSYCQPDSQ

SEQ ID NO: 6675 - DNA, 2108 bp, Homo sapiens
ggttgacagtagcttctaagatgtcccagcaacacacactgccagtgaccctctcccctgccctcagtcaggagctcctcaagactgttcctcctccagtcaatacccatcaggagcaaatgaaacagccaactccactgcctcccccatgccagaaggtgcctgtcgagctcccagtggaggtcccatcaaagcaagaggaaaagcacatgactgctgtaaagggactgcctgagcaagaatgtgagcaacagcagaaggagccacaggagcaggagctgcagcaacagcactgggaacagcatgaggaatatcagaaagcagaaaacccagagcagcagcttaagcaggagaaaacacaaagggatcagcagctaaacaaacagctggaagaagagaagaagctcttagaccagcaactggatcaagagctagtcaagagagatgagcaactgggaatgaagaaagagcaactgttggagctcccagagcagcaggaggggcacctgaagcacctagagcagcaggagggacagctgaagcacccggagcagcaggaggggcagctggagctcccagagcagcaggaggggcagctggagctcccagagcagcaggaggggcagctggagctcccagagcagcaggaggggcagctggagctcccagagcagcaggaggggcagctggagctcccagagcagcaggaggggcagctggagctcccacagcagcaggaggggcagctggagctctctgagcagcaggaggggcagctggagctctctgagcagcaggagggacagctgaagcacctggagcaccaggaggggcagctggaggtcccagaggagcagatggggcagctgaagtacctggaacagcaggaggggcagctgaagcacctggatcagcaggagaagcagccagagctcccagagcagcagatggggcagctgaagcacctggagcagcaggaggggcagcctaagcatctggagcagcaggaggggcaactggagcagctggaggagcaggaggggcagctgaagcacctggagcagcaggaggggcagctggagcacctggagcaccaggaagggcagctggggctcccagagcagcaggtgctgcagctgaagcagctagagaagcagcaggggcagccaaagcacctggaggaggaggaggggcagctgaagcacctggtgcagcaggaggggcagctgaagcatctggtgcagcaggaggggcagctggagcagcaggagaggcaggtggagcacctggagcagcaggtggggcagctgaagcacctagaggagcaggagggacaactgaagcatctggagcagcagcaggggcagttggaggtcccagagcagcaggtggggcagccaaagaacctggagcaggaggagaagcaactggagctcccagagcagcaagagggccaggtgaagcacctggagaagcaggaggcacagctggagctcccagagcagcaggtaggacagccaaagcacctggaacagcaggaaaagcacctagagcacccagagcagcaggacggacaactaaaacatctggagcagcaggaggggcagctgaaggacctggagcagcagaaggggcagctggagcagcctgtgtttgccccagctccaggccaggtccaagacattcaaccagccctgcccacaaagggagaagtattgcttcctgtagagcaccagcagcagaagcaggaggtgcagtggccacccaaacataaataaccacccgcagtgtccagaggccctcagatcgtctcatacaagggaagagagagccactggctccacttatttcgggtccgctaggtggcccgtctcatctgtgaacttgactctgtccctctacatgtctctttaatggggtgagggtgggggagagagggaattattgtccagtgccaaccccaatgaccccaatcccaacctcaggtgagcagagcctctacttgagggactattgttactataggaatccttacttccccagtattgaagctgaatcagtgagtgtgtacaatgatacataataaatcctggaagtcttgggatcct

SEQ ID NO: 6676 - protein, 585 aa, Homo sapiens; identical to SEQ ID NO: 324

SEQ ID NO: 6677 - DNA, 2236 bp, Homo sapiens
ggttgacagtagcttctaagatgtcccagcaacacacactgccagtgaccctctcccctgccctcagtcaggagctcctcaagactgttcctcctccagtcaatacccatcaggagcaaatgaaacagccaactccactgcctcccccatgccagaaggtgcctgtcgagctcccagtggaggtcccatcaaagcaagaggaaaagcacatgactgctgtaaagggactgcctgagcaagaatgtgagcaacagcagaaggagccacaggagcaggagctgcagcaacagcactgggaacagcatgaggaatatcagaaagcagaaaacccagagcagcagcttaagcaggagaaaacacaaagggatcagcagctaaacaaacagctggaagaagagaagaagctcttagaccagcaactggatcaagagctagtcaagagagatgagcaactgggaatgaagaaagagcaactgttggagctcccagagcagcaggaggggcacctgaagcacctagagcagcaggagggacagctgaagcacccggagcagcaggaggggcagctggagctcccagagcagcaggaggggcagctggagctcccagagcagcaggaggggcagctggagctcccagagcagcaggaggggcagctggagctcccagagcagcaggaggggcagctggagctcccagagcagcaggaggggcagctggagctcccacagcagcaggaggggcagctggagctctctgagcagcaggaggggcagctggagctctctgagcagcaggagggacagctgaagcacctggagcaccaggaggggcagctggaggtcccagaggagcagatggggcagctgaagtacctggaacagcaggaggggcagctgaagcacctggatcagcaggagaagcagccagagctcccagagcagcagatggggcagctgaagcacctggagcagcaggaggggcagcctaagcatctggagcagcaggaggggcaactggagcagctggaggagcaggaggggcagctgaagcacctggagcagcaggaggggcagctggagcacctggagcaccaggaagggcagctggggctcccagagcagcaggtgctgcagctgaagcagctagagaagcagcaggggcagccaaagcacctggaggaggaggaggggcagctgaagcacctggtgcagcaggaggggcagctgaagcatctggtgcagcaggaggggcagctggagcagcaggagaggcaggtggagcacctggagcagcaggtggggcagctgaagcacctagaggagcaggagggacaactgaagcatctggagcagcagcaggggcagttggaggtcccagagcagcaggtggggcagccaaagaacctggagcaggaggagaagcaactggagctcccagagcagcaagagggccaggtgaagcacctggagaagcaggaggcacagctggagctcccagagcagcaggtaggacagccaaagcacctggaacagcaggaaaagcacctagagcacccagagcagcaggacggacaactaaaacatctggagcagcaggaggggcagctgaaggacctggagcagcagaaggggcagctggagcagcctgtgtttgccccagctccaggccaggtccaagacattcaaccagccctgcccacaaagggagaagtattgcttcctgtagagcaccagcagcagaagcaggaggtgcagtggccacccaaacataaataaccacccgcagtgtccagaggccctcagatcgtctcatacaagggaagagagagccactggctccacttatttcgggtccgctaggtggcccgtctcatctgtgaacttgactctgtccctctacatgtctctttaatggggtgagggtgggggagagagggaattattgtccagtgccaaccccaatgaccccaatcccaacctcaggtgagcagagcctctacttgagggactattgttactataggaatccttacttccccagtattgaagctgaatcagtgagtgtgtacaatgatacataataaatcctggaagtcttgggatcctatattctctttagcattttcttctatcacaccacataaaaacctgtgtatgggtcaatggctgcaagagactcccacggcccattctcaaaggaggacagactctttttaaattttggtcctcaaacc

SEQ ID NO: 6678 - protein, 585 aa, Homo sapiens; identical to SEQ ID NO: 324

SEQ ID NO: 6679 - DNA, 1984 bp, Homo sapiens
ggaagcgtggtaggagaagatgcctgtgcatgccgctcatgtttccagcagggcaatgtagatgcatgtcaggaaagatgattagatagtttagaaccagatccttgtctgagatggaaactgcagctgctaattaagaagagtagagctcgaggaagccgccagctgccagcctggtgctgcctctcctgcaagtgtgaagtgtggctgcatccagaagcactgaaaataattgattagaaagagaaagagactgaaaatgtcataaatgaggagataattggagaaaatcattgtgaagaggtatgaatggatggcaacacaaatggagtaagacttaaagagatataagcctaccaaatgctgacatgatttttgtgagttgtgaagatttaaagaaatctgtttgaataacaatttttgaggctacctataaatttgtgttcattacttccactaagcaaggttcttttgattattctttgatcattgaaatgttttatattttatttaatttacagcaacaaaaataactcttgagaagaaataaatgtgaacctatggagataattatttagtaatgtttgaaatatatgatttagaacatttcattgcacttattaatgagtataagaatattatgaaaacagaaaaataatgagccttgtaagagttcacacaattattttatgtaattggtattctatattcaaggagagcttgaatgcagaaattaaagaagcatatgctcatttgaaaagagacaaatctagtagtgtaattaaagcttgtgccttataacacaataaaaatattcagaaggattttatccttaattgtgacataaaatgatttctaacctttattttttgagtcagaaaaaacggaggaagcatgggttcttctttgctatatgaaatcaaagtaactttacaaatttgaagtgcttagttatctaaaatcatatcatggaaagatatatatttatattttgattgttttatgtatgtaactttttaaagatcagagtgatctgggcaagaaaccagtgctatcagccagtattgcattttgtttacatgtaatagaaatccaactaaacaaggattttattttcatcatgttacagaaagttaggatataggaagtccttccttgtagttgctcaaggaaatcatgaaggaccaagtttattctagcttcctgctctgccacctttagcaagtggacagtccccctacctctcataggcaatgaacttcttcatatccaagcatgtgcttagggcagaagaaagggattggtgagaacaaaaatcacatgccagtgaagtctgttcatcttatattaggaaataatagctcctgcaaatgtcttacttgataggcttctaccactggaactgcctcacatgactaccactagatagaatggaatctggcttgatgagtatttttaagtggatacatttacttcctaaacaaaaccaatattctattaataaaagagaaaggaagaaagattcttgtaaggcagctaatatttctgtcacacagagaaaaacaaattgataatgcagtacaaggttgatattttaaggtagagatttttagcttgagcatttagcatccatttgttcttttaatgtaaatgtcaaacaaaatacaaaaatcgtatgtataattaccaaaaactatttaaaagtaaatttataattcactcaatagagtaatatagattaaataatttttgtaaaatttaacgtgtttttgctttcaaaaaatacaaaagataaaaaaagaatatacagctaaacagtctatatggaaaaaaccataaaagtgtcaaaagtaagatgatggcttatgaaaattacatttttacatttatggatgtgacctgaatgtaaatgtaagtaaattgtaaatgtattataaatgaatgtaaaaaccaaaataaagttgtttattggcaagattgattt

SEQ ID NO: 6680 - protein, 47 aa, Homo sapiens [sequence omitted]

SEQ ID NO: 6681 - DNA, 766 bp, Homo sapiens
aagggctcagcctcctctcctggggtccagcttgtcgcctctggctcacctgttcctagagcaatgtcttcccagcagcagcagcggcagcagcagcagtgcccaccccagagggcccagcagcagcaagtgaagcagccttgtcagccaccccctgttaaatgtcaagagacatgtgcacccaaaaccaaggatccatgtgctccccaggtcaagaagcaatgcccaccgaaaggcaccatcattccagcccagcagaagtgtccctcagcccagcaagcctccaagagcaaacagaagtaaggatggactggatattaccatcatccaccatcctggctaccagatggaaccttctcttcttccttctcctcttccctccagctcttgagcctaccctcctctcacatctcctcctgcccaagatgtaaggaagcattgtaaggatttcttcccatcgtacccttccccacacataccaccttggcttcttctatatcccaccccgatgctctcccaggtgggtgtgagagagacctcattctctgcaggctccagcgtggccacagctaaggcccatccatttcccaaagtgaggaaagtgtctgggcttcttctggggttccaccctgacaagtagggtcacagaggctggtgcacagtttctgcctcattcctctccatgatgccccctgctctgggcttctctcctgttttccccaataaatatgtgcctcatgtaataaatgtgtctgcttcctgggct

SEQ ID NO: 6682 - protein, 89 aa, Homo sapiens
MSRDMCTQNQGSMCSPGQEAMPTERHHHSSPAEVSLSPASLQEQTEVRMDWILPSSTILATRWNLLFFLLLFPPALEPTLLSHLLLPKM

SEQ ID NO: 6683 - DNA, 650 bp, Homo sapiens
accaaacccaagggaccacacagcccattctgctccgtataccagaaaaaaacacatttgaagcatgaattctcagcagcagaagcagccttgcaccccaccccctcagcctcagcagcagcaggtgaaacaaccttgccagcctccaccccaggaaccatgcatccccaaaaccaaggagccctgccaccccaaggtgcctgagccctgccaccccaaagtgcctgagccctgccagcccaaggttccagagccctgccagcccaaggtgcctgagccctgcccttcaacggtcactccagcaccagcccagcagaagaccaagcagaagtaatgtggtccacagccatgcccttgaggagctggccactggatactgaacaccctactccattctgcttatgaatcccatttgcctattgaccctgcagttagcatgctgtcaccctgaatcataatcgctcctttgcacctctaaaaagatgtcccttaccctcattctggagggctcctgagcctctgcgtaaggctgaacgtctcactgactgagctagtcttcttgttgctcgggtgcatttgaggatggatttggggaaggatcaagtgaaccatccctagtcttccttcaataaataacttttaactccaca

SEQ ID NO: 6684 - protein, 89 aa, Homo sapiens; identical to SEQ ID NO: 328

SEQ ID NO: 6685 - DNA, 500 bp, Homo sapiens
accagatcccagaggctgaacacctcgaccttctctgcacagcagattacaggtgtggaacttaggatcagaaaaggggagtgatttctgtaaaggcttgctaagttagcaagacaatatacccacttcaagagcactctcctgtcaacatgtattgaaaatttttaatatagaaggcactacattggcaattttgatgatcaaaagataagtttttctttattgcatgaatgtataatccattagaaaacatatacttgactaaaatttgcaaacatacagcatggggagtgattagcagagagggaaagcaagtatcatgctgtggcaaaacgaggaaggtgagagcatcaggaaggacagccatgagaggtgggcatgtgtggggaggcagcgatgatgtggagagcctgccagagagcatgtgcagcaggcacagtgtgaacagaggctcccaggtggattgtgggagccttagggggaagtttagataagagttc

SEQ ID NO: 6686 - protein, 87 aa, Homo sapiens [sequence omitted]

SEQ ID NO: 6687 - DNA, 987 bp, Homo sapiens
accagatcccagaggctgaacacctcgaccttctctgcacagcagatgatccctgagcagctgaagaccagaaaagccactaagactttctgcttaattcaggagcttagaggattcttcaaagagtgtgtccagcatcctttgaagcatgagttcttaccagcagaagcagacctttaccccaccacctcagcttcaacagcagcaggtgaaacaacccagccagcctccacctcaggaaatatttgttcccacaaccaaggagccatgccactcaaaggttccacaacctggaaacacaaagattccagagccaggctgtaccaaggtccctgagccaggctgtaccaaggtccctgagccaggctgtaccaaggtccctgagccaggttgtaccaaggtccctgagccaggctgtaccaaggtccctgagccaggttgtaccaaggtccctgagccaggctacaccaaggtccctgaaccaggcagcatcaaggtccctgaccaaggcttcatcaagtttcctgagccaggtgccatcaaagttcctgagcaaggatacaccaaagttcctgtgccaggctacacaaagctaccagagccatgtccttcaacggtcactccaggcccagctcagcagaagaccaagcagaagtaatttggtgcacagacaagcccttgagaagccaaccaccagatgctggacaccctcttcccatctgtttctgtgtcttaattgtctgtagaccttgtaatcagcacattgtcaccccaagccatagtctctctcttatttgtatcctaaaaatacgtactataaagcttttgttcacacacactctgaagaatcctgtaagcccctgaattaagcagaaagtcttcatggcttttctggtcttcggctgctcagggttcatctgaagattcgaatgaaaagaaatgcatgtttcctgctcttccctcattaaattgcttttaattccagtc

SEQ ID NO: 6688 - protein, 96 aa, Homo sapiens
MIPEQLKTRKATKTFCLIQELRGFFKECVQHPLKHEFLPAEADLYPTTSASTAAGETTQPASTSGNICSHNQGAMPLKGSTTWKHKDSRARLYQGP

SEQ ID NO: 6689 - DNA, 903 bp, Homo sapiens
accagatcccagaggctgaacacctcgaccttctctgcacagcaggtccagcatcctttgaagcatgagttcttaccagcagaagcagacctttaccccaccacctcagcttcaacagcagcaggtgaaacaacccagccagcctccacctcaggaaatatttgttcccacaaccaaggagccatgccactcaaaggttccacaacctggaaacacaaagattccagagccaggctgtaccaaggtccctgagccaggctgtaccaaggtccctgagccaggctgtaccaaggtccctgagccaggttgtaccaaggtccctgagccaggctgtaccaaggtccctgagccaggttgtaccaaggtccctgagccaggctacaccaaggtccctgaaccaggcagcatcaaggtccctgaccaaggcttcatcaagtttcctgagccaggtgccatcaaagttcctgagcaaggatacaccaaagttcctgtgccaggctacacaaagctaccagagccatgtccttcaacggtcactccaggcccagctcagcagaagaccaagcagaagtaatttggtgcacagacaagcccttgagaagccaaccaccagatgctggacaccctcttcccatctgtttctgtgtcttaattgtctgtagaccttgtaatcagcacattgtcaccccaagccatagtctctctcttatttgtatcctaaaaatacgtactataaagcttttgttcacacacactctgaagaatcctgtaagcccctgaattaagcagaaagtcttcatggcttttctggtcttcggctgctcagggttcatctgaagattcgaatgaaaagaaatgcatgtttcctgctcttccctcattaaattgcttttaattccagtc

SEQ ID NO: 6690 - protein, 169 aa, Homo sapiens; identical to SEQ ID NO: 330

SEQ ID NO: 6691 - DNA, 787 bp, Homo sapiens
gactggaattaaaagcaatttaatgagggaagagcaggaaacatgcatttcttttcattcgaatcttcagatgaaccctgagcagccgaagaccagaaaagccatgaagactttctgcttaattcaggggcttacaggattcttcagagtgtgtgtgaacaaaagctttatagtacgtatttttaggatacaaataagagagagactatggcttggggtgacaatgtgctgattacaaggtctacagacaattaagacacagaaacagatgggaagagggtgtccagcatctggtggttggcttctcaagggcttgtctgtgcaccaaattacttctgcttggtcttctgctgagctgggcctggagtgaccgttgaaggacatggctctggtagctttgtgtagcctggcacaggaactttggtgtatccttgctcaggaactttgatggcacctggctcaggaaacttgatgaagccttggtcagggaccttgatgctgcctggttcagggaccttggtgtagcctggctcagggaccttggtacaacctggctcagggaccttggtacagcctggctcagggaccttggtacaacctggctcagggaccttggtacagcctggctctggaatctttgtgtttccaggttgtggaacctttgagtggcatggctccttggttgtgggaacaaatatttcctgaggtggaggctggctgggttgtttcacctgctgctgttgaagctgaggtggtggggtaaaggtctgcttctgctggtaagaac

SEQ ID NO: 6692 - protein, 69 aa, Homo sapiens
MREEQETCISFHSNLQMNPEQPKTRKAMKTFCLIQGLTGFFRVCVNKSFIVRIFRIQIRERLWLGVTMC

SEQ ID NO: 6693 - DNA, 620 bp, Homo sapiens
caccagttctaagggaccatacagagtattcctctcttcacaccaggaccagtcactgttgcagcatgagttcccagcagcagaagcagccttgcaccccaccccctcagcttcagcagcagcaggtgaaacagccttgccagcctccacctcaggaaccatgcatccccaaaaccaaggagccctgccaccccaaggtgcctgagccctgccaccccaaagtgcccgagccctgccagcccaaggttccagagccatgccaccccaaggtgcctgagccctgcccttcaatagtcactccagcaccagcccagcagaagaccaagcagaagtaatgtggtccacagccatgcccttgaggagccggccaccagatgctgaatcccctatcccattctgcgtatgagtcccatttgccttgcaattagcattctgtctcccccaaaaaagaatgtgctatgaagctttctttcctacacactctgagtctctgaatgaagctgaaggtcttagtaccagagctagttttcagctgctcagaattcatctgaagagagacttaagatgaaagcaaatgattcagctcccttatacccccattaaattcactttcaattcca

SEQ ID NO: 6694 - protein, 89 aa, Homo sapiens; identical to SEQ ID NO: 332

SEQ ID NO: 6695 - DNA, 682 bp, Homo sapiens
aactcctggtactctagcaccgatctgctttggagaacctgatcctgagactccagcaggatgtcttatcaacagcagcagtgcaagcagccctgccagccacctcctgtgtgccccacgccaaagtgcccagagccatgtccacccccgaagtgccctgagccctgcccatcaccaaagtgtccacagccctgcccacctcagcagtgccagcagaaatatcctcctgtgacaccttccccaccctgccagccaaagtgtccacccaagagcaagtaacagcttcaggattcatcaggagcatgagaggataaggataattggctcacctcgttccacagctccacttgcatcttctcaccaaagccttccatggatgcacagggagcttctttctccttaacctgtggcctgcctgtgatgatctgtgacagcaaaagattccctttctgaggctgccatactgccactgtccaggtggagctaagaaaaggaagtcctcagctgtgccagctcccagagcttcggaagaaagagcagcagctctctccctgggaaccatcagacaattctgttgatgtgttctgtgtctgtctgtcacctggtcatgagcttctaccacctttgcaattgtcatttatctttcactccctgaataaagtatctatgcatatatatttgt

SEQ ID NO: 6696 - protein, 72 aa, Homo sapiens; identical to SEQ ID NO: 4321

SEQ ID NO: 6697 - DNA, 767 bp, Homo sapiens
caagtagcaaacgtgctgtggagactagatctcactctcaaatctgtcctgggatgcaagtgcctctacgaatgtggtgcagaagctacaaatgtggtgcagaagacagcttcaaagaggaaaggaatatagatcctgagactccagcaggatgtcttatcaacagcagcagtgcaagcagccctgccagccacctcctgtgtgccccacgccaaagtgcccagagccatgtccacccccgaagtgccctgagccctgcccatcaccaaagtgtccacagccctgcccacctcagcagtgccagcagaaatatcctcctgtgacaccttccccaccctgccagccaaagtgtccacccaagagcaagtaacagcttcaggattcatcaggagcatgagaggataaggataattggctcacctcgttccacagctccacttgcatcttctcaccaaagccttccatggatgcacagggagcttctttctccttaacctgtggcctgcctgtgatgatctgtgacagcaaaagattccctttctgaggctgccatactgccactgtccaggtggagctaagaaaaggaagtcctcagctgtgccagctcccagagcttcggaagaaagagcagcagctctctccctgggaaccatcagacaattctgttgatgtgttctgtgtctgtctgtcacctggtcatgagcttctaccacctttgcaattgtcatttatctttcactccctgaataaagtatctatgcatatat

SEQ ID NO: 6698 - protein, 89 aa, Homo sapiens
MQVPLRMWCRSYKCGAEDSFKEERNIDPETPAGCLINSSSASSPASHLLCAPRQSAQSHVHPRSALSPAHHQSVHSPAHLSSASRNILL

SEQ ID NO: 6699 - DNA, 905 bp, Homo sapiens
ctgtagtacacatccttgatggcaccaagtagcaaacgtgctgtggagactagatctcactctcaaatctgtcctgggatgcaagtgcctctacgaatgtggtgcagaagctacaaatgtggtgcagaagacagcttcaaagaggaaaggaatataggtgccaagagcctgcaatccttcccaaacagccctttgttctgtgctcaagtcaacccactgggactttactacagataatgataagagaaatggcttgtgagattgctcatgatcctgagactccagcaggatgtcttatcaacagcagcagtgcaagcagccctgccagccacctcctgtgtgccccacgccaaagtgcccagagccatgtccacccccgaagtgccctgagccctgcccatcaccaaagtgtccacagccctgcccacctcagcagtgccagcagaaatatcctcctgtgacaccttccccaccctgccagccaaagtgtccacccaagagcaagtaacagcttcaggattcatcaggagcatgagaggataaggataattggctcacctcgttccacagctccacttgcatcttctcaccaaagccttccatggatgcacagggagcttctttctccttaacctgtggcctgcctgtgatgatctgtgacagcaaaagattccctttctgaggctgccatactgccactgtccaggtggagctaagaaaaggaagtcctcagctgtgccagctcccagagcttcggaagaaagagcagcagctctctccctgggaaccatcagacaattctgttgatgtgttctgtgtctgtctgtcacctggtcatgagcttctaccacctttgcaattgtcatttatctttcactccctgaataaagtatctatgcatatat

SEQ ID NO: 6700 - protein, 114 aa, Homo sapiens
MWCRRQLQRGKEYRCQEPAILPKQPFVLCSSQPTGTLLQIMIREMACEIAHDPETPAGCLINSSSASSPASHLLCAPRQSAQSHVHPRSALSPAHHQSVHSPAHLSSASRNILL

SEQ ID NO: 6701 - DNA, 897 bp, Homo sapiens
aggctgtagtacacatccttgatggcaccaagtagcaaacgtgctgtggagactagatctcactctcaaatctgtcctgggatgcaagtgcctctacgaatgtggtgcagaagctacaaatgtggtgcagaagacagcttcaaagaggaaaggaatataggtaaaaatctgaggttttatctgagaaaaaggtggcaaagaaaatttcagtcttgaacagggtcagcagatagcacaatgtggtcagcctgcaaacccagagatcctgagactccagcaggatgtcttatcaacagcagcagtgcaagcagccctgccagccacctcctgtgtgccccacgccaaagtgcccagagccatgtccacccccgaagtgccctgagccctgcccatcaccaaagtgtccacagccctgcccacctcagcagtgccagcagaaatatcctcctgtgacaccttccccaccctgccagccaaagtgtccacccaagagcaagtaacagcttcaggattcatcaggagcatgagaggataaggataattggctcacctcgttccacagctccacttgcatcttctcaccaaagccttccatggatgcacagggagcttctttctccttaacctgtggcctgcctgtgatgatctgtgacagcaaaagattccctttctgaggctgccatactgccactgtccaggtggagctaagaaaaggaagtcctcagctgtgccagctcccagagcttcggaagaaagagcagcagctctctccctgggaaccatcagacaattctgttgatgtgttctgtgtctgtctgtcacctggtcatgagcttctaccacctttgcaattgtcatttatctttcactccctgaataaagtatctatgcatatat

SEQ ID NO: 6702 - protein, 71 aa, Homo sapiens
MWSACKPRDPETPAGCLINSSSASSPASHLLCAPRQSAQSHVHPRSALSPAHHQSVHSPAHLSSASRNILL

SEQ ID NO: 6703 - DNA, 676 bp, Homo sapiens
aaacccctggtacctgagcactgatctgccttggagaacctgatcctgagactccagcaggatgtcttatcaacagcagcagtgcaagcagccctgccagccacctcctgtgtgccccacgccaaagtgcccagagccatgtccacccccgaagtgccctgagccctgcccaccaccaaagtgtccacagccctgcccacctcagcagtgccagcagaaatatcctcctgtgacaccttccccaccctgccagtcaaagtatccaccgaagagcaagtaacagcttcagaattcatcaggaccaagaaaggataaggatatttggctcacctcgttccacagctccaccttcatcttctcatcaaagcctaccatggatacacagggagcttctttctccttagccagtaatctgcccatgatgatccctgacagcaaaaagtttcttttctgaggctgccatactgccactgtccaggtggagactgagcaaaggaagtcctgggctgtgccagctcccagagcttcggaagaaagagcagcagctctctccctgggaaccatcagagaattctgttgatgtgttctgtgtctgtctgtcacctggtcacgagcttctaccacctttgcaattgtcacttatctttcactccctgaataaagtatctatgcatat

SEQ ID NO: 6704 - protein, 72 aa, Homo sapiens; identical to SEQ ID NO: 336

SEQ ID NO: 6705 - DNA, 605 bp, Homo sapiens
agtgaaagataagtgacaattgcaaaggtggtagaagctcgtgaccaggggacagacagacacagaaaacatcaacagaattctctaatggttcccagggagagagctgctctttcttctgaagctctgggagctggcacagcccaggacttcctttgctcagtctccacctggacagtggcagtatggcagcctcaaaaagaaaaccttttgctatcagagatcatcacaggccgatcacaggctaagaggaaagaagctccctgtgtatccctggatggctttgatgagaagatgcaggtggagctgtggaacgaggtgagccaattatccttatcctttcatgctcctgatgaatcctgaagctgttacttgctcttgggtggacactttggctggcagggtggggaaggtgtcacaggaggacatttctgctggcactgctgaggtgggcaggactgtggacactttgatggtgggcagggctcagggcacttcgggggtggacatggctctgggcactttggcgcggggcacacaggaggtggctggcagggctgcttgcactgctgctgttgataagacatcctgctggagtctcagaa

SEQ ID NO: 6706 - protein, 91 aa, Homo sapiens
MVPRERAALSSEALGAGTAQDFLCSVSTWTVAVWQPQKENLLLSEIITGRSQAKRKEAPCVSLDGFDEKMQVELWNEVSQLSLSFHAPDES

SEQ ID NO: 6707 - DNA, 681 bp, Homo sapiens
cctaaactcctggtacttgagcactgatctgctttggagaacctgattctgagactccagcaggatgtcttatcaacagcagcagtgcaagcagccctgccagccacctcctgtgtgccccacgccaaagtgcccagagccatgtccacccccgaagtgccctgagccctgcccaccaccaaagtgtccacagccctgcccacctcagcagtgccagcaaaaatgtcctcctgtgacaccttccccaccctgccagccaaagtgtccacccaagagcaagtaacagcttcagaattcatcaggagcatgaaaggataaggataattggctcaccttgttccacagcttcacctgcatcttctcatcaaagcctaccatggatacacagttagcttctttcctcttagccagtgatctgcccatgatgatccctgatagcaaaaggtttcctttctgaggctgccatattgccactgtccaggtggagactgagaaaggaagtcctcagcagtgtcagttcccagagctttggaagaaggaccagcagctctgtccctgggaaccatcaaaaaatgctgttgatgttttctgtgtctgtctgtcacctgggcatgggcttctaacacctgtgcaattgtcacttttctttcactccctgaataaaatatctttgcatacgta

SEQ ID NO: 6708 - protein, 72 aa, Homo sapiens; identical to SEQ ID NO: 4323

SEQ ID NO: 6709 - DNA, 692 bp, Homo sapiens
gaaagtgtctgttcttgtcttttgttcacttttcaaaggggctgtttatttttcatattctgagactccagcaggatgtcttatcaacagcagcagtgcaagcagccctgccagccacctcctgtgtgccccacgccaaagtgcccagagccatgtccacccccgaagtgccctgagccctgcccaccaccaaagtgtccacagccctgcccacctcagcagtgccagcaaaaatgtcctcctgtgacaccttccccaccctgccagccaaagtgtccacccaagagcaagtaacagcttcagaattcatcaggagcatgaaaggataaggataattggctcaccttgttccacagcttcacctgcatcttctcatcaaagcctaccatggatacacagttagcttctttcctcttagccagtgatctgcccatgatgatccctgatagcaaaaggtttcctttctgaggctgccatattgccactgtccaggtggagactgagaaaggaagtcctcagcagtgtcagttcccagagctttggaagaaggaccagcagctctgtccctgggaaccatcaaaaaatgctgttgatgttttctgtgtctgtctgtcacctgggcatgggcttctaacacctgtgcaattgtcacttttctttcactccctgaataaaatatctttgcatacgta

SEQ ID NO: 6710 - protein, 72 aa, Homo sapiens; identical to SEQ ID NO: 4323

SEQ ID NO: 6711 - DNA, 644 bp, Homo sapiens
gttaataggaaggctttgatttgaggaagagattctgagactccagcaggatgtcttatcaacagtagcaatgtaagcagccctgccagccacctcctgtgtgccgcctgccaaagcgtccagagccatgtccacccctgaagtgccctgagccctgcccaccaccaaagtgtccacagccctgcccacctcagcagtgccagcagaaatatcctctggtgacaccttccccaccctgccagccaaagtgtccacccaagagcaagtaacagcttcggaattcatcaggaccacgaaaggatagggataattggctcacctcgttccacagctccacctgcatcttctcatcaaagccatccagggatacacagggagcttctttccccttagcctgtgatctgcccatgatgatccccgacagcaaaatgtttcctttctgaggctgccatgctgccactgtccaggtggagactgagcaaaggaagtcctcagctgtaccggcctttcagagcttctctttgggtgccatcaaagaattattttgatgtcttctgtctctgtctgtcacctggcatgagcttctactatctgtgcaattgtcacttttctttcactccctgaataaagtagctatgcctata

SEQ ID NO: 6712 - protein, 57 aa, Homo sapiens
MLPLSRWRLSKGSPQLYRPFRASLWVPSKNYFDVFCLCLSPGMSFYYLCNCHFSFTP

SEQ ID NO: 6713 - DNA, 680 bp, Homo sapiens
agaggttctcagcctcatgactcctaaactcctggtacttgagcaccgatctgctttggagaacctgattctgagactccagcaggatgtcttatcaacagtagcaatgtaagcagccctgccagccacctcctgtgtgccgcctgccaaagcgtccagagccatgtccacccctgaagtgccctgagccctgcccaccaccaaagtgtccacagccctgcccacctcagcagtgccagcagaaatatcctctggtgacaccttccccaccctgccagccaaagtgtccacccaagagcaagtaacagcttcggaattcatcaggaccacgaaaggatagggataattggctcacctcgttccacagctccacctgcatcttctcatcaaagccatccagggatacacagggagcttctttccccttagcctgtgatctgcccatgatgatccccgacagcaaaatgtttcctttctgaggctgccatgctgccactgtccaggtggagactgagcaaaggaagtcctcagctgtaccggcctttcagagcttctctttgggtgccatcaaagaattattttgatgtcttctgtctctgtctgtcacctggcatgagcttctactatctgtgcaattgtcacttttctttcactccctgaataaagtagctatgcctata

SEQ ID NO: 6714 - protein, 31 aa, Homo sapiens
MTPKLLVLEHRSALENLILRLQQDVLSTVAM

SEQ ID NO: 6715 - DNA, 1164 bp, Homo sapiens
agtctccagcatcctccacctgtctaccaccgagcatgggcctatatttgaagccttagatctctccagcacagtaagcaccaggagtccatgaagaagatggctcctgccatggaatcccctactctactgtgtgtagccttactgttcttcgctccagatggcgtgttagcagtccctcagaaacctaaggtctccttgaaccctccatggaatagaatatttaaaggagagaatgtgactcttacatgtaatgggaacaatttctttgaagtcagttccaccaaatggttccacaatggcagcctttcagaagagacaaattcaagtttgaatattgtgaatgccaaatttgaagacagtggagaatacaaatgtcagcaccaacaagttaatgagagtgaacctgtgtacctggaagtcttcagtgactggctgctccttcaggcctctgctgaggtggtgatggagggccagcccctcttcctcaggtgccatggttggaggaactgggatgtgtacaaggtgatctattataaggatggtgaagctctcaagtactggtatgagaaccacaacatctccattacaaatgccacagttgaagacagtggaacctactactgtacgggcaaagtgtggcagctggactatgagtctgagcccctcaacattactgtaataaaagctccgcgtgagaagtactggctacaattttttatcccattgttggtggtgattctgtttgctgtggacacaggattatttatctcaactcagcagcaggtcacatttctcttgaagattaagagaaccaggaaaggcttcagacttctgaacccacatcctaagccaaaccccaaaaacaactgatataattactcaagaaatatttgcaacattagtttttttccagcatcagcaattgctactcaattgtcaaacacagcttgcaatatacatagaaacgtctgtgctcaaggatttatagaaatgcttcattaaactgagtgaaactggttaagtggcatgtaatagtaagtgctcaattaacattggttgaataaatgagagaatgaatagattcatttattagcatttgtaaaagagatgttcaatttcaataaaataaatataaaaccatgtaacagaatgcttctgagt

SEQ ID NO: 6716 - protein, 260 aa, Homo sapiens
MKKMAPAMESPTLLCVALLFFAPDGVLAVPQKPKVSLNPPWNRIFKGENVTLTCNGNNFFEVSSTKWFHNGSLSEETNSSLNIVNAKFEDSGEYKCQHQQVNESEPVYLEVFSDWLLLQASAEVVMEGQPLFLRCHGWRNWDVYKVIYYKDGEALKYWYENHNISITNATVEDSGTYYCTGKVWQLDYESEPLNITVIKAPREKYWLQFFIPLLVVILFAVDTGLFISTQQQVTFLLKIKRTRKGFRLLNPHPKPNPKNN

SEQ ID NO: 6717 - DNA, 982 bp, Homo sapiens
acagtaagcaccaggagtccatgaagaagatggctcctgccatggaatcccctactctactgtgtgtagccttactgttcttcgctccagatggcgtgttagcagtcagttccaccaaatggttccacaatggcagcctttcagaagagacaaattcaagtttgaatattgtgaatgccaaatttgaagacagtggagaatacaaatgtcagcaccaacaagttaatgagagtgaacctgtgtacctggaagtcttcagtgactggctgctccttcaggcctctgctgaggtggtgatggagggccagcccctcttcctcaggtgccatggttggaggaactgggatgtgtacaaggtgatctattataaggatggtgaagctctcaagtactggtatgagaaccacaacatctccattacaaatgccacagttgaagacagtggaacctactactgtacgggcaaagtgtggcagctggactatgagtctgagcccctcaacattactgtaataaaagctccgcgtgagaagtactggctacaattttttatcccattgttggtggtgattctgtttgctgtggacacaggattatttatctcaactcagcagcaggtcacatttctcttgaagattaagagaaccaggaaaggcttcagacttctgaacccacatcctaagccaaaccccaaaaacaactgatataattactcaagaaatatttgcaacattagtttttttccagcatcagcaattgctactcaattgtcaaacacagcttgcaatatacatagaaacgtctgtgctcaaggatttatagaaatgcttcattaaactgagtgaaactggttaagtggcatgtaatagtaagtgctcaattaacattggttgaataaatgagagaatgaatagattcatttattagcatttgtaaaagagatgttcaatttcaataaaataaatataaaaccatgtaacag

SEQ ID NO: 6718 - protein, 227 aa, Homo sapiens
MKKMAPAMESPTLLCVALLFFAPDGVLAVSSTKWFHNGSLSEETNSSLNIVNAKFEDSGEYKCQHQQVNESEPVYLEVFSDWLLLQASAEVVMEGQPLFLRCHGWRNWDVYKVIYYKDGEALKYWYENHNISITNATVEDSGTYYCTGKVWQLDYESEPLNITVIKAPREKYWLQFFIPLLVVILFAVDTGLFISTQQQVTFLLKIKRTRKGFRLLNPHPKPNPKNN

SEQ ID NO: 6719 - DNA, 1058 bp, Homo sapiens
cctgtgaagaaggtgccttgcttcccctttgccttccaccacaatgctaagtttcttgaggcctcccgagacatgctgaactgtgagtcagtcaactaagcctctttcctttataaattacccagtttcaggcaattctttatagcaatgtgaaaatggactaatatacaactgaagtcatttggtaaaataagcttcaagattcctcttttcatctctcactgaagaaatataccccttttcataagaaaatctacaaagagtatttataagaaattggtgcatggctgtgcttcaactcctcagtgcatgatatgaaagaaaatcagatgaggttgcaagaaataaattttgtgttagacatcagagaccatttcttgacaggaaaagttgtttgtgatgtgtgcagcatggtttctcaagatctggctgtataaacaatggacagggctgagaaccaggaagtgcagtgtctctgggatctatgcttgatgcctctaactctgcttagcactgagtatgtaggatagtccccatgtattgacaactcatattaaactgtatatggaagcacaaacattgaagaatagccaaacattcttgaagaaaagaaacaaatggagagaacttgtccttcaaatatcatttactataataaagctgtagtaattaagaaggcatggttttggcacagggataagcactcaaaccaatgagagaaaatggaattctaaaatatgaaaattattcaaacggggctggcattcctgattgatggaaagcacagactagtcaattaatgcaatagttggtcattcatatgaggaaaaaatgaaattaggttagcttataccatacaaaattcaatcacaaatggattaaaaacctataaacaaacaaaaaactctattaaatatttagaagacactatgtgagaatatttttaaaacttgagataaatgattccttaaggtacaaaacagcaaaaaatgacaacctttattatataaaaattaatttgtgttttccagaatcacaaaaaagaaaaaaagcaaggt

SEQ ID NO: 6720 - protein, 40 aa, Homo sapiens
MKENQMRLQEINFVLDIRDHFLTGKVVCDVCSMVSQDLAV

SEQ ID NO: 6721 - DNA, 963 bp, Homo sapiens
atgcttttatgtttcagatttgggaaccaatccatgaaaagagagaactttactctcatcactgactttgttttccaaggtttctctagcttccatgagcagcagatcaccctttttggcgtgttccttgcactatacatcttaaccttagcaggcaatatcatcattgtgaccatcatccgaatggatcttcatcttcacacacccatgtacttcttcctgagcatgctgtccacttcagagactgtatatacattggtcattctcccaagaatgctctccagcctcgtaggtatgagccagcccatatcattggcagggtgtgccacacagatgttcttttttgtaacctttggcatcactaactgcttcctgctcacagcaatgggatatgaccgctatgtggccatctgcaaccccctgagatacatggttattatgaacaagaggctgcgtatccaacttgtcctgggggcctgcagcattgggctgattgtagcaataacgcaagtgacatctgtattcaggttacccttctgtgctagaaaggtgccccacttcttctgtgacatccgccctgtgatgaagctctcctgcattgacaccactgtcaatgaaatcctgactttgattatcagtgtgctggtgcttgttgtacctatgggtctggttttcatttcttatgttctcattatctctacaatcctcaagattgcttcagttgagggccggaagaaggcttttgccacctgtgcatcccacctcactgtggtcattgtccactacagctgtgcctccattgcctacctcaagcccaagtcagagaacaccagagaacatgaccagctgatctcggtgacctacactgtcatcactcccctactgaaccctgtggtatacaccctgagaaataaagaggtcaaagatgctctgtgcagggctgttggtgggaagttttcctga

SEQ ID NO: 6722 - protein, 320 aa, Homo sapiens
MLLCFRFGNQSMKRENFTLITDFVFQGFSSFHEQQITLFGVFLALYILTLAGNIIIVTIIRMDLHLHTPMYFFLSMLSTSETVYTLVILPRMLSSLVGMSQPISLAGCATQMFFFVTFGITNCFLLTAMGYDRYVAICNPLRYMVIMNKRLRIQLVLGACSIGLIVAITQVTSVFRLPFCARKVPHFFCDIRPVMKLSCIDTTVNEILTLIISVLVLVVPMGLVFISYVLIISTILKIASVEGRKKAFATCASHLTVVIVHYSCASIAYLKPKSENTREHDQLISVTYTVITPLLNPVVYTLRNKEVKDALCRAVGGKFS

SEQ ID NO: 6723 - DNA, 783 bp, Homo sapiens
tgtggacttcaactctgacaagtctgaatcccagtggaaatgcaagttagcctcaaactgagaacctcatactacattcagaatatgttttcatgtttccaaaatgtcaccaacaatgagatgacaggaacctgaaccaaaaggatgagagtagagatggaaagtaaatgttgttacaaaggctaaatcagaaatttgtcccagatctagtatggatcatgaagaagaagatagaatgaaagaacactcttaccattctgagtgccgaaagcaggaggtggttcctaaaaatatgaagtttgggtatcctatacaatgagagaagaatgtctatcttcattatgttcaagtacccagataaatgaacctgctgttataagggggagacatgacaagctttacgtgttgaaaatacaaagagcctgaccctacaggaatctttctttctggcctttttcatcgtgagtacatgcttttgattttgatcatggttaaatagaaaatatttaaattataatttctatccacaaggataaaatttctatccacaatttctaaccaacaagagtccccgtgactcacctggcacagaggttgggaaacttcaagttgattcccaggcctaagtatggaacagtctttatcactttccaaaatgtagcctgtccacattttcttgtgctgcataagcccatcatcccaatataatacagtagagaaaaagaaactgatgctgaaattctcatgggctttgatgagcagaaacttggtaatataattttg

SEQ ID NO: 6724 - protein, 36 aa, Homo sapiens
MREECLSSLCSSTQINEPAVIRGRHDKLYVLKIQRA

SEQ ID NO: 6725 - DNA, 4370 bp, Homo sapiens
gggcatgactctctctcttgagtaggcacacactcccttttctcgggtgtgtactttttgctttgtgatacatctctgcactttcagtattttccaactcatccttaaattccttctcacaacagtgtcaagagcctggacgccagccaggattgaggtcctacgggtgtttggggacctccccaagcccacgagtatcaatggcagtatcaattgtctgtgacagtgattaaggagcaaaacacttggaacccacaagactcccagaaggtgaagttaagagctcccagactcataaggttattagaacagcaaactggcaccccaaagaactttacggagacttgcaacctatcaacaagttggatgagggattaaaagccttcaacaaccaacaaccccaagcatcaaactgaaggaaacattctaaccttcacagacagactggaggctggatggggacctggctgaagacatctggagaatgaaagttaagtaccagcttgcatttttgtgcccctagattatttttgcattttaaaataagaagcatcaaattgcgtgtctctgtgtaaaagttctagcaatttgttttaaggtgaacttattttggcttagggactacaaaaagagaaggtaattcctagggaaggaagaagagaaagaaatgaaaattagagaataagattattttgaatgacttcaggtagcgaggagtgtgtgtttgtgagtgtgtatttgagagacttggctcatgcctgtgggtcttctcttctagtatcagtgaggggagggattactgaagaagaaggggggaaaaaaaaagaaagaaatctgagctttctgggaggaaattcaaaggaaccaagagaaattaacttcgttctgcaaggactaaagtacagcaagaggagagaggtcaagcgagaagcgtgcgggaagcacatgccctggggaggcatagaagccacactggcagagcggccagcacaggtagccagcagaggcattcttggggctatttgaaaaagtttggtctgtgaacaaaacagtttccctggtgactgcaaatccattgctagctgcctctttctcgtctgcccatcactctggtgtggtacccagaagttgacttctggttctgtagaaagagctaggggaggtatgatgtgcttaaagatcctaagaataagcctggcgattttggctgggtgggcactctgttctgccaactctgagctgggctggacacgcaagaaatccttggttgagagggaacacctgaatcaggtgctgttggaaggagaacgttgttggctgggggccaaggttcgaagacccagagcttctccacagcatcacctctttggagtctaccccagcagggctgggaactacctaaggccctaccccgtgggggagcaagaaatccatcatacaggacgcagcaaaccagacactgaaggaaatgctgtgagccttgttcccccagacctgactgaaaatccagcaggactgaggggtgcagttgaagagccggctgccccatgggtaggggatagtcctattgggcaatctgagctgctgggagatgatgacgcttatctcggcaatcaaagatccaaggagtctctaggtgaggccgggattcagaaaggctcagccatggctgccactactaccaccgccattttcacaaccctgaacgaacccaaaccagagacccaaaggaggggctgggccaagtccaggcagcgtcgccaagtgtggaagaggcgggcggaagatgggcagggagactccggtatctcttcacatttccaaccttggcccaagcattcccttaaacacagggtcaaaaagagtccaccggaggaaagcaaccaaaatggtggagagggctcctaccgagaagcagagacctttaactcccaagtaggactgcccatcttatacttctctgggaggcgggagcggctgctgctgcgtccagaagtgctggctgagattccccgggaggcgttcacagtggaagcctgggttaaaccggagggaggacagaacaacccagccatcatcgcaggtgtgtttgataactgctcccacactgtcagtgacaaaggctgggccctggggatccgctcagggaaggacaagggaaagcgggatgctcgcttcttcttctccctctgcaccgaccgcgtgaagaaagccaccatcttgattagccacagtcgctaccaaccaggcacatggacccatgtggcagccacttacgatggacggcacatggccctgtatgtggatggcactcaggtggctagcagtctagaccagtctggtcccctgaacagccccttcatggcatcttgccgctctttgctcctggggggagacagctctgaggatgggcactatttccgtggacacctgggcacactggttttctggtcgaccgccctgccacaaagccattttcagcacagttctcagcattcaagtggggaggaggaagcgactgacttggtcctgacagcgagctttgagcctgtgaacacagagtgggttccctttagagatgagaagtacccacgacttgaggttctccagggctttgagccagagcctgagattctgtcgcctttgcagcccccactctgtgggcaaacagtctgtgacaatgtggaattgatctcccagtacaatggatactggccccttcggggagagaaggtgatacgctaccaggtggtgaacatctgtgatgatgagggcctaaaccccattgtgagtgaggagcagattcgtctgcagcacgaggcactgaatgaggccttcagccgctacaacatcagctggcagctgagcgtccaccaggtccacaattccaccctgcgacaccgggttgtgcttgtgaactgtgagcccagcaagattggcaatgaccattgtgaccccgagtgtgagcacccactcacaggctatgatgggggtgactgccgcctgcagggccgctgctactcctggaaccgcagggatgggctctgtcacgtggagtgtaacaacatgctgaacgactttgacgacggagactgctgcgacccccaggtggctgatgtgcgcaagacctgctttgaccctgactcacccaagagggcatacatgagtgtgaaggagctgaaggaggccctgcagctgaacagtactcacttcctcaacatctactttgccagctcagtgcgggaagaccttgcaggtgctgccacctggccttgggacaaggacgctgtcactcacctgggtggcattgtcctcagcccagcatattatgggatgcctggccacaccgacaccatgatccatgaagtgggacatgttctgggactctaccatgtctttaaaggagtcagtgaaagagaatcctgcaatgacccctgcaaggagacagtgccatccatggaaacgggagacctctgtgccgacaccgcccccactcccaagagtgagctgtgccgggaaccagagcccactagtgacacctgtggcttcactcgcttcccaggggctccgttcaccaactacatgagctacacgggtatcaccactgtcttgttttgttttctgttaagaatacatgggggcctttgagagctgggagggtggaggtgtgggagctgatgggagaatgattaagtggtcatttgtgtcggagagttgaagtgtatttattataaggtattattattttttcatgtctttgaagaacttgaagaaatactgacatattaaggtactttgttcactgaattctcctctactagatattttaaaatatacttctatcctcgatagtaaaaaaggcacagagccaaaagccctcttgtgatccccttgacttctagaatgtggttattcttatttttgcccgcattcttagacatttactctgaagaagagtccaatggaaataaaggaaaagagtttatgggtcaaggtggcccattgtactgtttttgaagttggtcaacaaggtggcttggttaatttaggctcagcatgttttactgtatgttactaaaaaaaaaaaaaaaaaaaatcagattctctttttccagcactagtcaagcacaaattcttagctgcctaccaccctttccccaccaaaaggtgacatctaattttaaaaaaatggcatcttcctggccctcggaaaaacttgtcatctggtctttcttgccttaattcagcttctgtattattcttcgctgtctctcacgccttccttgtttcttgtgaaaagtaatagtgactggtttcctataatggactcaaagttatccctaaaattaaagacttatttgatgacctag

SEQ ID NO: 6726 - protein, 827 aa, Homo sapiens
MMCLKILRISLAILAGWALCSANSELGWTRKKSLVEREHLNQVLLEGERCWLGAKVRRPRASPQHHLFGVYPSRAGNYLRPYPVGEQEIHHTGRSKPDTEGNAVSLVPPDLTENPAGLRGAVEEPAAPWVGDSPIGQSELLGDDDAYLGNQRSKESLGEAGIQKGSAMAATTTTAIFTTLNEPKPETQRRGWAKSRQRRQVWKRRAEDGQGDSGISSHFQPWPKHSLKHRVKKSPPEESNQNGGEGSYREAETFNSQVGLPILYFSGRRERLLLRPEVLAEIPREAFTVEAWVKPEGGQNNPAIIAGVFDNCSHTVSDKGWALGIRSGKDKGKRDARFFFSLCTDRVKKATILISHSRYQPGTWTHVAATYDGRHMALYVDGTQVASSLDQSGPLNSPFMASCRSLLLGGDSSEDGHYFRGHLGTLVFWSTALPQSHFQHSSQHSSGEEEATDLVLTASFEPVNTEWVPFRDEKYPRLEVLQGFEPEPEILSPLQPPLCGQTVCDNVELISQYNGYWPLRGEKVIRYQVVNICDDEGLNPIVSEEQIRLQHEALNEAFSRYNISWQLSVHQVHNSTLRHRVVLVNCEPSKIGNDHCDPECEHPLTGYDGGDCRLQGRCYSWNRRDGLCHVECNNMLNDFDDGDCCDPQVADVRKTCFDPDSPKRAYMSVKELKEALQLNSTHFLNIYFASSVREDLAGAATWPWDKDAVTHLGGIVLSPAYYGMPGHTDTMIHEVGHVLGLYHVFKGVSERESCNDPCKETVPSMETGDLCADTAPTPKSELCREPEPTSDTCGFTRFPGAPFTNYMSYTGITTVLFCFLLRIHGGL

SEQ ID NO: 6727 - DNA, 6918 bp, Homo sapiens
gggcatgactctctctcttgagtaggcacacactcccttttctcgggtgtgtactttttgctttgtgatacatctctgcactttcagtattttccaactcatccttaaattccttctcacaacagtgtcaagagcctggacgccagccaggattgaggtcctacgggtgtttggggacctccccaagcccacgagtatcaatggcagtatcaattgtctgtgacagtgattaaggagcaaaacacttggaacccacaagactcccagaaggtgaagttaagagctcccagactcataaggttattagaacagcaaactggcaccccaaagaactttacggagacttgcaacctatcaacaagttggatgagggattaaaagccttcaacaaccaacaaccccaagcatcaaactgaaggaaacattctaaccttcacagacagactggaggctggatggggacctggctgaagacatctggagaatgaaagttaagtaccagcttgcatttttgtgcccctagattatttttgcattttaaaataagaagcatcaaattgcgtgtctctgtgtaaaagttctagcaatttgttttaaggtgaacttattttggcttagggactacaaaaagagaaggtaattcctagggaaggaagaagagaaagaaatgaaaattagagaataagattattttgaatgacttcaggtagcgaggagtgtgtgtttgtgagtgtgtatttgagagacttggctcatgcctgtgggtcttctcttctagtatcagtgaggggagggattactgaagaagaaggggggaaaaaaaaagaaagaaatctgagctttctgggaggaaattcaaaggaaccaagagaaattaacttcgttctgcaaggactaaagtacagcaagaggagagaggtcaagcgagaagcgtgcgggaagcacatgccctggggaggcatagaagccacactggcagagcggccagcacaggtagccagcagaggcattcttggggctatttgaaaaagtttggtctgtgaacaaaacagtttccctggtgactgcaaatccattgctagctgcctctttctcgtctgcccatcactctggtgtggtacccagaagttgacttctggttctgtagaaagagctaggggaggtatgatgtgcttaaagatcctaagaataagcctggcgattttggctgggtgggcactctgttctgccaactctgagctgggctggacacgcaagaaatccttggttgagagggaacacctgaatcaggtgctgttggaaggagaacgttgttggctgggggccaaggttcgaagacccagagcttctccacagcatcacctctttggagtctaccccagcagggctgggaactacctaaggccctaccccgtgggggagcaagaaatccatcatacaggacgcagcaaaccagacactgaaggaaatgctgtgagccttgttcccccagacctgactgaaaatccagcaggactgaggggtgcagttgaagagccggctgccccatgggtaggggatagtcctattgggcaatctgagctgctgggagatgatgacgcttatctcggcaatcaaagatccaaggagtctctaggtgaggccgggattcagaaaggctcagccatggctgccactactaccaccgccattttcacaaccctgaacgaacccaaaccagagacccaaaggaggggctgggccaagtccaggcagcgtcgccaagtgtggaagaggcgggcggaagatgggcagggagactccggtatctcttcacatttccaaccttggcccaagcattcccttaaacacagggtcaaaaagagtccaccggaggaaagcaaccaaaatggtggagagggctcctaccgagaagcagagacctttaactcccaagtaggactgcccatcttatacttctctgggaggcgggagcggctgctgctgcgtccagaagtgctggctgagattccccgggaggcgttcacagtggaagcctgggttaaaccggagggaggacagaacaacccagccatcatcgcaggtgtgtttgataactgctcccacactgtcagtgacaaaggctgggccctggggatccgctcagggaaggacaagggaaagcgggatgctcgcttcttcttctccctctgcaccgaccgcgtgaagaaagccaccatcttgattagccacagtcgctaccaaccaggcacatggacccatgtggcagccacttacgatggacggcacatggccctgtatgtggatggcactcaggtggctagcagtctagaccagtctggtcccctgaacagccccttcatggcatcttgccgctctttgctcctggggggagacagctctgaggatgggcactatttccgtggacacctgggcacactggttttctggtcgaccgccctgccacaaagccattttcagcacagttctcagcattcaagtggggaggaggaagcgactgacttggtcctgacagcgagctttgagcctgtgaacacagagtgggttccctttagagatgagaagtacccacgacttgaggttctccagggctttgagccagagcctgagattctgtcgcctttgcagcccccactctgtgggcaaacagtctgtgacaatgtggaattgatctcccagtacaatggatactggccccttcggggagagaaggtgatacgctaccaggtggtgaacatctgtgatgatgagggcctaaaccccattgtgagtgaggagcagattcgtctgcagcacgaggcactgaatgaggccttcagccgctacaacatcagctggcagctgagcgtccaccaggtccacaattccaccctgcgacaccgggttgtgcttgtgaactgtgagcccagcaagattggcaatgaccattgtgaccccgagtgtgagcacccactcacaggctatgatgggggtgactgccgcctgcagggccgctgctactcctggaaccgcagggatgggctctgtcacgtggagtgtaacaacatgctgaacgactttgacgacggagactgctgcgacccccaggtggctgatgtgcgcaagacctgctttgaccctgactcacccaagagggcatacatgagtgtgaaggagctgaaggaggccctgcagctgaacagtactcacttcctcaacatctactttgccagctcagtgcgggaagaccttgcaggtgctgccacctggccttgggacaaggacgctgtcactcacctgggtggcattgtcctcagcccagcatattatgggatgcctggccacaccgacaccatgatccatgaagtgggacatgttctgggactctaccatgtctttaaaggagtcagtgaaagagaatcctgcaatgacccctgcaaggagacagtgccatccatggaaacgggagacctctgtgccgacaccgcccccactcccaagagtgagctgtgccgggaaccagagcccactagtgacacctgtggcttcactcgcttcccaggggctccgttcaccaactacatgagctacacggatgataactgcactgacaacttcactcctaaccaagtggcccgaatgcattgctatttggacctagtctatcagcagtggactgaaagcagaaagcccacccccatccccattccacctatggtcatcggacagaccaacaagtccctcactatccactggctgcctcctattagtggagttgtatatgacagggcctcaggcagcttgtgtggcgcttgcactgaagatgggacctttcgtcagtatgtgcacacagcttcctcccggcgggtgtgtgactcctcaggttattggaccccagaggaggctgtggggcctcctgatgtggatcagccctgcgagccaagcttacaggcctggagccctgaggtccacctgtaccacatgaacatgacggtcccctgccccacagaaggctgtagcttggagctgctcttccaacacccggtccaagccgacaccctcaccctgtgggtcacttccttcttcatggagtcctcgcaggtcctctttgacacagagatcttgctggaaaacaaggagtcagtgcacctgggccccttagacactttctgtgacatcccactcaccatcaaactgcacgtggatgggaaggtgtcgggggtgaaagtctacacctttgatgagaggatagagattgatgcagcactcctgacttctcagccccacagtcccttgtgctctggctgcaggcctgtgaggtaccaggttctccgcgatcccccatttgccagtggtttgcccgtggtggtgacacattctcacaggaagttcacggacgtggaggtcacacctggacagatgtatcagtaccaagttctagctgaagctggaggagaactgggagaagcttcgcctcctctgaaccacattcatggagctccttattgtggagatgggaaggtgtcagagagactgggagaagagtgtgatgatggagaccttgtgagcggagatggctgctccaaggtgtgtgagctggaggaaggtttcaactgtgtaggagagccaagcctttgctacatgtatgagggagatggcatatgtgaaccttttgagagaaaaaccagcattgtagactgtggcatctacactcccaaaggatacttggatcaatgggctacccgggcttactcctctcatgaagacaagaagaagtgtcctgtttccttggtaactggagaacctcattccctaatttgcacatcataccatccagatttacccaaccaccgtcccctaactggctggtttccctgtgttgccagtgaaaatgaaactcaggatgacaggagtgaacagccagaaggtagcctgaagaaagaggatgaggtttggctcaaagtgtgtttcaatagaccaggagaggccagagcaatttttatttttttgacaactgatggcctagttcccggagagcatcagcagccgacagtgactctctacctgaccgatgtccgtggaagcaaccactctcttggaacctatggactgtcatgccagcataatccactgattatcaatgtgacccatcaccagaatgtccttttccaccataccacctcagtgctgctgaatttctcatccccacgggtcggcatctcagctgtggctctaaggacatcctcccgcattggtctttcggctcccagtaactgcatctcagaggacgaggggcagaatcatcagggacagagctgtatccatcggccctgtgggaagcaggacagctgtccgtcattgctgcttgatcatgctgatgtggtgaactgtacctctataggcccaggtctcatgaagtgtgctatcacttgtcaaaggggatttgcccttcaggccagcagtgggcagtacatcaggcccatgcagaaggaaattctgctcacatgttcttctgggcactgggaccagaatgtgagctgccttcccgtggactgcggtgttcccgacccgtctttggtgaactatgcaaacttctcctgctcagagggaaccaaatttctgaaacgctgctcaatctcttgtgtcccaccagccaagctgcaaggactgagcccatggctgacatgtcttgaagatggtctctggtctctccctgaagtctactgcaagttggagtgtgatgctccccctattattctgaatgccaacttgctcctgcctcactgcctccaggacaaccacgacgtgggcaccatctgcaaatatgaatgcaaaccagggtactatgtggcagaaagtgcagagggtaaagtcaggaacaagctcctgaagatacaatgcctggaaggtggaatctgggagcaaggcagctgcattcctgtggtgtgtgagccaccccctcctgtgtttgaaggcatgtatgaatgtaccaatggcttcagcctggacagccagtgtgtgctcaactgtaaccaggaacgtgaaaagcttcccatcctctgcactaaagagggcctgtggacccaggagtttaagttgtgtgagaatctgcaaggagaatgcccaccacccccctcagagctgaattctgtggagtacaaatgtgaacaaggatatgggattggtgcagtgtgttccccattgtgtgtaatcccccccagtgaccccgtgatgctacctgagaatatcactgctgacactctggagcactggatggaacctgtcaaagtccagagcattgtgtgcactggccggcgtcaatggcacccagaccccgtcttagtccactgcatccagtcatgtgagcccttccaagcagatggttggtgtgacactatcaacaaccgagcctactgccactatgacgggggagactgctgctcttccacactctcctccaagaaggtcattccatttgctgctgactgtgacctggatgagtgcacctgccgggaccccaaggcagaagaaaatcagtaactgtgggaacaagcccctccctccactgcctcagaggcagtaagaaagagaggccgacccaggaggaaacaaagggtgaatgaagaagaacaatcatgaaatggaagaaggaggaagagcatgaaggatcttataagaaatgcaagaggatattgataggtgtgaactagttcatcaagtagcccaagtaggagagaatcataggcaaaagtttctttaaagtggcagttgattaacatggaaggggaaatatgatagatatataaggaccctcctccctcacttatattctattaaatcctatcctcaactcttgccctgctctccgctccaccccctgccaactactcagtcccacccaacttgtaaaccaatacc

SEQ ID NO: 6728 - protein, 1791 aa, Homo sapiens
MMCLKILRISLAILAGWALCSANSELGWTRKKSLVEREHLNQVLLEGERCWLGAKVRRPRASPQHHLFGVYPSRAGNYLRPYPVGEQEIHHTGRSKPDTEGNAVSLVPPDLTENPAGLRGAVEEPAAPWVGDSPIGQSELLGDDDAYLGNQRSKESLGEAGIQKGSAMAATTTTAIFTTLNEPKPETQRRGWAKSRQRRQVWKRRAEDGQGDSGISSHFQPWPKHSLKHRVKKSPPEESNQNGGEGSYREAETFNSQVGLPILYFSGRRERLLLRPEVLAEIPREAFTVEAWVKPEGGQNNPAIIAGVFDNCSHTVSDKGWALGIRSGKDKGKRDARFFFSLCTDRVKKATILISHSRYQPGTWTHVAATYDGRHMALYVDGTQVASSLDQSGPLNSPFMASCRSLLLGGDSSEDGHYFRGHLGTLVFWSTALPQSHFQHSSQHSSGEEEATDLVLTASFEPVNTEWVPFRDEKYPRLEVLQGFEPEPEILSPLQPPLCGQTVCDNVELISQYNGYWPLRGEKVIRYQVVNICDDEGLNPIVSEEQIRLQHEALNEAFSRYNISWQLSVHQVHNSTLRHRVVLVNCEPSKIGNDHCDPECEHPLTGYDGGDCRLQGRCYSWNRRDGLCHVECNNMLNDFDDGDCCDPQVADVRKTCFDPDSPKRAYMSVKELKEALQLNSTHFLNIYFASSVREDLAGAATWPWDKDAVTHLGGIVLSPAYYGMPGHTDTMIHEVGHVLGLYHVFKGVSERESCNDPCKETVPSMETGDLCADTAPTPKSELCREPEPTSDTCGFTRFPGAPFTNYMSYTDDNCTDNFTPNQVARMHCYLDLVYQQWTESRKPTPIPIPPMVIGQTNKSLTIHWLPPISGVVYDRASGSLCGACTEDGTFRQYVHTASSRRVCDSSGYWTPEEAVGPPDVDQPCEPSLQAWSPEVHLYHMNMTVPCPTEGCSLELLFQHPVQADTLTLWVTSFFMESSQVLFDTEILLENKESVHLGPLDTFCDIPLTIKLHVDGKVSGVKVYTFDERIEIDAALLTSQPHSPLCSGCRPVRYQVLRDPPFASGLPVVVTHSHRKFTDVEVTPGQMYQYQVLAEAGGELGEASPPLNHIHGAPYCGDGKVSERLGEECDDGDLVSGDGCSKVCELEEGFNCVGEPSLCYMYEGDGICEPFERKTSIVDCGIYTPKGYLDQWATRAYSSHEDKKKCPVSLVTGEPHSLICTSYHPDLPNHRPLTGWFPCVASENETQDDRSEQPEGSLKKEDEVWLKVCFNRPGEARAIFIFLTTDGLVPGEHQQPTVTLYLTDVRGSNHSLGTYGLSCQHNPLIINVTHHQNVLFHHTTSVLLNFSSPRVGISAVALRTSSRIGLSAPSNCISEDEGQNHQGQSCIHRPCGKQDSCPSLLLDHADVVNCTSIGPGLMKCAITCQRGFALQASSGQYIRPMQKEILLTCSSGHWDQNVSCLPVDCGVPDPSLVNYANFSCSEGTKFLKRCSISCVPPAKLQGLSPWLTCLEDGLWSLPEVYCKLECDAPPIILNANLLLPHCLQDNHDVGTICKYECKPGYYVAESAEGKVRNKLLKIQCLEGGIWEQGSCIPVVCEPPPPVFEGMYECTNGFSLDSQCVLNCNQEREKLPILCTKEGLWTQEFKLCENLQGECPPPPSELNSVEYKCEQGYGIGAVCSPLCVIPPSDPVMLPENITADTLEHWMEPVKVQSIVCTGRRQWHPDPVLVHCIQSCEPFQADGWCDTINNRAYCHYDGGDCCSSTLSSKKVIPFAADCDLDECTCRDPKAEENQ

SEQ ID NO: 6729 - DNA, 472 bp, Homo sapiens
agtcacatgaccaagtgttgatttttctggaggaaaaattttatggaaatgatataggggaaaggtgggaggagatgaaagaacaggcaagagctgtcagggttaaatccaggtggcccagggctagctggctctaacaactagcatgacagcctccaatcagaaaggcaggtaaggggacagggtgaggagaatgggcagatactgacagaaattaaagtaaagggattgtgaaagtaaagagctcttcctgattctcatcttctcttttttctattacaaggcattgaacttggcacttcctgtattctttgtgatcactattgagtgcattagttaacacccaaggggatggcttgattgggaatgtagtgaaaggagctgatctactgtattgtaatgtaaaacagctacagccagttattttgtaagattataagttgttcattaaaaaatcagcacacaaaatatg

SEQ ID NO: 6730 - protein, 38 aa, Homo sapiens
RDCESKELFLILIFSFFYYKALNLALPVFFVITIECIS

SEQ ID NO: 6731 - DNA, 4207 bp, Homo sapiens
gctccgggaaacaaagaatccggggctctccagacatcagagcttaaacccaggactctgcaagcggcatctcattccggggtccagggctctcccggctctccatcccctccctaacctcccccgcctcccgcgctcgctccctcgctccctccccgctcgcttcctcccccaccatcgcagcgctaggaggaaggcggccggggctcaagatggctttagccgggctctgcgccctgctcgcctgctgctgggggccggcggcggtgctggccacggccgccggcgacgtggatccatccaaggagctggagtgcaagctcaaaagcatcacggtgtcggcactgcccttcctgcgcgagaacgacctgagcatcatgcacagcccctcggcctcggagcccaagctcctcttctcggtgcgcaacgacttcccgggagaaatggtcgtggtggacgacctggagaacacggagctgccctacttcgtgctggagatctcagggaacacagaggatatccctttggtgcgctggaggcagcagtggctggagaatggcactttgctttttcacattcatcaccaagatggtgccccaagccttcctggacaagaccccactgaagaaccccaacatgagtcggcagaagaggagctgaggatcctccacatctcagtcatgggtggcatgatcgctctgctgctgtccatcttgtgcctggtgatgatcctgtatactcgccggcgctggtgcaaacgccgccgggtcccgcagccccagaagagtgccagtgctgaggcagccaatgagattcactacattccttctgtgctgatcggcgggcacggacgggagagcctgcgcaatgcccgcgtgcagggccacaactccagtggcaccctgagcatccgggagacacctatcctggacggctatgagtatgacatcactgatctgcgccaccatctgcagagggagtgcatgaacggaggggaggactttgccagccaggtcacgcgcaccctcgactccctgcagggctgcaatgaaaagtcggggatggacctcacaccaggaagtgacaatgccaagctgtcactgatgaacaagtataaagataatattatagccactagccctgtggactccaaccaccagcaagccacccttctctctcacacctccagcagccagagaaagcggatcaacaacaaagcaagagctggttccgccttcttgaaccctgaaggggattctggcacagaggcagaaaacgacccccagctgaccttttacacggatccttcaaggagcaggaggcgtagtagagtgggttctccccgaagtcctgtgaataagaccaccttgaccctgatcagcatcaccagctgtgtgattggcctcgtgtgctcctctcacgtcaactgccctctcgttgtcaagatcaccctgcatgtccctgagcacctgattgctgatgggagccgcttcatcttgctggaggggagccagctggatgccagtgactggctgaaccctgcccaagtggttctcttctctcagcagaactccagcggaccctgggccatggacctctgtgcccggcggctcctggacccctgtgaacaccaatgtgaccccgaaactggggaatgcctctgctatgaaggctacatgaaggatccagtacataagcacctttgcattcggaacgaatgggggacaaaccaggggccatggccttacacaatatttcagcgaggctttgacctggttttgggagagcagccctctgataaaatatttagattcacctacactcttggggagggcatgtggttgcccctcagcaagagctttgtgattccaccagccgaactggccatcaatccatcagcaaagtgcaagacggacatgactgtgatggaggatgctgtggaggtcagagaggagctgatgacttcatcctccttcgacagcctggaggttctcttagattcctttgggccggtgcgcgactgcagcaaagataacgggggctgcagtaagaatttccgctgtatttcagatcgcaagctggactccactggttgcgtgtgcccatctggactcagtcccatgaaggacagctctggctgctatgaccgccacatcggggtggactgttccgacggcttcaacggcggctgtgagcagctgtgcctccagcagatggcgcccttcccggacgaccccaccttgtataacatcctcatgttctgtgggtgcatcgaggactacaagcttggtgtggatggacgctcttgccaactcatcacggagacctgtccagagggaagtgactgtggggaaagcagggagcttcccatgaaccagaccctctttggggagatgttctttggttacaacaaccattccaaggaagtggctgccggacaggtgctgaaaggaacattcaggcaaaacaactttgctcgtggtttagaccagcaactgccagatggtcttgtggtggccactgtgcccctggagaatcaatgcctagaggagatctcggagcccacccctgaccctgacttcctgactgggatggtgaacttcagtgaagtgtctgggtaccctgtgctgcagcactggaaggtccggtctgtgatgtaccacatcaaactcaaccaagtggccatctctcaggccctcagcaatgctctccactcgctggatggggctacatctcgtgcagattttgtggcgctgttggaccagttcggcaaccattacatccaggaagctatctacggctttgaggagtcctgttctatctggtacccaaacaagcaggtccagcggcgactctggctggagtatgaagacatcagtaaaggcaactccccatcagatgagtctgaggagcgggaaagagaccccaaggtgctgacattcccagaatacatcaccagcttgtcagactccggcaccaagcacatggcggctggagtccgcatggagtgccacagcaagggacgatgcccctcgtcctgccccctgtgtcatgtgacatccagccctgacacccctgctgagccggttctgctggaggtgaccaaagcagcccccatctatgaactagtgaccaacaaccagacccagaggctcttgcaggaggctaccatgagctctctctggtgctcagggactggagatgtcatcgaggactggtgtcgatgtgactccactgcttttggagctgatggactccccacctgtgcgcctctcccacagcctgtgctgagactctccacggttcacgagcccagcagcactcttgtggtcctggagtgggaacactcagagccaccaatcggggtgcagattgtagattacctcctccgtcaagagaaagtcactgacaggatggaccactccaaagtggagacagaaacagtgctgagctttgtggacgacatcatctctggagcaaagtctccttgtgcaatgccatctcaggtgccggacaagcagctcaccaccatctctctgatcatacgatgcctggaacctgacaccatttacatgttcacgctgtggggagtggacaacacaggacggcgctccaggccaagcgacgtgatcgtgaagaccccatgccccgtggtggatgatgtcaaggctcaagaaatagcagacaagatctacaatctcttcaatggctacactagtgggaaggagcagcagaccgcctacaacaccctcctggatctgggttcccccaccttacaccgggtcctctaccactataaccagcactatgagagttttggggaattcacctggcgatgtgaggatgagttaggtcccaggcttccagcgtgttgggacagtcagaggagttgtagatgattggaggaaaggaagaagacggcagccagggtatttccccttctccctgcctcagatggcatctccagcatctccttcatgacctctgtctcctccgtgtgaccttccatcccctcaaagcaggagctgcgccctgatgttgctaatctgataggttgctcctatttgtccttctataatcccaaagtcttcctaattggtttctcatcttgaacttcctctgtggaattacctaaaatgtattttgctttcctgactaggtcttgattaatatatacttcaaactaaaagttagtacatatcgtctg

SEQ ID NO: 6732 - protein, 1228 aa, Homo sapiens
MALAGLCALLACCWGPAAVLATAAGDVDPSKELECKLKSITVSALPFLRENDLSIMHSPSASEPKLLFSVRNDFPGEMVVVDDLENTELPYFVLEISGNTEDIPLVRWRQQWLENGTLLFHIHHQDGAPSLPGQDPTEEPQHESAEEELRILHISVMGGMIALLLSILCLVMILYTRRRWCKRRRVPQPQKSASAEAANEIHYIPSVLIGGHGRESLRNARVQGHNSSGTLSIRETPILDGYEYDITDLRHHLQRECMNGGEDFASQVTRTLDSLQGCNEKSGMDLTPGSDNAKLSLMNKYKDNIIATSPVDSNHQQATLLSHTSSSQRKRINNKARAGSAFLNPEGDSGTEAENDPQLTFYTDPSRSRRRSRVGSPRSPVNKTTLTLISITSCVIGLVCSSHVNCPLVVKITLHVPEHLIADGSRFILLEGSQLDASDWLNPAQVVLFSQQNSSGPWAMDLCARRLLDPCEHQCDPETGECLCYEGYMKDPVHKHLCIRNEWGTNQGPWPYTIFQRGFDLVLGEQPSDKIFRFTYTLGEGMWLPLSKSFVIPPAELAINPSAKCKTDMTVMEDAVEVREELMTSSSFDSLEVLLDSFGPVRDCSKDNGGCSKNFRCISDRKLDSTGCVCPSGLSPMKDSSGCYDRHIGVDCSDGFNGGCEQLCLQQMAPFPDDPTLYNILMFCGCIEDYKLGVDGRSCQLITETCPEGSDCGESRELPMNQTLFGEMFFGYNNHSKEVAAGQVLKGTFRQNNFARGLDQQLPDGLVVATVPLENQCLEEISEPTPDPDFLTGMVNFSEVSGYPVLQHWKVRSVMYHIKLNQVAISQALSNALHSLDGATSRADFVALLDQFGNHYIQEAIYGFEESCSIWYPNKQVQRRLWLEYEDISKGNSPSDESEERERDPKVLTFPEYITSLSDSGTKHMAAGVRMECHSKGRCPSSCPLCHVTSSPDTPAEPVLLEVTKAAPIYELVTNNQTQRLLQEATMSSLWCSGTGDVIEDWCRCDSTAFGADGLPTCAPLPQPVLRLSTVHEPSSTLVVLEWEHSEPPIGVQIVDYLLRQEKVTDRMDHSKVETETVLSFVDDIISGAKSPCAMPSQVPDKQLTTISLIIRCLEPDTIYMFTLWGVDNTGRRSRPSDVIVKTPCPVVDDVKAQEIADKIYNLFNGYTSGKEQQTAYNTLLDLGSPTLHRVLYHYNQHYESFGEFTWRCEDELGPRLPACWDSQRSCR

SEQ ID NO: 6733 - DNA, 7444 bp, Homo sapiens
ggggtctctagtgacccgaggcttccggaggaggctgcccttgctccgcggtccctcgcggctcaaatccgaaaggtcggagatttcagaaagaagaggcgtgtgcagggcgcctcccaagaccccgccagccgccggcacacccagcatctttgaagtggggcttcggcactgggccggggcgcacgcggggcggccggggctcaagatggctttagccgggctctgcgccctgctcgcctgctgctgggggccggcggcggtgctggccacggccgccggcgacgtggatccatccaaggagctggagtgcaagctcaaaagcatcacggtgtcggcactgcccttcctgcgcgagaacgacctgagcatcatgcacagcccctcggcctcggagcccaagctcctcttctcggtgcgcaacgacttcccgggagaaatggtcgtggtggacgacctggagaacacggagctgccctacttcgtgctggagatctcagggaacacagaggatatccctttggtgcgctggaggcagcagtggctggagaatggcactttgctttttcacattcatcaccaagatggtgccccaagccttcctggacaagaccccactgaagaaccccaacatgagtcggcagaagaggagctgaggatcctccacatctcagtcatgggtggcatgatcgctctgctgctgtccatcttgtgcctggtgatgatcctgtatactcgccggcgctggtgcaaacgccgccgggtcccgcagccccagaagagtgccagtgctgaggcagccaatgagattcactacattccttctgtgctgatcggcgggcacggacgggagagcctgcgcaatgcccgcgtgcagggccacaactccagtggcaccctgagcatccgggagacacctatcctggacggctatgagtatgacatcactgatctgcgccaccatctgcagagggagtgcatgaacggaggggaggactttgccagccaggtcacgcgcaccctcgactccctgcagggctgcaatgaaaagtcggggatggacctcacaccaggaagtgacaatgccaagctgtcactgatgaacaagtataaagataatattatagccactagccctgtggactccaaccaccagcaagccacccttctctctcacacctccagcagccagagaaagcggatcaacaacaaagcaagagctggttccgccttcttgaaccctgaaggggattctggcacagaggcagaaaacgacccccagctgaccttttacacggatccttcaaggagcaggaggcgtagtagagtgggttctccccgaagtcctgtgaataagaccaccttgaccctgatcagcatcaccagctgtgtgattggcctcgtgtgctcctctcacgtcaactgccctctcgttgtcaagatcaccctgcatgtccctgagcacctgattgctgatgggagccgcttcatcttgctggaggggagccagctggatgccagtgactggctgaaccctgcccaagtggttctcttctctcagcagaactccagcggaccctgggccatggacctctgtgcccggcggctcctggacccctgtgaacaccaatgtgaccccgaaactggggaatgcctctgctatgaaggctacatgaaggatccagtacataagcacctttgcattcggaacgaatgggggacaaaccaggggccatggccttacacaatatttcagcgaggctttgacctggttttgggagagcagccctctgataaaatatttagattcacctacactcttggggagggcatgtggttgcccctcagcaagagctttgtgattccaccagccgaactggccatcaatccatcagcaaagtgcaagacggacatgactgtgatggaggatgctgtggaggtcagagaggagctgatgacttcatcctccttcgacagcctggaggttctcttagattcctttgggccggtgcgcgactgcagcaaagataacgggggctgcagtaagaatttccgctgtatttcagatcgcaagctggactccactggttgcgtgtgcccatctggactcagtcccatgaaggacagctctggctgctatgaccgccacatcggggtggactgttccgacggcttcaacggcggctgtgagcagctgtgcctccagcagatggcgcccttcccggacgaccccaccttgtataacatcctcatgttctgtgggtgcatcgaggactacaagcttggtgtggatggacgctcttgccaactcatcacggagacctgtccagagggaagtgactgtggggaaagcagggagcttcccatgaaccagaccctctttggggagatgttctttggttacaacaaccattccaaggaagtggctgccggacaggtgctgaaaggaacattcaggcaaaacaactttgctcgtggtttagaccagcaactgccagatggtcttgtggtggccactgtgcccctggagaatcaatgcctagaggagatctcggagcccacccctgaccctgacttcctgactgggatggtgaacttcagtgaagtgtctgggtaccctgtgctgcagcactggaaggtccggtctgtgatgtaccacatcaaactcaaccaagtggccatctctcaggccctcagcaatgctctccactcgctggatggggctacatctcgtgcagattttgtggcgctgttggaccagttcggcaaccattacatccaggaagctatctacggctttgaggagtcctgttctatctggtacccaaacaagcaggtccagcggcgactctggctggagtatgaagacatcagtaaaggcaactccccatcagatgagtctgaggagcgggaaagagaccccaaggtgctgacattcccagaatacatcaccagcttgtcagactccggcaccaagcacatggcggctggagtccgcatggagtgccacagcaagggacgatgcccctcgtcctgccccctgtgtcatgtgacatccagccctgacacccctgctgagccggttctgctggaggtgaccaaagcagcccccatctatgaactagtgaccaacaaccagacccagaggctcttgcaggaggctaccatgagctctctctggtgctcagggactggagatgtcatcgaggactggtgtcgatgtgactccactgcttttggagctgatggactccccacctgtgcgcctctcccacagcctgtgctgagactctccacggttcacgagcccagcagcactcttgtggtcctggagtgggaacactcagagccaccaatcggggtgcagattgtagattacctcctccgtcaagagaaagtcactgacaggatggaccactccaaagtggagacagaaacagtgctgagctttgtggacgacatcatctctggagcaaagtctccttgtgcaatgccatctcaggtgccggacaagcagctcaccaccatctctctgatcatacgatgcctggaacctgacaccatttacatgttcacgctgtggggagtggacaacacaggacggcgctccaggccaagcgacgtgatcgtgaagaccccatgccccgtggtggatgatgtcaaggctcaagaaatagcagacaagatctacaatctcttcaatggctacactagtgggaaggagcagcagaccgcctacaacaccctcctggatctgggttcccccaccttacaccgggtcctctaccactataaccagcactatgagagttttggggaattcacctggcgatgtgaggatgagttaggtcccaggaaagctggtctcatcctttcccagcttggggacctcagcagttggtgcaatggactccttcaggaacccaagataagcttgcggcgcagctcactcaagtacctggggtgccgctacagcgagatcaaaccctacggacttgactgggcggagctcagccgggacctcaggaagacgtgtgaggagcagaccctgagtatcccctacaacgactatggggacagcaaagagatctagcaccataaggccagggagctgctgccagaatgaagtaggaaagaggagggatccatctgggttggtctgtggatttttaatattttttaatggaacatgaaaacctccacagcaacatcgaaaccagggagaaagtgatccttgctccctgcagaacttcttcagtatgatgttctccatctgcatgattgggaaatctgccagccagtggcttcatgcagtgccatatttctttagaggattactttggggtttgctttgccattaatttgttccattcatttttttttccctgagaagtttaccaaaatgctcaagagctctgccgtgctccccatgaaaagtctattaagtaggcaccctgtgctcactcagttcctaaatccattgcaactgggagcagaggtgaggccagaaagttgttaggcctgccgcaggccccaccctcaagcattcctcaggaagcgtctcactctgggagccttggccctgctcacagagagagacaatagaaaattgaggaaggtggcccttgtctgtgtctcctggttttcttcctaggccttgctatcactatttccatacccgaaaggtgaaaccagctttcattataggccccagtgggccacttgggttttgagatccttccttattttaagccaggactgggattaaatctccctctgtcagatctctgtcccttcctctgaacaacatgatctttgagagggaacaagatgccatctgtcaactgcaccttcagaaaagtctacctgggagactagttagcagtccacattcaagaggagacttggagtttattgttttttaaaaaaaccatgcttcctttggatagacttctccagcctaccaatatatatccatgtgcctggattatctttaacccccacacctcttaccttggacaggtaaggcttggccgatgtctgattgggaccaggaggggtcaacactttcatatcagtgttacagtgaactaaagctattattgatcacaaaaaacttctgttcatccccaccttgctaaatttgcttgtgttgctagttttgcaaatcgtttctctgatgaccataagcaggaggattccaccatggtcactgcccatccagtcacagggattctgtgtagggaagcaccactgattgcagttaacatctagagtgttgtttccatcccactgcccaagcattggcatggtcatgaatggtggcccagccaacaggaagcccagcctttcagaaagagcctggcaaggccctgttgactagcaatggccttagctgtcccacacaactcagtggcctgaacacacaccttcagccaccatgcctttgaccagggctcctcatctggaaacatatgagaaaggtcagcaaacagatgcaagacctataaggctagtcattgagctatattggttttttttctaaatagtagtagtgacagataacatttattgagtgcttgctgtatgccaggcgctgatgtaagcactttaggtatcattgaattctcacagcaactcctgaggaaagtgctattcttgtctccattttagtgttgaggaaaacgaggcaaagagaggttatacaacttgcctcaaatcccttgtgcactgtaactcacactgagtttcagtgtgatttcaggctgttggtctccagggcacaggatcttagctactctgggatacccagttctgttttcagtatcatctggcacacaactgtccaagctctcagccccacagggaacctgcccagagagctttacctttcccaagcatctgtggcatggacatgtcctctgtgcagtggaaggaggaggggcgaaagtacgcccttagcctttggagctagagcacccttgggacccctagttccactgcacatggccctcctccccaccctcatgactgggaaggaagcctgtgatgaggctgagataaagcacagggtggtttcactctcctctctccttctttccaaacactgaaggatttatttcaaactctctaatgcacctgcctcagagattcccctactttcaaagcaaagatcagcagaaaaattggctgtcccacctgtggcaaatgctggagcctcagttaaagtgcctcaaggggcaaatatttcaccattgccagagaagatgtgacaggccaatcagacagggcccagagcatctctttgctgctactgttttgccatccttctattcatatctgtgcagaacacggtgttttaagcttgagtgaaaggagggtgaggctgccgatgccttcctgcccagaagtggatgatgtgggagttgacaggccagggagagggtgaagcaggtatcagagtcactcctctgtaccctctccttctgtttttattttaggcacactatcttcctctctcctatctttccctcagtctcccaagttcctctaccttctttatctttgtcttttacttcttctttctgtgaccctccttttttggcctcctctttccccaagactttcttcctcctgtttctcgttgagttctccccactgaatgtgtgtatgtatgtacacacacacacacgtgtgcacacacaatgcacacaactcctatgactggctcctacttacattcaagttaaaaaggctgatatgaacagggcaggggaaaatcttaggatggttgtacaattgactggaggattttttccccttggaagacactattgatctcaacctgctgacttttcctaatgcttacctgaaggaacccatcctggctagaaagggtgatggtactggaccggtattcaaccttgagttttcaagctgccaaacaggtcttaagggaggtgcttatatcccaccaacactctcccagctcccatgtccccaagacctctggagtttcctcttgaatgtacatgaaccactgtaatagcattagacttttaattgagtgtgcaatcgttttccatggagtttggtccgttcattattttttagttaactacacttcttgatattcaaatgttctattaaaaaaactgagtatgaagaaaaacactttactactgcagaaggaagaaagaatataatatgaccatcttcaggtataacagtgttgtttaaaagagaattattgtatgattataaaagatgaaataattaactgaataataaaacaaagctattagtaagcattgggtatgtggatgttgtgtctttcagtaatctgagtgaactggttagactcatcagggaacttgttaaggttttaaaggttacacttcagattccagacataatgggccttatagtcatcattctaactgga

SEQ ID NO: 6734 - protein, 1294 aa, Homo sapiens; identical to SEQ ID NO: 350

SEQ ID NO: 6735 - DNA, 7317 bp, Homo sapiens
gctccgggaaacaaagaatccggggctctccagacatcagagcttaaacccaggactctgcaagcggcatctcattccggggtccagggctctcccggctctccatcccctccctaacctcccccgcctcccgcgctcgctccctcgctccctccccgctcgcttcctcccccaccatcgcagcgctaggaggaaggcggccggggctcaagatggctttagccgggctctgcgccctgctcgcctgctgctgggggccggcggcggtgctggccacggccgccggcgacgtggatccatccaaggagctggagtgcaagctcaaaagcatcacggtgtcggcactgcccttcctgcgcgagaacgacctgagcatcatgcacagcccctcggcctcggagcccaagctcctcttctcggtgcgcaacgacttcccgggagaaatggtcgtggtggacgacctggagaacacggagctgccctacttcgtgctggagatctcagggaacacagaggatatccctttggtgcgctggaggcagcagtggctggagaatggcactttgctttttcacattcatcaccaagatggtgccccaagccttcctggacaagaccccactgaagaaccccaacatgagtcggcagaagaggagctgaggatcctccacatctcagtcatgggtggcatgatcgctctgctgctgtccatcttgtgcctggtgatgatcctgtatactcgccggcgctggtgcaaacgccgccgggtcccgcagccccagaagagtgccagtgctgaggcagccaatgagattcactacattccttctgtgctgatcggcgggcacggacgggagagcctgcgcaatgcccgcgtgcagggccacaactccagtggcaccctgagcatccgggagacacctatcctggacggctatgagtatgacatcactgatctgcgccaccatctgcagagggagtgcatgaacggaggggaggactttgccagccaggtcacgcgcaccctcgactccctgcagggctgcaatgaaaagtcggggatggacctcacaccaggaagtgacaatgccaagctgtcactgatgaacaagtataaagataatattatagccactagccctgtggactccaaccaccagcaagccacccttctctctcacacctccagcagccagagaaagcggatcaacaacaaagcaagagctggttccgccttcttgaaccctgaaggggattctggcacagaggcagaaaacgacccccagctgaccttttacacggatccttcaaggagcaggaggcgtagtagagtgggttctccccgaagtcctgtgaataagaccaccttgaccctgatcagcatcaccagctgtgtgattggcctcgtgtgctcctctcacgtcaactgccctctcgttgtcaagatcaccctgcatgtccctgagcacctgattgctgatgggagccgcttcatcttgctggaggggagccagctggatgccagtgactggctgaaccctgcccaagtggttctcttctctcagcagaactccagcggaccctgggccatggacctctgtgcccggcggctcctggacccctgtgaacaccaatgtgaccccgaaactggggaatgcctctgctatgaaggctacatgaaggatccagtacataagcacctttgcattcggaacgaatgggggacaaaccaggggccatggccttacacaatatttcagcgaggctttgacctggttttgggagagcagccctctgataaaatatttagattcacctacactcttggggagggcatgtggttgcccctcagcaagagctttgtgattccaccagccgaactggccatcaatccatcagcaaagtgcaagacggacatgactgtgatggaggatgctgtggaggtcagagaggagctgatgacttcatcctccttcgacagcctggaggttctcttagattcctttgggccggtgcgcgactgcagcaaagataacgggggctgcagtaagaatttccgctgtatttcagatcgcaagctggactccactggttgcgtgtgcccatctggactcagtcccatgaaggacagctctggctgctatgaccgccacatcggggtggactgttccgacggcttcaacggcggctgtgagcagctgtgcctccagcagatggcgcccttcccggacgaccccaccttgtataacatcctcatgttctgtgggtgcatcgaggactacaagcttggtgtggatggacgctcttgccaactcatcacggagacctgtccagagggaagtgactgtggggaaagcagggagcttcccatgaaccagaccctctttggggagatgttctttggttacaacaaccattccaaggaagtggctgccggacaggtgctgaaaggaacattcaggcaaaacaactttgctcgtggtttagaccagcaactgccagatggtcttgtggtggccactgtgcccctggagaatcaatgcctagaggagatctcggagcccacccctgaccctgacttcctgactgggatggtgaacttcagtgaagtgtctgggtaccctgtgctgcagcactggaaggtccggtctgtgatgtaccacatcaaactcaaccaagtggccatctctcaggccctcagcaatgctctccactcgctggatggggctacatctcgtgcagattttgtggcgctgttggaccagttcggcaaccattacatccaggaagctatctacggctttgaggagtcctgttctatctggtacccaaacaagcaggtccagcggcgactctggctggagtatgaagacatcagtaaaggcaactccccatcagatgagtctgaggagcgggaaagagaccccaaggtgctgacattcccagaatacatcaccagcttgtcagactccggcaccaagcacatggcggctggagtccgcatggagtgccacagcaagggacgatgcccctcgtcctgccccctgtgtcatgtgacatccagccctgacacccctgctgagccggttctgctggaggtgaccaaagcagcccccatctatgaactagtgaccaacaaccagacccagaggctcttgcaggaggctaccatgagctctctctggtgctcagggactggagatgtcatcgaggactggtgtcgatgtgactccactgcttttggagctgatggactccccacctgtgcgcctctcccacagcctgtgctgagactctccacggttcacgagcccagcagcactcttgtggtcctggagtgggaacactcagagccaccaatcggggtgcagattgtagattacctcctccgtcaagagaaagtcactgacaggatggaccactccaaagtggagacagaaacagtgctgagctttgtggacgacatcatctctggagcaaagtctccttgtgcaatgccatctcaggtgccggacaagcagctcaccaccatctctctgatcatacgatgcctggaacctgacaccatttacatgttcacgctgtggggagtggacaacacaggacggcgctccaggccaagcgacgtgatcgtgaagaccccatgccccgtggtggatgatgtcaaggctcaagaaatagcagacaagatctacaatctcttcaatggctacactagtgggaaggagcagcagaccgcctacaacaccctcctggatctgggttcccccaccttacaccgggtcctctaccactataaccagcactatgagagttttggggaattcacctggcgatgtgaggatgagttaggtcccaggaaagctggtctcatcctttcccagcttggggacctcagcagttggtgcaatggactccttcaggaacccaagataagcttgcggcgcagctcactcaagtacctggggtgccgctacagcgagatcaaaccctacggacttgactgggcggagctcagccgggacctcaggaagacgtgtgaggagcagaccctgagtatcccctacaacgactatggggacagcaaagagatctagcaccataaggccagggagctgctgccagaatgaagtaggaaagaggagggatccatctgggttggtctgtggatttttaatattttttaatggaacatgaaaacctccacagcaacatcgaaaccagggagaaagtgatccttgctccctgcagaacttcttcagtatgatgttctccatctgcatgattgggaaatctgccagccagtggcttcatgcagtgccatatttctttagaggattactttggggtttgctttgccattaatttgttccattcatttttttttccctgagaagtttaccaaaatgctcaagagctctgccgtgctccccatgaaaagtctattaagtaggcaccctgtgctcactcagttcctaaatccattgcaactgggagcagaggtgaggccagaaagttgttaggcctgccgcaggccccaccctcaagcattcctcaggaagcgtctcactctgggagccttggccctgctcacagagagagacaatagaaaattgaggaaggtggcccttgtctgtgtctcctggttttcttcctaggccttgctatcactatttccatacccgaaaggtgaaaccagctttcattataggccccagtgggccacttgggttttgagatccttccttattttaagccaggactgggattaaatctccctctgtcagatctctgtcccttcctctgaacaacatgatctttgagagggaacaagatgccatctgtcaactgcaccttcagaaaagtctacctgggagactagttagcagtccacattcaagaggagacttggagtttattgttttttaaaaaaaccatgcttcctttggatagacttctccagcctaccaatatatatccatgtgcctggattatctttaacccccacacctcttaccttggacaggtaaggcttggccgatgtctgattgggaccaggaggggtcaacactttcatatcagtgttacagtgaactaaagctattattgatcacaaaaaacttctgttcatccccaccttgctaaatttgcttgtgttgctagttttgcaaatcgtttctctgatgaccataagcaggaggattccaccatggtcactgcccatccagtcacagggattctgtgtagggaagcaccactgattgcagttaacatctagagtgttgtttccatcccactgcccaagcattggcatggtcatgaatggtggcccagccaacaggaagcccagcctttcagaaagagcctggcaaggccctgttgactagcaatggccttagctgtcccacacaactcagtggcctgaacacacaccttcagccaccatgcctttgaccagggctcctcatctggaaacatatgagaaaggtcagcaaacagatgcaagacctataaggctagtcattgagctatattggttttttttctaaatagtagtagtgacagataacatttattgagtgcttgctgtatgccaggcgctgatgtaagcactttaggtatcattgaattctcacagcaactcctgaggaaagtgctattcttgtctccattttagtgttgaggaaaacgaggcaaagagaggttatacaacttgcctcaaatcccttgtgcactgtaactcacactgagtttcagtgtgatttcaggctgttggtctccagggcacaggatcttagctactctgggatacccagttctgttttcagtatcatctggcacacaactgtccaagctctcagccccacagggaacctgcccagagagctttacctttcccaagcatctgtggcatggacatgtcctctgtgcagtggaaggaggaggggcgaaagtacgcccttagcctttggagctagagcacccttgggacccctagttccactgcacatggccctcctccccaccctcatgactgggaaggaagcctgtgatgaggctgagataaagcacagggtggtttcactctcctctctccttctttccaaacactgaaggatttatttcaaactctctaatgcacctgcctcagagattcccctactttcaaagcaaagatcagcagaaaaattggctgtcccacctgtggcaaatgctggagcctcagttaaagtgcctcaaggggcaaatatttcaccattgccagagaagatgtgacaggccaatcagacagggcccagagcatctctttgctgctactgttttgccatccttctattcatatctgtgcagaacacggtgttttaagcttgagtgaaaggagggtgaggctgccgatgccttcctgcccagaagtggatgatgtgggagttgacaggccagggagagggtgaagcaggtatcagagtcactcctctgtaccctctccttctgtttttattttaggcacactatcttcctctctcctatctttccctcagtctcccaagttcctctaccttctttatctttgtcttttacttcttctttctgtgaccctccttttttggcctcctctttccccaagactttcttcctcctgtttctcgttgagttctccccactgaatgtgtgtatgtatgtacacacacacacacgtgtgcacacacaatgcacacaactcctatgactggctcctacttacattcaagttaaaaaggctgatatgaacagggcaggggaaaatcttaggatggttgtacaattgactggaggattttttccccttggaagacactattgatctcaacctgctgacttttcctaatgcttacctgaaggaacccatcctggctagaaagggtgatggtactggaccggtattcaaccttgagttttcaagctgccaaacaggtcttaagggaggtgcttatatcccaccaacactctcccagctcccatgtccccaagacctctggagtttcctcttgaatgtacatgaaccactgtaatagcattagacttttaattgagtgtgcaatcgttttccatggagtttggtccgttcattattttttagttaactacacttcttgatattcaaatgttctattaaaaaaactgagtatgaagaaaaacactttactactgcagaaggaagaaagaatataatatgaccatcttcaggtataacagtgttgtttaaaagagaattattgtatgattataaaagatgaaataattaactgaataataaaacaaagctattagtaagcattg

SEQ ID NO: 6736 - protein, 1294 aa, Homo sapiens; identical to SEQ ID NO: 350

SEQ ID NO: 6737 - DNA, 7313 bp, Homo sapiens
ggggtctctagtgacccgaggcttccggaggaggctgcccttgctccgcggtccctcgcggctcaaatccgaaaggtcggagatttcagaaagaagaggcgtgtgcagggcgcctcccaagaccccgccagccgccggcacacccagcatctttgaagtggggcttcggcactgggccggggcgcacgcggggcggccggggctcaagatggctttagccgggctctgcgccctgctcgcctgctgctgggggccggcggcggtgctggccacggccgccggcgacgtggatccatccaaggagctggagtgcaagctcaaaagcatcacggtgtcggcactgcccttcctgcgcgagaacgacctgagcatcatgcacagcccctcggcctcggagcccaagctcctcttctcggtgcgcaacgacttcccgggagaaatggtcgtggtggacgacctggagaacacggagctgccctacttcgtgctggagatctcagggaacacagaggatatccctttggtgcgctggaggcagcagtggctggagaatggcactttgctttttcacattcatcaccaagatggtgccccaagccttcctggacaagaccccactgaagaaccccaacatgagtcggcagaagaggagctgaggatcctccacatctcagtcatgggtggcatgatcgctctgctgctgtccatcttgtgcctggtgatgatcctgtatactcgccggcgctggtgcaaacgccgccgggtcccgcagccccagaagagtgccagtgctgaggcagccaatgagattcactacattccttctgtgctgatcggcgggcacggacgggagagcctgcgcaatgcccgcgtgcagggccacaactccagtggcaccctgagcatccgggagacacctatcctggacggctatgagtatgacatcactgatctgcgccaccatctgcagagggagtgcatgaacggaggggaggactttgccagccaggtcacgcgcaccctcgactccctgcagggctgcaatgaaaagtcggggatggacctcacaccaggaagtgacaatgccaagctgtcactgatgaacaagtataaagataatattatagccactagccctgtggactccaaccaccagcaagccacccttctctctcacacctccagcagccagagaaagcggatcaacaacaaagcaagagctggttccgccttcttgaaccctgaaggggattctggcacagaggcagaaaacgacccccagctgaccttttacacggatccttcaaggagcaggaggcgtagtagagtgggttctccccgaagtcctgtgaataagaccaccttgaccctgatcagcatcaccagctgtgtgattggcctcgtgtgctcctctcacgtcaactgccctctcgttgtcaagatcaccctgcatgtccctgagcacctgattgctgatgggagccgcttcatcttgctggaggggagccagctggatgccagtgactggctgaaccctgcccaagtggttctcttctctcagcagaactccagcggaccctgggccatggacctctgtgcccggcggctcctggacccctgtgaacaccaatgtgaccccgaaactggggaatgcctctgctatgaaggctacatgaaggatccagtacataagcacctttgcattcggaacgaatgggggacaaaccaggggccatggccttacacaatatttcagcgaggctttgacctggttttgggagagcagccctctgataaaatatttagattcacctacactcttggggagggcatgtggttgcccctcagcaagagctttgtgattccaccagccgaactggccatcaatccatcagcaaagtgcaagacggacatgactgtgatggaggatgctgtggaggtcagagaggagctgatgacttcatcctccttcgacagcctggaggttctcttagattcctttgggccggtgcgcgactgcagcaaagataacgggggctgcagtaagaatttccgctgtatttcagatcgcaagctggactccactggttgcgtgtgcccatctggactcagtcccatgaaggacagctctggctgctatgaccgccacatcggggtggactgttccgacggcttcaacggcggctgtgagcagctgtgcctccagcagatggcgcccttcccggacgaccccaccttgtataacatcctcatgttctgtgggtgcatcgaggactacaagcttggtgtggatggacgctcttgccaactcatcacggagacctgtccagagggaagtgactgtggggaaagcagggagcttcccatgaaccagaccctctttggggagatgttctttggttacaacaaccattccaaggaagtggctgccggacaggtgctgaaaggaacattcaggcaaaacaactttgctcgtggtttagaccagcaactgccagatggtcttgtggtggccactgtgcccctggagaatcaatgcctagaggagatctcggagcccacccctgaccctgacttcctgactgggatggtgaacttcagtgaagtgtctgggtaccctgtgctgcagcactggaaggtccggtctgtgatgtaccacatcaaactcaaccaagtggccatctctcaggccctcagcaatgctctccactcgctggatggggctacatctcgtgcagattttgtggcgctgttggaccagttcggcaaccattacatccaggaagctatctacggctttgaggagtcctgttctatctggtacccaaacaagcaggtccagcggcgactctggctggagtatgaagacatcagtaaaggcaactccccatcagatgagtctgaggagcgggaaagagaccccaaggtgctgacattcccagaatacatcaccagcttgtcagactccggcaccaagcacatggcggctggagtccgcatggagtgccacagcaagggacgatgcccctcgtcctgccccctgtgtcatgtgacatccagccctgacacccctgctgagccggttctgctggaggtgaccaaagcagcccccatctatgaactagtgaccaacaaccagacccagaggctcttgcaggaggctaccatgagctctctctggtgctcagggactggagatgtcatcgaggactggtgtcgatgtgactccactgcttttggagctgatggactccccacctgtgcgcctctcccacagcctgtgctgagactctccacggttcacgagcccagcagcactcttgtggtcctggagtgggaacactcagagccaccaatcggggtgcagattgtagattacctcctccgtcaagagaaagtcactgacaggatggaccactccaaagtggagacagaaacagtgctgagctttgtggacgacatcatctctggagcaaagtctccttgtgcaatgccatctcaggtgccggacaagcagctcaccaccatctctctgatcatacgatgcctggaacctgacaccatttacatgttcacgctgtggggagtggacaacacaggacggcgctccaggccaagcgacgtgatcgtgaagaccccatgccccgtggtggatgatgtcaaggctcaagaaatagcagacaagatctacaatctcttcaatggctacactagtgggaaggagcagcagaccgcctacaacaccctcctggatctgggttcccccaccttacaccgggtcctctaccactataaccagcactatgagagttttggggaattcacctggcgatgtgaggatgagttaggtcccaggaaagctggtctcatcctttcccagcttggggacctcagcagttggtgcaatggactccttcaggaacccaagataagcttgcggcgcagctcactcaagtacctggggtgccgctacagcgagatcaaaccctacggacttgactgggcggagctcagccgggacctcaggaagacgtgtgaggagcagaccctgagtatcccctacaacgactatggggacagcaaagagatctagcaccataaggccagggagctgctgccagaatgaagtaggaaagaggagggatccatctgggttggtctgtggatttttaatattttttaatggaacatgaaaacctccacagcaacatcgaaaccagggagaaagtgatccttgctccctgcagaacttcttcagtatgatgttctccatctgcatgattgggaaatctgccagccagtggcttcatgcagtgccatatttctttagaggattactttggggtttgctttgccattaatttgttccattcatttttttttccctgagaagtttaccaaaatgctcaagagctctgccgtgctccccatgaaaagtctattaagtaggcaccctgtgctcactcagttcctaaatccattgcaactgggagcagaggtgaggccagaaagttgttaggcctgccgcaggccccaccctcaagcattcctcaggaagcgtctcactctgggagccttggccctgctcacagagagagacaatagaaaattgaggaaggtggcccttgtctgtgtctcctggttttcttcctaggccttgctatcactatttccatacccgaaaggtgaaaccagctttcattataggccccagtgggccacttgggttttgagatccttccttattttaagccaggactgggattaaatctccctctgtcagatctctgtcccttcctctgaacaacatgatctttgagagggaacaagatgccatctgtcaactgcaccttcagaaaagtctacctgggagactagttagcagtccacattcaagaggagacttggagtttattgttttttaaaaaaaccatgcttcctttggatagacttctccagcctaccaatatatatccatgtgcctggattatctttaacccccacacctcttaccttggacaggtaaggcttggccgatgtctgattgggaccaggaggggtcaacactttcatatcagtgttacagtgaactaaagctattattgatcacaaaaaacttctgttcatccccaccttgctaaatttgcttgtgttgctagttttgcaaatcgtttctctgatgaccataagcaggaggattccaccatggtcactgcccatccagtcacagggattctgtgtagggaagcaccactgattgcagttaacatctagagtgttgtttccatcccactgcccaagcattggcatggtcatgaatggtggcccagccaacaggaagcccagcctttcagaaagagcctggcaaggccctgttgactagcaatggccttagctgtcccacacaactcagtggcctgaacacacaccttcagccaccatgcctttgaccagggctcctcatctggaaacatatgagaaaggtcagcaaacagatgcaagacctataaggctagtcattgagctatattggttttttttctaaatagtagtagtgacagataacatttattgagtgcttgctgtatgccaggcgctgatgtaagcactttaggtatcattgaattctcacagcaactcctgaggaaagtgctattcttgtctccattttagtgttgaggaaaacgaggcaaagagaggttatacaacttgcctcaaatcccttgtgcactgtaactcacactgagtttcagtgtgatttcaggctgttggtctccagggcacaggatcttagctactctgggatacccagttctgttttcagtatcatctggcacacaactgtccaagctctcagccccacagggaacctgcccagagagctttacctttcccaagcatctgtggcatggacatgtcctctgtgcagtggaaggaggaggggcgaaagtacgcccttagcctttggagctagagcacccttgggacccctagttccactgcacatggccctcctccccaccctcatgactgggaaggaagcctgtgatgaggctgagataaagcacagggtggtttcactctcctctctccttctttccaaacactgaaggatttatttcaaactctctaatgcacctgcctcagagattcccctactttcaaagcaaagatcagcagaaaaattggctgtcccacctgtggcaaatgctggagcctcagttaaagtgcctcaaggggcaaatatttcaccattgccagagaagatgtgacaggccaatcagacagggcccagagcatctctttgctgctactgttttgccatccttctattcatatctgtgcagaacacggtgttttaagcttgagtgaaaggagggtgaggctgccgatgccttcctgcccagaagtggatgatgtgggagttgacaggccagggagagggtgaagcaggtatcagagtcactcctctgtaccctctccttctgtttttattttaggcacactatcttcctctctcctatctttccctcagtctcccaagttcctctaccttctttatctttgtcttttacttcttctttctgtgaccctccttttttggcctcctctttccccaagactttcttcctcctgtttctcgttgagttctccccactgaatgtgtgtatgtatgtacacacacacacacgtgtgcacacacaatgcacacaactcctatgactggctcctacttacattcaagttaaaaaggctgatatgaacagggcaggggaaaatcttaggatggttgtacaattgactggaggattttttccccttggaagacactattgatctcaacctgctgacttttcctaatgcttacctgaaggaacccatcctggctagaaagggtgatggtactggaccggtattcaaccttgagttttcaagctgccaaacaggtcttaagggaggtgcttatatcccaccaacactctcccagctcccatgtccccaagacctctggagtttcctcttgaatgtacatgaaccactgtaatagcattagacttttaattgagtgtgcaatcgttttccatggagtttggtccgttcattattttttagttaactacacttcttgatattcaaatgttctattaaaaaaactgagtatgaagaaaaacactttactactgcagaaggaagaaagaatataatatgaccatcttcaggtataacagtgttgtttaaaagagaattattgtatgattataaaagatgaaataattaactgaataataaaacaaagctattagtaagcattg

SEQ ID NO: 6738 - protein, 1294 aa, Homo sapiens; identical to SEQ ID NO: 350

SEQ ID NO: 6739 - DNA, 3859 bp, Homo sapiens
gctccgggaaacaaagaatccggggctctccagacatcagagcttaaacccaggactctgcaagcggcatctcattccggggtccagggctctcccggctctccatcccctccctaacctcccccgcctcccgcgctcgctccctcgctccctccccgctcgcttcctcccccaccatcgcagcgctaggaggaaggcggccggggctcaagatggctttagccgggctctgcgccctgctcgcctgctgctgggggccggcggcggtgctggccacggccgccggcgacgtggatccatccaaggagctggagtgcaagctcaaaagcatcacggtgtcggcactgcccttcctgcgcgagaacgacctgagcatcatgcacagcccctcggcctcggagcccaagctcctcttctcggtgcgcaacgacttcccgggagaaatggtcgtggtggacgacctggagaacacggagctgccctacttcgtgctggagatctcagggaacacagaggatatccctttggtgcgctggaggcagcagtggctggagaatggcactttgctttttcacattcatcaccaagatggtgccccaagccttcctggacaagaccccactgaagaaccccaacatgagtcggcagaagaggagctgaggatcctccacatctcagtcatgggtggcatgatcgctctgctgctgtccatcttgtgcctggtgatgatcctgtatactcgccggcgctggtgcaaacgccgccgggtcccgcagccccagaagagtgccagtgctgaggcagccaatgagattcactacattccttctgtgctgatcggcgggcacggacgggagagcctgcgcaatgcccgcgtgcagggccacaactccagtggcaccctgagcatccgggagacacctatcctggacggctatgagtatgacatcactgatctgcgccaccatctgcagagggagtgcatgaacggaggggaggactttgccagccaggtcacgcgcaccctcgactccctgcagggctgcaatgaaaagtcggggatggacctcacaccaggaagtgacaatgccaagctgtcactgatgaacaagtataaagataatattatagccactagccctgtggactccaaccaccagcaagccacccttctctctcacacctccagcagccagagaaagcggatcaacaacaaagcaagagctggttccgccttcttgaaccctgaaggggattctggcacagaggcagaaaacgacccccagctgaccttttacacggatccttcaaggagcaggaggcgtagtagagtgggttctccccgaagtcctgtgaataagaccaccttgaccctgatcagcatcaccagctgtgtgattggcctcgtgtgctcctctcacgtcaactgccctctcgttgtcaagatcaccctgcatgtccctgagcacctgattgctgatgggagccgcttcatcttgctggaggggagccagctggatgccagtgactggctgaaccctgcccaagtggttctcttctctcagcagaactccagcggaccctgggccatggacctctgtgcccggcggctcctggacccctgtgaacaccaatgtgaccccgaaactggggaatgcctctgctatgaaggctacatgaaggatccagtacataagcacctttgcattcggaacgaatgggggacaaaccaggggccatggccttacacaatatttcagcgaggctttgacctggttttgggagagcagccctctgataaaatatttagattcacctacactcttggggagggcatgtggttgcccctcagcaagagctttgtgattccaccagccgaactggccatcaatccatcagcaaagtgcaagacggacatgactgtgatggaggatgctgtggaggtcagagaggagctgatgacttcatcctccttcgacagcctggaggttctcttagattcctttgggccggtgcgcgactgcagcaaagataacgggggctgcagtaagaatttccgctgtatttcagatcgcaagctggactccactggttgcgtgtgcccatctggactcagtcccatgaaggacagctctggctgctatgaccgccacatcggggtggactgttccgacggcttcaacggcggctgtgagcagctgtgcctccagcagatggcgcccttcccggacgaccccaccttgtataacatcctcatgttctgtgggtgcatcgaggactacaagcttggtgtggatggacgctcttgccaactcatcacggagacctgtccagagggaagtgactgtggggaaagcagggagcttcccatgaaccagaccctctttggggagatgttctttggttacaacaaccattccaaggaagtggctgccggacaggtgctgaaaggaacattcaggcaaaacaactttgctcgtggtttagaccagcaactgccagatggtcttgtggtggccactgtgcccctggagaatcaatgcctagaggagatctcggagcccacccctgaccctgacttcctgactgggatggtgaacttcagtgaagtgtctgggtaccctgtgctgcagcactggaaggtccggtctgtgatgtaccacatcaaactcaaccaagtggccatctctcaggccctcagcaatgctctccactcgctggatggggctacatctcgtgcagattttgtggcgctgttggaccagttcggcaaccattacatccaggaagctatctacggctttgaggagtcctgttctatctggtacccaaacaagcaggtccagcggcgactctggctggagtatgaagacatcagtaaaggcaactccccatcagatgagtctgaggagcgggaaagagaccccaaggtgctgacattcccagaatacatcaccagcttgtcagactccggcaccaagcacatggcggctggagtccgcatggagtgccacagcaagggacgatgcccctcgtcctgccccctgtgtcatgtgacatccagccctgacacccctgctgagccggttctgctggaggtgaccaaagcagcccccatctatgaactagtgaccaacaaccagacccagaggctcttgcaggaggctaccatgagctctctctggtgctcagggactggagatgtcatcgaggactggtgtcgatgtgactccactgcttttggagctgatggactccccacctgtgcgcctctcccacagcctgtgctgagactctccacggttcacgagcccagcagcactcttgtggtcctggagtgggaacactcagagccaccaatcggggtgcagattgtagattacctcctccgtcaagagaaagtcactgacaggatggaccactccaaagtggagacagaaacagtgctgagctttgtggacgacatcatctctggagcaaagtctccttgtgcaatgccatctcaggtgccggacaagcagctcaccaccatctctctgatcatacgatgcctggaacctgacaccatttacatgttcacgctgtggggagtggacaacacaggacggcgctccaggccaagcgacgtgatcgtgaagaccccatgccccgtggtggatgatgtcaaggctcaagaaatagcagacaagatctacaatctcttcaatggctacactagtgggaaggagcagcagaccgcctacaacaccctcctggatctgggttcccccaccttacaccgggtcctctaccactataaccagcactatgagagttttggggaattcacctggcgatgtgaggatgagttaggtcccag

SEQ ID NO: 6740 - protein, 1214 aa, Homo sapiens
MALAGLCALLACCWGPAAVLATAAGDVDPSKELECKLKSITVSALPFLRENDLSIMHSPSASEPKLLFSVRNDFPGEMVVVDDLENTELPYFVLEISGNTEDIPLVRWRQQWLENGTLLFHIHHQDGAPSLPGQDPTEEPQHESAEEELRILHISVMGGMIALLLSILCLVMILYTRRRWCKRRRVPQPQKSASAEAANEIHYIPSVLIGGHGRESLRNARVQGHNSSGTLSIRETPILDGYEYDITDLRHHLQRECMNGGEDFASQVTRTLDSLQGCNEKSGMDLTPGSDNAKLSLMNKYKDNIIATSPVDSNHQQATLLSHTSSSQRKRINNKARAGSAFLNPEGDSGTEAENDPQLTFYTDPSRSRRRSRVGSPRSPVNKTTLTLISITSCVIGLVCSSHVNCPLVVKITLHVPEHLIADGSRFILLEGSQLDASDWLNPAQVVLFSQQNSSGPWAMDLCARRLLDPCEHQCDPETGECLCYEGYMKDPVHKHLCIRNEWGTNQGPWPYTIFQRGFDLVLGEQPSDKIFRFTYTLGEGMWLPLSKSFVIPPAELAINPSAKCKTDMTVMEDAVEVREELMTSSSFDSLEVLLDSFGPVRDCSKDNGGCSKNFRCISDRKLDSTGCVCPSGLSPMKDSSGCYDRHIGVDCSDGFNGGCEQLCLQQMAPFPDDPTLYNILMFCGCIEDYKLGVDGRSCQLITETCPEGSDCGESRELPMNQTLFGEMFFGYNNHSKEVAAGQVLKGTFRQNNFARGLDQQLPDGLVVATVPLENQCLEEISEPTPDPDFLTGMVNFSEVSGYPVLQHWKVRSVMYHIKLNQVAISQALSNALHSLDGATSRADFVALLDQFGNHYIQEAIYGFEESCSIWYPNKQVQRRLWLEYEDISKGNSPSDESEERERDPKVLTFPEYITSLSDSGTKHMAAGVRMECHSKGRCPSSCPLCHVTSSPDTPAEPVLLEVTKAAPIYELVTNNQTQRLLQEATMSSLWCSGTGDVIEDWCRCDSTAFGADGLPTCAPLPQPVLRLSTVHEPSSTLVVLEWEHSEPPIGVQIVDYLLRQEKVTDRMDHSKVETETVLSFVDDIISGAKSPCAMPSQVPDKQLTTISLIIRCLEPDTIYMFTLWGVDNTGRRSRPSDVIVKTPCPVVDDVKAQEIADKIYNLFNGYTSGKEQQTAYNTLLDLGSPTLHRVLYHYNQHYESFGEFTWRCEDELG

SEQ ID NO: 6741 - DNA, 2104 bp, Homo sapiens
gcaaacgccgccgggtcccgcagccccagaagagtgccagtgctgaggcagccaatgagattcactacattccttctgtgctgatcggcgggcacggacgggagagcctgcgcaatgcccgcgtgcagggccacaactccagtggcaccctgagcatccgggagacacctatcctggacggctatgagtatgacatcactgatctgcgccaccatctgcagagggagtgcatgaacggaggggaggactttgccagccaggtcacgcgcaccctcgactccctgcagggctgcaatgaaaagtcggggatggacctcacaccaggaagtgacaatgccaagctgtcactgatgaacaagtataaagataatattatagccactagccctgtggactccaaccaccagcaagccacccttctctctcacacctccagcagccagagaaagcggatcaacaacaaagcaagagctggttccgccttcttgaaccctgaaggggattctggcacagaggcagaaaacgacccccagctgaccttttacacggatccttcaaggagcaggaggcgtagtagagtgggttctccccgaagtcctgtgaataagaccaccttgaccctgatcagcatcaccagctgtgtgattggcctcgtgtgctcctctcacgtcaactgccctctcgttgtcaagatcaccctgcatgtccctgagcacctgattgctgatgaactccagcggaccctgggccatggacctctgtgcccggcggctcctggacccctgtgaacaccaatgtgaccccgaaactggggaatgcctctgctatgaaggctacatgaaggatccagtacataagcacctttgcattcggaacgaatgggggacaaaccagggcacagtgaactgaatagagccaccaccacctggtattcaagccgaactatgagaatcatgccagactcctctctctccttcatcgtcacatccaatcaatcaccacatcatgattgctctactccctcaatatcacttggagctctccagctctgattgctacaggcattccttggcttggagatgcatcacttcagtctctgcctccgtcttcttgtggcattctccctgtgtgtgtctgtgtctcacgtggccatcctcttaaaaggacaccagtcatattggattttggcaccccctactccaggctgacctcatcttaactaattacacctgcaaagaccctatttccaaataagggatggatttgcacaggtccattgccaagctcttgtcctgttcatttgtgagcaaagatgggtgtccggggacacatggcagactgtgcccattgacgggagtaagcgagctgaacaagctttcaggaccactgaacttgagaccttggctatatgagcccagggtaaaagtcaactgagccttgagatgcagaaccagagagaagtggagggaggaagacagtagttactattatcaccattttacagaaaaaggaaactgaagcttggaaaggtcaaatatctttagctgtatcagttgcatgaagttagcaagagacttgaatccagaacttggacttgaatggagatctatctgacttcagagctaacccacaaaaccccagccatggtgagactgtcttggggtgatttgtatgggagactgcagggtcagtgttggtcagcgacggaccctgctctcagcatgctctttctgcctgactgctttcagtgtctgcagcagctgctagcagggtgagagaggaggaagagagcagtcgtgagtctcaccagccatctgactccctacccacaaagaaaatgctgcagctgtgacatgtgtgtttgtcagtgtgtgtcacatgtgcacgaccacatgtgtgtatgtgtgcataggtgggggcatctgtacctgtagatgcatttctgaatgtaggaaaatctcaatgctgcatagtactgttttcatggaactgttgatcctcagaaatagaaatgattgacagtttttcaaaaatgaatatgcatctcatataattgtaatgagatttgggatatcttaattcatcaataaaggggacaggaagg

SEQ ID NO: 6742 - protein, 185 aa, Homo sapiens
MNGGEDFASQVTRTLDSLQGCNEKSGMDLTPGSDNAKLSLMNKYKDNIIATSPVDSNHQQATLLSHTSSSQRKRINNKARAGSAFLNPEGDSGTEAENDPQLTFYTDPSRSRRRSRVGSPRSPVNKTTLTLISITSCVIGLVCSSHVNCPLVVKITLHVPEHLIADELQRTLGHGPLCPAAPGPL

SEQ ID NO: 6743 - DNA, 2813 bp, Homo sapiens
gggcagttgggattctccgtacgcctcggaaacagcagcccaaacctcacaacgcagaaccacgagatagtggggattgcagagccctgcgcaagagaaggaaaattaagacgcagcggagcccaggaggtgcccgcacgcgggaaggactggcgtgcagacgaggcagggggaggtttgcactcggcgtggcgcgggtgagccgcgtgctctcgggcacccggccgccagttcggatgcttccgatcctcggggagccggggcgctgcgccggagtcacttcagcccatgttgttcaggtgacacccggggaagagcagactccagtgtgcaaaacgtttcggggtttccgggccagcggttccgggcgcgcctcgcgggcggcggcgcagaactacaacccccaggctccctggcgtggcggcacgtgggcccgagccgggcggccgcggatataaagcgcggcggcggctgccgggcggagcggctgcacggacaagagcggaggcctggaaggggaaactgaagcagaaagaggttacttaatgggctcaaggtcacctacctgacctaccagcagctcaatggccttcccaaagaagaaacttcagggtcttgtggctgcaaccatcacgccaatgactgagaatggagaaatcaacttttcagtaattggtcagtatgtggattatcttgtgaaagaacagggagtgaagaacatttttgtgaatggcacaacaggagaaggcctgtccctgagcgtctcagagcgtcgccaggttgcagaggagtgggtgacaaaagggaaggacaagtcaaaccatcataagttggggaccatccgcacaacccaaagtagacggagtagctttagaagacagctgaaggcctggcacagtggctcacacctgtaatcccagcactttgggaggccaagtggtagctgtgcctagcagcccaggagaaagaggaagagcaaatggatgattggcttcacctaaaccaagagaaaggggtagtgaagggaggggtcgtgcaataaaactgctggtgagagttcaacaggctggatcaggtgataattcacgtaggagcactgagcttgaaggagtcacaggaactggcccaacatgcagcagaaataggagctgatggcatcgctgtcattgcaccgttcttcctcaagccatggaccaaagatatcctgattaatttcctaaaggaagtggctgctgccgcccctgccctgccattttattactatcacattcctgccttgacaggggtaaagattcgtgctgaggagttgttggatgggattctggataagatccccaccttccaagggctgaaattcagtgatacagatctcttagacttcgggcaatgtgttgatcagaatcgccagcaacagtttgctttcctttttggggtggatgagcaactgttgagtgctctggtgatgggagcaactggagcagtgggcagtacctataactacctgggaaaaaagacaaaccagatgttggaggcttttgaacaaaaggacttctctttagccctgaactatcagttttgtatccagagatttatcaactttgttgtcaaactaggtaagtgccacccatcttctgctttgtctgctgctggagactgtaaagaaaatggaataccatcactttctctgagggttcaacaagaacactttttaatggtctgttgcaagcagagttctgtttcccttattaaccctcggggccaaccatataaaactgtgaagtaaacctagttggaaaatctttggcaaccttctccattttagcacatgcctaccccattttccattctttctctcctaaaccatcagcactccctccctttacttgcttcagctcattaaaattctactactgcattgaggttgatttcagcctaagtgcttggaggaaggcagtctaaatacagattttactaaattgtgaatgactgacagctctcccaagagtatttacaatttaaacagagtttattaacacaagtaagcctaaatggatggaggtttggataatatgacaaagtaaaattggggagcagtcgtggggagaaatacagtgaatttgagtagagaaaccgctccagagtctcttaaatcttctataacaaatgacaaatgccactatccactcttctgcaagagattggcccttgggccaattgaatctgcgttaatgcaggaaaatttttaagtttatttttggtagacctccctgctccctgtcagagtcctgcataattctgacaactcctccctctcccccaagcacctcttctgtgttatgcccctcattcttgcagggttctcaacccactctcttactccttcaaggacgtttctgtttgtttttccactttcgtgatttttgcacatttgtgtgctgccagtgctatgaactacctattattgttccatttttctaagcaatggtttcacaaaattgtgggtttggtgtgataattattatgttcctaaaatacattaaaataggtattgaactgttaaaattttagacaaactaaaagcttgatgtgtgtagtagtccccccttatctcagggggatatgttccaagatgaccagtggatgcctgaaattgcagataatacgaaaccctatatatactatgttttttcctgtacatgcatacctatggtaaagtttaatttataaattaggcatagtaagagataaacagtaactaataataaaatagaacaattataacaatatactgcaataaaagttatataactatg

SEQ ID NO: 6744 - protein, 109 aa, Homo sapiens
MAFPKKKLQGLVAATITPMTENGEINFSVIGQYVDYLVKEQGVKNIFVNGTTGEGLSLSVSERRQVAEEWVTKGKDKSNHHKLGTIRTTQSRRSSFRRQLKAWHSGSHL

SEQ ID NO: 6745 - DNA, 1581 bp, Homo sapiens
gggcagttgggattctccgtacgcctcggaaacagcagcccaaacctcacaacgcagaaccacgagatagtggggattgcagagccctgcgcaagagaaggaaaattaagacgcagcggagcccaggaggtgcccgcacgcgggaaggactggcgtgcagacgaggcagggggaggtttgcactcggcgtggcgcgggtgagccgcgtgctctcgggcacccggccgccagttcggatgcttccgatcctcggggagccggggcgctgcgccggagtcacttcagcccatgttgttcaggtgacacccggggaagagcagactccagtgtgcaaaacgtttcggggtttccgggccagcggttccgggcgcgcctcgcgggcggcggcgcagaactacaacccccaggctccctggcgtggcggcacgtgggcccgagccgggcggccgcggatataaagcgcggcggcggctgccgggcggagcggctgcacggacaagagcggaggcctggaaggggaaactgaagcagaaagaggttacttaatgggctcaaggtcacctacctgacctaccagcagctcaatggccttcccaaagaagaaacttcagggtcttgtggctgcaaccatcacgccaatgactgagaatggagaaatcaacttttcagtaattggtcagtatgtggattatcttgtgaaagaacagggagtgaagaacatttttgtgaatggcacaacaggagaaggcctgtccctgagcgtctcagagcgtcgccaggttgcagaggagtgggtgacaaaagggaaggacaagctggatcaggtgataattcacgtaggagcactgagcttgaaggagtcacaggaactggcccaacatgcagcagaaataggagctgatggcatcgctgtcattgcaccgttcttcctcaagccatggaccaaagatatcctgattaatttcctaaaggaagtggctgctgccgcccctgccctgccattttattactatcacattcctgccttgacaggggtaaagattcgtgctgaggagttgttggatgggattctggataagatccccaccttccaagggctgaaattcagtgatacagatctcttagacttcgggcaatgtgttgatcagaatcgccagcaacagtttgctttcctttttggggtggatgagcaactgttgagtgctctggtgatgggagcaactggagcagtgggcagttttgtatccagagatttatcaactttgttgtcaaactaggttttggagtgtcacagaccaaagccatcatgactctggtctctgggattccaatgggcccaccccggcttccactgcagaaagcctccagggagtttactgatagtgctgaagctaaactgaagagcctggatttcctttctttcactgatttaaaggatggaaacttggaagctggtagctagtgcctctctatcaaatcagggtttgcaccttgagacataatctaccttaaatagtgcatttttttctcagggaattttagatgaacttgaataaactctcctagcaaatgaaatctcac

SEQ ID NO: 6746 - protein, 230 aa, Homo sapiens
MAFPKKKLQGLVAATITPMTENGEINFSVIGQYVDYLVKEQGVKNIFVNGTTGEGLSLSVSERRQVAEEWVTKGKDKLDQVIIHVGALSLKESQELAQHAAEIGADGIAVIAPFFLKPWTKDILINFLKEVAAAAPALPFYYYHIPALTGVKIRAEELLDGILDKIPTFQGLKFSDTDLLDFGQCVDQNRQQQFAFLFGVDEQLLSALVMGATGAVGSFVSRDLSTLLSN

SEQ ID NO: 6747 - DNA, 2782 bp, Homo sapiens
gggcagttgggattctccgtacgcctcggaaacagcagcccaaacctcacaacgcagaaccacgagatagtggggattgcagagccctgcgcaagagaaggaaaattaagacgcagcggagcccaggaggtgcccgcacgcgggaaggactggcgtgcagacgaggcagggggaggtttgcactcggcgtggcgcgggtgagccgcgtgctctcgggcacccggccgccagttcggatgcttccgatcctcggggagccggggcgctgcgccggagtcacttcagcccatgttgttcaggtgacacccggggaagagcagactccagtgtgcaaaacgtttcggggtttccgggccagcggttccgggcgcgcctcgcgggcggcggcgcagaactacaacccccaggctccctggcgtggcggcacgtgggcccgagccgggcggccgcggatataaagcgcggcggcggctgccgggcggagcggctgcacggacaagagcggaggcctggaaggggaaactgaagcagaaagaggttacttaatgggctcaaggtcacctacctgacctaccagcagctcaatggccttcccaaagaagaaacttcagggtcttgtggctgcaaccatcacgccaatgactgagaatggagaaatcaacttttcagtaattggtcagtatgtggattatcttgtgaaagaacagggagtgaagaacatttttgtgaatggcacaacaggagaaggcctgtccctgagcgtctcagagcgtcgccaggttgcagaggagtgggtgacaaaagggaaggacaagctggatcaggtgataattcacgtaggagcactgagcttgaaggagtcacaggaactggcccaacatgcagcagaaataggagctgatggcatcgctgtcattgcaccgttcttcctcaagccatggaccaaagatatcctgattaatttcctaaaggaagtggctgctgccgcccctgccctgccattttattactatcacattcctgccttgacaggggtaaagattcgtgctgaggagttgttggatgggattctggataagatccccaccttccaagggctgaaattcagtgatacagatctcttagacttcgggcaatgtgttgatcagaatcgccagcaacagtttgctttcctttttggggtggatgagcaactgttgagtgctctggtgatgggagcaactggagcagtgggcagtacctataactacctgggaaaaaagacaaaccagatgttggaggcttttgaacaaaaggacttctctttagccctgaactatcagttttgtatccagagatttatcaactttgttgtcaaactaggttttggagtgtcacagaccaaagccatcatgactctggtctctgggattccaatgggcccaccccggcttccactgcagaaagcctccagggagtttactgatagtgctgaagctaaactgaagagcctggatttcctttctttcactgatttaaaggatggaaacttggaagctggtagctagtgcctctctatcaaatcagggtttgcaccttgagacataatctaccttaaatagtgcatttttttctcagggaattttagatgaacttgaataaactctcctagcaaatgaaatctcacaataagcattgaggtaccttttgtgagccttaaaaagtcttattttgtgaaggggcaaaaactctaggagtcacaactctcagtcattcatttcacagatttttttgtggagaaatttctgtttatatggatgaaatggaatcaagaggaaaattgtaattgattaattccatctgtctttaggagctctcattatctcggtctctggttcctaatcctattttaaagttgtctaattttaaaccactataatatgtcttcattttaataaatattcatttggaatctaggaaaactctgagctactgcatttaggcaggcactttaataccaaactgtaacatgtctcaactgtatacaactcaaaatacaccagctcatttggctgctcagtctaactctagaatggatgcttttgaattcatttcgatgtcaccacttttcgctctttaaaaacactgggtcaggtgaggacttgtttcagttcctataactaagtaaagggcggctttctcataacaaaggaaaaagtcttccccaaagatgaatttaagtctccacttttttctatacagaaaactcaaaactcaaagtttcaaagaaccaaaggactcttcctctgggcaccacaaacttccccttcctccactgagaagactgtctctcccgcaggaccctgaattattgaaatcgaaggctgacttcctttctgcagtgagcccaggggctaatgttattatcctgtcacacttgcaactagtgacttttgtttagtgatagaagatttggggaggacccaaaggactcagaactttctctccatacctccttttactcttttctttctgtgtaatgtatcaacaactgtttaatctcccttctaacaaaccttgatataagctttctgatatcaaagtatattgacagttaacccttactgattttaaacttgactatccagtctgttaattacctaagattttgttttcatttcatctctaattgttttgatcattggcagagaaagagtatttgaaattcatatcagttttgctccttattttaatctctttgaattaaaaataaaactttttcaaaatggaaatttgaaattat

SEQ ID NO: 6748 - protein, 320 aa, Homo sapiens; identical to SEQ ID NO: 354

SEQ ID NO: 6749 - DNA, 1903 bp, Homo sapiens
gggcagttgggattctccgtacgcctcggaaacagcagcccaaacctcacaacgcagaaccacgagatagtggggattgcagagccctgcgcaagagaaggaaaattaagacgcagcggagcccaggaggtgcccgcacgcgggaaggactggcgtgcagacgaggcagggggaggtttgcactcggcgtggcgcgggtgagccgcgtgctctcgggcacccggccgccagttcggatgcttccgatcctcggggagccggggcgctgcgccggagtcacttcagcccatgttgttcaggtgacacccggggaagagcagactccagtgtgcaaaacgtttcggggtttccgggccagcggttccgggcgcgcctcgcgggcggcggcgcagaactacaacccccaggctccctggcgtggcggcacgtgggcccgagccgggcggccgcggatataaagcgcggcggcggctgccgggcggagcggctgcacggacaagagcggaggcctggaaggggaaactgaagcagaaagaggttacttaatgggctcaaggtcacctacctgacctaccagcagctcaatggccttcccaaagaagaaacttcagggtcttgtggctgcaaccatcacgccaatgactgagaatggagaaatcaacttttcagtaattggtcagtatgtggattatcttgtgaaagaacagggagtgaagaacatttttgtgaatggcacaacaggagaaggcctgtccctgagcgtctcagagcgtcgccaggttgcagaggagtgggtgacaaaagggaaggacaagctggatcaggtgataattcacgtaggagcactgagcttgaaggagtcacaggaactggcccaacatgcagcagaaataggagctgatggcatcgctgtcattgcaccgttcttcctcaagccatggaccaaagatatcctgattaatttcctaaaggaagtggctgctgccgcccctgccctgccattttattactatcacattcctgccttgacaggggtaaagattcgtgctgaggagttgttggatgggattctggataagatccccaccttccaagggctgaaattcagtgatacagatctcttagacttcgggcaatgtgttgatcagaatcgccagcaacagtttgctttcctttttggggtggatgagcaactgttgagtgctctggtgatgggagcaactggagcagtgggcagtacctataactacctgggaaaaaagacaaaccagatgttggaggcttttgaacaaaaggacttctctttagccctgaactatcagttttgtatccagagatttatcaactttgttgtcaaactagaaaactcaaaactcaaagtttcaaagaaccaaaggactcttcctctgggcaccacaaacttccccttcctccactgagaagactgtctctcccgcaggaccctgaattattgaaatcgaaggctgacttcctttctgcagtgagcccaggggctaatgttattatcctgtcacacttgcaactagtgacttttgtttagtgatagaagatttggggaggacccaaaggactcagaactttctctccatacctccttttactcttttctttctgtgtaatgtatcaacaactgtttaatctcccttctaacaaaccttgatataagctttctgatatcaaagtatattgacagttaacccttactgattttaaacttgactatccagtctgttaattacctaagattttgttttcatttcatctctaattgttttgatcattggcagagaaagagtatttgaaattcatatcagttttgctccttattttaatctctttgaattaaaaataaaactttttcaaaatggaaatttgaaattat

SEQ ID NO: 6750 - protein, 284 aa, Homo sapiens
MAFPKKKLQGLVAATITPMTENGEINFSVIGQYVDYLVKEQGVKNIFVNGTTGEGLSLSVSERRQVAEEWVTKGKDKLDQVIIHVGALSLKESQELAQHAAEIGADGIAVIAPFFLKPWTKDILINFLKEVAAAAPALPFYYYHIPALTGVKIRAEELLDGILDKIPTFQGLKFSDTDLLDFGQCVDQNRQQQFAFLFGVDEQLLSALVMGATGAVGSTYNYLGKKTNQMLEAFEQKDFSLALNYQFCIQRFINFVVKLENSKLKVSKNQRTLPLGTTNFPFLH

SEQ ID NO: 6751 - DNA, 1771 bp, Homo sapiens
gggcagttgggattctccgtacgcctcggaaacagcagcccaaacctcacaacgcagaaccacgagatagtggggattgcagagccctgcgcaagagaaggaaaattaagacgcagcggagcccaggaggtgcccgcacgcgggaaggactggcgtgcagacgaggcagggggaggtttgcactcggcgtggcgcgggtgagccgcgtgctctcgggcacccggccgccagttcggatgcttccgatcctcggggagccggggcgctgcgccggagtcacttcagcccatgttgttcaggtgacacccggggaagagcagactccagtgtgcaaaacgtttcggggtttccgggccagcggttccgggcgcgcctcgcgggcggcggcgcagaactacaacccccaggctccctggcgtggcggcacgtgggcccgagccgggcggccgcggatataaagcgcggcggcggctgccgggcggagcggctgcacggacaagagcggaggcctggaaggggaaactgaagcagaaagaggttacttaatgggctcaaggtcacctacctgacctaccagcagctcaatggccttcccaaagaagaaacttcagggtcttgtggctgcaaccatcacgccaatgactgagaatggagaaatcaacttttcagtaattggtcagtatgtggattatcttgtgaaagaacagggagtgaagaacatttttgtgaatggcacaacaggagaaggcctgtccctgagcgtctcagagcgtcgccaggttgcagaggagtgggtgacaaaagggaaggacaagctggatcaggtgataattcacgtaggagcactgagcttgaaggagtcacaggaactggcccaacatgcagcagaaataggagctgatggcatcgctgtcattgcaccgttcttcctcaagccatggaccaaagatatcctgattaatttcctaaaggaagtggctgctgccgcccctgccctgccattttattactatcacattcctgccttgacaggggtaaagattcgtgctgaggagttgttggatgggattctggataagatccccaccttccaagggctgaaattcagtgatacagatctcttagacttcgggcaatgtgttgatcagaatcgccagcaacagtttgctttcctttttggggtggatgagttttgtatccagagatttatcaactttgttgtcaaactagaaaactcaaaactcaaagtttcaaagaaccaaaggactcttcctctgggcaccacaaacttccccttcctccactgagaagactgtctctcccgcaggaccctgaattattgaaatcgaaggctgacttcctttctgcagtgagcccaggggctaatgttattatcctgtcacacttgcaactagtgacttttgtttagtgatagaagatttggggaggacccaaaggactcagaactttctctccatacctccttttactcttttctttctgtgtaatgtatcaacaactgtttaatctcccttctaacaaaccttgatataagctttctgatatcaaagtatattgacagttaacccttactgattttaaacttgactatccagtctgttaattacctaagattttgttttcatttcatctctaattgttttgatcattggcagagaaagagtatttgaaattcatatcagttttgctccttattttaatctctttgaattaaaaataaaactttttcaaaatggaaatttgaaattat

SEQ ID NO: 6752 - protein, 240 aa, Homo sapiens
MAFPKKKLQGLVAATITPMTENGEINFSVIGQYVDYLVKEQGVKNIFVNGTTGEGLSLSVSERRQVAEEWVTKGKDKLDQVIIHVGALSLKESQELAQHAAEIGADGIAVIAPFFLKPWTKDILINFLKEVAAAAPALPFYYYHIPALTGVKIRAEELLDGILDKIPTFQGLKFSDTDLLDFGQCVDQNRQQQFAFLFGVDEFCIQRFINFVVKLENSKLKVSKNQRTLPLGTTNFPFLH

SEQ ID NO: 6753 - DNA, 2697 bp, Homo sapiens
gggcagttgggattctccgtacgcctcggaaacagcagcccaaacctcacaacgcagaaccacgagatagtggggattgcagagccctgcgcaagagaaggaaaattaagacgcagcggagcccaggaggtgcccgcacgcgggaaggactggcgtgcagacgaggcagggggaggtttgcactcggcgtggcgcgggtgagccgcgtgctctcgggcacccggccgccagttcggatgcttccgatcctcggggagccggggcgctgcgccggagtcacttcagcccatgttgttcaggtgacacccggggaagagcagactccagtgtgcaaaacgtttcggggtttccgggccagcggttccgggcgcgcctcgcgggcggcggcgcagaactacaacccccaggctccctggcgtggcggcacgtgggcccgagccgggcggccgcggatataaagcgcggcggcggctgccgggcggagcggctgcacggacaagagcggaggcctggaaggggaaactgaagcagaaagaggttacttaatgggctcaaggtcacctacctgacctaccagcagctcaatggccttcccaaagaagaaacttcagggtcttgtggctgcaaccatcacgccaatgactgagaatggagaaatcaacttttcagtaattggtcagtatgtggattatcttgtgaaagaacagggagtgaagaacatttttgtgaatggcacaacaggagaaggcctgtccctgagcgtctcagagcgtcgccaggttgcagaggagtgggtgacaaaagggaaggacaagctggatcaggtgataattcacgtaggagcactgagcttgaaggagtcacaggaactggcccaacatgcagcagaaataggagctgatggcatcgctgtcattgcaccgttcttcctcaagccatggaccaaagatatcctgattaatttcctaaaggaagtggctgctgccgcccctgccctgccattttattactatcacattcctgccttgacaggggtaaagattcgtgctgaggagttgttggatgggattctggataagatccccaccttccaagggctgaaattcagtgatacagatctcttagacttcgggcaatgtgttgatcagaatcgccagcaacagtttgctttcctttttggggtggatgagcaactgttgagtgctctggtgatgggagcaactggagcagtgggcagttttgtatccagagatttatcaactttgttgtcaaactaggttttggagtgtcacagaccaaagccatcatgactctggtctctgggattccaatgggcccaccccggcttccactgcagaaagcctccagggagtttactgatagtgctgaagctaaactgaagagcctggatttcctttctttcactgatttaaaggatggaaacttggaagctggtagctagtgcctctctatcaaatcagggtttgcaccttgagacataatctaccttaaatagtgcatttttttctcagggaattttagatgaacttgaataaactctcctagcaaatgaaatctcacaataagcattgaggtaccttttgtgagccttaaaaagtcttattttgtgaaggggcaaaaactctaggagtcacaactctcagtcattcatttcacagatttttttgtggagaaatttctgtttatatggatgaaatggaatcaagaggaaaattgtaattgattaattccatctgtctttaggagctctcattatctcggtctctggttcctaatcctattttaaagttgtctaattttaaaccactataatatgtcttcattttaataaatattcatttggaatctaggaaaactctgagctactgcatttaggcaggcactttaataccaaactgtaacatgtctcaactgtatacaactcaaaatacaccagctcatttggctgctcagtctaactctagaatggatgcttttgaattcatttcgatgtcaccacttttcgctctttaaaaacactgggtcaggtgaggacttgtttcagttcctataactaagtaaagggcggctttctcataacaaaggaaaaagtcttccccaaagatgaatttaagtctccacttttttctatacagaaaactcaaaactcaaagtttcaaagaaccaaaggactcttcctctgggcaccacaaacttccccttcctccactgagaagactgtctctcccgcaggaccctgaattattgaaatcgaaggctgacttcctttctgcagtgagcccaggggctaatgttattatcctgtcacacttgcaactagtgacttttgtttagtgatagaagatttggggaggacccaaaggactcagaactttctctccatacctccttttactcttttctttctgtgtaatgtatcaacaactgtttaatctcccttctaacaaaccttgatataagctttctgatatcaaagtatattgacagttaacccttactgattttaaacttgactatccagtctgttaattacctaagattttgttttcatttcatctctaattgttttgatcattggcagagaaagagtatttgaaattcatatcagttttgctccttattttaatctctttgaattaaaaataaaactttttcaaaatggaaatttgaaattat

SEQ ID NO: 6754 - protein, 230 aa, Homo sapiens; identical to SEQ ID NO: 6746

SEQ ID NO: 6755 - DNA, 3023 bp, Homo sapiens
gggcagttgggattctccgtacgcctcggaaacagcagcccaaacctcacaacgcagaaccacgagatagtggggattgcagagccctgcgcaagagaaggaaaattaagacgcagcggagcccaggaggtgcccgcacgcgggaaggactggcgtgcagacgaggcagggggaggtttgcactcggcgtggcgcgggtgagccgcgtgctctcgggcacccggccgccagttcggatgcttccgatcctcggggagccggggcgctgcgccggagtcacttcagcccatgttgttcaggtgacacccggggaagagcagactccagtgtgcaaaacgtttcggggtttccgggccagcggttccgggcgcgcctcgcgggcggcggcgcagaactacaacccccaggctccctggcgtggcggcacgtgggcccgagccgggcggccgcggatataaagcgcggcggcggctgccgggcggagcggctgcacggacaagagcggaggcctggaaggggaaactgaagcagaaagaggttacttaatgggctcaaggtcacctacctgacctaccagcagctcaatggccttcccaaagaagaaacttcagggtcttgtggctgcaaccatcacgccaatgactgagaatggagaaatcaacttttcagtaattggtcagtatgtggattatcttgtgaaagaacagggagtgaagaacatttttgtgaatggcacaacaggagaaggcctgtccctgagcgtctcagagcgtcgccaggttgcagaggagtgggtgacaaaagggaaggacaagctggatcaggtgataattcacgtaggagcactgagcttgaaggagtcacaggaactggcccaacatgcagcagaaataggagctgatggcatcgctgtcattgcaccgttcttcctcaagccatggaccaaagatatcctgattaatttcctaaaggaagtggctgctgccgcccctgccctgccattttattactatcacattcctgccttgacaggggtaaagattcgtgctgaggagttgttggatgggattctggataagatccccaccttccaagggctgaaattcagtgatacagatctcttagacttcgggcaatgtgttgatcagaatcgccagcaacagtttgctttcctttttggggtggatgagcaactgttgagtgctctggtgatgggagcaactggagcagtgggcagtacctataactacctgggaaaaaagacaaaccagatgttggaggcttttgaacaaaaggacttctctttagccctgaactatcagttttgtatccagagatttatcaactttgttgtcaaactaggttttggagtgtcacagaccaaagccatcatgactctggtctctgggattccaatgggcccaccccggcttccactgcagaaagcctccagggagtttactgatagtgctgaagctaaactgaagagcctggatttcctttctttcactgatttaaaggatggaaacttggaagctggtagctagtgcctctctatcaaatcagggtttgcaccttgagacataatctaccttaaatagtgcatttttttctcagggaattttagatgaacttgaataaactctcctagcaaatgaaatctcacaataagcattgaggtaccttttgtgagccttaaaaagtcttattttgtgaaggggcaaaaactctaggagtcacaactctcagtcattcatttcacagatttttttgtggagaaatttctgtttatatggatgaaatggaatcaagaggaaaattgtaattgattaattccatctgtctttaggagctctcattatctcggtctctggttcctaatcctattttaaagttgtctaattttaaaccactataatatgtcttcattttaataaatattcatttggaatctaggaaaactctgagctactgcatttaggcaggcactttaataccaaactgtaacatgtctcaactgtatacaactcaaaatacaccagctcatttggctgctcagtctaactctagaatggatgcttttgaattcatttcgatgtcaccacttttcgctctttaaaaacactgggtcaggtgaggacttgtttcagttcctataactaagtaaagggcggctttctcataacaaaggaaaaagtcttccccaaagatgaatttaagtctccacttttttctatacagaaaactcaaaactcaaagtttcaaagaaccaaaggactcttcctctgggcaccacaaacttccccttcctccactgagaagactgtctctcccgcaggaccctgaattattgaaatcgaaggctgacttcctttctgcagtgagcccaggggctaatgttattatcctgtcacacttgcaactagtgacttttgtttagtgatagaagatttggggaggacccaaaggactcagaactttctctccatacctccttttactcttttctttctgtgtaatgtatcaacaactgtttaatctcccttctaacaaaccttgatataagctttctgatatcaaagtatattgacagttaacccttactgattttaaacttgactatccagtctgttaattacctaagattttgttttcatttcatctctaattgttttgatcattggcagagaaagagtatttgaaattcatatcagttttgctccttattttaatctctttgaattaaaaataaaactttttcaaaatggaaatttgaaattataagtagacttcaattatctttgctaatcctctctttaattagtcagctagttaaaagttgttatattcatatatcctcaaccctctttttgcctttgtagcttttaatttcctgaaagaagaaaatgagttgttcgtttttggttctgaggatgtgatatccgtacttactgatactaaagccaaatttaaattctaaaattaattcttgggtatccaataaacaaagaactatttttcta

SEQ ID NO: 6756 - protein, 320 aa, Homo sapiens; identical to SEQ ID NO: 354

SEQ ID NO: 6757 - DNA, 2144 bp, Homo sapiens
gggcagttgggattctccgtacgcctcggaaacagcagcccaaacctcacaacgcagaaccacgagatagtggggattgcagagccctgcgcaagagaaggaaaattaagacgcagcggagcccaggaggtgcccgcacgcgggaaggactggcgtgcagacgaggcagggggaggtttgcactcggcgtggcgcgggtgagccgcgtgctctcgggcacccggccgccagttcggatgcttccgatcctcggggagccggggcgctgcgccggagtcacttcagcccatgttgttcaggtgacacccggggaagagcagactccagtgtgcaaaacgtttcggggtttccgggccagcggttccgggcgcgcctcgcgggcggcggcgcagaactacaacccccaggctccctggcgtggcggcacgtgggcccgagccgggcggccgcggatataaagcgcggcggcggctgccgggcggagcggctgcacggacaagagcggaggcctggaaggggaaactgaagcagaaagaggttacttaatgggctcaaggtcacctacctgacctaccagcagctcaatggccttcccaaagaagaaacttcagggtcttgtggctgcaaccatcacgccaatgactgagaatggagaaatcaacttttcagtaattggtcagtatgtggattatcttgtgaaagaacagggagtgaagaacatttttgtgaatggcacaacaggagaaggcctgtccctgagcgtctcagagcgtcgccaggttgcagaggagtgggtgacaaaagggaaggacaagctggatcaggtgataattcacgtaggagcactgagcttgaaggagtcacaggaactggcccaacatgcagcagaaataggagctgatggcatcgctgtcattgcaccgttcttcctcaagccatggaccaaagatatcctgattaatttcctaaaggaagtggctgctgccgcccctgccctgccattttattactatcacattcctgccttgacaggggtaaagattcgtgctgaggagttgttggatgggattctggataagatccccaccttccaagggctgaaattcagtgatacagatctcttagacttcgggcaatgtgttgatcagaatcgccagcaacagtttgctttcctttttggggtggatgagcaactgttgagtgctctggtgatgggagcaactggagcagtgggcagtacctataactacctgggaaaaaagacaaaccagatgttggaggcttttgaacaaaaggacttctctttagccctgaactatcagttttgtatccagagatttatcaactttgttgtcaaactagaaaactcaaaactcaaagtttcaaagaaccaaaggactcttcctctgggcaccacaaacttccccttcctccactgagaagactgtctctcccgcaggaccctgaattattgaaatcgaaggctgacttcctttctgcagtgagcccaggggctaatgttattatcctgtcacacttgcaactagtgacttttgtttagtgatagaagatttggggaggacccaaaggactcagaactttctctccatacctccttttactcttttctttctgtgtaatgtatcaacaactgtttaatctcccttctaacaaaccttgatataagctttctgatatcaaagtatattgacagttaacccttactgattttaaacttgactatccagtctgttaattacctaagattttgttttcatttcatctctaattgttttgatcattggcagagaaagagtatttgaaattcatatcagttttgctccttattttaatctctttgaattaaaaataaaactttttcaaaatggaaatttgaaattataagtagacttcaattatctttgctaatcctctctttaattagtcagctagttaaaagttgttatattcatatatcctcaaccctctttttgcctttgtagcttttaatttcctgaaagaagaaaatgagttgttcgtttttggttctgaggatgtgatatccgtacttactgatactaaagccaaatttaaattctaaaattaattcttgggtatccaataaacaaagaactatttttcta

SEQ ID NO: 6758 - protein, 284 aa, Homo sapiens; identical to SEQ ID NO: 6750

SEQ ID NO: 6759 - DNA, 2938 bp, Homo sapiens
gggcagttgggattctccgtacgcctcggaaacagcagcccaaacctcacaacgcagaaccacgagatagtggggattgcagagccctgcgcaagagaaggaaaattaagacgcagcggagcccaggaggtgcccgcacgcgggaaggactggcgtgcagacgaggcagggggaggtttgcactcggcgtggcgcgggtgagccgcgtgctctcgggcacccggccgccagttcggatgcttccgatcctcggggagccggggcgctgcgccggagtcacttcagcccatgttgttcaggtgacacccggggaagagcagactccagtgtgcaaaacgtttcggggtttccgggccagcggttccgggcgcgcctcgcgggcggcggcgcagaactacaacccccaggctccctggcgtggcggcacgtgggcccgagccgggcggccgcggatataaagcgcggcggcggctgccgggcggagcggctgcacggacaagagcggaggcctggaaggggaaactgaagcagaaagaggttacttaatgggctcaaggtcacctacctgacctaccagcagctcaatggccttcccaaagaagaaacttcagggtcttgtggctgcaaccatcacgccaatgactgagaatggagaaatcaacttttcagtaattggtcagtatgtggattatcttgtgaaagaacagggagtgaagaacatttttgtgaatggcacaacaggagaaggcctgtccctgagcgtctcagagcgtcgccaggttgcagaggagtgggtgacaaaagggaaggacaagctggatcaggtgataattcacgtaggagcactgagcttgaaggagtcacaggaactggcccaacatgcagcagaaataggagctgatggcatcgctgtcattgcaccgttcttcctcaagccatggaccaaagatatcctgattaatttcctaaaggaagtggctgctgccgcccctgccctgccattttattactatcacattcctgccttgacaggggtaaagattcgtgctgaggagttgttggatgggattctggataagatccccaccttccaagggctgaaattcagtgatacagatctcttagacttcgggcaatgtgttgatcagaatcgccagcaacagtttgctttcctttttggggtggatgagcaactgttgagtgctctggtgatgggagcaactggagcagtgggcagttttgtatccagagatttatcaactttgttgtcaaactaggttttggagtgtcacagaccaaagccatcatgactctggtctctgggattccaatgggcccaccccggcttccactgcagaaagcctccagggagtttactgatagtgctgaagctaaactgaagagcctggatttcctttctttcactgatttaaaggatggaaacttggaagctggtagctagtgcctctctatcaaatcagggtttgcaccttgagacataatctaccttaaatagtgcatttttttctcagggaattttagatgaacttgaataaactctcctagcaaatgaaatctcacaataagcattgaggtaccttttgtgagccttaaaaagtcttattttgtgaaggggcaaaaactctaggagtcacaactctcagtcattcatttcacagatttttttgtggagaaatttctgtttatatggatgaaatggaatcaagaggaaaattgtaattgattaattccatctgtctttaggagctctcattatctcggtctctggttcctaatcctattttaaagttgtctaattttaaaccactataatatgtcttcattttaataaatattcatttggaatctaggaaaactctgagctactgcatttaggcaggcactttaataccaaactgtaacatgtctcaactgtatacaactcaaaatacaccagctcatttggctgctcagtctaactctagaatggatgcttttgaattcatttcgatgtcaccacttttcgctctttaaaaacactgggtcaggtgaggacttgtttcagttcctataactaagtaaagggcggctttctcataacaaaggaaaaagtcttccccaaagatgaatttaagtctccacttttttctatacagaaaactcaaaactcaaagtttcaaagaaccaaaggactcttcctctgggcaccacaaacttccccttcctccactgagaagactgtctctcccgcaggaccctgaattattgaaatcgaaggctgacttcctttctgcagtgagcccaggggctaatgttattatcctgtcacacttgcaactagtgacttttgtttagtgatagaagatttggggaggacccaaaggactcagaactttctctccatacctccttttactcttttctttctgtgtaatgtatcaacaactgtttaatctcccttctaacaaaccttgatataagctttctgatatcaaagtatattgacagttaacccttactgattttaaacttgactatccagtctgttaattacctaagattttgttttcatttcatctctaattgttttgatcattggcagagaaagagtatttgaaattcatatcagttttgctccttattttaatctctttgaattaaaaataaaactttttcaaaatggaaatttgaaattataagtagacttcaattatctttgctaatcctctctttaattagtcagctagttaaaagttgttatattcatatatcctcaaccctctttttgcctttgtagcttttaatttcctgaaagaagaaaatgagttgttcgtttttggttctgaggatgtgatatccgtacttactgatactaaagccaaatttaaattctaaaattaattcttgggtatccaataaacaaagaactatttttcta

SEQ ID NO: 6760 - protein, 230 aa, Homo sapiens; identical to SEQ ID NO: 6746

SEQ ID NO: 6761 - DNA, 2392 bp, Homo sapiens
gccgggcggagcggctgcacggacaagagcggaggcctggctatacctgctggaatggataaagtgagctttaaaagttgatcagaccgaagagattgaagtgagagaaccacaggaacaaagaaggggaaactgaagcagaaagaggttacttaatgggctcaaggtcacctacctgacctaccagcagctcaatggccttcccaaagaagaaacttcagggtcttgtggctgcaaccatcacgccaatgactgagaatggagaaatcaacttttcagtaattggtcagtatgtggattatcttgtgaaagaacagggagtgaagaacatttttgtgaatggcacaacaggagaaggcctgtccctgagcgtctcagagcgtcgccaggttgcagaggagtgggtgacaaaagggaaggacaagctggatcaggtgataattcacgtaggagcactgagcttgaaggagtcacaggaactggcccaacatgcagcagaaataggagctgatggcatcgctgtcattgcaccgttcttcctcaagccatggaccaaagatatcctgattaatttcctaaaggaagtggctgctgccgcccctgccctgccattttattactatcacattcctgccttgacaggggtaaagattcgtgctgaggagttgttggatgggattctggataagatccccaccttccaagggctgaaattcagtgatacagatctcttagacttcgggcaatgtgttgatcagaatcgccagcaacagtttgctttcctttttggggtggatgagcaactgttgagtgctctggtgatgggagcaactggagcagtgggcagtacctataactacctgggaaaaaagacaaaccagatgttggaggcttttgaacaaaaggacttctctttagccctgaactatcagttttgtatccagagatttatcaactttgttgtcaaactaggttttggagtgtcacagaccaaagccatcatgactctggtctctgggattccaatgggcccaccccggcttccactgcagaaagcctccagggagtttactgatagtgctgaagctaaactgaagagcctggatttcctttctttcactgatttaaaggatggaaacttggaagctggtagctagtgcctctctatcaaatcagggtttgcaccttgagacataatctaccttaaatagtgcatttttttctcagggaattttagatgaacttgaataaactctcctagcaaatgaaatctcacaataagcattgaggtaccttttgtgagccttaaaaagtcttattttgtgaaggggcaaaaactctaggagtcacaactctcagtcattcatttcacagatttttttgtggagaaatttctgtttatatggatgaaatggaatcaagaggaaaattgtaattgattaattccatctgtctttaggagctctcattatctcggtctctggttcctaatcctattttaaagttgtctaattttaaaccactataatatgtcttcattttaataaatattcatttggaatctaggaaaactctgagctactgcatttaggcaggcactttaataccaaactgtaacatgtctcaactgtatacaactcaaaatacaccagctcatttggctgctcagtctaactctagaatggatgcttttgaattcatttcgatgtcaccacttttcgctctttaaaaacactgggtcaggtgaggacttgtttcagttcctataactaagtaaagggcggctttctcataacaaaggaaaaagtcttccccaaagatgaatttaagtctccacttttttctatacagaaaactcaaaactcaaagtttcaaagaaccaaaggactcttcctctgggcaccacaaacttccccttcctccactgagaagactgtctctcccgcaggaccctgaattattgaaatcgaaggctgacttcctttctgcagtgagcccaggggctaatgttattatcctgtcacacttgcaactagtgacttttgtttagtgatagaagatttggggaggacccaaaggactcagaactttctctccatacctccttttactcttttctttctgtgtaatgtatcaacaactgtttaatctcccttctaacaaaccttgatataagctttctgatatcaaagtatattgacagttaacccttactgattttaaacttgactatccagtctgttaattacctaagattttgttttcatttcatctctaattgttttgatcattggcagagaaagagtatttgaaattcatatcagttttgctccttattttaatctctttgaattaaaaataaaactttttcaaaatggaaatttgaaattat

SEQ ID NO: 6762 - protein, 320 aa, Homo sapiens; identical to SEQ ID NO: 354

SEQ ID NO: 6763 - DNA, 2633 bp, Homo sapiens
gccgggcggagcggctgcacggacaagagcggaggcctggctatacctgctggaatggataaagtgagctttaaaagttgatcagaccgaagagattgaagtgagagaaccacaggaacaaagaaggggaaactgaagcagaaagaggttacttaatgggctcaaggtcacctacctgacctaccagcagctcaatggccttcccaaagaagaaacttcagggtcttgtggctgcaaccatcacgccaatgactgagaatggagaaatcaacttttcagtaattggtcagtatgtggattatcttgtgaaagaacagggagtgaagaacatttttgtgaatggcacaacaggagaaggcctgtccctgagcgtctcagagcgtcgccaggttgcagaggagtgggtgacaaaagggaaggacaagctggatcaggtgataattcacgtaggagcactgagcttgaaggagtcacaggaactggcccaacatgcagcagaaataggagctgatggcatcgctgtcattgcaccgttcttcctcaagccatggaccaaagatatcctgattaatttcctaaaggaagtggctgctgccgcccctgccctgccattttattactatcacattcctgccttgacaggggtaaagattcgtgctgaggagttgttggatgggattctggataagatccccaccttccaagggctgaaattcagtgatacagatctcttagacttcgggcaatgtgttgatcagaatcgccagcaacagtttgctttcctttttggggtggatgagcaactgttgagtgctctggtgatgggagcaactggagcagtgggcagtacctataactacctgggaaaaaagacaaaccagatgttggaggcttttgaacaaaaggacttctctttagccctgaactatcagttttgtatccagagatttatcaactttgttgtcaaactaggttttggagtgtcacagaccaaagccatcatgactctggtctctgggattccaatgggcccaccccggcttccactgcagaaagcctccagggagtttactgatagtgctgaagctaaactgaagagcctggatttcctttctttcactgatttaaaggatggaaacttggaagctggtagctagtgcctctctatcaaatcagggtttgcaccttgagacataatctaccttaaatagtgcatttttttctcagggaattttagatgaacttgaataaactctcctagcaaatgaaatctcacaataagcattgaggtaccttttgtgagccttaaaaagtcttattttgtgaaggggcaaaaactctaggagtcacaactctcagtcattcatttcacagatttttttgtggagaaatttctgtttatatggatgaaatggaatcaagaggaaaattgtaattgattaattccatctgtctttaggagctctcattatctcggtctctggttcctaatcctattttaaagttgtctaattttaaaccactataatatgtcttcattttaataaatattcatttggaatctaggaaaactctgagctactgcatttaggcaggcactttaataccaaactgtaacatgtctcaactgtatacaactcaaaatacaccagctcatttggctgctcagtctaactctagaatggatgcttttgaattcatttcgatgtcaccacttttcgctctttaaaaacactgggtcaggtgaggacttgtttcagttcctataactaagtaaagggcggctttctcataacaaaggaaaaagtcttccccaaagatgaatttaagtctccacttttttctatacagaaaactcaaaactcaaagtttcaaagaaccaaaggactcttcctctgggcaccacaaacttccccttcctccactgagaagactgtctctcccgcaggaccctgaattattgaaatcgaaggctgacttcctttctgcagtgagcccaggggctaatgttattatcctgtcacacttgcaactagtgacttttgtttagtgatagaagatttggggaggacccaaaggactcagaactttctctccatacctccttttactcttttctttctgtgtaatgtatcaacaactgtttaatctcccttctaacaaaccttgatataagctttctgatatcaaagtatattgacagttaacccttactgattttaaacttgactatccagtctgttaattacctaagattttgttttcatttcatctctaattgttttgatcattggcagagaaagagtatttgaaattcatatcagttttgctccttattttaatctctttgaattaaaaataaaactttttcaaaatggaaatttgaaattataagtagacttcaattatctttgctaatcctctctttaattagtcagctagttaaaagttgttatattcatatatcctcaaccctctttttgcctttgtagcttttaatttcctgaaagaagaaaatgagttgttcgtttttggttctgaggatgtgatatccgtacttactgatactaaagccaaatttaaattctaaaattaattcttgggtatccaataaacaaagaactatttttcta

SEQ ID NO: 6764 - protein, 320 aa, Homo sapiens; identical to SEQ ID NO: 354

SEQ ID NO: 6765 - DNA, 695 bp, Homo sapiens
ggacaagagcggaggcctgggtgagcgcggcccgcgacggcacgggctaggacagacggacgcagacggcccgacgacctgggcgttcgggcggaggggcgctggggcctgactcgcggaaggggaaactgaagcagaaagaggttacttaatgggctcaaggtcacctacctgacctaccagcagctcaatggccttcccaaagaagaaacttcagggtcttgtggctgcaaccatcacgccaatgactgagaatggttttaagaaagactggcatcagctgtttctcaatgcatcagtcacttgttcgcagatcaaacagaagacatgtgattgcatgaatcggcaggatttacttcctgttacagagtgagatcctttctgtaatctcctaacactgcatctggtccatactactttaaccttttaataagacccctcttatcctggaagtggcttcttaaaacagtcttgtttgttcatcagggacccacggacaatgtcagtgtgttcttcctccctgttttgccgttttcctggaaggccagatcccatgatagagataactaaaatgactttttctggatctttttccgtttcccaaaaatctgtggtcctgctgcatccattttactattttctcatcaattctgcgtttttcttctaggaaccttactttcctaaggtgtgaaatc

SEQ ID NO: 6766 - protein, 60 aa, Homo sapiens
MAFPKKKLQGLVAATITPMTENGFKKDWHQLFLNASVTCSQIKQKTCDCMNRQDLLPVTE

SEQ ID NO: 6767 - DNA, 2388 bp, Homo sapiens
ggacaagagcggaggcctgggtgagcgcggcccgcgacggcacgggctaggacagacggacgcagacggcccgacgacctgggcgttcgggcggaggggcgctggggcctgactcgcggaaggggaaactgaagcagaaagaggttacttaatgggctcaaggtcacctacctgacctaccagcagctcaatggccttcccaaagaagaaacttcagggtcttgtggctgcaaccatcacgccaatgactgagaatggagaaatcaacttttcagtaattggtcagtatgtggattatcttgtgaaagaacagggagtgaagaacatttttgtgaatggcacaacaggagaaggcctgtccctgagcgtctcagagcgtcgccaggttgcagaggagtgggtgacaaaagggaaggacaagctggatcaggtgataattcacgtaggagcactgagcttgaaggagtcacaggaactggcccaacatgcagcagaaataggagctgatggcatcgctgtcattgcaccgttcttcctcaagccatggaccaaagatatcctgattaatttcctaaaggaagtggctgctgccgcccctgccctgccattttattactatcacattcctgccttgacaggggtaaagattcgtgctgaggagttgttggatgggattctggataagatccccaccttccaagggctgaaattcagtgatacagatctcttagacttcgggcaatgtgttgatcagaatcgccagcaacagtttgctttcctttttggggtggatgagcaactgttgagtgctctggtgatgggagcaactggagcagtgggcagtacctataactacctgggaaaaaagacaaaccagatgttggaggcttttgaacaaaaggacttctctttagccctgaactatcagttttgtatccagagatttatcaactttgttgtcaaactaggttttggagtgtcacagaccaaagccatcatgactctggtctctgggattccaatgggcccaccccggcttccactgcagaaagcctccagggagtttactgatagtgctgaagctaaactgaagagcctggatttcctttctttcactgatttaaaggatggaaacttggaagctggtagctagtgcctctctatcaaatcagggtttgcaccttgagacataatctaccttaaatagtgcatttttttctcagggaattttagatgaacttgaataaactctcctagcaaatgaaatctcacaataagcattgaggtaccttttgtgagccttaaaaagtcttattttgtgaaggggcaaaaactctaggagtcacaactctcagtcattcatttcacagatttttttgtggagaaatttctgtttatatggatgaaatggaatcaagaggaaaattgtaattgattaattccatctgtctttaggagctctcattatctcggtctctggttcctaatcctattttaaagttgtctaattttaaaccactataatatgtcttcattttaataaatattcatttggaatctaggaaaactctgagctactgcatttaggcaggcactttaataccaaactgtaacatgtctcaactgtatacaactcaaaatacaccagctcatttggctgctcagtctaactctagaatggatgcttttgaattcatttcgatgtcaccacttttcgctctttaaaaacactgggtcaggtgaggacttgtttcagttcctataactaagtaaagggcggctttctcataacaaaggaaaaagtcttccccaaagatgaatttaagtctccacttttttctatacagaaaactcaaaactcaaagtttcaaagaaccaaaggactcttcctctgggcaccacaaacttccccttcctccactgagaagactgtctctcccgcaggaccctgaattattgaaatcgaaggctgacttcctttctgcagtgagcccaggggctaatgttattatcctgtcacacttgcaactagtgacttttgtttagtgatagaagatttggggaggacccaaaggactcagaactttctctccatacctccttttactcttttctttctgtgtaatgtatcaacaactgtttaatctcccttctaacaaaccttgatataagctttctgatatcaaagtatattgacagttaacccttactgattttaaacttgactatccagtctgttaattacctaagattttgttttcatttcatctctaattgttttgatcattggcagagaaagagtatttgaaattcatatcagttttgctccttattttaatctctttgaattaaaaataaaactttttcaaaatggaaatttgaaattat

SEQ ID NO: 6768 - protein, 320 aa, Homo sapiens; identical to SEQ ID NO: 354

SEQ ID NO: 6769 - DNA, 2629 bp, Homo sapiens
ggacaagagcggaggcctgggtgagcgcggcccgcgacggcacgggctaggacagacggacgcagacggcccgacgacctgggcgttcgggcggaggggcgctggggcctgactcgcggaaggggaaactgaagcagaaagaggttacttaatgggctcaaggtcacctacctgacctaccagcagctcaatggccttcccaaagaagaaacttcagggtcttgtggctgcaaccatcacgccaatgactgagaatggagaaatcaacttttcagtaattggtcagtatgtggattatcttgtgaaagaacagggagtgaagaacatttttgtgaatggcacaacaggagaaggcctgtccctgagcgtctcagagcgtcgccaggttgcagaggagtgggtgacaaaagggaaggacaagctggatcaggtgataattcacgtaggagcactgagcttgaaggagtcacaggaactggcccaacatgcagcagaaataggagctgatggcatcgctgtcattgcaccgttcttcctcaagccatggaccaaagatatcctgattaatttcctaaaggaagtggctgctgccgcccctgccctgccattttattactatcacattcctgccttgacaggggtaaagattcgtgctgaggagttgttggatgggattctggataagatccccaccttccaagggctgaaattcagtgatacagatctcttagacttcgggcaatgtgttgatcagaatcgccagcaacagtttgctttcctttttggggtggatgagcaactgttgagtgctctggtgatgggagcaactggagcagtgggcagtacctataactacctgggaaaaaagacaaaccagatgttggaggcttttgaacaaaaggacttctctttagccctgaactatcagttttgtatccagagatttatcaactttgttgtcaaactaggttttggagtgtcacagaccaaagccatcatgactctggtctctgggattccaatgggcccaccccggcttccactgcagaaagcctccagggagtttactgatagtgctgaagctaaactgaagagcctggatttcctttctttcactgatttaaaggatggaaacttggaagctggtagctagtgcctctctatcaaatcagggtttgcaccttgagacataatctaccttaaatagtgcatttttttctcagggaattttagatgaacttgaataaactctcctagcaaatgaaatctcacaataagcattgaggtaccttttgtgagccttaaaaagtcttattttgtgaaggggcaaaaactctaggagtcacaactctcagtcattcatttcacagatttttttgtggagaaatttctgtttatatggatgaaatggaatcaagaggaaaattgtaattgattaattccatctgtctttaggagctctcattatctcggtctctggttcctaatcctattttaaagttgtctaattttaaaccactataatatgtcttcattttaataaatattcatttggaatctaggaaaactctgagctactgcatttaggcaggcactttaataccaaactgtaacatgtctcaactgtatacaactcaaaatacaccagctcatttggctgctcagtctaactctagaatggatgcttttgaattcatttcgatgtcaccacttttcgctctttaaaaacactgggtcaggtgaggacttgtttcagttcctataactaagtaaagggcggctttctcataacaaaggaaaaagtcttccccaaagatgaatttaagtctccacttttttctatacagaaaactcaaaactcaaagtttcaaagaaccaaaggactcttcctctgggcaccacaaacttccccttcctccactgagaagactgtctctcccgcaggaccctgaattattgaaatcgaaggctgacttcctttctgcagtgagcccaggggctaatgttattatcctgtcacacttgcaactagtgacttttgtttagtgatagaagatttggggaggacccaaaggactcagaactttctctccatacctccttttactcttttctttctgtgtaatgtatcaacaactgtttaatctcccttctaacaaaccttgatataagctttctgatatcaaagtatattgacagttaacccttactgattttaaacttgactatccagtctgttaattacctaagattttgttttcatttcatctctaattgttttgatcattggcagagaaagagtatttgaaattcatatcagttttgctccttattttaatctctttgaattaaaaataaaactttttcaaaatggaaatttgaaattataagtagacttcaattatctttgctaatcctctctttaattagtcagctagttaaaagttgttatattcatatatcctcaaccctctttttgcctttgtagcttttaatttcctgaaagaagaaaatgagttgttcgtttttggttctgaggatgtgatatccgtacttactgatactaaagccaaatttaaattctaaaattaattcttgggtatccaataaacaaagaactatttttcta

SEQ ID NO: 6770 - protein, 320 aa, Homo sapiens; identical to SEQ ID NO: 354

SEQ ID NO: 6771 - DNA, 503 bp, Homo sapiens
ccttcccaaagaagaaacttcagggtcttgtggctgcaaccatcacgccaatgactgagaatggttttaagaaagactggcatcagctgtttctcaatgcatcagtcacttgttcgcagatcaaacagaagacatgtgattgcatgaatcggcaggatttacttcctgttacagagtgagatcctttctgtaatctcctaacactgcatctggtccatactactttaaccttttaataagacccctcttatcctggaagtggcttcttaaaacagtcttgtttgttcatcagggacccacggacaatgtcagtgtgttcttcctccctgttttgccgttttcctggaaggccagatcccatgatagagataactaaaatgactttttctggatctttttccgtttcccaaaaatctgtggtcctgctgcatccattttactattttctcatcaattctgcgtttttcttctaggaaccttactttcctaaggtgtgaaatcaa

SEQ ID NO: 6772 - protein, 42 aa, Homo sapiens
MTENGFKKDWHQLFLNASVTCSQIKQKTCDCMNRQDLLPVTE

SEQ ID NO: 6773 - DNA, 1217 bp, Homo sapiens
agctatgtgagggagccataggtatctctgtcctggcagttgaagaaacggagatcctaaaggctagcccagctgccccaagccacacagctagaaagagaaatcaacttttcagtaattggtcagtatgtggattatcttgtgaaagaacagggagtgaagaacatttttgtgaatggcacaacaggagaaggcctgtccctgagcgtctcagagcgtcgccaggttgcagaggagtgggtgacaaaagggaaggacaagctggatcaggtgataattcacgtaggagcactgagcttgaaggagtcacaggaactggcccaacatgcagcagaaataggagctgatggcatcgctgtcattgcaccgttcttcctcaagccatggaccaaagatatcctgattaatttcctaaaggaagtggctgctgccgcccctgccctgccattttattactatcacattcctgccttgacaggggtaaagattcgtgctgaggagttgttggatgggattctggataagatccccaccttccaagggctgaaattcagtgatacagatctcttagacttcgggcaatgtgttgatcagaatcgccagcaacagtttgctttcctttttggggtggatgagttttgtatccagagatttatcaactttgttgtcaaactagaaaactcaaaactcaaagtttcaaagaaccaaaggactcttcctctgggcaccacaaacttccccttcctccactgagaagactgtctctcccgcaggaccctgaattattgaaatcgaaggctgacttcctttctgcagtgagcccaggggctaatgttattatcctgtcacacttgcaactagtgacttttgtttagtgatagaagatttggggaggacccaaaggactcagaactttctctccatacctccttttactcttttctttctgtgtaatgtatcaacaactgtttaatctcccttctaacaaaccttgatataagctttctgatatcaaagtatattgacagttaacccttactgattttaaacttgactatccagtctgttaattacctaagattttgttttcatttcatctctaattgttttgatcattggcagagaaagagtatttgaaattcatatcagttttgctccttattttaatctctttgaattaaaaataaaactttttcaaaatggaaatttgaaattat

SEQ ID NO: 6774 - protein, 230 aa, Homo sapiens
RLAQLPQATQLEREINFSVIGQYVDYLVKEQGVKNIFVNGTTGEGLSLSVSERRQVAEEWVTKGKDKLDQVIIHVGALSLKESQELAQHAAEIGADGIAVIAPFFLKPWTKDILINFLKEVAAAAPALPFYYYHIPALTGVKIRAEELLDGILDKIPTFQGLKFSDTDLLDFGQCVDQNRQQQFAFLFGVDEFCIQRFINFVVKLENSKLKVSKNQRTLPLGTTNFPFLH

SEQ ID NO: 6775 - DNA, 1458 bp, Homo sapiens
agctatgtgagggagccataggtatctctgtcctggcagttgaagaaacggagatcctaaaggctagcccagctgccccaagccacacagctagaaagagaaatcaacttttcagtaattggtcagtatgtggattatcttgtgaaagaacagggagtgaagaacatttttgtgaatggcacaacaggagaaggcctgtccctgagcgtctcagagcgtcgccaggttgcagaggagtgggtgacaaaagggaaggacaagctggatcaggtgataattcacgtaggagcactgagcttgaaggagtcacaggaactggcccaacatgcagcagaaataggagctgatggcatcgctgtcattgcaccgttcttcctcaagccatggaccaaagatatcctgattaatttcctaaaggaagtggctgctgccgcccctgccctgccattttattactatcacattcctgccttgacaggggtaaagattcgtgctgaggagttgttggatgggattctggataagatccccaccttccaagggctgaaattcagtgatacagatctcttagacttcgggcaatgtgttgatcagaatcgccagcaacagtttgctttcctttttggggtggatgagttttgtatccagagatttatcaactttgttgtcaaactagaaaactcaaaactcaaagtttcaaagaaccaaaggactcttcctctgggcaccacaaacttccccttcctccactgagaagactgtctctcccgcaggaccctgaattattgaaatcgaaggctgacttcctttctgcagtgagcccaggggctaatgttattatcctgtcacacttgcaactagtgacttttgtttagtgatagaagatttggggaggacccaaaggactcagaactttctctccatacctccttttactcttttctttctgtgtaatgtatcaacaactgtttaatctcccttctaacaaaccttgatataagctttctgatatcaaagtatattgacagttaacccttactgattttaaacttgactatccagtctgttaattacctaagattttgttttcatttcatctctaattgttttgatcattggcagagaaagagtatttgaaattcatatcagttttgctccttattttaatctctttgaattaaaaataaaactttttcaaaatggaaatttgaaattataagtagacttcaattatctttgctaatcctctctttaattagtcagctagttaaaagttgttatattcatatatcctcaaccctctttttgcctttgtagcttttaatttcctgaaagaagaaaatgagttgttcgtttttggttctgaggatgtgatatccgtacttactgatactaaagccaaatttaaattctaaaattaattcttgggtatccaataaacaaagaactatttttcta

SEQ ID NO: 6776 - protein, 230 aa, Homo sapiens; identical to SEQ ID NO: 6774

SEQ ID NO: 6777 - DNA, 1096 bp, Homo sapiens
ctagaaatgttcccatcttttgttttaatcttaccctgttgtagtagttgctgttagcatatgatctccttctttgggatttttgtggagagatagacggtaccagtcatgtttcctcatttgtttttcccgtctaggttttggagtgtcacagaccaaagccatcatgactctggtctctgggattccaatgggcccaccccggcttccactgcagaaagcctccagggagtttactgatagtgctgaagctaaactgaagagcctggatttcctttctttcactgatttaaaggatggaaacttggaagctgaaaactcaaaactcaaagtttcaaagaaccaaaggactcttcctctgggcaccacaaacttccccttcctccactgagaagactgtctctcccgcaggaccctgaattattgaaatcgaaggctgacttcctttctgcagtgagcccaggggctaatgttattatcctgtcacacttgcaactagtgacttttgtttagtgatagaagatttggggaggacccaaaggactcagaactttctctccatacctccttttactcttttctttctgtgtaatgtatcaacaactgtttaatctcccttctaacaaaccttgatataagctttctgatatcaaagtatattgacagttaacccttactgattttaaacttgactatccagtctgttaattacctaagattttgttttcatttcatctctaattgttttgatcattggcagagaaagagtatttgaaattcatatcagttttgctccttattttaatctctttgaattaaaaataaaactttttcaaaatggaaatttgaaattataagtagacttcaattatctttgctaatcctctctttaattagtcagctagttaaaagttgttatattcatatatcctcaaccctctttttgcctttgtagcttttaatttcctgaaagaagaaaatgagttgttcgtttttggttctgaggatgtgatatccgtacttactgatactaaagccaaatttaaattctaaaattaattcttgggtatccaataaacaaagaactatttttcta

SEQ ID NO: 6778 - protein, 74 aa, Homo sapiens
MTLVSGIPMGPPRLPLQKASREFTDSAEAKLKSLDFLSFTDLKDGNLEAENSKLKVSKNQRTLPLGTTNFPFLH

SEQ ID NO: 6779 - DNA, 656 bp, Homo sapiens
caatggtaagtttatttagggcatctccatttttttcaagcttttggaatcttttgctttcaattactcttaaatacagcaaatttatattttgctacaggttccactctgagtcattttttcttaatagattattacatcccatttacctttattgaaaatctttctaaagtagtttgtagagggaaacattaatttgttcaggtaaataaatacagtaattctagtatccaataagaaattacaaattctagatatgtgaaactaattaacactggaaaaaagtaaaaccccataaccttatagaaatgtgttgttcttgtggtggctcatgcctgtaatccttggaagctaaagatccagctttgaaaaatgtatttccatgtaatatattgatacttttgttgtgctcattatatactataaaacacttgcaattcatttatgctagttgagtctctttatttatttacttattttgagatggagtctcactctgtcacccaggctggagtgcagtgggacgatctgagctcgctgcaacttctgcccctcctccctccaggttcaagcaattctcctgcctcagcctcccaagtagctaggattacaggcacacgccaccttgcccggctaatttttgtatttttagtaca

SEQ ID NO: 6780 - protein, 69 aa, Homo sapiens
MLVESLYLFTYFEMESHSVTQAGVQWDDLSSLQLLPLLPPGSSNSPASASQVARITGTRHLARLIFVFL

SEQ ID NO: 6781 - DNA, 1025 bp, Homo sapiens
ggctcgtcccttcccccacccccagccgccgccgccgcccgcgcttcgcaacaaagccggctgcggagccatggtccacggcgcccgcccgcgaccccgccgccccgcatggtagccggaacgtctctcccttaccagccttcgcttcctggtgcccagctcttaggaccgtgtgtgactctggccttctaccgagacaacagagaaacgcacagcaactcgcatggaggaatcggcgaaatggctccgaccgcggcgctagggggcggggccagcgagcggtgttgaaagcagcaggggcctagaagacattaaaccgataccacagaaatacaaaggatcattagagactattatgaacaactatatgccaacaaattggaaaccaaatggaaatggataaattcctgaacagatacaacttaccaaaattggaccaagaagaaatagaaaacctgaaaagaccaactatgagtaatgagattaaatcagtaatatagagtctcccatcaaagaaaagtccaggccctgatggcttcactgctgaattctactgaacagttaaagaagaactcataccagttctcaaactcatcctgtgagggcagcattaccctgataccaaaactagatatggacacaagaaaaaaaatctataggccagtatccctgatgaacatagatgcaagaatcctcaacaagaccaggtgtggtggttcatgcctgtaatcccagcactttgggaggccaaggcaggtggatcacctgaggtcaggaatttgagaccagcctggccaacatggcaaaaccctgtctgtactaaaaatacaaaaattagccgggcaaggtggcgtgtgcctgtaatcctagctacttgggaggctgaggcaggagaattgcttgaacctggagggaggaggggcagaagttgcagcgagctcagatcgtcccactgcactccagcctgggtgacagagtgagactccatctcaaaataagtaaataaataaagagactcaactagc

SEQ ID NO: 6782 - protein, 59 aa, Homo sapiens
MVAGTSLPYQPSLPGAQLLGPCVTLAFYRDNRETHSNSHGGIGEMAPTAALGGGASERC

SEQ ID NO: 6783 - DNA, 1917 bp, Homo sapiens
agcgccgcggtcggagccatttcgccgattcctccatgcgagttgctgtgcgtttctctgttgtctcggtagaaggccagagtcacacacggtcctaagagctgggcaccaggaagcgaaggctgatctgaagaagacacttgaatcatgggtgacgttaaaaattttctgtatgcctggtgtggcaaaaggaagatgaccccatcctatgaaattagagcagtggggaacaaaaacaggcagaaattcatgtgtgaggttcaggtggaaggttataattacactggcatgggaaattccaccaataaaaaagatgcacaaagcaatgctgccagagactttgttaactatttggttcgaataaatgaaataaagagtgaagaagttccagcttttggggtagcatctccgcccccacttactgatactcctgacactacagcaaatgctgaaggagatttaccaacaaccatgggaggacctcttcctccacatctggctctcaaagcagaaaataattctgaggtaggggcctctggctatggtgttcctgggcccacctgggaccgaggagccaacttgaaggattactactcaagaaaggaagaacaagaagtgcaagcgactctagaatcagaagaagtggatttaaatgctgggcttcatggaaactggaccttggaaaatgctaaagctcgtctaaaccaatattttcagaaagaaaagatccaaggagaatataagtacacccaagtgggtcctgatcacaacaggagctttattgcagaaatgaccatttatatcaagcagctgggcagaaggatttttgcacgagaacatggatcaaataagaaattggcagcacagtcctgtgccctgtcacttgtcagacaactgtaccatcttggagtggttgaagcttactccggacttacaaagaagaaggaaggagagacagtggagccttacaaagtaaacctctctcaagatttagagcatcagctgcaaaacatcattcaagagctaaatcttgagattttgcccccgcctgaagatccttctgtgccagttgcactcaacattggcaaattggctcagttcgaaccatctcagcgacaaaaccaagtgggtgtggttccttggtcacctccacaatccaactggaatccttggactagtagcaacattgatgaggggcctctggcttttgctactccagagcaaataagcatggacctcaagaatgaattgatgtaccagttggaacaggatcatgatttgcaagcaatcttgcaggagagagagttactgcctgtgaagaaatttgaaagtgagattctggaagcaatcagccaaaattcagttgtcattattagaggggctactggatgtgggaaaaccacacaggttccccagttcattctagatgactttatccagaatgaccgagcagcagagtgtaacatcgtagtaactcagcccagaagaatcagtgcggtttctgtggcagagcgagttgcatttgaaagaggagaagagcctggaaaaagctgtggctacagcgttcgatttgagtctatacttcctcgtcctcatgccagtataatgttttgtactgtaggtgtgctcctgagaaaattagaagcaggcattcgaggaatcagtcatgtaattgtagatgaaatacatgaaagagatattaatactgacttccttttggtagtactgcgtgatgttgttcaggcttatcctgaagttcgcattgttcttatgtctgctactattgataccagcatgttttgtgaatatttcttcaattgccccatcattgaagtttatgggaggacttacccagttcaagaatattttctggaagactgcattcagatgacccactttgttcctccaccaaaagac

SEQ ID NO: 6784 - protein, 589 aa, Homo sapiens
MGDVKNFLYAWCGKRKMTPSYEIRAVGNKNRQKFMCEVQVEGYNYTGMGNSTNKKDAQSNAARDFVNYLVRINEIKSEEVPAFGVASPPPLTDTPDTTANAEGDLPTTMGGPLPPHLALKAENNSEVGASGYGVPGPTWDRGANLKDYYSRKEEQEVQATLESEEVDLNAGLHGNWTLENAKARLNQYFQKEKIQGEYKYTQVGPDHNRSFIAEMTIYIKQLGRRIFAREHGSNKKLAAQSCALSLVRQLYHLGVVEAYSGLTKKKEGETVEPYKVNLSQDLEHQLQNIIQELNLEILPPPEDPSVPVALNIGKLAQFEPSQRQNQVGVVPWSPPQSNWNPWTSSNIDEGPLAFATPEQISMDLKNELMYQLEQDHDLQAILQERELLPVKKFESEILEAISQNSVVIIRGATGCGKTTQVPQFILDDFIQNDRAAECNIVVTQPRRISAVSVAERVAFERGEEPGKSCGYSVRFESILPRPHASIMFCTVGVLLRKLEAGIRGISHVIVDEIHERDINTDFLLVVLRDVVQAYPEVRIVLMSATIDTSMFCEYFFNCPIIEVYGRTYPVQEYFLEDCIQMTHFVPPPK

SEQ ID NO: 6785 - DNA, 4173 bp, Homo sapiens
agcgccgcggtcggagccatttcgccgattcctccatgcgagttgctgtgcgtttctctgttgtctcggtagaaggccagagtcacacacggtcctaagagctgggcaccaggaagcgaaggctgatctgaagaagacacttgaatcatgggtgacgttaaaaattttctgtatgcctggtgtggcaaaaggaagatgaccccatcctatgaaattagagcagtggggaacaaaaacaggcagaaattcatgtgtgaggttcaggtggaaggttataattacactggcatgggaaattccaccaataaaaaagatgcacaaagcaatgctgccagagactttgttaactatttggttcgaataaatgaaataaagagtgaagaagttccagcttttggggtagcatctccgcccccacttactgatactcctgacactacagcaaatgctgaaggagatttaccaacaaccatgggaggacctcttcctccacatctggctctcaaagcagaaaataattctgaggtaggggcctctggctatggtgttcctgggcccacctgggaccgaggagccaacttgaaggattactactcaagaaaggaagaacaagaagtgcaagcgactctagaatcagaagaagtggatttaaatgctgggcttcatggaaactggaccttggaaaatgctaaagctcgtctaaaccaatattttcagaaagaaaagatccaaggagaatataagtacacccaagtgggtcctgatcacaacaggagctttattgcagaaatgaccatttatatcaagcagctgggcagaaggatttttgcacgagaacatggatcaaataagaaattggcagcacagtcctgtgccctgtcacttgtcagacaactgtaccatcttggagtggttgaagcttactccggacttacaaagaagaaggaaggagagacagtggagccttacaaagtaaacctctctcaagatttagagcatcagctgcaaaacatcattcaagagctaaatcttgagattttgcccccgcctgaagatccttctgtgccagttgcactcaacattggcaaattggctcagttcgaaccatctcagcgacaaaaccaagtgggtgtggttccttggtcacctccacaatccaactggaatccttggactagtagcaacattgatgaggggcctctggcttttgctactccagagcaaataagcatggacctcaagaatgaattgatgtaccagttggaacaggatcatgatttgcaagcaatcttgcaggagagagagttactgcctgtgaagaaatttgaaagtgagattctggaagcaatcagccaaaattcagttgtcattattagaggggctactggatgtgggaaaaccacacaggttccccagttcattctagatgactttatccagaatgaccgagcagcagagtgtaacatcgtagtaactcagcccagaagaatcagtgcggtttctgtggcagagcgagttgcatttgaaagaggagaagagcctggaaaaagctgtggctacagcgttcgatttgagtctatacttcctcgtcctcatgccagtataatgttttgtactgtaggtgtgctcctgagaaaattagaagcaggcattcgaggaatcagtcatgtaattgtagatgaaatacatgaaagagatattaatactgacttccttttggtagtactgcgtgatgttgttcaggcttatcctgaagttcgcattgttcttatgtctgctactattgataccagcatgttttgtgaatatttcttcaattgccccatcattgaagtttatgggaggacttacccagttcaagaatattttctggaagactgcattcagatgacccactttgttcctccaccaaaagacaaaaagaagaaggataaggatgatgatggtggtgaggatgatgatgcaaattgcaacttgatctgtggtgatgaatatggtccagaaacaaggttgagcatgtctcaattgaacgaaaaggaaactccttttgaactcatcgaggctctacttaagtacattgaaacccttaatgttcctggagctgtgttggtttttttgcctggctggaatctgatttatactatgcagaagcatttggaaatgaatccacattttggaagccatcggtatcagattctacccctgcattctcagattcctcgagaggaacagcgcaaagtgtttgatccagtaccagttggagtaaccaaggttattttgtccacaaatattgctgaaacaagcattaccataaacgatgttgtttatgtcattgactcctgcaagcagaaagtgaaactcttcactgctcacaacaatatgaccaactatgctaccgtatgggcatcaaaaacaaaccttgagcaacggaaagggcgagctggccgagtacggcctggattctgctttcacctgtgcagccgagctcgttttgagagacttgaaacccacatgacaccagagatgttccgaacaccattgcatgaaattgctcttagcataaaacttctgcgtctaggaggaattggccaatttctggccaaagcaattgaacctccccctttggatgctgtgattgaagcagaacacactcttagagagcttgatgcattagatgccaatgatgagttgactcctttgggacgaatcctggctaaactccccattgagcctcgttttggcaaaatgatgataatggggtgtattttctacgtgggagatgctatctgtaccattgctgctgctacctgctttccagagcctttcatcaatgaaggaaagcggctgggctatatccatcgaaattttgctggaaacagattttctgatcacgtagcccttttatcagtattccaagcctgggatgatgctagaatgggtggagaagaagcagagatacgtttttgtgagcacaaaagacttaatatggctacactaagaatgacttgggaagccaaagttcagctcaaagagattttgattaattctgggtttccagaagattgtttgttgacacaagtgtttactaacactggaccagataataatttggatgttgttatctccctcctggcctttgtagccaagacatgaagtacccatctcccttctttgtatttggtgaaaagattcgaactcgagccatctctgctaaaggcatgactttagtcacccccctgcagttgcttctctttgcctccaagaaagtccaatctgatgggcagattgtgcttgtagatgactggattaaactgcaaatatctcatgaagctgctgcctgtatcactggtctccgggcagccatggaggctttggttgttgaagtaaccaaacaacctgctatcatcagccagttggaccccgtaaatgaacgtatgctgaacatgatccgtcagatctctagaccctcagctgctggtatcaaccttatgattggcagtacacggtatggagatggtccacgtcctcccaagatggcccgatacgacaatggaagcggatatagaaggggaggttctagttacagtggtggaggctatggcggtggctatagcagtggaggctatggtagcggaggctatggtggcagcgccaactcctttcgggcaggatatggtgcaggtgttggtggaggctatagaggagtttcccgaggtggctttagaggcaactctggaggagactacagagggcctagtggaggctacagaggatctgggggattccagcgaggaggtggtaggggggcctatggaactggctactttggacagggaagaggaggtggcggctattaaaacttggttatgtcagttcctgtgtgtagacagtaaggaaaaaaaggcatgctatgtgttacgtgttttttccagtatgtttatttgccaccaaaaagtaaatgcattttcacccattctgtggttcattgtagtttaaggaaaccaagcatatagatgcattagtgattttgtttatattatgtaaaatataacgatctcttaaaaataccacagtttgtattttttctttaaggagtaaagatttgcctttaaataacttggtattttcctggctttcgtttaatacaatagaaaataaagtattacaccgaat

SEQ ID NO: 6786 - protein, 1001 aa, Homo sapiens
MGDVKNFLYAWCGKRKMTPSYEIRAVGNKNRQKFMCEVQVEGYNYTGMGNSTNKKDAQSNAARDFVNYLVRINEIKSEEVPAFGVASPPPLTDTPDTTANAEGDLPTTMGGPLPPHLALKAENNSEVGASGYGVPGPTWDRGANLKDYYSRKEEQEVQATLESEEVDLNAGLHGNWTLENAKARLNQYFQKEKIQGEYKYTQVGPDHNRSFIAEMTIYIKQLGRRIFAREHGSNKKLAAQSCALSLVRQLYHLGVVEAYSGLTKKKEGETVEPYKVNLSQDLEHQLQNIIQELNLEILPPPEDPSVPVALNIGKLAQFEPSQRQNQVGVVPWSPPQSNWNPWTSSNIDEGPLAFATPEQISMDLKNELMYQLEQDHDLQAILQERELLPVKKFESEILEAISQNSVVIIRGATGCGKTTQVPQFILDDFIQNDRAAECNIVVTQPRRISAVSVAERVAFERGEEPGKSCGYSVRFESILPRPHASIMFCTVGVLLRKLEAGIRGISHVIVDEIHERDINTDFLLVVLRDVVQAYPEVRIVLMSATIDTSMFCEYFFNCPIIEVYGRTYPVQEYFLEDCIQMTHFVPPPKDKKKKDKDDDGGEDDDANCNLICGDEYGPETRLSMSQLNEKETPFELIEALLKYIETLNVPGAVLVFLPGWNLIYTMQKHLEMNPHFGSHRYQILPLHSQIPREEQRKVFDPVPVGVTKVILSTNIAETSITINDVVYVIDSCKQKVKLFTAHNNMTNYATVWASKTNLEQRKGRAGRVRPGFCFHLCSRARFERLETHMTPEMFRTPLHEIALSIKLLRLGGIGQFLAKAIEPPPLDAVIEAEHTLRELDALDANDELTPLGRILAKLPIEPRFGKMMIMGCIFYVGDAICTIAAATCFPEPFINEGKRLGYIHRNFAGNRFSDHVALLSVFQAWDDARMGGEEAEIRFCEHKRLNMATLRMTWEAKVQLKEILINSGFPEDCLLTQVFTNTGPDNNLDVVISLLAFVAKT

SEQ ID NO: 6787 - DNA, 4276 bp, Homo sapiens
agcgccgcggtcggagccatttcgccgattcctccatgcgagttgctgtgcgtttctctgttgtctcggtagaaggccagagtcacacacggtcctaagagctgggcaccaggaagcgaaggctgatctgaagaagacacttgaatcatgggtgacgttaaaaattttctgtatgcctggtgtggcaaaaggaagatgaccccatcctatgaaattagagcagtggggaacaaaaacaggcagaaattcatgtgtgaggttcaggtggaaggttataattacactggcatgggaaattccaccaataaaaaagatgcacaaagcaatgctgccagagactttgttaactatttggttcgaataaatgaaataaagagtgaagaagttccagcttttggggtagcatctccgcccccacttactgatactcctgacactacagcaaatgctgaaggagatttaccaacaaccatgggaggacctcttcctccacatctggctctcaaagcagaaaataattctgaggtaggggcctctggctatggtgttcctgggcccacctgggaccgaggagccaacttgaaggattactactcaagaaaggaagaacaagaagtgcaagcgactctagaatcagaagaagtggatttaaatgctgggcttcatggaaactggaccttggaaaatgctaaagctcgtctaaaccaatattttcagaaagaaaagatccaaggagaatataagtacacccaagtgggtcctgatcacaacaggagctttattgcagaaatgaccatttatatcaagcagctgggcagaaggatttttgcacgagaacatggatcaaataagaaattggcagcacagtcctgtgccctgtcacttgtcagacaactgtaccatcttggagtggttgaagcttactccggacttacaaagaagaaggaaggagagacagtggagccttacaaagtaaacctctctcaagatttagagcatcagctgcaaaacatcattcaagagctaaatcttgagattttgcccccgcctgaagatccttctgtgccagttgcactcaacattggcaaattggctcagttcgaaccatctcagcgacaaaaccaagtgggtgtggttccttggtcacctccacaatccaactggaatccttggactagtagcaacattgatgaggggcctctggcttttgctactccagagcaaataagcatggacctcaagaatgaattgatgtaccagttggaacaggatcatgatttgcaagcaatcttgcaggagagagagttactgcctgtgaagaaatttgaaagtgagattctggaagcaatcagccaaaattcagttgtcattattagaggggctactggatgtgggaaaaccacacaggttccccagttcattctagatgactttatccagaatgaccgagcagcagagtgtaacatcgtagtaactcagcccagaagaatcagtgcggtttctgtggcagagcgagttgcatttgaaagaggagaagagcctggaaaaagctgtggctacagcgttcgatttgagtctatacttcctcgtcctcatgccagtataatgttttgtactgtaggtgtgctcctgagaaaattagaagcaggcattcgaggaatcagtcatgtaattgtagatgaaatacatgaaagagatattaatactgacttccttttggtagtactgcgtgatgttgttcaggcttatcctgaagttcgcattgttcttatgtctgctactattgataccagcatgttttgtgaatatttcttcaattgccccatcattgaagtttatgggaggacttacccagttcaagaatattttctggaagactgcattcagatgacccactttgttcctccaccaaaagacaaaaagaagaaggataaggatgatgatggtggtgaggatgatgatgcaaattgcaacttgatctgtggtgatgaatatggtccagaaacaaggttgagcatgtctcaattgaacgaaaaggaaactccttttgaactcatcgaggctctacttaagtacattgaaacccttaatgttcctggagctgtgttggtttttttgcctggctggaatctgatttatactatgcagaagcatttggaaatgaatccacattttggaagccatcggtatcagattctacccctgcattctcagattcctcgagaggaacagcgcaaagtgtttgatccagtaccagttggagtaaccaaggttattttgtccacaaatattgctgaaacaagcattaccataaacgatgttgtttatgtcattgactcctgcaagcagaaagtgaaactcttcactgctcacaacaatatgaccaactatgctaccgtatgggcatcaaaaacaaaccttgagcaacggaaagggcgagctggccgagtacggcctggattctgctttcacctgtgcagccgagctcgttttgagagacttgaaacccacatgacaccagagatgttccgaacaccattgcatgaaattgctcttagcataaaacttctgcgtctaggaggaattggccaatttctggccaaagcaattgaacctccccctttggatgctgtgattgaagcagaacacactcttagagagcttgatgcattagatgccaatgatgagttgactcctttgggacgaatcctggctaaactccccattgagcctcgttttggcaaaatgatgataatggggtgtattttctacgtgggagatgctatctgtaccattgctgctgctacctgctttccagagcctttcatcaatgaaggaaagcggctgggctatatccatcgaaattttgctggaaacagattttctgatcacgtagcccttttatcagtattccaagcctgggatgatgctagaatgggtggagaagaagcagagatacgtttttgtgagcacaaaagacttaatatggctacactaagaatgacttgggaagccaaagttcagctcaaagagattttgattaattctgggtttccagaagattgtttgttgacacaagtgtttactaacactggaccagataataatttggatgttgttatctccctcctggcctttggtgtgtaccccaatgtatgctatcataaggaaaagaggaagattctcaccactgaagggcgtaatgcacttatccacaaatcatctgttaattgtccttttagtagccaagacatgaagtacccatctcccttctttgtatttggtgaaaagattcgaactcgagccatctctgctaaaggcatgactttagtcacccccctgcagttgcttctctttgcctccaagaaagtccaatctgatgggcagattgtgcttgtagatgactggattaaactgcaaatatctcatgaagctgctgcctgtatcactggtctccgggcagccatggaggctttggttgttgaagtaaccaaacaacctgctatcatcagccagttggaccccgtaaatgaacgtatgctgaacatgatccgtcagatctctagaccctcagctgctggtatcaaccttatgattggcagtacacggtatggagatggtccacgtcctcccaagatggcccgatacgacaatggaagcggatatagaaggggaggttctagttacagtggtggaggctatggcggtggctatagcagtggaggctatggtagcggaggctatggtggcagcgccaactcctttcgggcaggatatggtgcaggtgttggtggaggctatagaggagtttcccgaggtggctttagaggcaactctggaggagactacagagggcctagtggaggctacagaggatctgggggattccagcgaggaggtggtaggggggcctatggaactggctactttggacagggaagaggaggtggcggctattaaaacttggttatgtcagttcctgtgtgtagacagtaaggaaaaaaaggcatgctatgtgttacgtgttttttccagtatgtttatttgccaccaaaaagtaaatgcattttcacccattctgtggttcattgtagtttaaggaaaccaagcatatagatgcattagtgattttgtttatattatgtaaaatataacgatctcttaaaaataccacagtttgtattttttctttaaggagtaaagatttgcctttaaataacttggtattttcctggctttcgtttaatacaatagaaaataaagtattacaccgaat

SEQ ID NO: 6788 - protein, 1270 aa, Homo sapiens; identical to SEQ ID NO: 356

SEQ ID NO: 6789 - DNA, 4405 bp, Homo sapiens
agcgccgcggtcggagccatttcgccgattcctccatgcgagttgctgtgcgtttctctgttgtctcggtagaaggccagagtcacacacggtcctaagagctgggcaccaggaagcgaaggctgatctgaagaagacacttgaatcatgggtgacgttaaaaattttctgtatgcctggtgtggcaaaaggaagatgaccccatcctatgaaattagagcagtggggaacaaaaacaggcagaaattcatgtgtgaggttcaggtggaaggttataattacactggcatgggaaattccaccaataaaaaagatgcacaaagcaatgctgccagagactttgttaactatttggttcgaataaatgaaataaagagtgaagaagttccagcttttggggtagcatctccgcccccacttactgatactcctgacactacagcaaatgctgaaggagatttaccaacaaccatgggaggacctcttcctccacatctggctctcaaagcagaaaataattctgaggtaggggcctctggctatggtgttcctgggcccacctgggaccgaggagccaacttgaaggattactactcaagaaaggaagaacaagaagtgcaagcgactctagaatcagaagaagtggatttaaatgctgggcttcatggaaactggaccttggaaaatgctaaagctcgtctaaaccaatattttcagaaagaaaagatccaaggagaatataagtacacccaagtgggtcctgatcacaacaggagctttattgcagaaatgaccatttatatcaagcagctgggcagaaggatttttgcacgagaacatggatcaaataagaaattggcagcacagtcctgtgccctgtcacttgtcagacaactgtaccatcttggagtggttgaagcttactccggacttacaaagaagaaggaaggagagacagtggagccttacaaagtaaacctctctcaagatttagagcatcagctgcaaaacatcattcaagagctaaatcttgagattttgcccccgcctgaagatccttctgtgccagttgcactcaacattggcaaattggctcagttcgaaccatctcagcgacaaaaccaagtgggtgtggttccttggtcacctccacaatccaactggaatccttggactagtagcaacattgatgaggggcctctggcttttgctactccagagcaaataagcatggacctcaagaatgaattgatgtaccagttggaacaggatcatgatttgcaagcaatcttgcaggagagagagttactgcctgtgaagaaatttgaaagtgagattctggaagcaatcagccaaaattcagttgtcattattagaggggctactggatgtgggaaaaccacacaggttccccagttcattctagatgactttatccagaatgaccgagcagcagagtgtaacatcgtagtaactcagcccagaagaatcagtgcggtttctgtggcagagcgagttgcatttgaaagaggagaagagcctggaaaaagctgtggctacagcgttcgatttgagtctatacttcctcgtcctcatgccagtataatgttttgtactgtaggtgtgctcctgagaaaattagaagcaggcattcgaggaatcagtcatgtaattgtagatgaaatacatgaaagagatattaatactgacttccttttggtagtactgcgtgatgttgttcaggcttatcctgaagttcgcattgttcttatgtctgctactattgataccagcatgttttgtgaatatttcttcaattgccccatcattgaagtttatgggaggacttacccagttcaagaatattttctggaagactgcattcagatgacccactttgttcctccaccaaaagacaaaaagaagaaggataaggatgatgatggtggtgaggatgatgatgcaaattgcaacttgatctgtggtgatgaatatggtccagaaacaaggttgagcatgtctcaattgaacgaaaaggaaactccttttgaactcatcgaggctctacttaagtacattgaaacccttaatgttcctggagctgtgttggtttttttgcctggctggaatctgatttatactatgcagaagcatttggaaatgaatccacattttggaagccatcggtatcagattctacccctgcattctcagattcctcgagaggaacagcgcaaagtgtttgatccagtaccagttggagtaaccaaggttattttgtccacaaatattgctgaaacaagcattaccataaacgatgttgtttatgtcattgactcctgcaagcagaaagtgaaactcttcactgctcacaacaatatgaccaactatgctaccgtatgggcatcaaaaacaaaccttgagcaacggaaagggcgagctggccgagtacggcctggattctgctttcacctgtgcagccgagctcgttttgagagacttgaaacccacatgacaccagagatgttccgaacaccattgcatgaaattgctcttagcataaaacttctgcgtctaggaggaattggccaatttctggccaaagcaattgaacctccccctttggatgctgtgattgaagcagaacacactcttagagagcttgatgcattagatgccaatgatgagttgactcctttgggacgaatcctggctaaactccccattgagcctcgttttggcaaaatgatgataatggggtgtattttctacgtgggagatgctatctgtaccattgctgctgctacctgctttccagagcctttcatcaatgaaggaaagcggctgggctatatccatcgaaattttgctggaaacagattttctgatcacgtagcccttttatcagtattccaagcctgggatgatgctagaatgggtggagaagaagcagagatacgtttttgtgagcacaaaagacttaatatggctacactaagaatgacttgggaagccaaagttcagctcaaagagattttgattaattctgggtttccagaagattgtttgttgacacaagtgtttactaacactggaccagataataatttggatgttgttatctccctcctggcctttgtagccaagacatgaagtacccatctcccttctttgtatttggtgaaaagattcgaactcgagccatctctgctaaaggcatgactttagtcacccccctgcagttgcttctctttgcctccaagaaagtccaatctgatgggcagattgtgcttgtagatgactggattaaactgcaaatatctcatgaagctgctgcctgtatcactggtctccgggcagccatggaggctttggttgttgaagtaaccaaacaacctgctatcatcagccagttggaccccgtaaatgaacgtatgctgaacatgatccgtcagatctctagaccctcagctgctggtatcaaccttatgattggcagtacacggtatggagatggtccacgtcctcccaagatggcccgatacgacaatggaagcggatatagaaggggaggttctagttacagtggtggaggctatggcggtggctatagcagtggaggctatggtagcggaggctatggtggcagcgccaactcctttcgggcaggatatggtgcaggtgttggtggaggctatagaggagtttcccgaggtggctttagaggcaactctggaggagactacagagggcctagtggaggctacagaggatctgggggattccagcgaggaggtggtaggggggcctatggaactggctactttggacagggaagaggaggtggcggctattaaaacttggttatgtcagttcctgtgtgtagacagtaaggaaaaaaaggcatgctatgtgttacgtgttttttccagtatgtttatttgccaccaaaaagtaaatgcattttcacccattctgtggttcattgtagtttaaggaaaccaagcatatagatgcattagtgattttgtttatattatgtaaaatataacgatctcttaaaaataccacagtttgtattttttctttaaggagtaaagatttgcctttaaataacttggtattttcctggctttcgtttaatacaatagaaaataaagtattacaccgaatacttgccgtgtagtttgtttgttgacctcgtatgttagaaaattttacaatgccagctacatctgttgattttaaatgtcagagaagttgtaccctgtttcaaaagtatactaagtgatactacttgtaatagaataaatcatcttggaattgaattgttaccttttgaagtaaatactggcaagtgcacaagccacataaacctgaataaaacttttgacctagggttgaa

SEQ ID NO: 6790 - protein, 1001 aa, Homo sapiens; identical to SEQ ID NO: 6786

SEQ ID NO: 6791 - DNA, 4508 bp, Homo sapiens
agcgccgcggtcggagccatttcgccgattcctccatgcgagttgctgtgcgtttctctgttgtctcggtagaaggccagagtcacacacggtcctaagagctgggcaccaggaagcgaaggctgatctgaagaagacacttgaatcatgggtgacgttaaaaattttctgtatgcctggtgtggcaaaaggaagatgaccccatcctatgaaattagagcagtggggaacaaaaacaggcagaaattcatgtgtgaggttcaggtggaaggttataattacactggcatgggaaattccaccaataaaaaagatgcacaaagcaatgctgccagagactttgttaactatttggttcgaataaatgaaataaagagtgaagaagttccagcttttggggtagcatctccgcccccacttactgatactcctgacactacagcaaatgctgaaggagatttaccaacaaccatgggaggacctcttcctccacatctggctctcaaagcagaaaataattctgaggtaggggcctctggctatggtgttcctgggcccacctgggaccgaggagccaacttgaaggattactactcaagaaaggaagaacaagaagtgcaagcgactctagaatcagaagaagtggatttaaatgctgggcttcatggaaactggaccttggaaaatgctaaagctcgtctaaaccaatattttcagaaagaaaagatccaaggagaatataagtacacccaagtgggtcctgatcacaacaggagctttattgcagaaatgaccatttatatcaagcagctgggcagaaggatttttgcacgagaacatggatcaaataagaaattggcagcacagtcctgtgccctgtcacttgtcagacaactgtaccatcttggagtggttgaagcttactccggacttacaaagaagaaggaaggagagacagtggagccttacaaagtaaacctctctcaagatttagagcatcagctgcaaaacatcattcaagagctaaatcttgagattttgcccccgcctgaagatccttctgtgccagttgcactcaacattggcaaattggctcagttcgaaccatctcagcgacaaaaccaagtgggtgtggttccttggtcacctccacaatccaactggaatccttggactagtagcaacattgatgaggggcctctggcttttgctactccagagcaaataagcatggacctcaagaatgaattgatgtaccagttggaacaggatcatgatttgcaagcaatcttgcaggagagagagttactgcctgtgaagaaatttgaaagtgagattctggaagcaatcagccaaaattcagttgtcattattagaggggctactggatgtgggaaaaccacacaggttccccagttcattctagatgactttatccagaatgaccgagcagcagagtgtaacatcgtagtaactcagcccagaagaatcagtgcggtttctgtggcagagcgagttgcatttgaaagaggagaagagcctggaaaaagctgtggctacagcgttcgatttgagtctatacttcctcgtcctcatgccagtataatgttttgtactgtaggtgtgctcctgagaaaattagaagcaggcattcgaggaatcagtcatgtaattgtagatgaaatacatgaaagagatattaatactgacttccttttggtagtactgcgtgatgttgttcaggcttatcctgaagttcgcattgttcttatgtctgctactattgataccagcatgttttgtgaatatttcttcaattgccccatcattgaagtttatgggaggacttacccagttcaagaatattttctggaagactgcattcagatgacccactttgttcctccaccaaaagacaaaaagaagaaggataaggatgatgatggtggtgaggatgatgatgcaaattgcaacttgatctgtggtgatgaatatggtccagaaacaaggttgagcatgtctcaattgaacgaaaaggaaactccttttgaactcatcgaggctctacttaagtacattgaaacccttaatgttcctggagctgtgttggtttttttgcctggctggaatctgatttatactatgcagaagcatttggaaatgaatccacattttggaagccatcggtatcagattctacccctgcattctcagattcctcgagaggaacagcgcaaagtgtttgatccagtaccagttggagtaaccaaggttattttgtccacaaatattgctgaaacaagcattaccataaacgatgttgtttatgtcattgactcctgcaagcagaaagtgaaactcttcactgctcacaacaatatgaccaactatgctaccgtatgggcatcaaaaacaaaccttgagcaacggaaagggcgagctggccgagtacggcctggattctgctttcacctgtgcagccgagctcgttttgagagacttgaaacccacatgacaccagagatgttccgaacaccattgcatgaaattgctcttagcataaaacttctgcgtctaggaggaattggccaatttctggccaaagcaattgaacctccccctttggatgctgtgattgaagcagaacacactcttagagagcttgatgcattagatgccaatgatgagttgactcctttgggacgaatcctggctaaactccccattgagcctcgttttggcaaaatgatgataatggggtgtattttctacgtgggagatgctatctgtaccattgctgctgctacctgctttccagagcctttcatcaatgaaggaaagcggctgggctatatccatcgaaattttgctggaaacagattttctgatcacgtagcccttttatcagtattccaagcctgggatgatgctagaatgggtggagaagaagcagagatacgtttttgtgagcacaaaagacttaatatggctacactaagaatgacttgggaagccaaagttcagctcaaagagattttgattaattctgggtttccagaagattgtttgttgacacaagtgtttactaacactggaccagataataatttggatgttgttatctccctcctggcctttggtgtgtaccccaatgtatgctatcataaggaaaagaggaagattctcaccactgaagggcgtaatgcacttatccacaaatcatctgttaattgtccttttagtagccaagacatgaagtacccatctcccttctttgtatttggtgaaaagattcgaactcgagccatctctgctaaaggcatgactttagtcacccccctgcagttgcttctctttgcctccaagaaagtccaatctgatgggcagattgtgcttgtagatgactggattaaactgcaaatatctcatgaagctgctgcctgtatcactggtctccgggcagccatggaggctttggttgttgaagtaaccaaacaacctgctatcatcagccagttggaccccgtaaatgaacgtatgctgaacatgatccgtcagatctctagaccctcagctgctggtatcaaccttatgattggcagtacacggtatggagatggtccacgtcctcccaagatggcccgatacgacaatggaagcggatatagaaggggaggttctagttacagtggtggaggctatggcggtggctatagcagtggaggctatggtagcggaggctatggtggcagcgccaactcctttcgggcaggatatggtgcaggtgttggtggaggctatagaggagtttcccgaggtggctttagaggcaactctggaggagactacagagggcctagtggaggctacagaggatctgggggattccagcgaggaggtggtaggggggcctatggaactggctactttggacagggaagaggaggtggcggctattaaaacttggttatgtcagttcctgtgtgtagacagtaaggaaaaaaaggcatgctatgtgttacgtgttttttccagtatgtttatttgccaccaaaaagtaaatgcattttcacccattctgtggttcattgtagtttaaggaaaccaagcatatagatgcattagtgattttgtttatattatgtaaaatataacgatctcttaaaaataccacagtttgtattttttctttaaggagtaaagatttgcctttaaataacttggtattttcctggctttcgtttaatacaatagaaaataaagtattacaccgaatacttgccgtgtagtttgtttgttgacctcgtatgttagaaaattttacaatgccagctacatctgttgattttaaatgtcagagaagttgtaccctgtttcaaaagtatactaagtgatactacttgtaatagaataaatcatcttggaattgaattgttaccttttgaagtaaatactggcaagtgcacaagccacataaacctgaataaaacttttgacctagggttgaa

SEQ ID NO: 6792 - protein, 1270 aa, Homo sapiens; identical to SEQ ID NO: 356

SEQ ID NO: 6793 - DNA, 4415 bp, Homo sapiens
gggggtgggggaagggacgagccgcccgcgggtccccggattgcgggttgcgtgcgcgcctcgccgcgatgcgcttgcgccgtccgggcagcctgtggccccctcccctctcctccgcccagcgtttcccgctgctgcctctagcaggcaaagcgcgcttcctcctctggcctgcgtacgccggggcaccgcggcggctgagggaagggggtgcttcgcctgtggtggttgccgccggggcgccactggcctagggctcttcattcattcaagccacgaataactggcgccgtcgtgcaggccttgtgggtagaggaaaaaaaattgaagaatgtaaagggagagcgcctttggctagtatagcgagatctgaagaagacacttgaatcatgggtgacgttaaaaattttctgtatgcctggtgtggcaaaaggaagatgaccccatcctatgaaattagagcagtggggaacaaaaacaggcagaaattcatgtgtgaggttcaggtggaaggttataattacactggcatgggaaattccaccaataaaaaagatgcacaaagcaatgctgccagagactttgttaactatttggttcgaataaatgaaataaagagtgaagaagttccagcttttggggtagcatctccgcccccacttactgatactcctgacactacagcaaatgctgaaggagatttaccaacaaccatgggaggacctcttcctccacatctggctctcaaagcagaaaataattctgaggtaggggcctctggctatggtgttcctgggcccacctgggaccgaggagccaacttgaaggattactactcaagaaaggaagaacaagaagtgcaagcgactctagaatcagaagaagtggatttaaatgctgggcttcatggaaactggaccttggaaaatgctaaagctcgtctaaaccaatattttcagaaagaaaagatccaaggagaatataagtacacccaagtgggtcctgatcacaacaggagctttattgcagaaatgaccatttatatcaagcagctgggcagaaggatttttgcacgagaacatggatcaaataagaaattggcagcacagtcctgtgccctgtcacttgtcagacaactgtaccatcttggagtggttgaagcttactccggacttacaaagaagaaggaaggagagacagtggagccttacaaagtaaacctctctcaagatttagagcatcagctgcaaaacatcattcaagagctaaatcttgagattttgcccccgcctgaagatccttctgtgccagttgcactcaacattggcaaattggctcagttcgaaccatctcagcgacaaaaccaagtgggtgtggttccttggtcacctccacaatccaactggaatccttggactagtagcaacattgatgaggggcctctggcttttgctactccagagcaaataagcatggacctcaagaatgaattgatgtaccagttggaacaggatcatgatttgcaagcaatcttgcaggagagagagttactgcctgtgaagaaatttgaaagtgagattctggaagcaatcagccaaaattcagttgtcattattagaggggctactggatgtgggaaaaccacacaggttccccagttcattctagatgactttatccagaatgaccgagcagcagagtgtaacatcgtagtaactcagcccagaagaatcagtgcggtttctgtggcagagcgagttgcatttgaaagaggagaagagcctggaaaaagctgtggctacagcgttcgatttgagtctatacttcctcgtcctcatgccagtataatgttttgtactgtaggtgtgctcctgagaaaattagaagcaggcattcgaggaatcagtcatgtaattgtagatgaaatacatgaaagagatattaatactgacttccttttggtagtactgcgtgatgttgttcaggcttatcctgaagttcgcattgttcttatgtctgctactattgataccagcatgttttgtgaatatttcttcaattgccccatcattgaagtttatgggaggacttacccagttcaagaatattttctggaagactgcattcagatgacccactttgttcctccaccaaaagacaaaaagaagaaggataaggatgatgatggtggtgaggatgatgatgcaaattgcaacttgatctgtggtgatgaatatggtccagaaacaaggttgagcatgtctcaattgaacgaaaaggaaactccttttgaactcatcgaggctctacttaagtacattgaaacccttaatgttcctggagctgtgttggtttttttgcctggctggaatctgatttatactatgcagaagcatttggaaatgaatccacattttggaagccatcggtatcagattctacccctgcattctcagattcctcgagaggaacagcgcaaagtgtttgatccagtaccagttggagtaaccaaggttattttgtccacaaatattgctgaaacaagcattaccataaacgatgttgtttatgtcattgactcctgcaagcagaaagtgaaactcttcactgctcacaacaatatgaccaactatgctaccgtatgggcatcaaaaacaaaccttgagcaacggaaagggcgagctggccgagtacggcctggattctgctttcacctgtgcagccgagctcgttttgagagacttgaaacccacatgacaccagagatgttccgaacaccattgcatgaaattgctcttagcataaaacttctgcgtctaggaggaattggccaatttctggccaaagcaattgaacctccccctttggatgctgtgattgaagcagaacacactcttagagagcttgatgcattagatgccaatgatgagttgactcctttgggacgaatcctggctaaactccccattgagcctcgttttggcaaaatgatgataatggggtgtattttctacgtgggagatgctatctgtaccattgctgctgctacctgctttccagagcctttcatcaatgaaggaaagcggctgggctatatccatcgaaattttgctggaaacagattttctgatcacgtagcccttttatcagtattccaagcctgggatgatgctagaatgggtggagaagaagcagagatacgtttttgtgagcacaaaagacttaatatggctacactaagaatgacttgggaagccaaagttcagctcaaagagattttgattaattctgggtttccagaagattgtttgttgacacaagtgtttactaacactggaccagataataatttggatgttgttatctccctcctggcctttgtagccaagacatgaagtacccatctcccttctttgtatttggtgaaaagattcgaactcgagccatctctgctaaaggcatgactttagtcacccccctgcagttgcttctctttgcctccaagaaagtccaatctgatgggcagattgtgcttgtagatgactggattaaactgcaaatatctcatgaagctgctgcctgtatcactggtctccgggcagccatggaggctttggttgttgaagtaaccaaacaacctgctatcatcagccagttggaccccgtaaatgaacgtatgctgaacatgatccgtcagatctctagaccctcagctgctggtatcaaccttatgattggcagtacacggtatggagatggtccacgtcctcccaagatggcccgatacgacaatggaagcggatatagaaggggaggttctagttacagtggtggaggctatggcggtggctatagcagtggaggctatggtagcggaggctatggtggcagcgccaactcctttcgggcaggatatggtgcaggtgttggtggaggctatagaggagtttcccgaggtggctttagaggcaactctggaggagactacagagggcctagtggaggctacagaggatctgggggattccagcgaggaggtggtaggggggcctatggaactggctactttggacagggaagaggaggtggcggctattaaaacttggttatgtcagttcctgtgtgtagacagtaaggaaaaaaaggcatgctatgtgttacgtgttttttccagtatgtttatttgccaccaaaaagtaaatgcattttcacccattctgtggttcattgtagtttaaggaaaccaagcatatagatgcattagtgattttgtttatattatgtaaaatataacgatctcttaaaaataccacagtttgtattttttctttaaggagtaaagatttgcctttaaataacttggtattttcctggctttcgtttaatacaatagaaaataaagtattacaccgaat

SEQ ID NO: 6794 - protein, 1001 aa, Homo sapiens; identical to SEQ ID NO: 6786

SEQ ID NO: 6795 - DNA, 4647 bp, Homo sapiens
gggggtgggggaagggacgagccgcccgcgggtccccggattgcgggttgcgtgcgcgcctcgccgcgatgcgcttgcgccgtccgggcagcctgtggccccctcccctctcctccgcccagcgtttcccgctgctgcctctagcaggcaaagcgcgcttcctcctctggcctgcgtacgccggggcaccgcggcggctgagggaagggggtgcttcgcctgtggtggttgccgccggggcgccactggcctagggctcttcattcattcaagccacgaataactggcgccgtcgtgcaggccttgtgggtagaggaaaaaaaattgaagaatgtaaagggagagcgcctttggctagtatagcgagatctgaagaagacacttgaatcatgggtgacgttaaaaattttctgtatgcctggtgtggcaaaaggaagatgaccccatcctatgaaattagagcagtggggaacaaaaacaggcagaaattcatgtgtgaggttcaggtggaaggttataattacactggcatgggaaattccaccaataaaaaagatgcacaaagcaatgctgccagagactttgttaactatttggttcgaataaatgaaataaagagtgaagaagttccagcttttggggtagcatctccgcccccacttactgatactcctgacactacagcaaatgctgaaggagatttaccaacaaccatgggaggacctcttcctccacatctggctctcaaagcagaaaataattctgaggtaggggcctctggctatggtgttcctgggcccacctgggaccgaggagccaacttgaaggattactactcaagaaaggaagaacaagaagtgcaagcgactctagaatcagaagaagtggatttaaatgctgggcttcatggaaactggaccttggaaaatgctaaagctcgtctaaaccaatattttcagaaagaaaagatccaaggagaatataagtacacccaagtgggtcctgatcacaacaggagctttattgcagaaatgaccatttatatcaagcagctgggcagaaggatttttgcacgagaacatggatcaaataagaaattggcagcacagtcctgtgccctgtcacttgtcagacaactgtaccatcttggagtggttgaagcttactccggacttacaaagaagaaggaaggagagacagtggagccttacaaagtaaacctctctcaagatttagagcatcagctgcaaaacatcattcaagagctaaatcttgagattttgcccccgcctgaagatccttctgtgccagttgcactcaacattggcaaattggctcagttcgaaccatctcagcgacaaaaccaagtgggtgtggttccttggtcacctccacaatccaactggaatccttggactagtagcaacattgatgaggggcctctggcttttgctactccagagcaaataagcatggacctcaagaatgaattgatgtaccagttggaacaggatcatgatttgcaagcaatcttgcaggagagagagttactgcctgtgaagaaatttgaaagtgagattctggaagcaatcagccaaaattcagttgtcattattagaggggctactggatgtgggaaaaccacacaggttccccagttcattctagatgactttatccagaatgaccgagcagcagagtgtaacatcgtagtaactcagcccagaagaatcagtgcggtttctgtggcagagcgagttgcatttgaaagaggagaagagcctggaaaaagctgtggctacagcgttcgatttgagtctatacttcctcgtcctcatgccagtataatgttttgtactgtaggtgtgctcctgagaaaattagaagcaggcattcgaggaatcagtcatgtaattgtagatgaaatacatgaaagagatattaatactgacttccttttggtagtactgcgtgatgttgttcaggcttatcctgaagttcgcattgttcttatgtctgctactattgataccagcatgttttgtgaatatttcttcaattgccccatcattgaagtttatgggaggacttacccagttcaagaatattttctggaagactgcattcagatgacccactttgttcctccaccaaaagacaaaaagaagaaggataaggatgatgatggtggtgaggatgatgatgcaaattgcaacttgatctgtggtgatgaatatggtccagaaacaaggttgagcatgtctcaattgaacgaaaaggaaactccttttgaactcatcgaggctctacttaagtacattgaaacccttaatgttcctggagctgtgttggtttttttgcctggctggaatctgatttatactatgcagaagcatttggaaatgaatccacattttggaagccatcggtatcagattctacccctgcattctcagattcctcgagaggaacagcgcaaagtgtttgatccagtaccagttggagtaaccaaggttattttgtccacaaatattgctgaaacaagcattaccataaacgatgttgtttatgtcattgactcctgcaagcagaaagtgaaactcttcactgctcacaacaatatgaccaactatgctaccgtatgggcatcaaaaacaaaccttgagcaacggaaagggcgagctggccgagtacggcctggattctgctttcacctgtgcagccgagctcgttttgagagacttgaaacccacatgacaccagagatgttccgaacaccattgcatgaaattgctcttagcataaaacttctgcgtctaggaggaattggccaatttctggccaaagcaattgaacctccccctttggatgctgtgattgaagcagaacacactcttagagagcttgatgcattagatgccaatgatgagttgactcctttgggacgaatcctggctaaactccccattgagcctcgttttggcaaaatgatgataatggggtgtattttctacgtgggagatgctatctgtaccattgctgctgctacctgctttccagagcctttcatcaatgaaggaaagcggctgggctatatccatcgaaattttgctggaaacagattttctgatcacgtagcccttttatcagtattccaagcctgggatgatgctagaatgggtggagaagaagcagagatacgtttttgtgagcacaaaagacttaatatggctacactaagaatgacttgggaagccaaagttcagctcaaagagattttgattaattctgggtttccagaagattgtttgttgacacaagtgtttactaacactggaccagataataatttggatgttgttatctccctcctggcctttgtagccaagacatgaagtacccatctcccttctttgtatttggtgaaaagattcgaactcgagccatctctgctaaaggcatgactttagtcacccccctgcagttgcttctctttgcctccaagaaagtccaatctgatgggcagattgtgcttgtagatgactggattaaactgcaaatatctcatgaagctgctgcctgtatcactggtctccgggcagccatggaggctttggttgttgaagtaaccaaacaacctgctatcatcagccagttggaccccgtaaatgaacgtatgctgaacatgatccgtcagatctctagaccctcagctgctggtatcaaccttatgattggcagtacacggtatggagatggtccacgtcctcccaagatggcccgatacgacaatggaagcggatatagaaggggaggttctagttacagtggtggaggctatggcggtggctatagcagtggaggctatggtagcggaggctatggtggcagcgccaactcctttcgggcaggatatggtgcaggtgttggtggaggctatagaggagtttcccgaggtggctttagaggcaactctggaggagactacagagggcctagtggaggctacagaggatctgggggattccagcgaggaggtggtaggggggcctatggaactggctactttggacagggaagaggaggtggcggctattaaaacttggttatgtcagttcctgtgtgtagacagtaaggaaaaaaaggcatgctatgtgttacgtgttttttccagtatgtttatttgccaccaaaaagtaaatgcattttcacccattctgtggttcattgtagtttaaggaaaccaagcatatagatgcattagtgattttgtttatattatgtaaaatataacgatctcttaaaaataccacagtttgtattttttctttaaggagtaaagatttgcctttaaataacttggtattttcctggctttcgtttaatacaatagaaaataaagtattacaccgaatacttgccgtgtagtttgtttgttgacctcgtatgttagaaaattttacaatgccagctacatctgttgattttaaatgtcagagaagttgtaccctgtttcaaaagtatactaagtgatactacttgtaatagaataaatcatcttggaattgaattgttaccttttgaagtaaatactggcaagtgcacaagccacataaacctgaataaaacttttgacctagggttgaa

SEQ ID NO: 6796 - protein, 1001 aa, Homo sapiens; identical to SEQ ID NO: 6786

SEQ ID NO: 6797 - DNA, 2764 bp, Homo sapiens
caaaaatgctaataaacaagtatatctaactttgtagttgttaagtcacttttctttttttctgtctcagcccagaagaatcagtgcggtttctgtggcagagcgagttgcatttgaaagaggagaagagcctggaaaaagctgtggctacagcgttcgatttgagtctatacttcctcgtcctcatgccagtataatgttttgtactgtaggtgtgctcctgagaaaattagaagcaggcattcgaggaatcagtcatgtaattgtagatgaaatacatgaaagagatattaatactgacttccttttggtagtactgcgtgatgttgttcaggcttatcctgaagttcgcattgttcttatgtctgctactattgataccagcatgttttgtgaatatttcttcaattgccccatcattgaagtttatgggaggacttacccagttcaagaatattttctggaagactgcattcagatgacccactttgttcctccaccaaaagacaaaaagaagaaggataaggatgatgatggtggtgaggatgatgatgcaaattgcaacttgatctgtggtgatgaatatggtccagaaacaaggttgagcatgtctcaattgaacgaaaaggaaactccttttgaactcatcgaggctctacttaagtacattgaaacccttaatgttcctggagctgtgttggtttttttgcctggctggaatctgatttatactatgcagaagcatttggaaatgaatccacattttggaagccatcggtatcagattctacccctgcattctcagattcctcgagaggaacagcgcaaagtgtttgatccagtaccagttggagtaaccaaggttattttgtccacaaatattgctgaaacaagcattaccataaacgatgttgtttatgtcattgactcctgcaagcagaaagtgaaactcttcactgctcacaacaatatgaccaactatgctaccgtatgggcatcaaaaacaaaccttgagcaacggaaagggcgagctggccgagtacggcctggattctgctttcacctgtgcagccgagctcgttttgagagacttgaaacccacatgacaccagagatgttccgaacaccattgcatgaaattgctcttagcataaaacttctgcgtctaggaggaattggccaatttctggccaaagcaattgaacctccccctttggatgctgtgattgaagcagaacacactcttagagagcttgatgcattagatgccaatgatgagttgactcctttgggacgaatcctggctaaactccccattgagcctcgttttggcaaaatgatgataatggggtgtattttctacgtgggagatgctatctgtaccattgctgctgctacctgctttccagagcctttcatcaatgaaggaaagcggctgggctatatccatcgaaattttgctggaaacagattttctgatcacgtagcccttttatcagtattccaagcctgggatgatgctagaatgggtggagaagaagcagagatacgtttttgtgagcacaaaagacttaatatggctacactaagaatgacttgggaagccaaagttcagctcaaagagattttgattaattctgggtttccagaagattgtttgttgacacaagtgtttactaacactggaccagataataatttggatgttgttatctccctcctggcctttgtagccaagacatgaagtacccatctcccttctttgtatttggtgaaaagattcgaactcgagccatctctgctaaaggcatgactttagtcacccccctgcagttgcttctctttgcctccaagaaagtccaatctgatgggcagattgtgcttgtagatgactggattaaactgcaaatatctcatgaagctgctgcctgtatcactggtctccgggcagccatggaggctttggttgttgaagtaaccaaacaacctgctatcatcagccagttggaccccgtaaatgaacgtatgctgaacatgatccgtcagatctctagaccctcagctgctggtatcaaccttatgattggcagtacacggtatggagatggtccacgtcctcccaagatggcccgatacgacaatggaagcggatatagaaggggaggttctagttacagtggtggaggctatggcggtggctatagcagtggaggctatggtagcggaggctatggtggcagcgccaactcctttcgggcaggatatggtgcaggtgttggtggaggctatagaggagtttcccgaggtggctttagaggcaactctggaggagactacagagggcctagtggaggctacagaggatctgggggattccagcgaggaggtggtaggggggcctatggaactggctactttggacagggaagaggaggtggcggctattaaaacttggttatgtcagttcctgtgtgtagacagtaaggaaaaaaaggcatgctatgtgttacgtgttttttccagtatgtttatttgccaccaaaaagtaaatgcattttcacccattctgtggttcattgtagtttaaggaaaccaagcatatagatgcattagtgattttgtttatattatgtaaaatataacgatctcttaaaaataccacagtttgtattttttctttaaggagtaaagatttgcctttaaataacttggtattttcctggctttcgtttaatacaatagaaaataaagtattacaccgaat

SEQ ID NO: 6798 - protein, 515 aa, Homo sapiens
MFCTVGVLLRKLEAGIRGISHVIVDEIHERDINTDFLLVVLRDVVQAYPEVRIVLMSATIDTSMFCEYFFNCPIIEVYGRTYPVQEYFLEDCIQMTHFVPPPKDKKKKDKDDDGGEDDDANCNLICGDEYGPETRLSMSQLNEKETPFELIEALLKYIETLNVPGAVLVFLPGWNLIYTMQKHLEMNPHFGSHRYQILPLHSQIPREEQRKVFDPVPVGVTKVILSTNIAETSITINDVVYVIDSCKQKVKLFTAHNNMTNYATVWASKTNLEQRKGRAGRVRPGFCFHLCSRARFERLETHMTPEMFRTPLHEIALSIKLLRLGGIGQFLAKAIEPPPLDAVIEAEHTLRELDALDANDELTPLGRILAKLPIEPRFGKMMIMGCIFYVGDAICTIAAATCFPEPFINEGKRLGYIHRNFAGNRFSDHVALLSVFQAWDDARMGGEEAEIRFCEHKRLNMATLRMTWEAKVQLKEILINSGFPEDCLLTQVFTNTGPDNNLDVVISLLAFVAKT

SEQ ID NO: 6799 - DNA, 2996 bp, Homo sapiens
caaaaatgctaataaacaagtatatctaactttgtagttgttaagtcacttttctttttttctgtctcagcccagaagaatcagtgcggtttctgtggcagagcgagttgcatttgaaagaggagaagagcctggaaaaagctgtggctacagcgttcgatttgagtctatacttcctcgtcctcatgccagtataatgttttgtactgtaggtgtgctcctgagaaaattagaagcaggcattcgaggaatcagtcatgtaattgtagatgaaatacatgaaagagatattaatactgacttccttttggtagtactgcgtgatgttgttcaggcttatcctgaagttcgcattgttcttatgtctgctactattgataccagcatgttttgtgaatatttcttcaattgccccatcattgaagtttatgggaggacttacccagttcaagaatattttctggaagactgcattcagatgacccactttgttcctccaccaaaagacaaaaagaagaaggataaggatgatgatggtggtgaggatgatgatgcaaattgcaacttgatctgtggtgatgaatatggtccagaaacaaggttgagcatgtctcaattgaacgaaaaggaaactccttttgaactcatcgaggctctacttaagtacattgaaacccttaatgttcctggagctgtgttggtttttttgcctggctggaatctgatttatactatgcagaagcatttggaaatgaatccacattttggaagccatcggtatcagattctacccctgcattctcagattcctcgagaggaacagcgcaaagtgtttgatccagtaccagttggagtaaccaaggttattttgtccacaaatattgctgaaacaagcattaccataaacgatgttgtttatgtcattgactcctgcaagcagaaagtgaaactcttcactgctcacaacaatatgaccaactatgctaccgtatgggcatcaaaaacaaaccttgagcaacggaaagggcgagctggccgagtacggcctggattctgctttcacctgtgcagccgagctcgttttgagagacttgaaacccacatgacaccagagatgttccgaacaccattgcatgaaattgctcttagcataaaacttctgcgtctaggaggaattggccaatttctggccaaagcaattgaacctccccctttggatgctgtgattgaagcagaacacactcttagagagcttgatgcattagatgccaatgatgagttgactcctttgggacgaatcctggctaaactccccattgagcctcgttttggcaaaatgatgataatggggtgtattttctacgtgggagatgctatctgtaccattgctgctgctacctgctttccagagcctttcatcaatgaaggaaagcggctgggctatatccatcgaaattttgctggaaacagattttctgatcacgtagcccttttatcagtattccaagcctgggatgatgctagaatgggtggagaagaagcagagatacgtttttgtgagcacaaaagacttaatatggctacactaagaatgacttgggaagccaaagttcagctcaaagagattttgattaattctgggtttccagaagattgtttgttgacacaagtgtttactaacactggaccagataataatttggatgttgttatctccctcctggcctttgtagccaagacatgaagtacccatctcccttctttgtatttggtgaaaagattcgaactcgagccatctctgctaaaggcatgactttagtcacccccctgcagttgcttctctttgcctccaagaaagtccaatctgatgggcagattgtgcttgtagatgactggattaaactgcaaatatctcatgaagctgctgcctgtatcactggtctccgggcagccatggaggctttggttgttgaagtaaccaaacaacctgctatcatcagccagttggaccccgtaaatgaacgtatgctgaacatgatccgtcagatctctagaccctcagctgctggtatcaaccttatgattggcagtacacggtatggagatggtccacgtcctcccaagatggcccgatacgacaatggaagcggatatagaaggggaggttctagttacagtggtggaggctatggcggtggctatagcagtggaggctatggtagcggaggctatggtggcagcgccaactcctttcgggcaggatatggtgcaggtgttggtggaggctatagaggagtttcccgaggtggctttagaggcaactctggaggagactacagagggcctagtggaggctacagaggatctgggggattccagcgaggaggtggtaggggggcctatggaactggctactttggacagggaagaggaggtggcggctattaaaacttggttatgtcagttcctgtgtgtagacagtaaggaaaaaaaggcatgctatgtgttacgtgttttttccagtatgtttatttgccaccaaaaagtaaatgcattttcacccattctgtggttcattgtagtttaaggaaaccaagcatatagatgcattagtgattttgtttatattatgtaaaatataacgatctcttaaaaataccacagtttgtattttttctttaaggagtaaagatttgcctttaaataacttggtattttcctggctttcgtttaatacaatagaaaataaagtattacaccgaatacttgccgtgtagtttgtttgttgacctcgtatgttagaaaattttacaatgccagctacatctgttgattttaaatgtcagagaagttgtaccctgtttcaaaagtatactaagtgatactacttgtaatagaataaatcatcttggaattgaattgttaccttttgaagtaaatactggcaagtgcacaagccacataaacctgaataaaacttttgacctagggttgaa

SEQ ID NO: 6800 - protein, 515 aa, Homo sapiens; identical to SEQ ID NO: 6798

SEQ ID NO: 6801 - DNA, 1962 bp, Homo sapiens
gggaaacctatttgtctgctccagtgttactaactggaaacttcttaccagttaacagaatcaaaaacaccttatttttaaactcctgtgttcttaaatctccaaaattattgtgcatctatatagcattataggcagaaagtgaaactcttcactgctcacaacaatatgaccaactatgctaccgtatgggcatcaaaaacaaaccttgagcaacggaaagggcgagctggccgagtacggcctggattctgctttcacctgtgcagccgagctcgttttgagagacttgaaacccacatgacaccagagatgttccgaacaccattgcatgaaattgctcttagcataaaacttctgcgtctaggaggaattggccaatttctggccaaagcaattgaacctccccctttggatgctgtgattgaagcagaacacactcttagagagcttgatgcattagatgccaatgatgagttgactcctttgggacgaatcctggctaaactccccattgagcctcgttttggcaaaatgatgataatggggtgtattttctacgtgggagatgctatctgtaccattgctgctgctacctgctttccagagcctttcatcaatgaaggaaagcggctgggctatatccatcgaaattttgctggaaacagattttctgatcacgtagcccttttatcagtattccaagcctgggatgatgctagaatgggtggagaagaagcagagatacgtttttgtgagcacaaaagacttaatatggctacactaagaatgacttgggaagccaaagttcagctcaaagagattttgattaattctgggtttccagaagattgtttgttgacacaagtgtttactaacactggaccagataataatttggatgttgttatctccctcctggcctttgtagccaagacatgaagtacccatctcccttctttgtatttggtgaaaagattcgaactcgagccatctctgctaaaggcatgactttagtcacccccctgcagttgcttctctttgcctccaagaaagtccaatctgatgggcagattgtgcttgtagatgactggattaaactgcaaatatctcatgaagctgctgcctgtatcactggtctccgggcagccatggaggctttggttgttgaagtaaccaaacaacctgctatcatcagccagttggaccccgtaaatgaacgtatgctgaacatgatccgtcagatctctagaccctcagctgctggtatcaaccttatgattggcagtacacggtatggagatggtccacgtcctcccaagatggcccgatacgacaatggaagcggatatagaaggggaggttctagttacagtggtggaggctatggcggtggctatagcagtggaggctatggtagcggaggctatggtggcagcgccaactcctttcgggcaggatatggtgcaggtgttggtggaggctatagaggagtttcccgaggtggctttagaggcaactctggaggagactacagagggcctagtggaggctacagaggatctgggggattccagcgaggaggtggtaggggggcctatggaactggctactttggacagggaagaggaggtggcggctattaaaacttggttatgtcagttcctgtgtgtagacagtaaggaaaaaaaggcatgctatgtgttacgtgttttttccagtatgtttatttgccaccaaaaagtaaatgcattttcacccattctgtggttcattgtagtttaaggaaaccaagcatatagatgcattagtgattttgtttatattatgtaaaatataacgatctcttaaaaataccacagtttgtattttttctttaaggagtaaagatttgcctttaaataacttggtattttcctggctttcgtttaatacaatagaaaataaagtattacaccgaat

SEQ ID NO: 6802 - protein, 257 aa, Homo sapiens
MTNYATVWASKTNLEQRKGRAGRVRPGFCFHLCSRARFERLETHMTPEMFRTPLHEIALSIKLLRLGGIGQFLAKAIEPPPLDAVIEAEHTLRELDALDANDELTPLGRILAKLPIEPRFGKMMIMGCIFYVGDAICTIAAATCFPEPFINEGKRLGYIHRNFAGNRFSDHVALLSVFQAWDDARMGGEEAEIRFCEHKRLNMATLRMTWEAKVQLKEILINSGFPEDCLLTQVFTNTGPDNNLDVVISLLAFVAKT

SEQ ID NO: 6803 - DNA, 2194 bp, Homo sapiens
gggaaacctatttgtctgctccagtgttactaactggaaacttcttaccagttaacagaatcaaaaacaccttatttttaaactcctgtgttcttaaatctccaaaattattgtgcatctatatagcattataggcagaaagtgaaactcttcactgctcacaacaatatgaccaactatgctaccgtatgggcatcaaaaacaaaccttgagcaacggaaagggcgagctggccgagtacggcctggattctgctttcacctgtgcagccgagctcgttttgagagacttgaaacccacatgacaccagagatgttccgaacaccattgcatgaaattgctcttagcataaaacttctgcgtctaggaggaattggccaatttctggccaaagcaattgaacctccccctttggatgctgtgattgaagcagaacacactcttagagagcttgatgcattagatgccaatgatgagttgactcctttgggacgaatcctggctaaactccccattgagcctcgttttggcaaaatgatgataatggggtgtattttctacgtgggagatgctatctgtaccattgctgctgctacctgctttccagagcctttcatcaatgaaggaaagcggctgggctatatccatcgaaattttgctggaaacagattttctgatcacgtagcccttttatcagtattccaagcctgggatgatgctagaatgggtggagaagaagcagagatacgtttttgtgagcacaaaagacttaatatggctacactaagaatgacttgggaagccaaagttcagctcaaagagattttgattaattctgggtttccagaagattgtttgttgacacaagtgtttactaacactggaccagataataatttggatgttgttatctccctcctggcctttgtagccaagacatgaagtacccatctcccttctttgtatttggtgaaaagattcgaactcgagccatctctgctaaaggcatgactttagtcacccccctgcagttgcttctctttgcctccaagaaagtccaatctgatgggcagattgtgcttgtagatgactggattaaactgcaaatatctcatgaagctgctgcctgtatcactggtctccgggcagccatggaggctttggttgttgaagtaaccaaacaacctgctatcatcagccagttggaccccgtaaatgaacgtatgctgaacatgatccgtcagatctctagaccctcagctgctggtatcaaccttatgattggcagtacacggtatggagatggtccacgtcctcccaagatggcccgatacgacaatggaagcggatatagaaggggaggttctagttacagtggtggaggctatggcggtggctatagcagtggaggctatggtagcggaggctatggtggcagcgccaactcctttcgggcaggatatggtgcaggtgttggtggaggctatagaggagtttcccgaggtggctttagaggcaactctggaggagactacagagggcctagtggaggctacagaggatctgggggattccagcgaggaggtggtaggggggcctatggaactggctactttggacagggaagaggaggtggcggctattaaaacttggttatgtcagttcctgtgtgtagacagtaaggaaaaaaaggcatgctatgtgttacgtgttttttccagtatgtttatttgccaccaaaaagtaaatgcattttcacccattctgtggttcattgtagtttaaggaaaccaagcatatagatgcattagtgattttgtttatattatgtaaaatataacgatctcttaaaaataccacagtttgtattttttctttaaggagtaaagatttgcctttaaataacttggtattttcctggctttcgtttaatacaatagaaaataaagtattacaccgaatacttgccgtgtagtttgtttgttgacctcgtatgttagaaaattttacaatgccagctacatctgttgattttaaatgtcagagaagttgtaccctgtttcaaaagtatactaagtgatactacttgtaatagaataaatcatcttggaattgaattgttaccttttgaagtaaatactggcaagtgcacaagccacataaacctgaataaaacttttgacctagggttgaa

SEQ ID NO: 6804 - protein, 257 aa, Homo sapiens; identical to SEQ ID NO: 6802

SEQ ID NO: 6805 - DNA, 2534 bp, Homo sapiens
tggccaacttgtaccccatgacttctctttataattccttagtctgtcctgacaatgaaaacaatttgctgccaacatccattttaggaaatgatgaatagcattctgtgccaatcccagtcatttagtggcagctgtctctgtatgtaacattgaaggaatctgaggttacttgggggttcaaatggaccacacaggcatcactagatacagatatcctaaaagttacactaaactttggaatagagatgacttaaataattactttcttttgtgtatgtgccatattccatttaaatgctttgcatttgttaatttatttaatgtttaccaaaaaaactataaggtagataatggcatgcaaagtttggccaaggcagttcagctgataagtggcaagtggatgttacattgccttttagtaggttgacaactaggagtttgcagtcagattgctgattcttacttgtgccattcatgaatagacatcacaagtaggtatggctttaactacatagtggaaagcattcactacttagtggatatataatagttattgataatacacatgagtcttagaattaaccactttttcctatgtaggcagaaagtgaaactcttcactgctcacaacaatatgaccaactatgctaccgtatgggcatcaaaaacaaaccttgagcaacggaaagggcgagctggccgagtacggcctggattctgctttcacctgtgcagccgagctcgttttgagagacttgaaacccacatgacaccagagatgttccgaacaccattgcatgaaattgctcttagcataaaacttctgcgtctaggaggaattggccaatttctggccaaagcaattgaacctccccctttggatgctgtgattgaagcagaacacactcttagagagcttgatgcattagatgccaatgatgagttgactcctttgggacgaatcctggctaaactccccattgagcctcgttttggcaaaatgatgataatggggtgtattttctacgtgggagatgctatctgtaccattgctgctgctacctgctttccagagcctttcatcaatgaaggaaagcggctgggctatatccatcgaaattttgctggaaacagattttctgatcacgtagcccttttatcagtattccaagcctgggatgatgctagaatgggtggagaagaagcagagatacgtttttgtgagcacaaaagacttaatatggctacactaagaatgacttgggaagccaaagttcagctcaaagagattttgattaattctgggtttccagaagattgtttgttgacacaagtgtttactaacactggaccagataataatttggatgttgttatctccctcctggcctttggtgtgtaccccaatgtatgctatcataaggaaaagaggaagattctcaccactgaagggcgtaatgcacttatccacaaatcatctgttaattgtccttttagtagccaagacatgaagtacccatctcccttctttgtatttggtgaaaagattcgaactcgagccatctctgctaaaggcatgactttagtcacccccctgcagttgcttctctttgcctccaagaaagtccaatctgatgggcagattgtgcttgtagatgactggattaaactgcaaatatctcatgaagctgctgcctgtatcactggtctccgggcagccatggaggctttggttgttgaagtaaccaaacaacctgctatcatcagccagttggaccccgtaaatgaacgtatgctgaacatgatccgtcagatctctagaccctcagctgctggtatcaaccttatgattggcagtacacggtatggagatggtccacgtcctcccaagatggcccgatacgacaatggaagcggatatagaaggggaggttctagttacagtggtggaggctatggcggtggctatagcagtggaggctatggtagcggaggctatggtggcagcgccaactcctttcgggcaggatatggtgcaggtgttggtggaggctatagaggagtttcccgaggtggctttagaggcaactctggaggagactacagagggcctagtggaggctacagaggatctgggggattccagcgaggaggtggtaggggggcctatggaactggctactttggacagggaagaggaggtggcggctattaaaacttggttatgtcagttcctgtgtgtagacagtaaggaaaaaaaggcatgctatgtgttacgtgttttttccagtatgtttatttgccaccaaaaagtaaatgcattttcacccattctgtggttcattgtagtttaaggaaaccaagcatatagatgcattagtgattttgtttatattatgtaaaatataacgatctcttaaaaataccacagtttgtattttttctttaaggagtaaagatttgcctttaaataacttggtattttcctggctttcgtttaatacaatagaaaataaagtattacaccgaat

SEQ ID NO: 6806 - protein, 549 aa, Homo sapiens
MSLRINHFFLCRQKVKLFTAHNNMTNYATVWASKTNLEQRKGRAGRVRPGFCFHLCSRARFERLETHMTPEMFRTPLHEIALSIKLLRLGGIGQFLAKAIEPPPLDAVIEAEHTLRELDALDANDELTPLGRILAKLPIEPRFGKMMIMGCIFYVGDAICTIAAATCFPEPFINEGKRLGYIHRNFAGNRFSDHVALLSVFQAWDDARMGGEEAEIRFCEHKRLNMATLRMTWEAKVQLKEILINSGFPEDCLLTQVFTNTGPDNNLDVVISLLAFGVYPNVCYHKEKRKILTTEGRNALIHKSSVNCPFSSQDMKYPSPFFVFGEKIRTRAISAKGMTLVTPLQLLLFASKKVQSDGQIVLVDDWIKLQISHEAAACITGLRAAMEALVVEVTKQPAIISQLDPVNERMLNMIRQISRPSAAGINLMIGSTRYGDGPRPPKMARYDNGSGYRRGGSSYSGGGYGGGYSSGGYGSGGYGGSANSFRAGYGAGVGGGYRGVSRGGFRGNSGGDYRGPSGGYRGSGGFQRGGGRGAYGTGYFGQGRGGGGY

SEQ ID NO: 6807 - DNA, 2766 bp, Homo sapiens
tggccaacttgtaccccatgacttctctttataattccttagtctgtcctgacaatgaaaacaatttgctgccaacatccattttaggaaatgatgaatagcattctgtgccaatcccagtcatttagtggcagctgtctctgtatgtaacattgaaggaatctgaggttacttgggggttcaaatggaccacacaggcatcactagatacagatatcctaaaagttacactaaactttggaatagagatgacttaaataattactttcttttgtgtatgtgccatattccatttaaatgctttgcatttgttaatttatttaatgtttaccaaaaaaactataaggtagataatggcatgcaaagtttggccaaggcagttcagctgataagtggcaagtggatgttacattgccttttagtaggttgacaactaggagtttgcagtcagattgctgattcttacttgtgccattcatgaatagacatcacaagtaggtatggctttaactacatagtggaaagcattcactacttagtggatatataatagttattgataatacacatgagtcttagaattaaccactttttcctatgtaggcagaaagtgaaactcttcactgctcacaacaatatgaccaactatgctaccgtatgggcatcaaaaacaaaccttgagcaacggaaagggcgagctggccgagtacggcctggattctgctttcacctgtgcagccgagctcgttttgagagacttgaaacccacatgacaccagagatgttccgaacaccattgcatgaaattgctcttagcataaaacttctgcgtctaggaggaattggccaatttctggccaaagcaattgaacctccccctttggatgctgtgattgaagcagaacacactcttagagagcttgatgcattagatgccaatgatgagttgactcctttgggacgaatcctggctaaactccccattgagcctcgttttggcaaaatgatgataatggggtgtattttctacgtgggagatgctatctgtaccattgctgctgctacctgctttccagagcctttcatcaatgaaggaaagcggctgggctatatccatcgaaattttgctggaaacagattttctgatcacgtagcccttttatcagtattccaagcctgggatgatgctagaatgggtggagaagaagcagagatacgtttttgtgagcacaaaagacttaatatggctacactaagaatgacttgggaagccaaagttcagctcaaagagattttgattaattctgggtttccagaagattgtttgttgacacaagtgtttactaacactggaccagataataatttggatgttgttatctccctcctggcctttggtgtgtaccccaatgtatgctatcataaggaaaagaggaagattctcaccactgaagggcgtaatgcacttatccacaaatcatctgttaattgtccttttagtagccaagacatgaagtacccatctcccttctttgtatttggtgaaaagattcgaactcgagccatctctgctaaaggcatgactttagtcacccccctgcagttgcttctctttgcctccaagaaagtccaatctgatgggcagattgtgcttgtagatgactggattaaactgcaaatatctcatgaagctgctgcctgtatcactggtctccgggcagccatggaggctttggttgttgaagtaaccaaacaacctgctatcatcagccagttggaccccgtaaatgaacgtatgctgaacatgatccgtcagatctctagaccctcagctgctggtatcaaccttatgattggcagtacacggtatggagatggtccacgtcctcccaagatggcccgatacgacaatggaagcggatatagaaggggaggttctagttacagtggtggaggctatggcggtggctatagcagtggaggctatggtagcggaggctatggtggcagcgccaactcctttcgggcaggatatggtgcaggtgttggtggaggctatagaggagtttcccgaggtggctttagaggcaactctggaggagactacagagggcctagtggaggctacagaggatctgggggattccagcgaggaggtggtaggggggcctatggaactggctactttggacagggaagaggaggtggcggctattaaaacttggttatgtcagttcctgtgtgtagacagtaaggaaaaaaaggcatgctatgtgttacgtgttttttccagtatgtttatttgccaccaaaaagtaaatgcattttcacccattctgtggttcattgtagtttaaggaaaccaagcatatagatgcattagtgattttgtttatattatgtaaaatataacgatctcttaaaaataccacagtttgtattttttctttaaggagtaaagatttgcctttaaataacttggtattttcctggctttcgtttaatacaatagaaaataaagtattacaccgaatacttgccgtgtagtttgtttgttgacctcgtatgttagaaaattttacaatgccagctacatctgttgattttaaatgtcagagaagttgtaccctgtttcaaaagtatactaagtgatactacttgtaatagaataaatcatcttggaattgaattgttaccttttgaagtaaatactggcaagtgcacaagccacataaacctgaataaaacttttgacctagggttgaa

SEQ ID NO: 6808 - protein, 549 aa, Homo sapiens; identical to SEQ ID NO: 6806

SEQ ID NO: 6809 - DNA, 972 bp, Homo sapiens
agacatgaagtacccatctcccttctttgtatttggtgaaaagattcgaactcgagccatctctgctaaaggcatgactttagtcacccccctgcagttgcttctctttgcctccaagaaagtccaatctgatgggcagattgtgcttgtagatgactggattaaactgcaaatatctcatgaagctgctgcctgtatcactggtctccgggcagccatggaggctttggttgttgaagtaaccaaacaacctgctatcatcagccagttggaccccgtaaatgaacgtatgctgaacatgatccgtcagatctctagaccctcagctgctggtatcaaccttatgattggcagtacacggtatggagatggtccacgtcctcccaagatggcccgatacgacaatggaagcggatatagaaggggaggttctagttacagtggtggaggctatggcggtggctatagcagtggaggctatggtagcggaggctatggtggcagcgccaactcctttcgggcaggatatggtgcaggtgttggtggaggctatagaggagtttcccgaggtggctttagaggcaactctggaggagactacagagggcctagtggaggctacagaggatctgggggattccagcgaggaggtggtaggggggcctatggaactggctactttggacagggaagaggaggtggcggctattaaaacttggttatgtcagttcctgtgtgtagacagtaaggaaaaaaaggcatgctatgtgttacgtgttttttccagtatgtttatttgccaccaaaaagtaaatgcattttcacccattctgtggttcattgtagtttaaggaaaccaagcatatagatgcattagtgattttgtttatattatgtaaaatataacgatctcttaaaaataccacagtttgtattttttctttaaggagtaaagatttgcctttaaataac

SEQ ID NO: 6810 - protein, 235 aa, Homo sapiens
MKYPSPFFVFGEKIRTRAISAKGMTLVTPLQLLLFASKKVQSDGQIVLVDDWIKLQISHEAAACITGLRAAMEALVVEVTKQPAIISQLDPVNERMLNMIRQISRPSAAGINLMIGSTRYGDGPRPPKMARYDNGSGYRRGGSSYSGGGYGGGYSSGGYGSGGYGGSANSFRAGYGAGVGGGYRGVSRGGFRGNSGGDYRGPSGGYRGSGGFQRGGGRGAYGTGYFGQGRGGGGY

SEQ ID NO: 6811 - DNA, 822 bp, Homo sapiens
ggtatggagatggtccacgtcctcccaagatggcccgatacgacaatggaagcggatatagaaggggaggttctagttacagtggtggaggctatggcggtggctatagcagtggaggctatggtagcggaggctatggtggcagcgccaactcctttcgggcaggatatggtgcaggtgttggtggaggctatagaggagtttcccgaggtggctttagaggcaactctggaggagactacagagggcctagtggaggctacagaggatctgggggattccagcgaggaggtggtaggggggcctatggaactggctactttggacagggaagaggaggtggcggctattaaaacttggttatgtcagttcctgtgtgtagacagtaaggaaaaaaaggcatgctattttaaggaaaccaagcatatagatgcattagtgattttgtttatattatgtaaaatataacgatctcttaaaaataccacagtttgtattttttctttaaggagtaaagatttgcctttaaataacttggtattttcctggctttcgtttaatacaatagaaaataaagtattacaccgaatacttgccgtgtagtttgtttgttgacctcgtatgttagaaaattttacaatgccagctacatctgttgattttaaatgtcagagaagttgtaccctgtttcaaaagtatactaagtgatactacttgtaatagaataaatcatcttggaattgaattgttaccttttgaagtaaatactggcaagtgcacaagccacataaacctgaataaaacttttgacctagggttgaa

SEQ ID NO: 6812 - protein, 154 aa, Homo sapiens
MEMVHVLPRWPDTTMEADIEGEVLVTVVEAMAVAIAVEAMVAEAMVAAPTPFGQDMVQVLVEAIEEFPEVALEATLEETTEGLVEATEDLGDSSEEVVGGPMELATLDREEEVAAIKTWLCQFLCVDSKEKKACYFKETKHIDALVILFILCKI

SEQ ID NO: 6813 - DNA, 2527 bp, Homo sapiens
ggggttagagccattgcgttgggctcgtctggcaccttctggtgtgtgcggcacctggtgggggttcggcacggagccgcacccaacactgacccgggcccccccacccctgtcctgagcccaggcgcttcgccctgtcccacctagctctgagcagcgccccccagcaccctgaatgcgtccgcaggaccccgcgctctacccgcaggccccgcaccccctagctctgggccgcgcctcacatccctcccagagccgcaacaccccacccggcgggacgccctcgagcagccgctcgttgcgggcctgaagcgcagagcgcctattggccagagcggccgagggcgggaaaagtggccaacggctgcctcggccctcgggctgctgaggagatggcgtcgggctccaaggcctcggtgcccgcggactcattccgcaccatcagcccggacaggcgaggcgagaagtccgcctccgctgtctccggggacacggcggccgcgaccaccctgaagggcaccgcgatcccagtgcggtcggtggtggcctcccctcgcccggtgaaggggaaagcgggccgggagacggccaggctgcggctccagcgcctgcccgcggctcaggccgaggacacgggagaggcggcggcggcggcggcggaggagcccctgctgccagtgcctgaggatgaagaggaggcgcagcccctgcccccagtctgcgtgtcccgtatgagggggatgtggcgggacgagaaggtgtcgctgtattgcgacgaagtgctgcaggactgtaagtacagatggggtttctccagttggtcaggctggactcgaactcccgacctcaggcagaagatgctgatgaagttatgggtaaatacctatcagaaaaattaaagttgaaagacaaatggcttggagtctggaagactaatcccagtgtattctttgtgaaatatgaagaagcttctatcccttttgttggtatattggttgaggtaacttgtgaaccataccaagactcatcatctcgtttcaaagttactgtttctgttgctgagcccttttcttccaacattgcaaatattccaagagatttggttgatgagattttggaggaactggaacacagtgtgcctcttttggaagtgtatcctgttgagggacaagatactgatatacatgttattgctttggccttggaagttgtcaggtttttttatgactttctttggagagactgggatgatgaagaaagttgtgagaattatactgcacttattgaagaaagaattaatttgtggtgtgatatacaggatggaacaatacctggtcctatcgcacaacgttttaaaaaaactttggagaaatataaaaacaaacgtgtcgagctcattgagtatcagagcaatattaaagaagatccatctgcagcagaggctgttgaatgctggaaaaaatactatgagatagtcatgctctgtggattactgaaaatgtgggaagatttacgcctccgagttcatggacctttctttccaagaattctgaggcgtaggaaaggaaaaagagaatttggaaagactataacacatattgtagcaaaaatgatgactactgaaatgataaaggatttatcttcagacacacttctccaacagcatggtgatttggatttggctttggataattgttatagtggagatacagtaataatttttccaggagaatatcaagctgcaaatcttgctttgttgacagatgacatcattataaagggagttggaaagagagaggaaattatgattacttctgaaccttctcgtgacagttttgtggtgtccaaagctgacaatgtgaaactaatgcatctatctttgatacaacaagggacggttgatggtatcgtggtggtggagtctggtcacatgactctagaaaactgcatattaaaatgtgaaggaacaggagtgtgtgttcttacaggggctgctttgacaattacagacagtgaaataactggcgcccagggtgctggtgttgaactgtatcctggaagcatagctattttggaaagaaatgaaattcatcactgtaataacctcagaaccagtaacagttcaaaaagcaccttaggtggagttaatatgaaggttcttccagcacccaaattgaagatgactaataatcatatttatagcaacaaaggctatggagtaagcattcttcaaccaatggaacagttttttatcgtagcagaagaagctctcaacaaaagggcttcttcaggagataaaaaagatgataaaatgctcttcaaagtaatgcaaaatctgaatctggaaatgaataataataagatagaagcaaacgtcaagggggatatcagaatagtcacaagttaaagcgtctgaattgatgttaaagttttatatttcacaaatttgtttaatacatgattctcataccccactgaaatggtagtttcaattcaaagcttaattaaaaaatatttaaatatcatg

SEQ ID NO: 6814 - protein, 534 aa, Homo sapiens
MGFLQLVRLDSNSRPQAEDADEVMGKYLSEKLKLKDKWLGVWKTNPSVFFVKYEEASIPFVGILVEVTCEPYQDSSSRFKVTVSVAEPFSSNIANIPRDLVDEILEELEHSVPLLEVYPVEGQDTDIHVIALALEVVRFFYDFLWRDWDDEESCENYTALIEERINLWCDIQDGTIPGPIAQRFKKTLEKYKNKRVELIEYQSNIKEDPSAAEAVECWKKYYEIVMLCGLLKMWEDLRLRVHGPFFPRILRRRKGKREFGKTITHIVAKMMTTEMIKDLSSDTLLQQHGDLDLALDNCYSGDTVIIFPGEYQAANLALLTDDIIIKGVGKREEIMITSEPSRDSFVVSKADNVKLMHLSLIQQGTVDGIVVVESGHMTLENCILKCEGTGVCVLTGAALTITDSEITGAQGAGVELYPGSIAILERNEIHHCNNLRTSNSSKSTLGGVNMKVLPAPKLKMTNNHIYSNKGYGVSILQPMEQFFIVAEEALNKRASSGDKKDDKMLFKVMQNLNLEMNNNKIEANVKGDIRIVTS

SEQ ID NO: 6815 - DNA, 2546 bp, Homo sapiens
ggggttagagccattgcgttgggctcgtctggcaccttctggtgtgtgcggcacctggtgggggttcggcacggagccgcacccaacactgacccgggcccccccacccctgtcctgagcccaggcgcttcgccctgtcccacctagctctgagcagcgccccccagcaccctgaatgcgtccgcaggaccccgcgctctacccgcaggccccgcaccccctagctctgggccgcgcctcacatccctcccagagccgcaacaccccacccggcgggacgccctcgagcagccgctcgttgcgggcctgaagcgcagagcgcctattggccagagcggccgagggcgggaaaagtggccaacggctgcctcggccctcgggctgctgaggagatggcgtcgggctccaaggcctcggtgcccgcggactcattccgcaccatcagcccggacaggcgaggcgagaagtccgcctccgctgtctccggggacacggcggccgcgaccaccctgaagggcaccgcgatcccagtgcggtcggtggtggcctcccctcgcccggtgaaggggaaagcgggccgggagacggccaggctgcggctccagcgcctgcccgcggctcaggccgaggacacgggagaggcggcggcggcggcggcggaggagcccctgctgccagtgcctgaggatgaagaggaggcgcagcccctgcccccagtctgcgtgtcccgtatgagggggatgtggcgggacgagaaggtgtcgctgtattgcgacgaagtgctgcaggactgtaaggcagaagatgctgatgaagttatgggtaaatacctatcagaaaaattaaagttgaaagacaaatggcttggagtctggaagactaatcccagtgtattctttgtgaaatatgaagaagcttctatcccttttgttggtatattggttgaggtaacttgtgaaccataccaagactcatcatctcgtttcaaagttactgtttctgttgctgagcccttttcttccaacattgcaaatattccaagagatttggttgatgagattttggaggaactggaacacagtgtgcctcttttggaagtgtatcctgttgagggacaagatactgatatacatgttattgctttggccttggaagttgtcaggtttttttatgactttctttggagagactgggatgatgaagaaagttgtgagaattatactgcacttattgaagaaagaattaatttgtaagtatagtttataaacttataccgcacattagaaaaaataaacattgtaattatgttgataattttcaggtggtgtgatatacaggatggaacaatacctggtcctatcgcacaacgttttaaaaaaactttggagaaatataaaaacaaacgtgtcgagctcattgagtatcagagcaatattaaagaagatccatctgcagcagaggctgttgaatgctggaaaaaatactatgagatagtcatgctctgtggattactgaaaatgtgggaagatttacgcctccgagttcatggacctttctttccaagaattctgaggcgtaggaaaggaaaaagagaatttggaaagactataacacatattgtagcaaaaatgatgactactgaaatgataaaggatttatcttcagacacacttctccaacagcatggtgatttggatttggctttggataattgttatagtggagatacagtaataatttttccaggagaatatcaagctgcaaatcttgctttgttgacagatgacatcattataaagggagttggaaagagagaggaaattatgattacttctgaaccttctcgtgacagttttgtggtgtccaaagctgacaatgtgaaactaatgcatctatctttgatacaacaagggacggttgatggtatcgtggtggtggagtctggtcacatgactctagaaaactgcatattaaaatgtgaaggaacaggagtgtgtgttcttacaggggctgctttgacaattacagacagtgaaataactggcgcccagggtgctggtgttgaactgtatcctggaagcatagctattttggaaagaaatgaaattcatcactgtaataacctcagaaccagtaacagttcaaaaagcaccttaggtggagttaatatgaaggttcttccagcacccaaattgaagatgactaataatcatatttatagcaacaaaggctatggagtaagcattcttcaaccaatggaacagttttttatcgtagcagaagaagctctcaacaaaagggcttcttcaggagataaaaaagatgataaaatgctcttcaaagtaatgcaaaatctgaatctggaaatgaataataataagatagaagcaaacgtcaagggggatatcagaatagtcacaagttaaagcgtctgaattgatgttaaagttttatatttcacaaatttgtttaatacatgattctcataccccactgaaatggtagtttcaattcaaagcttaattaaaaaatatttaaatatcatg

SEQ ID NO: 6816 - protein, 373 aa, Homo sapiens
MLIIFRWCDIQDGTIPGPIAQRFKKTLEKYKNKRVELIEYQSNIKEDPSAAEAVECWKKYYEIVMLCGLLKMWEDLRLRVHGPFFPRILRRRKGKREFGKTITHIVAKMMTTEMIKDLSSDTLLQQHGDLDLALDNCYSGDTVIIFPGEYQAANLALLTDDIIIKGVGKREEIMITSEPSRDSFVVSKADNVKLMHLSLIQQGTVDGIVVVESGHMTLENCILKCEGTGVCVLTGAALTITDSEITGAQGAGVELYPGSIAILERNEIHHCNNLRTSNSSKSTLGGVNMKVLPAPKLKMTNNHIYSNKGYGVSILQPMEQFFIVAEEALNKRASSGDKKDDKMLFKVMQNLNLEMNNNKIEANVKGDIRIVTS

SEQ ID NO: 6817 - DNA, 2474 bp, Homo sapiens
ggggttagagccattgcgttgggctcgtctggcaccttctggtgtgtgcggcacctggtgggggttcggcacggagccgcacccaacactgacccgggcccccccacccctgtcctgagcccaggcgcttcgccctgtcccacctagctctgagcagcgccccccagcaccctgaatgcgtccgcaggaccccgcgctctacccgcaggccccgcaccccctagctctgggccgcgcctcacatccctcccagagccgcaacaccccacccggcgggacgccctcgagcagccgctcgttgcgggcctgaagcgcagagcgcctattggccagagcggccgagggcgggaaaagtggccaacggctgcctcggccctcgggctgctgaggagatggcgtcgggctccaaggcctcggtgcccgcggactcattccgcaccatcagcccggacaggcgaggcgagaagtccgcctccgctgtctccggggacacggcggccgcgaccaccctgaagggcaccgcgatcccagtgcggtcggtggtggcctcccctcgcccggtgaaggggaaagcgggccgggagacggccaggctgcggctccagcgcctgcccgcggctcaggccgaggacacgggagaggcggcggcggcggcggcggaggagcccctgctgccagtgcctgaggatgaagaggaggcgcagcccctgcccccagtctgcgtgtcccgtatgagggggatgtggcgggacgagaaggtgtcgctgtattgcgacgaagtgctgcaggactgtaaggcagaagatgctgatgaagttatgggtaaatacctatcagaaaaattaaagttgaaagacaaatggcttggagtctggaagactaatcccagtgtattctttgtgaaatatgaagaagcttctatcccttttgttggtatattggttgaggtaacttgtgaaccataccaagactcatcatctcgtttcaaagttactgtttctgttgctgagcccttttcttccaacattgcaaatattccaagagatttggttgatgagattttggaggaactggaacacagtgtgcctcttttggaagtgtatcctgttgagggacaagatactgatatacatgttattgctttggccttggaagttgtcaggtttttttatgactttctttggagagactgggatgatgaagaaagttgtgagaattatactgcacttattgaagaaagaattaatttgtggtgtgatatacaggatggaacaatacctggtcctatcgcacaacgttttaaaaaaactttggagaaatataaaaacaaacgtgtcgagctcattgagtatcagagcaatattaaagaagatccatctgcagcagaggctgttgaatgctggaaaaaatactatgagatagtcatgctctgtggattactgaaaatgtgggaagatttacgcctccgagttcatggacctttctttccaagaattctgaggcgtaggaaaggaaaaagagaatttggaaagactataacacatattgtagcaaaaatgatgactactgaaatgataaaggatttatcttcagacacacttctccaacagcatggtgatttggatttggctttggataattgttatagtggagatacagtaataatttttccaggagaatatcaagctgcaaatcttgctttgttgacagatgacatcattataaagggagttggaaagagagaggaaattatgattacttctgaaccttctcgtgacagttttgtggtgtccaaagctgacaatgtgaaactaatgcatctatctttgatacaacaagggacggttgatggtatcgtggtggtggagtctggtcacatgactctagaaaactgcatattaaaatgtgaaggaacaggagtgtgtgttcttacaggggctgctttgacaattacagacagtgaaataactggcgcccagggtgctggtgttgaactgtatcctggaagcatagctattttggaaagaaatgaaattcatcactgtaataacctcagaaccagtaacagttcaaaaagcaccttaggtggagttaatatgaaggttcttccagcacccaaattgaagatgactaataatcatatttatagcaacaaaggctatggagtaagcattcttcaaccaatggaacagttttttatcgtagcagaagaagctctcaacaaaagggcttcttcaggagataaaaaagatgataaaatgctcttcaaagtaatgcaaaatctgaatctggaaatgaataataataagatagaagcaaacgtcaagggggatatcagaatagtcacaagttaaagcgtctgaattgatgttaaagttttatatttcacaaatttgtttaatacatgattctcataccccactgaaatggtagtttcaattcaaagcttaattaaaaaatatttaaatatcatg

SEQ ID NO: 6818 - protein, 653 aa, Homo sapiens; identical to SEQ ID NO: 358

SEQ ID NO: 6819 - DNA, 1309 bp, Homo sapiens
agcgccccccagcaccctgaatgcgtccgcaggaccccgcgctctacccgcaggccccgcaccccctagctctgggccgcgcctcacatccctcccagagccgcaacaccccacccggcgggacgccctcgagcagccgctcgttgcgggcctgaagcgcagagcgcctattggccagagcggccgagggcgggaaaagtggccaacggctgcctcggccctcgggctgctgaggagatggcgtcgggctccaaggcctcggtgcccgcggactcattccgcaccatcagcccggacaggcgaggcgagaagtccgcctccgctgtctccggggacacggcggccgcgaccaccctgaagggcaccgcgatcccagtgcggtcggtggtggcctcccctcgcccggtgaaggggaaagcgggccgggagacggccaggctgcggctccagcgcctgcccgcggctcaggccgaggacacgggagaggcggcggcggcggcggcggaggagcccctgctgccagtgcctgaggatgaagaggaggcgcagcccctgcccccagtctgcgtgtcccgtatgagggggatgtggcgggacgagaaggtgtcgctgtattgcgacgaagtgctgcaggactgtaaggtgagcggatccgggacaggaagactacggtcggaagctcgtcggaacctggggacaggcatctggggcttccctcttaggcggatggggatccacagggcacaacgaaaacttgcgtttcaaaaaagtaaatggagtcaacatgtatagagcgttcaccttgttagaggtgcccgcgtcctgccctagaggagttaaggttcgagtttccgacaaaattcgtcaggcagaagatgctgatgaagttatgggtaaatacctatcagaaaaattaaagttgaaagacaaatggcttggagtctggaagactaatcccagtgtattctttgtgaaatatgaagaagcttctatcccttttgttggtatattggttgaggtaacttgtgaaccataccaagactcatcatctcgtttcaaagttactgtttctgttgctgagcccttttcttccaacattgcaaatattccaagagatttggttgatgagattttggaggaactggaacacagtgtgcctcttttggaagtgtatcctgttgagggacaagatactgatatacatgttattgctttggccttggaagttgtcaggtttttttatgactttctttggagagactgggatgatgaagaaagttgtgagaattatactgcacttattgaagaa

SEQ ID NO: 6820 - protein, 174 aa, Homo sapiens
MYRAFTLLEVPASCPRGVKVRVSDKIRQAEDADEVMGKYLSEKLKLKDKWLGVWKTNPSVFFVKYEEASIPFVGILVEVTCEPYQDSSSRFKVTVSVAEPFSSNIANIPRDLVDEILEELEHSVPLLEVYPVEGQDTDIHVIALALEVVRFFYDFLWRDWDDEESCENYTALIE

SEQ ID NO: 6821 - DNA, 1231 bp, Homo sapiens
ggggttagagccattgcgttgggctcgtctggcaccttctggtgtgtgcggcacctggtgggggttcggcacggagccgcacccaacactgacccgggcccccccacccctgtcctgagcccaggcgcttcgccctgtcccacctagctctgagcagcgccccccagcaccctgaatgcgtccgcaggaccccgcgctctacccgcaggccccgcaccccctagctctgggccgcgcctcacatccctcccagagccgcaacaccccacccggcgggacgccctcgagcagccgctcgttgcgggcctgaagcgcagagcgcctattggccagagcggccgagggcgggaaaagtggccaacggctgcctcggccctcgggctgctgaggagatggcgtcgggctccaaggcctcggtgcccgcggactcattccgcaccatcagcccggacaggcgaggcgagaagtccgcctccgctgtctccggggacacggcggccgcgaccaccctgaagggcaccgcgatcccagtgcggtcggtggtggcctcccctcgcccggtgaaggggaaagcgggccgggagacggccaggctgcggctccagcgcctgcccgcggctcaggccgaggacacgggagaggcggcggcggcggcggcggaggagcccctgctgccagtgcctgaggatgaagaggaggcgcagcccctgcccccagtctgcgtgtcccgtatgagggggatgtggcgggacgagaaggtgtcgctgtattgcgacgaagtgctgcaggactgtaagtacagatggggtttctccagttggtcaggctggactcgaactcccgacctcaggcagaagatgctgatgaagttatgggtaaatacctatcagaaaaattaaagttgaaagacaaatggcttggagtctggaagactaatcccagtgtattctttgtgaaatatgaagaagcttctatcccttttgttggtatattggttgagagtttcgtcctgtcgcccaggctggagtgcagtggtgtgatctcggctactgcaacctctgcctccccggttcaagcgattctcctgccccagcctcccgagtagctgggattacaggcgcatgccaccatgcccagctaattttttgtatctttggtagagacggggtttaaccctgttggccaggctggtcttgaactcctaaccttgtgatctttagcagagaagggg

SEQ ID NO: 6822 - protein, 168 aa, Homo sapiens
MASGSKASVPADSFRTISPDRRGEKSASAVSGDTAAATTLKGTAIPVRSVVASPRPVKGKAGRETARLRLQRLPAAQAEDTGEAAAAAAEEPLLPVPEDEEEAQPLPPVCVSRMRGMWRDEKVSLYCDEVLQDCKYRWGFSSWSGWTRTPDLRQKMLMKLWVNTYQKN

SEQ ID NO: 6823 - DNA, 454 bp, Homo sapiens
tctttgtgttctcaaccttctgccgcaatcccaagtggaagctctgttggctcgccctctagtcctcttcctgctgagccagtcttcaactaggaatcacaccagagtcaccaggacaaggaaagctaggcccatctgaaggagattctgggcagtgtggtctcagagggcacagtctttctggagtcccgtctctggttaaaaggtttggaaggctcgccacatgaaggaattactgctggatgagagatgctggagctttggactgaccagggactctggccagacctaggctggcccagggacttaaggcccaagggaacataaatgaacaagtgctgttcaagggagccactcacccatctttttctgtggattcgttcctgctgggaacataccaaacacgaaggaaaggggaaactatcttcattttagataaagaactgcacgactt

SEQ ID NO: 6824 - protein, 35 aa, Homo sapiens
MNKCCSREPLTHLFLWIRSCWEHTKHEGKGKLSSF

SEQ ID NO: 6825 - DNA, 7933 bp, Homo sapiens
gcgcactcgggcacgcgctcggaagtcgggggtcggcgcggagtgcaggctgctcccggggtaggtgagggaagcgcggaggcggcgcgcgggggcagtggtcggcgagcagcgcggtcctcgctaggggcgcccacccgtcagtctctccggcgcgagccgccgccaccgcccgcgccggagtcaggcccctgggcccccaggctcaagcagcgaagcggcctccgggggacgccgctaggcgagaggaacgcgccggtgcccttgccttcgccgtgacccagcgtgcgggcggcgggatgagagggagccatcgggccgcgccggccctgcggccccgggggcggctctggcccgtgctggccgtgctggcggcggccgccgcggcgggctgtgcccaggcagccatggacgagtgcacggacgagggcgggcggccgcagcgctgcatgcccgagttcgtcaacgccgccttcaacgtgactgtggtggccaccaacacgtgtgggactccgcccgaggaatactgtgtgcagaccggggtgaccggggtcaccaagtcctgtcacctgtgcgacgccgggcagccccacctgcagcacggggcagccttcctgaccgactacaacaaccaggccgacaccacctggtggcaaagccagaccatgctggccggggtgcagtaccccagctccatcaacctcacgctgcacctgggaaaagcttttgacatcacctatgtgcgtctcaagttccacaccagccgcccggagagctttgccatttacaagcgcacacgggaagacgggccctggattccttaccagtactacagtggttcctgtgagaacacctactccaaggcaaaccgcggcttcatcaggacaggaggggacgagcagcaggccttgtgtactgatgaattcagtgacatttctcccctcactgggggcaacgtggccttttctaccctggaaggaaggcccagcgcctataactttgacaatagccctgtgctgcaggaatgggtaactgccactgacatcagagtaactcttaatcgcctgaacacttttggagatgaagtgtttaacgatcccaaagttctcaagtcctattattatgccatctctgattttgctgtaggtggcagatgtaaatgtaatggacacgcaagcgagtgtatgaagaacgaatttgataagctggtgtgtaattgcaaacataacacatatggagtagactgtgaaaagtgtcttcctttcttcaatgaccggccgtggaggagggcaactgcggaaagtgccagtgaatgcctgccctgtgattgcaatggtcgatcccaggaatgctacttcgaccctgaactctatcgttccactggccatgggggccactgtaccaactgccaggataacacagatggcgcccactgtgagaggtgccgagagaacttcttccgccttggcaacaatgaagcctgctcttcatgccactgtagtcctgtgggctctctaagcacacagtgtgatagttacggcagatgcagctgtaagccaggagtgatgggggacaaatgtgaccgttgccagcctggattccattctctcactgaagcaggatgcaggccatgctcttgtgatccctctggcagcatagatgaatgtaatattgaaacaggaagatgtgtttgcaaagacaatgtcgaaggcttcaattgtgaaagatgcaaacctggattttttaatctggaatcatctaatcctcggggttgcacaccctgcttctgctttgggcattcttctgtctgtacaaacgctgttggctacagtgtttattctatctcctctacctttcagattgatgaggatgggtggcgtgcggaacagagagatggctctgaagcatctctcgagtggtcctctgagaggcaagatatcgccgtgatctcagacagctactttcctcggtacttcattgctcctgcaaagttcttgggcaagcaggtgttgagttatggtcagaacctctccttctcctttcgagtggacaggcgagatactcgcctctctgcagaagaccttgtgcttgagggagctggcttaagagtatctgtacccttgatcgctcagggcaattcctatccaagtgagaccactgtgaagtatgtcttcaggctccatgaagcaacagattacccttggaggcctgctcttaccccttttgaatttcagaagctcctaaacaacttgacctctatcaagatacgtgggacatacagtgagagaagtgctggatatttggatgatgtcaccctggcaagtgctcgtcctgggcctggagtccctgcaacttgggtggagtcctgcacctgtcctgtgggatatggagggcagttttgtgagatgtgcctctcaggttacagaagagaaactcctaatcttggaccatacagtccatgtgtgctttgcgcctgcaatggacacagcgagacctgtgatcctgagacaggtgtttgtaactgcagagacaatacggctggcccgcactgtgagaagtgcagtgatgggtactatggagattcaactgcaggcacctcctccgattgccaaccctgtccgtgtcctggaggttcaagttgtgctgttgttcccaagacaaaggaggtggtgtgcaccaactgtcctactggcaccactggtaagagatgtgagctctgtgatgatggctactttggagaccccctgggtagaaacggccctgtgagactttgccgcctgtgccagtgcagtgacaacatcgatcccaatgcagttggaaattgcaatcgcttgacgggagaatgcctgaagtgcatctataacactgctggcttctattgtgaccggtgcaaagacggattttttggaaatcccctggctcccaatccagcagacaaatgcaaagcctgcaattgcaatctgtatgggaccatgaagcagcagagcagctgtaaccccgtgacggggcagtgtgaatgtttgcctcacgtgactggccaggactgtggtgcttgtgaccctggattctacaatctgcagagtgggcaaggctgtgagaggtgtgactgccatgccttgggctccaccaatgggcagtgtgacatccgcaccggccagtgtgagtgccagcccggcatcactggtcagcactgtgagcgctgtgaggtcaaccactttgggtttggacctgaaggctgcaaaccctgtgactgtcatcctgagggatctctttcacttcagtgcaaagatgatggtcgctgtgaatgcagagaaggctttgtgggaaatcgctgtgaccagtgtgaagaaaactatttctacaatcggtcttggcctggctgccaggaatgtccagcttgttaccggctggtaaaggataaggttgctgatcatagagtgaagctccaggaattagagagtctcatagcaaaccttggaactggggatgagatggtgacagatcaagccttcgaggatagactaaaggaagcagagagggaagttatggacctccttcgtgaggcccaggatgtcaaagatgttgaccagaatttgatggatcgcctacagagagtgaataacactctgtccagccaaattagccgtttacagaatatccggaataccattgaagagactggaaacttggctgaacaagcgcgtgcccatgtagagaacacagagcggttgattgaaatcgcatccagagaacttgagaaagcaaaagtcgctgctgccaatgtgtcagtcactcagccagaatctacaggggacccaaacaacatgactcttttggcagaagaggctcgaaagcttgctgaacgtcataaacaggaagctgatgacattgttcgagtggcaaagacagccaatgatacgtcaactgaggcatacaacctgcttctgaggacactggcaggagaaaatcaaacagcatttgagattgaagagcttaataggaagtatgaacaagcgaagaacatctcacaggatctggaaaaacaagctgcccgagtacatgaggaggccaaaagggccggtgacaaagctgtggagatctatgccagcgtggctcagctgagccctttggactctgagacactggagaatgaagcaaataacataaagatggaagctgagaatctggaacaactgattgaccagaaattaaaagattatgaggacctcagagaagatatgagagggaaggaacttgaagtcaagaaccttctggagaaaggcaagactgaacagcagaccgcagaccaactcctagcccgagctgatgctgccaaggccctcgctgaagaagctgcaaagaagggacgggataccttacaagaagctaatgacattctcaacaacctgaaagattttgataggcgtgtgaacgataacaagacggccgcagaggaggcactaaggaagattcctgccatcaaccagaccatcactgaagccaatgaaaagaccagagaagcccagcaggccctgggcagtgctgcggcggatgccacagaggccaagaacaaggcccatgaggcggagaggatcgcgagcgctgtccaaaagaatgccaccagcaccaaggcagaagctgaaagaacttttgcagaagttacagatctggataatgaggtgaacaatatgttgaagcaactgcaggaagcagaaaaagagctaaagagaaaacaagatgacgctgaccaggacatgatgatggcagggatggcttcacaggctgctcaagaagccgagatcaatgccagaaaagccaaaaactctgttactagcctcctcagcattattaatgacctcttggagcagctggggcagctggatacagtggacctgaataagctaaacgagattgaaggcaccctaaacaaagccaaagatgaaatgaaggtcagcgatcttgataggaaagtgtctgacctggagaatgaagccaagaagcaggaggctgccatcatggactataaccgagatatcgaggagatcatgaaggacattcgcaatctggaggacatcaggaagaccttaccatctggctgcttcaacaccccgtccattgaaaagccctagtgtctttagggctggaaggcagcatccctctgacaggggggcagttgtgaggccacagagtgccttgacacaaagattacatttttcagacccccactcctctgctgctgtccatgactgtccttttgaaccaggaaaagtcacagagtttaaagagaagcaaattaaacatcctgaatcgggaacaaagggttttatctaataaagtgtctcttccattcacgttgctaccttacccacactttcccttctgatttgcgtgaggacgtggcatcctacgttactgtacagtggcataagcacatcgtgtgagcccatgtatgctggggtagagcaagtagccctcccctgtctcatcgataccagcagaacctcctcagtctcagtactcttgtttctatgaaggaaaagtttggctactaacagtagcattgtgatggccagtatatccagtccatggataaagaaaatgcatctgcatctcctacccctcttccttctaagcaaaaggaaataaacatcctgtgccaaaggtattggtcatttagaatgtcggtagccatccatcagtgcttttagttattatgagtgtaggacactgagccatccgtgggtcaggatgcaattatttataaaagtctccaggtgaacatggctgaagatttttctagtatattaataattgactaggaagatgaactttttttcagatctttgggcagctgataatttaaatctggatgggcagcttgcactcaccaatagaccaaaagacatcttttgatattcttataaatggaacttacacagaagaaatagggatatgataaccactaaaattttgttttcaaaatcaaactaattcttacagcttttttattagttagtcttggaactagtgttaagtatctggcagagaacagttaatccctaaggtcttgacaaaacagaagaaaaacaagcctcctcgtcctagtcttttctagcaaagggataaaacttagatggcagcttgtactgtcagaatcccgtgtatccatttgttcttctgttggagagatgagacatttgacccttagctccagttttcttctgatgtttccatcttccagaatccctcaaaaaacattgtttgccaaatcctggtggcaaatacttgcactcagtatttcacacagctgccaacgctatcgagttcctgcactttgtgatttaaatccactctaaaccttccctctaagtgtagagggaagacccttacgtggagtttcctagtgggcttctcaacttttgatcctcagctctgtggttttaagaccacagtgtgacagttccctgccacacacccccttcctcctaccaacccacctttgagattcatatatagcctttaacactatgcaactttgtactttgcgtagcaggggcggggtggggggaaagaaactattatctgacacactggtgctattaattatttcaaatttatatttttgtgtgaatgttttgtgttttgtttatcatgattatagaataaggaatttatgtaaatatacttagtcctatttctagaatgacactctgttcactttgctcaatttttcctcttcactggcacaatgtatctgaatacctccttccctcccttctagaattctttggattgtactccaaagaattgtgccttgtgtttgcagcatctccattctctaaaattaatataattgctttcctccacacccagccactgtaaagaggtaacttgggtcctcttccattgcagtcctgatgatcctaacctgcagcacggtggttttacaatgttccagagcaggaacgccaggttgacaagctatggtaggattaggaaagtttgctgaagaggatctttgacgccacagtgggactagccaggaatgagggagaaatgccctttctggcaattgttggagctggataggtaagttttataagggagtacattttgactgagcacttagggcatcaggaacagtgctacttactgatgggtagactgggagaggtggtgtaacttagttcttgatgatcccacttcctgtttccatctgcttgggatataccagagtttaccacaagtgttttgacgatatactcctgagctttcactctgctgcttctcccaggcctcttctactatggcaggagatgtggcgtgctgttgcaaagttttcacgtcattgtttcctggctagttcatttcattaagtggctacatcctaacatatgcatttggtcaaggttgcagaagaggactgaagattgactgccaagctagtttgggtgaagttcactccagcaagtctcaggccacaatggggtggtttggtttggtttccttttaactttctttttgttatttgcttttctcctccacctgtgtggtatattttttaagcagaattttattttttaaaataaaaggttctttacaagatgataccttaattacactcccgcaacacagccattattttattgtctagctccagttatctgtattttatgtaatgtaattgacaggatggctgctgcagaatgctggttgacacagggattattatactgctatttttccctgaatttttttcctttgaattccaactgtggaccttttatatgtgccttcactttagctgtttgccttaatctctacagccttgctctccggggtggttaataaaatgcaacacttggcatttttatgttttaagaaaaacagtattttatttataataaaatctgaatatttgtaaccctttata

SEQ ID NO: 6826 - protein, 1609 aa, Homo sapiens
MRGSHRAAPALRPRGRLWPVLAVLAAAAAAGCAQAAMDECTDEGGRPQRCMPEFVNAAFNVTVVATNTCGTPPEEYCVQTGVTGVTKSCHLCDAGQPHLQHGAAFLTDYNNQADTTWWQSQTMLAGVQYPSSINLTLHLGKAFDITYVRLKFHTSRPESFAIYKRTREDGPWIPYQYYSGSCENTYSKANRGFIRTGGDEQQALCTDEFSDISPLTGGNVAFSTLEGRPSAYNFDNSPVLQEWVTATDIRVTLNRLNTFGDEVFNDPKVLKSYYYAISDFAVGGRCKCNGHASECMKNEFDKLVCNCKHNTYGVDCEKCLPFFNDRPWRRATAESASECLPCDCNGRSQECYFDPELYRSTGHGGHCTNCQDNTDGAHCERCRENFFRLGNNEACSSCHCSPVGSLSTQCDSYGRCSCKPGVMGDKCDRCQPGFHSLTEAGCRPCSCDPSGSIDECNIETGRCVCKDNVEGFNCERCKPGFFNLESSNPRGCTPCFCFGHSSVCTNAVGYSVYSISSTFQIDEDGWRAEQRDGSEASLEWSSERQDIAVISDSYFPRYFIAPAKFLGKQVLSYGQNLSFSFRVDRRDTRLSAEDLVLEGAGLRVSVPLIAQGNSYPSETTVKYVFRLHEATDYPWRPALTPFEFQKLLNNLTSIKIRGTYSERSAGYLDDVTLASARPGPGVPATWVESCTCPVGYGGQFCEMCLSGYRRETPNLGPYSPCVLCACNGHSETCDPETGVCNCRDNTAGPHCEKCSDGYYGDSTAGTSSDCQPCPCPGGSSCAVVPKTKEVVCTNCPTGTTGKRCELCDDGYFGDPLGRNGPVRLCRLCQCSDNIDPNAVGNCNRLTGECLKCIYNTAGFYCDRCKDGFFGNPLAPNPADKCKACNCNLYGTMKQQSSCNPVTGQCECLPHVTGQDCGACDPGFYNLQSGQGCERCDCHALGSTNGQCDIRTGQCECQPGITGQHCERCEVNHFGFGPEGCKPCDCHPEGSLSLQCKDDGRCECREGFVGNRCDQCEENYFYNRSWPGCQECPACYRLVKDKVADHRVKLQELESLIANLGTGDEMVTDQAFEDRLKEAEREVMDLLREAQDVKDVDQNLMDRLQRVNNTLSSQISRLQNIRNTIEETGNLAEQARAHVENTERLIEIASRELEKAKVAAANVSVTQPESTGDPNNMTLLAEEARKLAERHKQEADDIVRVAKTANDTSTEAYNLLLRTLAGENQTAFEIEELNRKYEQAKNISQDLEKQAARVHEEAKRAGDKAVEIYASVAQLSPLDSETLENEANNIKMEAENLEQLIDQKLKDYEDLREDMRGKELEVKNLLEKGKTEQQTADQLLARADAAKALAEEAAKKGRDTLQEANDILNNLKDFDRRVNDNKTAAEEALRKIPAINQTITEANEKTREAQQALGSAAADATEAKNKAHEAERIASAVQKNATSTKAEAERTFAEVTDLDNEVNNMLKQLQEAEKELKRKQDDADQDMMMAGMASQAAQEAEINARKAKNSVTSLLSIINDLLEQLGQLDTVDLNKLNEIEGTLNKAKDEMKVSDLDRKVSDLENEAKKQEAAIMDYNRDIEEIMKDIRNLEDIRKTLPSGCFNTPSIEKP

SEQ ID NO: 6827 - DNA, 856 bp, Homo sapiens
gtgcaggctgctcccggggtaggtgagggaagcgcggaggcggcgcgcgggggcagtggtcggcgagcagcgcggtcctcgctaggggcgcccacccgtcagtctctccggcgcgagccgccgccaccgcccgcgccggagtcaggcccctgggcccccaggctcaagcagcgaagcggcctccgggggacgccgctaggcgagaggaacgcgccggtgcccttgccttcgccgtgacccagcgtgcgggcggcgggatgagagggagccatcgggccgcgccggccctgcggccccgggggcggctctggcccgtgctggccgtgctggcggcggccgccgcggcgggctgtgcccaggcagccatggacgagtgcacggacgagggcgggcggccgcagcgctgcatgcccgagttcgtcaacgccgccttcaacgtgactgtggtggccaccaacacgtgtgggactccgcccgaggaatactgtgtgcagaccggggtgaccggggtcaccaagtcctgtcacctgtgcgacgccgggcagccccacctgcagcacggggcagccttcctgaccgactacaacaaccaggccgacaccacctggtggcaaagccagaccatgctggccggggtgcagtaccccagctccatcaacctcacgctgcacctggatgacacgtggaataaattgcacattaaaatgtctgacatgaaaatcagaagagcttaagttcattccacagaagccttttgttagaatcttcaaaggatgagaaccaggatgaagaagagtttacagtagggaagtatttctcaactgtaattgtacataaaaattgcctatggtgcttt

SEQ ID NO: 6828 - protein, 158 aa, Homo sapiens
MRGSHRAAPALRPRGRLWPVLAVLAAAAAAGCAQAAMDECTDEGGRPQRCMPEFVNAAFNVTVVATNTCGTPPEEYCVQTGVTGVTKSCHLCDAGQPHLQHGAAFLTDYNNQADTTWWQSQTMLAGVQYPSSINLTLHLDDTWNKLHIKMSDMKIRRA

SEQ ID NO: 6829 - DNA, 2394 bp, Homo sapiens
gtgcaggctgctcccggggtaggtgagggaagcgcggaggcggcgcgcgggggcagtggtcggcgagcagcgcggtcctcgctaggggcgcccacccgtcagtctctccggcgcgagccgccgccaccgcccgcgccggagtcaggcccctgggcccccaggctcaagcagcgaagcggcctccgggggacgccgctaggcgagaggaacgcgccggtgcccttgccttcgccgtgacccagcgtgcgggcggcgggatgagagggagccatcgggccgcgccggccctgcggccccgggggcggctctggcccgtgctggccgtgctggcggcggccgccgcggcgggctgtgcccaggcagccatggacgagtgcacggacgagggcgggcggccgcagcgctgcatgcccgagttcgtcaacgccgccttcaacgtgactgtggtggccaccaacacgtgtgggactccgcccgaggaatactgtgtgcagaccggggtgaccggggtcaccaagtcctgtcacctgtgcgacgccgggcagccccacctgcagcacggggcagccttcctgaccgactacaacaaccaggccgacaccacctggtggcaaagccagaccatgctggccggggtgcagtaccccagctccatcaacctcacgctgcacctgggaaaagcttttgacatcacctatgtgcgtctcaagttccacaccagccgcccggagagctttgccatttacaagcgcacacgggaagacgggccctggattccttaccagtactacagtggttcctgtgagaacacctactccaaggcaaaccgcggcttcatcaggacaggaggggacgagcagcaggccttgtgtactgatgaattcagtgacatttctcccctcactgggggcaacgtggccttttctaccctggaaggaaggcccagcgcctataactttgacaatagccctgtgctgcaggtaaattctcacaggttggcctgaagccagctagttctacaacatgcgaggtgtgggaagattattgtagtggggcttgtggtcccacttctgaggtacggggtcagagtagaatacttgagcaacacagacagagagcttgattctgctctctgtgtactattaataagtgaaggaaagtagttttgttcctgctgcctggttgatgtttgttcttatgcacttgcagatctattctgggatgtaaactttacacattttttaaaaagtcaaacaattttaacgttagtctctgtacctgaggtggaaacattttccttctgaccttttgaagagaacatttgacctaattacccagatttcttggatcttttcttgcctattttttgatttgacaaaataaaatgtattttttaaaattagcaaaggggaaccgttgaagcaagatatttaagaatgccatcttctttcatttttacacaagaaaattttgattagatttgtctggcacgattgctgatcattaaagaaactcctcatcacctaaaatggatgatgttagtaacaggatatggatgttagtaacaggatattaatttaggtacccatagcactgtacttaaacattgtgatagaaacctttccctgtttgagaaggatttcttttttctcctgaattctacatgcatattccttatacaccataatacggaattcttctatgttgctcatatttctgtgaacttttcatatgtcctggctatttgattatggaaaagctggtgagcctcatgctgtactcagcactttaacacagaattggagatgctgctgcatgtggctgaagtcaacaaccacatggggatagcctttgtcagttgactgaaacaagaaagtctgataatgggttttcaaatgctgtgtacattatatgaaaagctattgtgatttctaaataggaaataccccatttttctagggtttctaatttggatcttcttattctttctcaccgttattatgttcagggactctctttctaattgtatggttttggacagtgacaaaagataagaatatatttttctgtgggttcagttgccccccttccattgtatttctgtaagttgctgggaaagcatgaatgtgaaagctgttggtaaactctgaggttatggtgagcaatgagtgtgcttgccaacaccttgcaaaaaagtgtttcttgcaatggagataagttgtgttcaaaataaatggccgagagaatagctgattttgatagatgaaaaagcagggccaggcgcagtggctcatggctgtaataccagcactttgggaggcggaggcaggtggatcacttgaggtcaggcattcaaaacccacctggccaacatggtgaaaccctgtctctact

SEQ ID NO: 6830 - protein, 248 aa, Homo sapiens
MRGSHRAAPALRPRGRLWPVLAVLAAAAAAGCAQAAMDECTDEGGRPQRCMPEFVNAAFNVTVVATNTCGTPPEEYCVQTGVTGVTKSCHLCDAGQPHLQHGAAFLTDYNNQADTTWWQSQTMLAGVQYPSSINLTLHLGKAFDITYVRLKFHTSRPESFAIYKRTREDGPWIPYQYYSGSCENTYSKANRGFIRTGGDEQQALCTDEFSDISPLTGGNVAFSTLEGRPSAYNFDNSPVLQVNSHRLA

SEQ ID NO: 6831 - DNA, 5321 bp, Homo sapiens
gtgcaggctgctcccggggtaggtgagggaagcgcggaggcggcgcgcgggggcagtggtcggcgagcagcgcggtcctcgctaggggcgcccacccgtcagtctctccggcgcgagccgccgccaccgcccgcgccggagtcaggcccctgggcccccaggctcaagcagcgaagcggcctccgggggacgccgctaggcgagaggaacgcgccggtgcccttgccttcgccgtgacccagcgtgcgggcggcgggatgagagggagccatcgggccgcgccggccctgcggccccgggggcggctctggcccgtgctggccgtgctggcggcggccgccgcggcgggctgtgcccaggcagccatggacgagtgcacggacgagggcgggcggccgcagcgctgcatgcccgagttcgtcaacgccgccttcaacgtgactgtggtggccaccaacacgtgtgggactccgcccgaggaatactgtgtgcagaccggggtgaccggggtcaccaagtcctgtcacctgtgcgacgccgggcagccccacctgcagcacggggcagccttcctgaccgactacaacaaccaggccgacaccacctggtggcaaagccagaccatgctggccggggtgcagtaccccagctccatcaacctcacgctgcacctgggaaaagcttttgacatcacctatgtgcgtctcaagttccacaccagccgcccggagagctttgccatttacaagcgcacacgggaagacgggccctggattccttaccagtactacagtggttcctgtgagaacacctactccaaggcaaaccgcggcttcatcaggacaggaggggacgagcagcaggccttgtgtactgatgaattcagtgacatttctcccctcactgggggcaacgtggccttttctaccctggaaggaaggcccagcgcctataactttgacaatagccctgtgctgcaggaatgggtaactgccactgacatcagagtaactcttaatcgcctgaacacttttggagatgaagtgtttaacgatcccaaagttctcaagtcctattattatgccatctctgattttgctgtaggtggcagatgtaaatgtaatggacacgcaagcgagtgtatgaagaacgaatttgataagctggtgtgtaattgcaaacataacacatatggagtagactgtgaaaagtgtcttcctttcttcaatgaccggccgtggaggagggcaactgcggaaagtgccagtgaatgcctgccctgtgattgcaatggtcgatcccaggaatgctacttcgaccctgaactctatcgttccactggccatgggggccactgtaccaactgccaggataacacagatggcgcccactgtgagaggtgccgagagaacttcttccgccttggcaacaatgaagcctgctcttcatgccactgtagtcctgtgggctctctaagcacacagtgtgatagttacggcagatgcagctgtaagccaggagtgatgggggacaaatgtgaccgttgccagcctggattccattctctcactgaagcaggatgcaggccatgctcttgtgatccctctggcagcatagatgaatgtaatattgaaacaggaagatgtgtttgcaaagacaatgtcgaaggcttcaattgtgaaagatgcaaacctggattttttaatctggaatcatctaatcctcggggttgcacaccctgcttctgctttgggcattcttctgtctgtacaaacgctgttggctacagtgtttattctatctcctctacctttcagattgatgaggatgggtggcgtgcggaacagagagatggctctgaagcatctctcgagtggtcctctgagaggcaagatatcgccgtgatctcagacagctactttcctcggtacttcattgctcctgcaaagttcttgggcaagcaggtgttgagttatggtcagaacctctccttctcctttcgagtggacaggcgagatactcgcctctctgcagaagaccttgtgcttgagggagctggcttaagagtatctgtacccttgatcgctcagggcaattcctatccaagtgagaccactgtgaagtatgtcttcaggctccatgaagcaacagattacccttggaggcctgctcttaccccttttgaatttcagaagctcctaaacaacttgacctctatcaagatacgtgggacatacagtgagagaagtgctggatatttggatgatgtcaccctggcaagtgctcgtcctgggcctggagtccctgcaacttgggtggagtcctgcacctgtcctgtgggatatggagggcagttttgtgagatgtgcctctcaggttacagaagagaaactcctaatcttggaccatacagtccatgtgtgctttgcgcctgcaatggacacagcgagacctgtgatcctgagacaggtgtttgtaactgcagagacaatacggctggcccgcactgtgagaagtgcagtgatgggtactatggagattcaactgcaggcacctcctccgattgccaaccctgtccgtgtcctggaggttcaagttgtgctgttgttcccaagacaaaggaggtggtgtgcaccaactgtcctactggcaccactggtaagagatgtgagctctgtgatgatggctactttggagaccccctgggtagaaacggccctgtgagactttgccgcctgtgccagtgcagtgacaacatcgatcccaatgcagttggaaattgcaatcgcttgacgggagaatgcctgaagtgcatctataacactgctggcttctattgtgaccggtgcaaagacggattttttggaaatcccctggctcccaatccagcagacaaatgcaaagcctgcaattgcaatctgtatgggaccatgaagcagcagagcagctgtaaccccgtgacggggcagtgtgaatgtttgcctcacgtgactggccaggactgtggtgcttgtgaccctggattctacaatctgcagagtgggcaaggctgtgagaggtgtgactgccatgccttgggctccaccaatgggcagtgtgacatccgcaccggccagtgtgagtgccagcccggcatcactggtcagcactgtgagcgctgtgaggtcaaccactttgggtttggacctgaaggctgcaaaccctgtgactgtcatcctgagggatctctttcacttcagtgcaaagatgatggtcgctgtgaatgcagagaaggctttgtgggaaatcgctgtgaccagtgtgaagaaaactatttctacaatcggtcttggcctggctgccaggaatgtccagcttgttaccggctggtaaaggataaggttgctgatcatagagtgaagctccaggaattagagagtctcatagcaaaccttggaactggggatgagatggtgacagatcaagccttcgaggatagactaaaggaagcagagagggaagttatggacctccttcgtgaggcccaggatgtcaaagatgttgaccagaatttgatggatcgcctacagagagtgaataacactctgtccagccaaattagccgtttacagaatatccggaataccattgaagagactggaaacttggctgaacaagcgcgtgcccatgtagagaacacagagcggttgattgaaatcgcatccagagaacttgagaaagcaaaagtcgctgctgccaatgtgtcagtcactcagccagaatctacaggggacccaaacaacatgactcttttggcagaagaggctcgaaagcttgctgaacgtcataaacaggaagctgatgacattgttcgagtggcaaagacagccaatgatacgtcaactgaggcatacaacctgcttctgaggacactggcaggagaaaatcaaacagcatttgagattgaagagcttaataggaagtatgaacaagcgaagaacatctcacaggatctggaaaaacaagctgcccgagtacatgaggaggccaaaagggccggtgacaaagctgtggagatctatgccagcgtggctcagctgagccctttggactctgagacactggagaatgaagcaaataacataaagatggaagctgagaatctggaacaactgattgaccagaaattaaaagattatgaggacctcagagaagatatgagagggaaggaacttgaagtcaagaaccttctggagaaaggcaagactgaacagcagaccgcagaccaactcctagcccgagctgatgctgccaaggccctcgctgaagaagctgcaaagaagggacgggataccttacaagaagctaatgacattctcaacaacctgaaagattttgataggcgtgtgaacgataacaagacggccgcagaggaggcactaaggaagattcctgccatcaaccagaccatcactgaagccaatgaaaagaccagagaagcccagcaggccctgggcagtgctgcggcggatgccacagaggccaagaacaaggcccatgaggcggagaggatcgcgagcgctgtccaaaagaatgccaccagcaccaaggcagaagctgaaagaacttttgcagaagttacagatctggataatgaggtgaacaatatgttgaagcaactgcaggaagcagaaaaagagctaaagagaaaacaagatgacgctgaccaggacatgatgatggcagggatggcttcacaggctgctcaagaagccgagatcaatgccagaaaagccaaaaactctgttactagcctcctcagcattattaatgacctcttggagcagctggggcagctggatacagtggacctgaataagctaaacgagattgaaggcaccctaaacaaagccaaagatgaaatgaaggtcagcgatcttgataggaaagtgtctgacctggagaatgaagccaagaagcaggaggctgccatcatggactataaccgagatatcgaggagatcatgaaggacattcgcaatctggaggacatcaggaagaccttaccatctggctgcttcaacaccccgtccattgaaaagccctagtgtctttagggctggaaggcagcatccctctgacaggggggcagttgtgaggccacagagtgccttgacacaaagattacatttttcagacccccactcctctgctgctgtccatgactgtccttttgaaccaggaaaagtcacagagtttaaagagaagcaaattaaacatcctgaatcgggaacaaagggttttatctaataaagtgtctcttccattcacgttgctacctt

SEQ ID NO: 6832 - protein, 1609 aa, Homo sapiens; identical to SEQ ID NO: 6826

SEQ ID NO: 6833 - DNA, 382 bp, Homo sapiens
cctgcagcacagggctattgtcaaagttataggcgctgggccttccttccagggtagaaaaggccacgttgcccccagtgaggggagaaatgtcactgaattcatcagtacacaaggcctgctgctcgtcccctcctgtcctgatgaagccgcggtttgccttggagtaggtgttctcacaggaaccactgtatcggtcaggaaggctgccccgtgctgcaggtggggctgcccggcgtcgcacaggtgacaggacttggtgaccccggtcaccccggtctgcacacagtattcctcgggcggagtcccacacgtgttggtggccaccacagtcacgttgaaggcggcgttgacgaactcgggcatgcagcgctgcggccgc

SEQ ID NO: 6834 - protein, 82 aa, Homo sapiens
LQHRAIVKVIGAGPSFQGRKGHVAPSEGRNVTEFISTQGLLLVPSCPDEAAVCLGVGVLTGTTVSVRKAAPCCRWGCPASHR

SEQ ID NO: 6835 - DNA, 5883 bp, Homo sapiens
accacctgatcaaggaaaaggaaggcacagcggagcgcagagtgagaaccaccaaccgaggcgccgggcagcgacccctgcagcggagacagagactgagcggcccggccccgccatgcctgcgctctggctgggctgctgcctctgcttctcgctcctcctgcccgcagcccgggccacctccaggagggaagtctgtgattgcaatgggaagtccaggcagtgtatctttgatcgggaacttcacagacaaactggtaatggattccgctgcctcaactgcaatgacaacactgatggcattcactgcgagaagtgcaagaatggcttttaccggcacagagaaagggaccgctgtttgccctgcaattgtaactccaaaggttctcttagtgctcgatgtgacaactccggacggtgcagctgtaaaccaggtgtgacaggagccagatgcgaccgatgtctgccaggcttccacatgctcacggatgcggggtgcacccaagaccagagactgctagactccaagtgtgactgtgacccagctggcatcgcagggccctgtgacgcgggccgctgtgtctgcaagccagctgtcactggagaacgctgtgataggtgtcgatcaggttactataatctggatggggggaaccctgagggctgtacccagtgtttctgctatgggcattcagccagctgccgcagctctgcagaatacagtgtccataagatcacctctacctttcatcaagatgttgatggctggaaggctgtccaacgaaatgggtctcctgcaaagctccaatggtcacagcgccatcaagatgtgtttagctcagcccaacgactagaccctgtctattttgtggctcctgccaaatttcttgggaatcaacaggtgagctatggtcaaagcctgtcctttgactaccgtgtggacagaggaggcagacacccatctgcccatgatgtgattctggaaggtgctggtctacggatcacagctcccttgatgccacttggcaagacactgccttgtgggctcaccaagacttacacattcaggttaaatgagcatccaagcaataattggagcccccagctgagttactttgagtatcgaaggttactgcggaatctcacagccctccgcatccgagctacatatggagaatacagtactgggtacattgacaatgtgaccctgatttcagcccgccctgtctctggagccccagcaccctgggttgaacagtgtatatgtcctgttgggtacaaggggcaattctgccaggattgtgcttctggctacaagagagattcagcgagactggggccttttggcacctgtattccttgtaactgtcaagggggaggggcctgtgatccagacacaggagattgttattcaggggatgagaatcctgacattgagtgtgctgactgcccaattggtttctacaacgatccgcacgacccccgcagctgcaagccatgtccctgtcataacgggttcagctgctcagtgatgccggagacggaggaggtggtgtgcaataactgccctcccggggtcaccggtgcccgctgtgagctctgtgctgatggctactttggggacccctttggtgaacatggcccagtgaggccttgtcagccctgtcaatgcaacaacaatgtggaccccagtgcctctgggaattgtgaccggctgacaggcaggtgtttgaagtgtatccacaacacagccggcatctactgcgaccagtgcaaagcaggctacttcggggacccattggctcccaacccagcagacaagtgtcgagcttgcaactgtaaccccatgggctcagagcctgtaggatgtcgaagtgatggcacctgtgtttgcaagccaggatttggtggccccaactgtgagcatggagcattcagctgtccagcttgctataatcaagtgaagattcagatggatcagtttatgcagcagcttcagagaatggaggccctgatttcaaaggctcagggtggtgatggagtagtacctgatacagagctggaaggcaggatgcagcaggctgagcaggcccttcaggacattctgagagatgcccagatttcagaaggtgctagcagatcccttggtctccagttggccaaggtgaggagccaagagaacagctaccagagccgcctggatgacctcaagatgactgtggaaagagttcgggctctgggaagtcagtaccagaaccgagttcgggatactcacaggctcatcactcagatgcagctgagcctggcagaaagtgaagcttccttgggaaacactaacattcctgcctcagaccactacgtggggccaaatggctttaaaagtctggctcaggaggccacaagattagcagaaagccacgttgagtcagccagtaacatggagcaactgacaagggaaactgaggactattccaaacaagccctctcactggtgcgcaaggccctgcatgaaggagtcggaagcggaagcggtagcccggacggtgctgtggtgcaagggcttgtggaaaaattggagaaaaccaagtccctggcccagcagttgacaagggaggccactcaagcggaaattgaagcagataggtcttatcagcacagtctccgcctcctggattcagtgtctcggcttcagggagtcagtgatcagtcctttcaggtggaagaagcaaagaggatcaaacaaaaagcggattcactctcaagcctggtaaccaggcatatggatgagttcaagcgtacacagaagaatctgggaaactggaaagaagaagcacagcagctcttacagaatggaaaaagtgggagagagaaatcagatcagctgctttcccgtgccaatcttgctaaaagcagagcacaagaagcactgagtatgggcaatgccactttttatgaagttgagagcatccttaaaaacctcagagagtttgacctgcaggtggacaacagaaaagcagaagctgaagaagccatgaagagactctcctacatcagccagaaggtttcagatgccagtgacaagacccagcaagcagaaagagccctggggagcgctgctgctgatgcacagagggcaaagaatggggccggggaggccctggaaatctccagtgagattgaacaggagattgggagtctgaacttggaagccaatgtgacagcagatggagccttggccatggaaaagggactggcctctctgaagagtgagatgagggaagtggaaggagagctggaaaggaaggagctggagtttgacacgaatatggatgcagtacagatggtgattacagaagcccagaaggttgataccagagccaagaacgctggggttacaatccaagacacactcaacacattagacggcctcctgcatctgatgggtatgtgaacccacaacccacaaccttccagctccatgctccagggctttgctccagaacactcactatacctagccccagcaaaggggagtctcagctttccttaaggatatcagtaaatgtgctttgtttccaggcccagataactttcggcaggttcccttacatttactggaccctgttttaccgttgctaagatgggtcactgaacacctattgcacttgggggtaaaggtctgtgggccaaagaacaggtgtatataagcaacttcacagaacacgagacagcttgggaatcctgctaaagagtctggcctggaccctgagaagccagtggacagttttaagcagaggaataacatcaccactgtatatttcagaaagatcactagggcagccgagtggaggaaagcttgaagagggggttagagagaaggcaggttgagactacttaagatattgttgaaataattgaagagagaaatgacaggagcctgctctaaggcagtagaatggtggctgggaagatgtgaaggaagattttcccagtctgtgaagtcaagaatcacttgccggccgggtgtggtggctcacgcctgtaattctagcactttgggagactgaagcgggtggatcacccgaggtcaggagttgaagaccagcctggccaacatggtgaaaccctgtctctactaaaagtacaaaaattagctggatgtggtggtgggcgcctgtaattccagctactcaggagtctgaggcaggagaatcgcttgaacccaggaggcggaggttacagtgagccaagattgcaccactgctctccagcctggggaacagagcaagactgtctcaaaaaaaaaaaaaaaaggaaaaataaaaaagaatcacttgccgattttacatttgttcctccccaaaccaaagttataccttgatgtaaccagtgggaggaacttgagctgcttgggtaaataacccagaagaaatgtgatgagagtaggcctgtgagataattttaggaagatctgatggcacagcgtggaagaaaatcaggtttccctacagaatcgctcccaaaagaaaacttattttggttaaatttctggatttaggtagagctgatatcaaaccctcatttggtctgttttatcaagcttggactgcagcagatgtggaactagagattcgtcacagattccagtaacatttaggaaaatgtttggctctgctattccagttcagtagaacaacttcgaaactggatttttctgtagggtgtcatcatcaccctgagatgccaatgtcatctgtgttgttatagtcttgggtctgctttgtgatccaatgagcccaaaagagtaaaatgccctcaaaggattgagaaaaaaaaaaggaaaaaacaaaacaaaggaaaacaaaaccttcccaattgagactttagcagcgttgtttagtgttctaaaaaaaaaagaaaggcaatgaaactaatgagacctgtaaagagaatatgagagagtagggagagcagggtagatggaagctattaaacatttactatgtgtcagatgttttcatggtgtaatatcatttgtcttgtaaaagtcctctgtggtgggttttatcatttttattattttatttcatgaaggactgaactgaggctcagaggttaataatgccccacaggtcatgtagtaaattgtagaggcaggatccaaactgatatctttttgcctccaatgctcgtgttcttttctagtaactcatgccaccttcccatagacaaggttattttgttcccaagcttacttaacttcctctgcatgtcgtaaaatcctaaattcctaaattctccctgaccccaagtgaaagatccatttggatcaacatttttgttacagtgttgtttctactctgtgtgctctcttaagtcctggagcaatatgagattaattgttctaggtataataaactcatgcagtcaaatactatcacttcagctcacatatgtgaggcaacttgaccttgagttcgaattgaccaaggccactcaaacctatttgaactaaatgggtctggccaggtacccttcatactgacattagttttagatagtctaagggtaacacatgcttgaacaaacgtgattttattttaaattggaaataaaataacatctagtcagatgactgctgtttcaggctggaatgatgtctgacatcaatttctagcagctggaatccattccccaagtggcaaagcgtaccttggcctctataaccctgaagctcagccagtttcttaaggtcttctaatagaaaacagcaagatatttcttaagggtggttcagaaagcataatttggagttgattctaatcctagcagtgacctatgttaggcaaatgccttggatagtgctcagtcccctatgacctt

SEQ ID NO: 6836 - protein, 1111 aa, Homo sapiens
MPALWLGCCLCFSLLLPAARATSRREVCDCNGKSRQCIFDRELHRQTGNGFRCLNCNDNTDGIHCEKCKNGFYRHRERDRCLPCNCNSKGSLSARCDNSGRCSCKPGVTGARCDRCLPGFHMLTDAGCTQDQRLLDSKCDCDPAGIAGPCDAGRCVCKPAVTGERCDRCRSGYYNLDGGNPEGCTQCFCYGHSASCRSSAEYSVHKITSTFHQDVDGWKAVQRNGSPAKLQWSQRHQDVFSSAQRLDPVYFVAPAKFLGNQQVSYGQSLSFDYRVDRGGRHPSAHDVILEGAGLRITAPLMPLGKTLPCGLTKTYTFRLNEHPSNNWSPQLSYFEYRRLLRNLTALRIRATYGEYSTGYIDNVTLISARPVSGAPAPWVEQCICPVGYKGQFCQDCASGYKRDSARLGPFGTCIPCNCQGGGACDPDTGDCYSGDENPDIECADCPIGFYNDPHDPRSCKPCPCHNGFSCSVMPETEEVVCNNCPPGVTGARCELCADGYFGDPFGEHGPVRPCQPCQCNNNVDPSASGNCDRLTGRCLKCIHNTAGIYCDQCKAGYFGDPLAPNPADKCRACNCNPMGSEPVGCRSDGTCVCKPGFGGPNCEHGAFSCPACYNQVKIQMDQFMQQLQRMEALISKAQGGDGVVPDTELEGRMQQAEQALQDILRDAQISEGASRSLGLQLAKVRSQENSYQSRLDDLKMTVERVRALGSQYQNRVRDTHRLITQMQLSLAESEASLGNTNIPASDHYVGPNGFKSLAQEATRLAESHVESASNMEQLTRETEDYSKQALSLVRKALHEGVGSGSGSPDGAVVQGLVEKLEKTKSLAQQLTREATQAEIEADRSYQHSLRLLDSVSRLQGVSDQSFQVEEAKRIKQKADSLSSLVTRHMDEFKRTQKNLGNWKEEAQQLLQNGKSGREKSDQLLSRANLAKSRAQEALSMGNATFYEVESILKNLREFDLQVDNRKAEAEEAMKRLSYISQKVSDASDKTQQAERALGSAAADAQRAKNGAGEALEISSEIEQEIGSLNLEANVTADGALAMEKGLASLKSEMREVEGELERKELEFDTNMDAVQMVITEAQKVDTRAKNAGVTIQDTLNTLDGLLHLMGM

SEQ ID NO: 6837 - DNA, 5201 bp, Homo sapiens
accacctgatcaaggaaaaggaaggcacagcggagcgcagagtgagaaccaccaaccgaggcgccgggcagcgacccctgcagcggagacagagactgagcggcccggccccgccatgcctgcgctctggctgggctgctgcctctgcttctcgctcctcctgcccgcagcccgggccacctccaggagggaagtctgtgattgcaatgggaagtccaggcagtgtatctttgatcgggaacttcacagacaaactggtaatggattccgctgcctcaactgcaatgacaacactgatggcattcactgcgagaagtgcaagaatggcttttaccggcacagagaaagggaccgctgtttgccctgcaattgtaactccaaaggttctcttagtgctcgatgtgacaactccggacggtgcagctgtaaaccaggtgtgacaggagccagatgcgaccgatgtctgccaggcttccacatgctcacggatgcggggtgcacccaagaccagagactgctagactccaagtgtgactgtgacccagctggcatcgcagggccctgtgacgcgggccgctgtgtctgcaagccagctgtcactggagaacgctgtgataggtgtcgatcaggttactataatctggatggggggaaccctgagggctgtacccagtgtttctgctatgggcattcagccagctgccgcagctctgcagaatacagtgtccataagatcacctctacctttcatcaagatgttgatggctggaaggctgtccaacgaaatgggtctcctgcaaagctccaatggtcacagcgccatcaagatgtgtttagctcagcccaacgactagaccctgtctattttgtggctcctgccaaatttcttgggaatcaacaggtgagctatggtcaaagcctgtcctttgactaccgtgtggacagaggaggcagacacccatctgcccatgatgtgattctggaaggtgctggtctacggatcacagctcccttgatgccacttggcaagacactgccttgtgggctcaccaagacttacacattcaggttaaatgagcatccaagcaataattggagcccccagctgagttactttgagtatcgaaggttactgcggaatctcacagccctccgcatccgagctacatatggagaatacagtactgggtacattgacaatgtgaccctgatttcagcccgccctgtctctggagccccagcaccctgggttgaacagtgtatatgtcctgttgggtacaaggggcaattctgccaggattgtgcttctggctacaagagagattcagcgagactggggccttttggcacctgtattccttgtaactgtcaagggggaggggcctgtgatccagacacaggagattgttattcaggggatgagaatcctgacattgagtgtgctgactgcccaattggtttctacaacgatccgcacgacccccgcagctgcaagccatgtccctgtcataacgggttcagctgctcagtgatgccggagacggaggaggtggtgtgcaataactgccctcccggggtcaccggtgcccgctgtgagctctgtgctgatggctactttggggacccctttggtgaacatggcccagtgaggccttgtcagccctgtcaatgcaacaacaatgtggaccccagtgcctctgggaattgtgaccggctgacaggcaggtgtttgaagtgtatccacaacacagccggcatctactgcgaccagtgcaaagcaggctacttcggggacccattggctcccaacccagcagacaagtgtcgagcttgcaactgtaaccccatgggctcagagcctgtaggatgtcgaagtgatggcacctgtgtttgcaagccaggatttggtggccccaactgtgagcatggagcattcagctgtccagcttgctataatcaagtgaagattcagatggatcagtttatgcagcagcttcagagaatggaggccctgatttcaaaggctcagggtggtgatggagtagtacctgatacagagctggaaggcaggatgcagcaggctgagcaggcccttcaggacattctgagagatgcccagatttcagaaggtgctagcagatcccttggtctccagttggccaaggtgaggagccaagagaacagctaccagagccgcctggatgacctcaagatgactgtggaaagagttcgggctctgggaagtcagtaccagaaccgagttcgggatactcacaggctcatcactcagatgcagctgagcctggcagaaagtgaagcttccttgggaaacactaacattcctgcctcagaccactacgtggggccaaatggctttaaaagtctggctcaggaggccacaagattagcagaaagccacgttgagtcagccagtaacatggagcaactgacaagggaaactgaggactattccaaacaagccctctcactggtgcgcaaggccctgcatgaaggagtcggaagcggaagcggtagcccggacggtgctgtggtgcaagggcttgtggaaaaattggagaaaaccaagtccctggcccagcagttgacaagggaggccactcaagcggaaattgaagcagataggtcttatcagcacagtctccgcctcctggattcagtgtctcggcttcagggagtcagtgatcagtcctttcaggtggaagaagcaaagaggatcaaacaaaaagcggattcactctcaagcctggtaaccaggcatatggatgagttcaagcgtacacagaagaatctgggaaactggaaagaagaagcacagcagctcttacagaatggaaaaagtgggagagagaaatcagatcagctgctttcccgtgccaatcttgctaaaagcagagcacaagaagcactgagtatgggcaatgccactttttatgaagttgagagcatccttaaaaacctcagagagtttgacctgcaggtggacaacagaaaagcagaagctgaagaagccatgaagagactctcctacatcagccagaaggtttcagatgccagtgacaagacccagcaagcagaaagagccctggggagcgctgctgctgatgcacagagggcaaagaatggggccggggaggccctggaaatctccagtgagattgaacaggagattgggagtctgaacttggaagccaatgtgacagcagatggagccttggccatggaaaagggactggcctctctgaagagtgagatgagggaagtggaaggagagctggaaaggaaggagctggagtttgacacgaatatggatgcagtacagatggtgattacagaagcccagaaggttgataccagagccaagaacgctggggttacaatccaagacacactcaacacattagacggcctcctgcatctgatggaccagcctctcagtgtagatgaagaggggctggtcttactggagcagaagctttcccgagccaagacccagatcaacagccaactgcggcccatgatgtcagagctggaagagagggcacgtcagcagaggggccacctccatttgctggagacaagcatagatgggattctggctgatgtgaagaacttggagaacattagggacaacctgcccccaggctgctacaatacccaggctcttgagcaacagtgaagctgccataaatatttctcaactgaggttcttgggatacagatctcagggctcgggagccatgtcatgtgagtgggtgggatggggacatttgaacatgtttaatgggtatgctcaggtcaactgacctgaccccattcctgatcccatggccaggtggttgtcttattgcaccatactccttgcttcctgatgctgggcaatgaggcagatagcactgggtgtgagaatgatcaaggatctggaccccaaagaatagactggatggaaagacaaactgcacaggcagatgtttgcctcataatagtcgtaagtggagtcctggaatttggacaagtgctgttgggatatagtcaacttattctttgagtaatgtgactaaaggaaaaaactttgactttgcccaggcatgaaattcttcctaatgtcagaacagagtgcaacccagtcacactgtggccagtaaaatactattgcctcatattgtcctctgcaagcttcttgctgatcagagttcctcctacttacaacccagggtgtgaacatgttctccattttcaagctggaagaagtgagcagtgttggagtgaggacctgtaaggcaggcccattcagagctatggtgcttgctggtgcctgccaccttcaagttctggacctgggcatgacatcctttcttttaatgatgccatggcaacttagagattgcatttttattaaagcatttcctaccagcaaagcaaatgttgggaaagtatttactttttcggtttcaaagtgatagaaaagtgtggcttgggcattgaaagaggtaaaattctctagatttattagtcctaattcaatcctacttttcgaacaccaaaaatgatgcgcatcaatgtattttatcttattttctcaatctcctctctctttcctccacccataataagagaatgttcctactcacacttcagctgggtcacatccatccctccattcatccttccatccatctttccatccattacctccatccatccttccaacatatatttattgagtacctactgtgtgccaggggctggtgggacagtggtgacatagtctctgccctcatagagttgattgtctagtgaggaagacaagcatttttaaaaaataaatttaaacttacaaactttgtttgtcacaagtggtgtttattgcaataaccgcttggtttgcaacctctttgctcaacagaacatatgttgcaagaccctcccatgggggcacttgagttttggcaaggctgacagagctctgggttgtgcacatttctttgcattccagctgtcactctgtgcctttctacaactgattgcaacagactgttgagttatgataacaccagtgggaattgctggaggaaccagaggcacttccaccttggctgggaagactatggtgctgccttgcttctgtatttccttggattttcctgaaagtgtttttaaataaagaacaattgttagatgcc

SEQ ID NO: 6838 - protein, 1193 aa, Homo sapiens
MPALWLGCCLCFSLLLPAARATSRREVCDCNGKSRQCIFDRELHRQTGNGFRCLNCNDNTDGIHCEKCKNGFYRHRERDRCLPCNCNSKGSLSARCDNSGRCSCKPGVTGARCDRCLPGFHMLTDAGCTQDQRLLDSKCDCDPAGIAGPCDAGRCVCKPAVTGERCDRCRSGYYNLDGGNPEGCTQCFCYGHSASCRSSAEYSVHKITSTFHQDVDGWKAVQRNGSPAKLQWSQRHQDVFSSAQRLDPVYFVAPAKFLGNQQVSYGQSLSFDYRVDRGGRHPSAHDVILEGAGLRITAPLMPLGKTLPCGLTKTYTFRLNEHPSNNWSPQLSYFEYRRLLRNLTALRIRATYGEYSTGYIDNVTLISARPVSGAPAPWVEQCICPVGYKGQFCQDCASGYKRDSARLGPFGTCIPCNCQGGGACDPDTGDCYSGDENPDIECADCPIGFYNDPHDPRSCKPCPCHNGFSCSVMPETEEVVCNNCPPGVTGARCELCADGYFGDPFGEHGPVRPCQPCQCNNNVDPSASGNCDRLTGRCLKCIHNTAGIYCDQCKAGYFGDPLAPNPADKCRACNCNPMGSEPVGCRSDGTCVCKPGFGGPNCEHGAFSCPACYNQVKIQMDQFMQQLQRMEALISKAQGGDGVVPDTELEGRMQQAEQALQDILRDAQISEGASRSLGLQLAKVRSQENSYQSRLDDLKMTVERVRALGSQYQNRVRDTHRLITQMQLSLAESEASLGNTNIPASDHYVGPNGFKSLAQEATRLAESHVESASNMEQLTRETEDYSKQALSLVRKALHEGVGSGSGSPDGAVVQGLVEKLEKTKSLAQQLTREATQAEIEADRSYQHSLRLLDSVSRLQGVSDQSFQVEEAKRIKQKADSLSSLVTRHMDEFKRTQKNLGNWKEEAQQLLQNGKSGREKSDQLLSRANLAKSRAQEALSMGNATFYEVESILKNLREFDLQVDNRKAEAEEAMKRLSYISQKVSDASDKTQQAERALGSAAADAQRAKNGAGEALEISSEIEQEIGSLNLEANVTADGALAMEKGLASLKSEMREVEGELERKELEFDTNMDAVQMVITEAQKVDTRAKNAGVTIQDTLNTLDGLLHLMDQPLSVDEEGLVLLEQKLSRAKTQINSQLRPMMSELEERARQQRGHLHLLETSIDGILADVKNLENIRDNLPPGCYNTQALEQQ

SEQ ID NO: 6839 - DNA, 5656 bp, Homo sapiens
acagcggagcgcagagtgagaaccaccaaccgaggcgccgggcagcgacccctgcagcggagacagagactgagcggcccggccccgccatgcctgcgctctggctgggctgctgcctctgcttctcgctcctcctgcccgcagcccgggccacctccaggagggaagtctgtgattgcaatgggaagtccaggcagtgtatctttgatcgggaacttcacagacaaactggtaatggattccgctgcctcaactgcaatgacaacactgatggcattcactgcgagaagtgcaagaatggcttttaccggcacagagaaagggaccgctgtttgccctgcaattgtaactccaaaggttctcttagtgctcgatgtgacaactccggacggtgcagctgtaaaccaggtgtgacaggagccagatgcgaccgatgtctgccaggcttccacatgctcacggatgcggggtgcacccaagaccagagactgctagactccaagtgtgactgtgacccagctggcatcgcagggccctgtgacgcgggccgctgtgtctgcaagccagctgtcactggagaacgctgtgataggtgtcgatcaggttactataatctggatggggggaaccctgagggctgtacccagtgtttctgctatgggcattcagccagctgccgcagctctgcagaatacagtgtccataagatcacctctacctttcatcaagatgttgatggctggaaggctgtccaacgaaatgggtctcctgcaaagctccaatggtcacagcgccatcaagatgtgtttagctcagcccaacgactagaccctgtctattttgtggctcctgccaaatttcttgggaatcaacaggtgagctatggtcaaagcctgtcctttgactaccgtgtggacagaggaggcagacacccatctgcccatgatgtgattctggaaggtgctggtctacggatcacagctcccttgatgccacttggcaagacactgccttgtgggctcaccaagacttacacattcaggttaaatgagcatccaagcaataattggagcccccagctgagttactttgagtatcgaaggttactgcggaatctcacagccctccgcatccgagctacatatggagaatacagtactgggtacattgacaatgtgaccctgatttcagcccgccctgtctctggagccccagcaccctgggttgaacagtgtatatgtcctgttgggtacaaggggcaattctgccaggattgtgcttctggctacaagagagattcagcgagactggggccttttggcacctgtattccttgtaactgtcaagggggaggggcctgtgatccagacacaggagattgttattcaggggatgagaatcctgacattgagtgtgctgactgcccaattggtttctacaacgatccgcacgacccccgcagctgcaagccatgtccctgtcataacgggttcagctgctcagtgatgccggagacggaggaggtggtgtgcaataactgccctcccggggtcaccggtgcccgctgtgagctctgtgctgatggctactttggggacccctttggtgaacatggcccagtgaggccttgtcagccctgtcaatgcaacaacaatgtggaccccagtgcctctgggaattgtgaccggctgacaggcaggtgtttgaagtgtatccacaacacagccggcatctactgcgaccagtgcaaagcaggctacttcggggacccattggctcccaacccagcagacaagtgtcgagcttgcaactgtaaccccatgggctcagagcctgtaggatgtcgaagtgatggcacctgtgtttgcaagccaggatttggtggccccaactgtgagcatggagcattcagctgtccagcttgctataatcaagtgaagattcagatggatcagtttatgcagcagcttcagagaatggaggccctgatttcaaaggctcagggtggtgatggagtagtacctgatacagagctggaaggcaggatgcagcaggctgagcaggcccttcaggacattctgagagatgcccagatttcagaaggtgctagcagatcccttggtctccagttggccaaggtgaggagccaagagaacagctaccagagccgcctggatgacctcaagatgactgtggaaagagttcgggctctgggaagtcagtaccagaaccgagttcgggatactcacaggctcatcactcagatgcagctgagcctggcagaaagtgaagcttccttgggaaacactaacattcctgcctcagaccactacgtggggccaaatggctttaaaagtctggctcaggaggccacaagattagcagaaagccacgttgagtcagccagtaacatggagcaactgacaagggaaactgaggactattccaaacaagccctctcactggtgcgcaaggccctgcatgaaggagtcggaagcggaagcggtagcccggacggtgctgtggtgcaagggcttgtggaaaaattggagaaaaccaagtccctggcccagcagttgacaagggaggccactcaagcggaaattgaagcagataggtcttatcagcacagtctccgcctcctggattcagtgtctcggcttcagggagtcagtgatcagtcctttcaggtggaagaagcaaagaggatcaaacaaaaagcggattcactctcaagcctggtaaccaggcatatggatgagttcaagcgtacacagaagaatctgggaaactggaaagaagaagcacagcagctcttacagaatggaaaaagtgggagagagaaatcagatcagctgctttcccgtgccaatcttgctaaaagcagagcacaagaagcactgagtatgggcaatgccactttttatgaagttgagagcatccttaaaaacctcagagagtttgacctgcaggtggacaacagaaaagcagaagctgaagaagccatgaagagactctcctacatcagccagaaggtttcagatgccagtgacaagacccagcaagcagaaagagccctggggagcgctgctgctgatgcacagagggcaaagaatggggccggggaggccctggaaatctccagtgagattgaacaggagattgggagtctgaacttggaagccaatgtgacagcagatggagccttggccatggaaaagggactggcctctctgaagagtgagatgagggaagtggaaggagagctggaaaggaaggagctggagtttgacacgaatatggatgcagtacagatggtgattacagaagcccagaaggttgataccagagccaagaacgctggggttacaatccaagacacactcaacacattagacggcctcctgcatctgatggaccagcctctcagtgtagatgaagaggggctggtcttactggagcagaagctttcccgagccaagacccagatcaacagccaactgcggcccatgatgtcagagctggaagagagggcacgtcagcagaggggccacctccatttgctggagacaagcatagatgggattctggctgatgtgaagaacttggagaacattagggacaacctgcccccaggctgctacaatacccaggctcttgagcaacagtgaagctgccataaatatttctcaactgaggttcttgggatacagatctcagggctcgggagccatgtcatgtgagtgggtgggatggggacatttgaacatgtttaatgggtatgctcaggtcaactgacctgaccccattcctgatcccatggccaggtggttgtcttattgcaccatactccttgcttcctgatgctgggcaatgaggcagatagcactgggtgtgagaatgatcaaggatctggaccccaaagaatagactggatggaaagacaaactgcacaggcagatgtttgcctcataatagtcgtaagtggagtcctggaatttggacaagtgctgttgggatatagtcaacttattctttgagtaatgtgactaaaggaaaaaactttgactttgcccaggcatgaaattcttcctaatgtcagaacagagtgcaacccagtcacactgtggccagtaaaatactattgcctcatattgtcctctgcaagcttcttgctgatcagagttcctcctacttacaacccagggtgtgaacatgttctccattttcaagctggaagaagtgagcagtgttggagtgaggacctgtaaggcaggcccattcagagctatggtgcttgctggtgcctgccaccttcaagttctggacctgggcatgacatcctttcttttaatgatgccatggcaacttagagattgcatttttattaaagcatttcctaccagcaaagcaaatgttgggaaagtatttactttttcggtttcaaagtgatagaaaagtgtggcttgggcattgaaagaggtaaaattctctagatttattagtcctaattcaatcctacttttcgaacaccaaaaatgatgcgcatcaatgtattttatcttattttctcaatctcctctctctttcctccacccataataagagaatgttcctactcacacttcagctgggtcacatccatccctccattcatccttccatccatctttccatccattacctccatccatccttccaacatatatttattgagtacctactgtgtgccaggggctggtgggacagtggtgacatagtctctgccctcatagagttgattgtctagtgaggaagacaagcatttttaaaaaataaatttaaacttacaaactttgtttgtcacaagtggtgtttattgcaataaccgcttggtttgcaacctctttgctcaacagaacatatgttgcaagaccctcccatgggggcacttgagttttggcaaggctgacagagctctgggttgtgcacatttctttgcattccagctgtcactctgtgcctttctacaactgattgcaacagactgttgagttatgataacaccagtgggaattgctggaggaaccagaggcacttccaccttggctgggaagactatggtgctgccttgcttctgtatttccttggattttcctgaaagtgtttttaaataaagaacaattgttagatgcctggggtcagtttctgatttactaaactctaagcctatgatggtaccaaagtaatggaaatgaaaatgccacagaaatggcaataggtcctagagttagcatcttcagttcccacttctgagcatcttacttcgcccattccaaccatacaggattgatgatgctgtcaatgagatttttatgaggtttaactgatgctgtcttctaagcataaagctttatttctagaaaaactctagctgggtgggggggatatagttaatattcttatctttttcatcagctataaaatgaaggtaaaattaatagtttgtggtgcatatgtcatgctttttaagaagttaaaatgtactaaattaagatcttgaattggtcatctacgcaagcggctgaggaaacaattctgcttctgtccattgacccccagattctgataggtctggtcactttgctttaccttctgtgaaaatgaatttgtaatc

SEQ ID NO: 6840 - protein, 1193 aa, Homo sapiens; identical to SEQ ID NO: 6838

SEQ ID NO: 6841 - DNA, 848 bp, Homo sapiens
gatctcttttgaaatatactgttagtacaatcgatggttggcatcacaaattgaagattacggcagatgaaatacccatacgccttaagtgttataaattccaaccacaaagagtttctgaaaggaattgctactactaacatactctgcaagaaatcctgacttcaggattattattgttgcagatgtaattaaaatgaggttataataaattagagtaagcccttaactcaaaacaattggtgccattataagaggatgaccatgtgaagacacagacacacagaaaaaacaccatgtggtgactgaagcagagattggtgtaatgcaactacaagtcaacaagcaactatgattgacggccaccaccaaggctaggaagaggagagaaaaatatatatatctcaagaaagaaaaaatccagcacctacggcataatgtaaggagagaatgctccagcaaaatctaacttgcacaataaatctgttctgtcagatccttgaccggtatgtttatgttgacctctttccgtttgaagagagaggaaagaaactggtgttgatcaaaggttacagcagaataaaaaatatactgggacacgaaattgtgacatgtatttcccccaccagtcaggactctatgttcaatatttttatttcattatgcttacaaaagcaaatgaatgtccctttgtatttccttaagaatgaaaagatgaatgtttctttctttgcaagttccatggaagctaagaaccttaatactataaacattttaatgcttgataatggttctgtcttcaaaatgcaaaacgttttattctgacaaataaaaactctaaaaaaatg

SEQ ID NO: 6842 - protein, 124 aa, Homo sapiens
MLQQNLTCTINLFCQILDRYVYVDLFPFEERGKKLVLIKGYSRIKNILGHEIVTCISPTSQDSMFNIFISLCLQKQMNVPLYFLKNEKMNVSFFASSMEAKNLNTINILMLDNGSVFKMQNVLF

SEQ ID NO: 6843 - DNA, 815 bp, Homo sapiens
agaatgaagtgtcaatgaaccatgatatactggagccaaagcagaatttatttcatccggataaatctaagggctgtcgtctgtatcttaattgtgagtcaagtgaaggccactggctctcttcagactcacagttaacagtattgttgcagatgtaattaaaatgaggttataataaattagagtaagcccttaactcaaaacaattggtgccattataagaggatgaccatgtgaagacacagacacacagaaaaaacaccatgtggtgactgaagcagagattggtgtaatgcaactacaagtcaacaagcaactatgattgacggccaccaccaaggctaggaagaggagagaaaaatatatatatctcaagaaagaaaaaatccagcacctacggcataatgtaaggagagaatgctccagcaaaatctaacttgcacaataaatctgttctgtcagatccttgaccggtatgtttatgttgacctctttccgtttgaagagagaggaaagaaactggtgttgatcaaaggttacagcagaataaaaaatatactgggacacgaaattgtgacatgtatttcccccaccagtcaggactctatgttcaatatttttatttcattatgcttacaaaagcaaatgaatgtccctttgtatttccttaagaatgaaaagatgaatgtttctttctttgcaagttccatggaagctaagaaccttaatactataaacattttaatgcttgataatggttctgtcttcaaaatgcaaaacgttttattctgacaaataaaaactctaaaaaaatg

SEQ ID NO: 6844 - protein, 47 aa, Homo sapiens [sequence omitted]

SEQ ID NO: 6845 - DNA, 830 bp, Homo sapiens
aataaaatttctgtttgtaatcaacctaatataaattcaacacacaattaagatttaggaatgtgtaacaccccaaggctcttaattttcaaaagtcacaaaactatgtttactcaaatggtttgacattatttaaaaattggattctatcttattctcttgaggaaatttttgggtagttagaagttttgacataattaatttctgaatatttcacatttatctttcagattttcctgacatcaatgtatccttttgagtatattatcgtatctcttaacatttctgtttcatccttgacctgagacttttttttttttttttaatcttgagataattcttggctttgtcaaggctactggtgacaaaagcattagcaagcaggtgcagagtgctttttccaccaaagaagagacattgtactctttttggggttatattaatgactaattcacctctctgtcctcctcaatgccatctgtcttttgtttggtctccctgatgttagtcacgaagtctgcttagaaggatttatgtcttactttgatataggttctatactcaatgctagggaacaatcattggcaagatgtgtctcctttactcaaagaggttttaatggtctatgtttggaaaagagacatacagtcattagaatgcaatattgtgaaagttgacaagggaaattcttggggttatgggaatcttcaatatctttattgagaaatacagatatacacatttatcaaaactcataaaatgatgaatttgtagtattttattgtgtataaattatgcctcaataaaagttcattgtaatgtgctgaaag

SEQ ID NO: 6846 - protein, 52 aa, Homo sapiens [sequence omitted]

SEQ ID NO: 6847 - DNA, 8192 bp, Homo sapiens
ggagccgcggggcttccatccttcctttgactgatttttaaattttaatttgtattttccccgccgccccgccccttttcctccgaccccgccctatcgctccccggcttccctgctctttcctttttcccggcttccttcctcgcgtttctttcccctgcgccctcggcttgcctctctccctcctccctcgctctctcccccttctctccccttcttcctcggtttcttccgtcctctctctccccctcctcctcccccgcctcctcctcctgcgctcccgccccctgccccctccccccgtgcctgcagacgcgcggatcgtccatgcgctcctcgcgggcagaatgctgggcagcagcgtcaagagcgtgcagcccgaggtggagctgagcagcggcggcggcgacgagggcgcggacgaaccgcggggcgccggcaggaaggcggcagcggcggacggcagaggcatgctgcccaagcgcgccaaggcgcccggcggcggcggcggcatggccaaggccagcgcggctgagctgaaggtcttcaagtccggcagcgtggacagccgtgtccccggcgggccgcccgcctccaacctgcgcaagcagaagtcactcaccaacctctcttttctcacggactccgagaaaaagctgcagctttatgagcccgaatggagcgacgatatggccaaggcgcccaaaggcttaggcaaggtggggtccaagggccgtgaagctccgctgatgtccaagacgctgtccaagtcggagcactcgctcttccaggccaagggcagcccggcgggcggcgccaagacccccctggctccgctcgcgcccaacctgggaaagccgagccggatccctcgaggaccctatgcggaggtcaagccgctcagcaaggcgcctgaagcggccgtgagcgaagatggcaaatcggacgacgagctgctctccagcaaggccaaggcgcaaaagagctctgggcctgtcccctctgccaagggccaggaggagcgcgccttcctcaaggtggaccccgagctggtggtgaccgtgctgggagacctggagcagctgctcttcagccagatgctggacccagagtcccagagaaagaggacagtgcagaatgtcctggatctccggcagaacctggaagagaccatgtccagcctgcgagggtcccaggtgactcacagctccctggagatgacctgctacgacagcgatgatgccaacccacgcagcgtgtccagcctctccaaccgctcgtcccctctgtcatggcgctatggccagtccagtccgcggctgcaggctggtgacgcgccctctgtgggtgggagctgccgctcggaggggacgcccgcctggtacatgcacggcgaacgggcccactactcccacaccatgcccatgcgcagccccagcaagctcagccatatctcccgcctggagctggtcgaatccctggactcggatgaggtggacctcaagtccggctacatgagcgacagtgacctcatgggcaagaccatgacggaggatgatgacatcactaccggctgggatgaaagcagctccatcagtagtggactcagcgatgcctcagacaatctcagttcagaagaattcaatgccagctcctcactcaactccctcccaagtactcccactgcttctcgcaggaactcaacaatagtgctacgcacagactcagagaagcgctcactggcagaaagtgggctgagctggtttagtgaatcagaggagaaagcccctaaaaaactggagtacgacagtggtagcctgaagatggaacctgggacttctaagtggcggagggagcggcctgagagctgtgatgattcatccaagggtggagaactgaaaaagcccatcagcctgggccaccctggttccctgaagaagggcaagaccccacctgtggctgtaacttcccccatcactcacacagcccagagtgccctcaaagtcgcaggcaaacctgagggcaaagctacagacaagggtaagcttgcagtgaagaatactgggctccaacgctcctcctctgatgctggtcgggaccgcctgagtgatgctaagaagcccccctcgggcattgctcgcccctccacttcgggatcctttggctacaagaagcctcctcctgccacaggcacagccactgtcatgcaaactggtggttcagccactctcagcaagatccagaagtcctcaggcatccctgtcaagccagtaaatgggcgcaagactagcttagatgtttccaacagtgcagagccaggattcctggctcctggagcccgttctaacatccagtaccgcagcctgccccggccagccaagtcaagttctatgagcgtgaccggcgggcggggtggacctcgccctgtgagcagcagcattgaccccagtctcctcagcaccaagcagggaggccttacgccttccagactgaaggagcctaccaaggtagccagtgggcggaccactccagcccctgtcaatcagacagatcgggaaaaggagaaggccaaagccaaggcagtggccttggactcagacaacatctccttgaagagtattggctccccagaaagtactcccaagaaccaagcaagccaccccacagccaccaagctggcagagctgccaccaacccctctcagggccacagcgaagagctttgtcaaaccaccctcactagccaatcttgacaaggtcaactccaacagtctggatctaccatcatccagtgataccacccatgcttcaaaggtcccagatctgcatgctacaagctcagcatctgggggccctctcccttcctgcttcacccccagtccggcacccatcctcaatattaactcagccagcttctcccagggcctggagctaatgagtggtttcagtgtgccaaaagagacccgcatgtaccccaaactctcaggcctgcacaggagcatggagtccctccagatgccaatgagcctccccagtgccttccccagcagtactcccgtccccaccccacctgctccccctgctgctcccacagaagaagagacggaagagctgacttggagtggaagccccagagctgggcaactggacagtaatcagcgggatcggaacactcttcccaagaaagggctcaggtaccagcttcagtcccaggaggagaccaaggagaggcgacattcccataccattggtgggctgcctgaatccgatgaccagtcagagctgccttctccccctgcacttcccatgtctctgagtgcaaagggccaacttaccaacatagtgagtcccactgcggccaccacgccaagaatcacccgctccaacagcatccccacccacgaggcggccttcgagctgtacagcggctcccaaatggggagcaccctgtccctggccgagagacccaagggaatgattcggtcaggatccttccgagaccccacggacgatgttcacggctcagtgctgtccctggcctccagtgcctcctccacctactcctcagctgaggagaggatgcaatctgagcaaatccggaagcttcgtagggaactggaatcatcccaggaaaaagtggccaccttgacgtctcagctttctgccaatgctaatctggtggctgcttttgagcagagcctggtgaatatgacatcccgcctgcgacacctggcagagacggccgaggagaaggacactgagctgctggatttgcgagaaaccatagactttctgaagaaaaagaactctgaggcccaggcagtcattcagggagcccttaatgcctcagaaaccacacccaaagaacttcggatcaagagacaaaactcctcagatagcatctcaagcctcaacagcatcactagccattccagcatcggcagcagcaaggatgctgatgcgaaaaagaagaaaaaaaagagttggcttcgaagttccttcaacaaagcgttcagtataaaaaaggggcccaagtcagcttcctcatactcggatatagaggagattgctacacccgactcttcagccccctcatcccccaaactacagcatggttctacagagactgcttcaccctccatcaagtcctccacctcgtcctccgtgggcactgatgtcaccgagggccctgctcacccagccccccacactaggctgttccatgcaaatgaggaggaggagccagagaagaaggaggtatcggagctgcgctctgagctatgggagaaggaaatgaagcttacagacatccgcttggaggccctcaactctgcccaccaactggatcagcttcgggagaccatgcacaacatgcagttggaggtggacctgctgaaagcagagaatgaccgactgaaggtagccccaggcccctcatcaggctccactccagggcaggtccctggatcatctgcattatcttccccacgccgctccctaggcctggcactcacccattccttcggccccagtcttgcagacacagacctgtcacccatggatggcatcagtacttgtggtccaaaggaggaagtgaccctccgggtggtggtgaggatgcccccgcagcacatcatcaaaggggacttgaagcagcaggaattcttcctgggctgtagcaaggtcagtggaaaagttgactggaagatgctggatgaagctgttttccaagtgttcaaggactatatttctaaaatggacccagcctctaccctgggactaagcactgagtccatccatggctacagcatcagccacgtgaaacgagtgttggatgcagagccccccgagatgcctccttgccgtcgaggtgtcaataacatatcagtctccctcaaaggtctgaaggagaaatgcgtcgacagcctggtgttcgagacgctgatccccaagccgatgatgcagcactacataagcctcctgctgaagcaccggcgcctcgtcctctcgggccccagcggcacgggcaagacctacctgaccaatcgcttggccgagtacctggtggagcgctctggccgtgaggtcacagagggcatcgtcagcaccttcaacatgcaccagcagtcttgcaaggatctgcaactgtatctttccaacctagccaaccagatagaccgggaaacaggaattggggatgtgcccctggtgattctattggatgacctgagtgaagcaggctccatcagtgagttggtcaatggggccctcacctgcaagtatcataaatgtccctatattataggtaccaccaatcagcctgtaaaaatgacacccaaccatggcttgcacttgagcttcaggatgttgaccttctccaacaacgtggagccagccaatggcttcctggttcgttacctgaggaggaagctggtagagtcagacagcgacatcaatgccaacaaggaagagctgcttcgggtgctcgactgggtacccaagctgtggtatcatctccacaccttccttgagaagcacagcacctcagacttcctcatcggcccttgcttctttctgtcgtgtcccattggcattgaggacttccggacctggttcattgacctgtggaacaactctatcattccctatctacaggaaggagccaaggatgggataaaggtccatggacagaaagctgcttgggaggacccagtggaatgggtccgggacacacttccctggccatcagcccaacaagaccaatcaaagctgtaccacctgcccccacccaccgtgggccctcacagcattgcctcacctcccgaggataggacagtcaaagacagcaccccaagttctctggactcagatcctctgatggccatgctgctgaaacttcaagaagctgccaactacattgagtctccagatcgagaaaccatcctggaccccaaccttcaggcaacactttaagggttcggcaatcactgtcacccccggacagcagaacgctggcatcagctatcttagctcctcctctcccctctcctctttcagagcactggctctccagccccaggaggagaacaggagggaggaggagatgaaagaggagggacaggttcttggtgctgtacctttgagaacttcctaggaaggaatggtggggtggcgtttgggaacttgtgccccctaaacacatttactggcctcctctaatgactttggggaaaagatgattctgggtctttcccttgacttcttgtttcaattacaaactcctgggctttctggggaggggttcagaaaacatcaaaacactgcagcagttcctaaatgattctcacaagcaaccctgagagagacagtcttgtgagggagatctgggggaggcaggaagctcctcagattttctcacagacccttcccaattccatcaccactgccaacaactcctcccccagagatctggctggagcccagaaaaagaagcatgtggtttaaaaaatgtttaaatcaatctgtaaaaggtaaaaatgaaaaacaaaaacaagcaaacaaacaaaaaacaatggaaaagatgaagctggagagagaggaaccagttgccaaggtagagagctgcccgctcctgccctctggatgacataggggacatcaacaagacggctgccaacctgagaagtcaccaaaccacaaaaataaccttacagccttcagggaaagactaccagctctgtctttctaccctctaatttaacaatgcataagagtcaataaaccctacttttttatttttggtttttattttgttttcatttttttctcccatttgcctatttatttttttgtttcccttttttttttctttttccgtttttccatttcctcacatgtccacgagatgcttgggttgcttttccaggggctagtttggcttttccaagtgggttttctttggagaatctgatgccatgcaattggcatgacacctgccatgccactatctttggcatccatggggcttatatgagacatgaagcattggctcagaagtagagggagaagaggaacccagttcccttgacttcccttttgagagcacacgttctgctgggtagctcaattgccagcctctgtcatgagaaggtatagccccatcttgatagaagagttactccgagctttatcatggaccagaggaaaaccagaaaactgaaaacattcctctgtcttgtggccagtttggcctttcactgcactattctgatggtgcctgactgaatccaaatatcctagctggctcttactatttttcacaaatgagtattcacatataagagatgaacatccatgtgagatcatcccaatcagaatataagactcaaggagtttgacttggtggccaatacctgccttccaaagagatcctacctttgcagatttgctcctttcccattgccttgaaggtctggcaatccctgttctttcatttgacaagtacttactgagtactcactatatacaaatcattaggttaaaacagacacacacacacacacacacacacacacacacacacacacacacacaagacctgggcccttaagtttacagtccagcaggaaatgttaacctccattcagctacgcccccttgttatctagaccttcgggatcatctaagaaatgtagctgaaacccaaggagccagctagaaagaagcttttgattagatgtacaatacattgggggcagaagatctgggatcaattaagatggagcctgaaggactatggaatcttgcttgtcaggaatgggcaagtctacttcctgccatttctgaaagccccgcgggaccagcttctaggctgagctgcctagtaggctgaagcttcaggactctgcaggtcaaggatatgtgatgagcaccggcctaagtgtttgctcttcagattcctaagtagcacaagactttatcagaatctataggcataccaacctggatcactcttccacccaaccgaggagtagatgcatctgaatcttcatatcggtatattaagtccaaaagatggtccgggctgcccctcacaaaagcttctgcatccacgtggtaagctcccatggatgacagggttctgtatgatggagactattattgctattgctgctaattccatgagctgtgaag

SEQ ID NO: 6848 - protein, 1874 aa, Homo sapiens; identical to SEQ ID NO: 366

SEQ ID NO: 6849 - DNA, 6336 bp, Homo sapiens
catgctgcccaagcgcgccaaggcgcccggcggcggcggcggcatggccaaggccagcgcggctgagctgaaggtcttcaagtccggcagcgtggacagccgtgtccccggcgggccgcccgcctccaacctgcgcaagcagaagtcactcaccaacctctcttttctcacggactccgagaaaaagctgcagctttatgagcccgaatggagcgacgatatggccaaggcgcccaaaggcttaggcaaggtggggtccaagggccgtgaagctccgctgatgtccaagacgctgtccaagtcggagcactcgctcttccaggccaagggcagcccggcgggcggcgccaagacccccctggctccgctcgcgcccaacctgggaaagccgagccggatccctcgaggaccctatgcggaggtcaagccgctcagcaaggcgcctgaagcggccgtgagcgaagatggcaaatcggacgacgagctgctctccagcaaggccaaggcgcaaaagagctctgggcctgtcccctctgccaagggccaggaggagcgcgccttcctcaaggtggaccccgagctggtggtgaccgtgctgggagacctggagcagctgctcttcagccagatgctggacccagagtcccagagaaagaggacagtgcagaatgtcctggatctccggcagaacctggaagagaccatgtccagcctgcgagggtcccaggtgactcacagctccctggagatgacctgctacgacagcgatgatgccaacccacgcagcgtgtccagcctctccaaccgctcgtcccctctgtcatggcgctatggccagtccagtccgcggctgcaggctggtgacgcgccctctgtgggtgggagctgccgctcggaggggacgcccgcctggtacatgcacggcgaacgggcccactactcccacaccatgcccatgcgcagccccagcaagctcagccatatctcccgcctggagctggtcgaatccctggactcggatgaggtggacctcaagtccggctacatgagcgacagtgacctcatgggcaagaccatgacggaggatgatgacatcactaccggctgggatgaaagcagctccatcagtagtggactcagcgatgcctcagacaatctcagttcagaagaattcaatgccagctcctcactcaactccctcccaagtactcccactgcttctcgcaggaactcaacaatagtgctacgcacagactcagagaagcgctcactggcagaaagtgggctgagctggtttagtgaatcagaggagaaagcccctaaaaaactggagtacgacagtggtagcctgaagatggaacctgggacttctaagtggcggagggagcggcctgagagctgtgatgattcatccaagggtggagaactgaaaaagcccatcagcctgggccaccctggttccctgaagaagggcaagaccccacctgtggctgtaacttcccccatcactcacacagcccagagtgccctcaaagtcgcaggcaaacctgagggcaaagctacagacaagggtaagcttgcagtgaagaatactgggctccaacgctcctcctctgatgctggtcgggaccgcctgagtgatgctaagaagcccccctcgggcattgctcgcccctccacttcgggatcctttggctacaagaagcctcctcctgccacaggcacagccactgtcatgcaaactggtggttcagccactctcagcaagatccagaagtcctcaggcatccctgtcaagccagtaaatgggcgcaagactagcttagatgtttccaacagtgcagagccaggattcctggctcctggagcccgttctaacatccagtaccgcagcctgccccggccagccaagtcaagttctatgagcgtgaccggcgggcggggtggacctcgccctgtgagcagcagcattgaccccagtctcctcagcaccaagcagggaggccttacgccttccagactgaaggagcctaccaaggtagccagtgggcggaccactccagcccctgtcaatcagacagatcgggaaaaggagaaggccaaagccaaggcagtggccttggactcagacaacatctccttgaagagtattggctccccagaaagtactcccaagaaccaagcaagccaccccacagccaccaagctggcagagctgccaccaacccctctcagggccacagcgaagagctttgtcaaaccaccctcactagccaatcttgacaaggtcaactccaacagtctggatctaccatcatccagtgataccacccatgcttcaaaggtcccagatctgcatgctacaagctcagcatctgggggccctctcccttcctgcttcacccccagtccggcacccatcctcaatattaactcagccagcttctcccagggcctggagctaatgagtggtttcagtgtgccaaaagagacccgcatgtaccccaaactctcaggcctgcacaggagcatggagtccctccagatgccaatgagcctccccagtgccttccccagcagtactcccgtccccaccccacctgctccccctgctgctcccacagaagaagagacggaagagctgacttggagtggaagccccagagctgggcaactggacagtaatcagcgggatcggaacactcttcccaagaaagggctcaggtaccagcttcagtcccaggaggagaccaaggagaggcgacattcccataccattggtgggctgcctgaatccgatgaccagtcagagctgccttctccccctgcacttcccatgtctctgagtgcaaagggccaacttaccaacatagtgagtcccactgcggccaccacgccaagaatcacccgctccaacagcatccccacccacgaggcggccttcgagctgtacagcggctcccaaatggggagcaccctgtccctggccgagagacccaagggaatgattcggtcaggatccttccgagaccccacggacgatgttcacggctcagtgctgtccctggcctccagtgcctcctccacctactcctcagctgaggagaggatgcaatctgagcaaatccggaagcttcgtagggaactggaatcatcccaggaaaaagtggccaccttgacgtctcagctttctgccaatgctaatctggtggctgcttttgagcagagcctggtgaatatgacatcccgcctgcgacacctggcagagacggccgaggagaaggacactgagctgctggatttgcgagaaaccatagactttctgaagaaaaagaactctgaggcccaggcagtcattcagggagcccttaatgcctcagaaaccacacccaaagaacttcggatcaagagacaaaactcctcagatagcatctcaagcctcaacagcatcactagccattccagcatcggcagcagcaaggatgctgatgcgaaaaagaagaaaaaaaagagttggcttcgaagttccttcaacaaagcgttcagtataaaaaaggggcccaagtcagcttcctcatactcggatatagaggagattgctacacccgactcttcagccccctcatcccccaaactacagcatggttctacagagactgcttcaccctccatcaagtcctccacctcgtcctccgtgggcactgatgtcaccgagggccctgctcacccagccccccacactaggctgttccatgcaaatgaggaggaggagccagagaagaaggaggtatcggagctgcgctctgagctatgggagaaggaaatgaagcttacagacatccgcttggaggccctcaactctgcccaccaactggatcagcttcgggagaccatgcacaacatgcagttggaggtggacctgctgaaagcagagaatgaccgactgaaggtagccccaggcccctcatcaggctccactccagggcaggtccctggatcatctgcattatcttccccacgccgctccctaggcctggcactcacccattccttcggccccagtcttgcagacacagacctgtcacccatggatggcatcagtacttgtggtccaaaggaggaagtgaccctccgggtggtggtgaggatgcccccgcagcacatcatcaaaggggacttgaagcagcaggaattcttcctgggctgtagcaaggtcagtggaaaagttgactggaagatgctggatgaagctgttttccaagtgttcaaggactatatttctaaaatggacccagcctctaccctgggactaagcactgagtccatccatggctacagcatcagccacgtgaaacgagtgttggatgcagagccccccgagatgcctccttgccgtcgaggtgtcaataacatatcagtctccctcaaaggtctgaaggagaaatgcgtcgacagcctggtgttcgagacgctgatccccaagccgatgatgcagcactacataagcctcctgctgaagcaccggcgcctcgtcctctcgggccccagcggcacgggcaagacctacctgaccaatcgcttggccgagtacctggtggagcgctctggccgtgaggtcacagagggcatcgtcagcaccttcaacatgcaccagcagtcttgcaaggatctgcaactgtatctttccaacctagccaaccagatagaccgggaaacaggaattggggatgtgcccctggtgattctattggatgacctgagtgaagcaggctccatcagtgagttggtcaatggggccctcacctgcaagtatcataaatgtccctatattataggtaccaccaatcagcctgtaaaaatgacacccaaccatggcttgcacttgagcttcaggatgttgaccttctccaacaacgtggagccagccaatggcttcctggttcgttacctgaggaggaagctggtagagtcagacagcgacatcaatgccaacaaggaagagctgcttcgggtgctcgactgggtacccaagctgtggtatcatctccacaccttccttgagaagcacagcacctcagacttcctcatcggcccttgcttctttctgtcgtgtcccattggcattgaggacttccggacctggttcattgacctgtggaacaactctatcattccctatctacaggaaggagccaaggatgggataaaggtccatggacagaaagctgcttgggaggacccagtggaatgggtccgggacacacttccctggccatcagcccaacaagaccaatcaaagctgtaccacctgcccccacccaccgtgggccctcacagcattgcctcacctcccgaggataggacagtcaaagacagcaccccaagttctctggactcagatcctctgatggccatgctgctgaaacttcaagaagctgccaactacattgagtctccagatcgagaaaccatcctggaccccaaccttcaggcaacactttaagggttcggcaatcactgtcacccccggacagcagaacgctggcatcagctatcttagctcctcctctcccctctcctctttcagagcactggctctccagccccaggaggagaacaggagggaggaggagatgaaagaggagggacaggttcttggtgctgtacctttgagaacttcctaggaaggaatggtggggtggcgtttgggaacttgtgccccctaaacacatttactggcctcctctaatgactttggggaaaagatgattctgggtctttcccttgacttcttgtttcaattacaaactcctgggctttctggggaggggttcagaaaacatcaaaacactgcagcagttcctaaatgattctcacaagcaaccctgagagagacagtcttgtgagggagatctgggggaggcaggaagctcctcagattttctcacagacccttcccaattccatcaccactgccaacaactcctcccccagagatctggctggagcccagaaaaagaagcatgtggtttaaaaaatgtttaaatcaatctgtaaaaggtaaaaatgaaaaacaaaaacaagcaaacaaacaaaaaacaatggaaaagatgaagctggagagagaggaaccagttgccaaggtagagagctgcccgctcctgccctctggatgacataggggacatcaacaagacggctgccaacctgagaagtcaccaaaccacaaaaataaccttacagccttcagggaaagactaccagctctgtctttctaccctctaatttaacaatgcataagagtcaataaaccctacttttttatttttggttttt

SEQ ID NO: 6850 - protein, 1833 aa, Homo sapiens
MLPKRAKAPGGGGGMAKASAAELKVFKSGSVDSRVPGGPPASNLRKQKSLTNLSFLTDSEKKLQLYEPEWSDDMAKAPKGLGKVGSKGREAPLMSKTLSKSEHSLFQAKGSPAGGAKTPLAPLAPNLGKPSRIPRGPYAEVKPLSKAPEAAVSEDGKSDDELLSSKAKAQKSSGPVPSAKGQEERAFLKVDPELVVTVLGDLEQLLFSQMLDPESQRKRTVQNVLDLRQNLEETMSSLRGSQVTHSSLEMTCYDSDDANPRSVSSLSNRSSPLSWRYGQSSPRLQAGDAPSVGGSCRSEGTPAWYMHGERAHYSHTMPMRSPSKLSHISRLELVESLDSDEVDLKSGYMSDSDLMGKTMTEDDDITTGWDESSSISSGLSDASDNLSSEEFNASSSLNSLPSTPTASRRNSTIVLRTDSEKRSLAESGLSWFSESEEKAPKKLEYDSGSLKMEPGTSKWRRERPESCDDSSKGGELKKPISLGHPGSLKKGKTPPVAVTSPITHTAQSALKVAGKPEGKATDKGKLAVKNTGLQRSSSDAGRDRLSDAKKPPSGIARPSTSGSFGYKKPPPATGTATVMQTGGSATLSKIQKSSGIPVKPVNGRKTSLDVSNSAEPGFLAPGARSNIQYRSLPRPAKSSSMSVTGGRGGPRPVSSSIDPSLLSTKQGGLTPSRLKEPTKVASGRTTPAPVNQTDREKEKAKAKAVALDSDNISLKSIGSPESTPKNQASHPTATKLAELPPTPLRATAKSFVKPPSLANLDKVNSNSLDLPSSSDTTHASKVPDLHATSSASGGPLPSCFTPSPAPILNINSASFSQGLELMSGFSVPKETRMYPKLSGLHRSMESLQMPMSLPSAFPSSTPVPTPPAPPAAPTEEETEELTWSGSPRAGQLDSNQRDRNTLPKKGLRYQLQSQEETKERRHSHTIGGLPESDDQSELPSPPALPMSLSAKGQLTNIVSPTAATTPRITRSNSIPTHEAAFELYSGSQMGSTLSLAERPKGMIRSGSFRDPTDDVHGSVLSLASSASSTYSSAEERMQSEQIRKLRRELESSQEKVATLTSQLSANANLVAAFEQSLVNMTSRLRHLAETAEEKDTELLDLRETIDFLKKKNSEAQAVIQGALNASETTPKELRIKRQNSSDSISSLNSITSHSSIGSSKDADAKKKKKKSWLRSSFNKAFSIKKGPKSASSYSDIEEIATPDSSAPSSPKLQHGSTETASPSIKSSTSSSVGTDVTEGPAHPAPHTRLFHANEEEEPEKKEVSELRSELWEKEMKLTDIRLEALNSAHQLDQLRETMHNMQLEVDLLKAENDRLKVAPGPSSGSTPGQVPGSSALSSPRRSLGLALTHSFGPSLADTDLSPMDGISTCGPKEEVTLRVVVRMPPQHIIKGDLKQQEFFLGCSKVSGKVDWKMLDEAVFQVFKDYISKMDPASTLGLSTESIHGYSISHVKRVLDAEPPEMPPCRRGVNNISVSLKGLKEKCVDSLVFETLIPKPMMQHYISLLLKHRRLVLSGPSGTGKTYLTNRLAEYLVERSGREVTEGIVSTFNMHQQSCKDLQLYLSNLANQIDRETGIGDVPLVILLDDLSEAGSISELVNGALTCKYHKCPYIIGTTNQPVKMTPNHGLHLSFRMLTFSNNVEPANGFLVRYLRRKLVESDSDINANKEELLRVLDWVPKLWYHLHTFLEKHSTSDFLIGPCFFLSCPIGIEDFRTWFIDLWNNSIIPYLQEGAKDGIKVHGQKAAWEDPVEWVRDTLPWPSAQQDQSKLYHLPPPTVGPHSIASPPEDRTVKDSTPSSLDSDPLMAMLLKLQEAANYIESPDRETILDPNLQATL

SEQ ID NO: 6851 - DNA, 8192 bp, Homo sapiens
catgctgcccaagcgcgccaaggcgcccggcggcggcggcggcatggccaaggccagcgcggctgagctgaaggtcttcaagtccggcagcgtggacagccgtgtccccggcgggccgcccgcctccaacctgcgcaagcagaagtcactcaccaacctctcttttctcacggactccgagaaaaagctgcagctttatgagcccgaatggagcgacgatatggccaaggcgcccaaaggcttaggcaaggtggggtccaagggccgtgaagctccgctgatgtccaagacgctgtccaagtcggagcactcgctcttccaggccaagggcagcccggcgggcggcgccaagacccccctggctccgctcgcgcccaacctgggaaagccgagccggatccctcgaggaccctatgcggaggtcaagccgctcagcaaggcgcctgaagcggccgtgagcgaagatggcaaatcggacgacgagctgctctccagcaaggccaaggcgcaaaagagctctgggcctgtcccctctgccaagggccaggaggagcgcgccttcctcaaggtggaccccgagctggtggtgaccgtgctgggagacctggagcagctgctcttcagccagatgctggacccagagtcccagagaaagaggacagtgcagaatgtcctggatctccggcagaacctggaagagaccatgtccagcctgcgagggtcccaggtgactcacagctccctggagatgacctgctacgacagcgatgatgccaacccacgcagcgtgtccagcctctccaaccgctcgtcccctctgtcatggcgctatggccagtccagtccgcggctgcaggctggtgacgcgccctctgtgggtgggagctgccgctcggaggggacgcccgcctggtacatgcacggcgaacgggcccactactcccacaccatgcccatgcgcagccccagcaagctcagccatatctcccgcctggagctggtcgaatccctggactcggatgaggtggacctcaagtccggctacatgagcgacagtgacctcatgggcaagaccatgacggaggatgatgacatcactaccggctgggatgaaagcagctccatcagtagtggactcagcgatgcctcagacaatctcagttcagaagaattcaatgccagctcctcactcaactccctcccaagtactcccactgcttctcgcaggaactcaacaatagtgctacgcacagactcagagaagcgctcactggcagaaagtgggctgagctggtttagtgaatcagaggagaaagcccctaaaaaactggagtacgacagtggtagcctgaagatggaacctgggacttctaagtggcggagggagcggcctgagagctgtgatgattcatccaagggtggagaactgaaaaagcccatcagcctgggccaccctggttccctgaagaagggcaagaccccacctgtggctgtaacttcccccatcactcacacagcccagagtgccctcaaagtcgcaggcaaacctgagggcaaagctacagacaagggtaagcttgcagtgaagaatactgggctccaacgctcctcctctgatgctggtcgggaccgcctgagtgatgctaagaagcccccctcgggcattgctcgcccctccacttcgggatcctttggctacaagaagcctcctcctgccacaggcacagccactgtcatgcaaactggtggttcagccactctcagcaagatccagaagtcctcaggcatccctgtcaagccagtaaatgggcgcaagactagcttagatgtttccaacagtgcagagccaggattcctggctcctggagcccgttctaacatccagtaccgcagcctgccccggccagccaagtcaagttctatgagcgtgaccggcgggcggggtggacctcgccctgtgagcagcagcattgaccccagtctcctcagcaccaagcagggaggccttacgccttccagactgaaggagcctaccaaggtagccagtgggcggaccactccagcccctgtcaatcagacagatcgggaaaaggagaaggccaaagccaaggcagtggccttggactcagacaacatctccttgaagagtattggctccccagaaagtactcccaagaaccaagcaagccaccccacagccaccaagctggcagagctgccaccaacccctctcagggccacagcgaagagctttgtcaaaccaccctcactagccaatcttgacaaggtcaactccaacagtctggatctaccatcatccagtgataccacccatgcttcaaaggtcccagatctgcatgctacaagctcagcatctgggggccctctcccttcctgcttcacccccagtccggcacccatcctcaatattaactcagccagcttctcccagggcctggagctaatgagtggtttcagtgtgccaaaagagacccgcatgtaccccaaactctcaggcctgcacaggagcatggagtccctccagatgccaatgagcctccccagtgccttccccagcagtactcccgtccccaccccacctgctccccctgctgctcccacagaagaagagacggaagagctgacttggagtggaagccccagagctgggcaactggacagtaatcagcgggatcggaacactcttcccaagaaagggctcaggtaccagcttcagtcccaggaggagaccaaggagaggcgacattcccataccattggtgggctgcctgaatccgatgaccagtcagagctgccttctccccctgcacttcccatgtctctgagtgcaaagggccaacttaccaacatagtgagtcccactgcggccaccacgccaagaatcacccgctccaacagcatccccacccacgaggcggccttcgagctgtacagcggctcccaaatggggagcaccctgtccctggccgagagacccaagggaatgattcggtcaggatccttccgagaccccacggacgatgttcacggctcagtgctgtccctggcctccagtgcctcctccacctactcctcagctgaggagaggatgcaatctgagcaaatccggaagcttcgtagggaactggaatcatcccaggaaaaagtggccaccttgacgtctcagctttctgccaatgctaatctggtggctgcttttgagcagagcctggtgaatatgacatcccgcctgcgacacctggcagagacggccgaggagaaggacactgagctgctggatttgcgagaaaccatagactttctgaagaaaaagaactctgaggcccaggcagtcattcagggagcccttaatgcctcagaaaccacacccaaagaacttcggatcaagagacaaaactcctcagatagcatctcaagcctcaacagcatcactagccattccagcatcggcagcagcaaggatgctgatgcgaaaaagaagaaaaaaaagagttggcttcgaagttccttcaacaaagcgttcagtataaaaaaggggcccaagtcagcttcctcatactcggatatagaggagattgctacacccgactcttcagccccctcatcccccaaactacagcatggttctacagagactgcttcaccctccatcaagtcctccacctcgtcctccgtgggcactgatgtcaccgagggccctgctcacccagccccccacactaggctgttccatgcaaatgaggaggaggagccagagaagaaggaggtatcggagctgcgctctgagctatgggagaaggaaatgaagcttacagacatccgcttggaggccctcaactctgcccaccaactggatcagcttcgggagaccatgcacaacatgcagttggaggtggacctgctgaaagcagagaatgaccgactgaaggtagccccaggcccctcatcaggctccactccagggcaggtccctggatcatctgcattatcttccccacgccgctccctaggcctggcactcacccattccttcggccccagtcttgcagacacagacctgtcacccatggatggcatcagtacttgtggtccaaaggaggaagtgaccctccgggtggtggtgaggatgcccccgcagcacatcatcaaaggggacttgaagcagcaggaattcttcctgggctgtagcaaggtcagtggaaaagttgactggaagatgctggatgaagctgttttccaagtgttcaaggactatatttctaaaatggacccagcctctaccctgggactaagcactgagtccatccatggctacagcatcagccacgtgaaacgagtgttggatgcagagccccccgagatgcctccttgccgtcgaggtgtcaataacatatcagtctccctcaaaggtctgaaggagaaatgcgtcgacagcctggtgttcgagacgctgatccccaagccgatgatgcagcactacataagcctcctgctgaagcaccggcgcctcgtcctctcgggccccagcggcacgggcaagacctacctgaccaatcgcttggccgagtacctggtggagcgctctggccgtgaggtcacagagggcatcgtcagcaccttcaacatgcaccagcagtcttgcaaggatctgcaactgtatctttccaacctagccaaccagatagaccgggaaacaggaattggggatgtgcccctggtgattctattggatgacctgagtgaagcaggctccatcagtgagttggtcaatggggccctcacctgcaagtatcataaatgtccctatattataggtaccaccaatcagcctgtaaaaatgacacccaaccatggcttgcacttgagcttcaggatgttgaccttctccaacaacgtggagccagccaatggcttcctggttcgttacctgaggaggaagctggtagagtcagacagcgacatcaatgccaacaaggaagagctgcttcgggtgctcgactgggtacccaagctgtggtatcatctccacaccttccttgagaagcacagcacctcagacttcctcatcggcccttgcttctttctgtcgtgtcccattggcattgaggacttccggacctggttcattgacctgtggaacaactctatcattccctatctacaggaaggagccaaggatgggataaaggtccatggacagaaagctgcttgggaggacccagtggaatgggtccgggacacacttccctggccatcagcccaacaagaccaatcaaagctgtaccacctgcccccacccaccgtgggccctcacagcattgcctcacctcccgaggataggacagtcaaagacagcaccccaagttctctggactcagatcctctgatggccatgctgctgaaacttcaagaagctgccaactacattgagtctccagatcgagaaaccatcctggaccccaaccttcaggcaacactttaagggttcggcaatcactgtcacccccggacagcagaacgctggcatcagctatcttagctcctcctctcccctctcctctttcagagcactggctctccagccccaggaggagaacaggagggaggaggagatgaaagaggagggacaggttcttggtgctgtacctttgagaacttcctaggaaggaatggtggggtggcgtttgggaacttgtgccccctaaacacatttactggcctcctctaatgactttggggaaaagatgattctgggtctttcccttgacttcttgtttcaattacaaactcctgggctttctggggaggggttcagaaaacatcaaaacactgcagcagttcctaaatgattctcacaagcaaccctgagagagacagtcttgtgagggagatctgggggaggcaggaagctcctcagattttctcacagacccttcccaattccatcaccactgccaacaactcctcccccagagatctggctggagcccagaaaaagaagcatgtggtttaaaaaatgtttaaatcaatctgtaaaaggtaaaaatgaaaaacaaaaacaagcaaacaaacaaaaaacaatggaaaagatgaagctggagagagaggaaccagttgccaaggtagagagctgcccgctcctgccctctggatgacataggggacatcaacaagacggctgccaacctgagaagtcaccaaaccacaaaaataaccttacagccttcagggaaagactaccagctctgtctttctaccctctaatttaacaatgcataagagtcaataaaccctacttttttatttttggtttttattttgttttcatttttttctcccatttgcctatttatttttttgtttcccttttttttttctttttccgtttttccatttcctcacatgtccacgagatgcttgggttgcttttccaggggctagtttggcttttccaagtgggttttctttggagaatctgatgccatgcaattggcatgacacctgccatgccactatctttggcatccatggggcttatatgagacatgaagcattggctcagaagtagagggagaagaggaacccagttcccttgacttcccttttgagagcacacgttctgctgggtagctcaattgccagcctctgtcatgagaaggtatagccccatcttgatagaagagttactccgagctttatcatggaccagaggaaaaccagaaaactgaaaacattcctctgtcttgtggccagtttggcctttcactgcactattctgatggtgcctgactgaatccaaatatcctagctggctcttactatttttcacaaatgagtattcacatataagagatgaacatccatgtgagatcatcccaatcagaatataagactcaaggagtttgacttggtggccaatacctgccttccaaagagatcctacctttgcagatttgctcctttcccattgccttgaaggtctggcaatccctgttctttcatttgacaagtacttactgagtactcactatatacaaatcattaggttaaaacagacacacacacacacacacacacacacacacacacacacacacacacaagacctgggcccttaagtttacagtccagcaggaaatgttaacctccattcagctacgcccccttgttatctagaccttcgggatcatctaagaaatgtagctgaaacccaaggagccagctagaaagaagcttttgattagatgtacaatacattgggggcagaagatctgggatcaattaagatggagcctgaaggactatggaatcttgcttgtcaggaatgggcaagtctacttcctgccatttctgaaagccccgcgggaccagcttctaggctgagctgcctagtaggctgaagcttcaggactctgcaggtcaaggatatgtgatgagcaccggcctaagtgtttgctcttcagattcctaagtagcacaagactttatcagaatctataggcataccaacctggatcactcttccacccaaccgaggagtagatgcatctgaatcttcatatcggtatattaagtccaaaagatggtccgggctgcccctcacaaaagcttctgcatccacgtggtaagctcccatggatgacagggttctgtatgatggagactattattgctattgctgctaattccatgagctgtgaagatccctaaccaactcagctgtaacatatgcaattctgtggtgggaagaggctgtgtgtccaaggatggtgctgaaatcactgccttaaggtctctgctgtgcagaatgaggaggcccccgagctggctgttctaacttagaaggaagagaagactggatgggcctgcttgggatctaggcctcttctaaaccctatcctaagctccagttccatggcaaggctcagacttttaatgccatcttaatctgatggttgagcgcttcactctattttctggtgctgcccagccagtgccttctgccatggatgttactggctacttgagaaaaaggagaggggagaaccccttctttcattccaactgcctccgaccccaaagggattcttggctctctggtaaccatggataccaccatgaattttatttggatcctcagcaggttgattctggaggcctcatgctatgac

SEQ ID NO: 6852 - protein, 1833 aa, Homo sapiens; identical to SEQ ID NO: 6850

SEQ ID NO: 6853 - DNA, 839 bp, Homo sapiens
ttcaggcgcgcctctcctctctcggactttcacaaccaccagcgacatcaatctctcgcttcctgctccacttctcggcgcccacatctccaactggctcaggctccccatgtccccagccggtacggagctgcggtcagcggattgtgcggctgagccatcctcgtgacggtcccgcctcactcaccctccgtcacctccagcaccttaatctgttcttcagcagccgcccgcacctcctgtactggggataggatcccggtgagcgtatccactaacgcttcctttaatccttgtgccactggacccggcagcccggaggccgcaccagctgccgccgccgccgccatcttttctcccctcagcccgccagccccgcggccgggacccgccaccgaatgacggcccccgcgcgcggccaatccgcgaagccgcgcctgcgcaccagaggcgggcgggagcgggcggagggcggggaatgaatctaagcctccagagacagcgcctcctgctgcctgaacgagaactgcacctttctctgcaaggatctctggatttgtgtgaaaactgagccccagacaggttaaggggctttcctaaagttgcacaaatggcttctactcaccagaggatctgagtccagagaacttggggtgctgtctttgactgtcctatcctcgggagattcttcaaaacatcccattttccccaggaagttctccttgattccatgggagtagggagaccacaagctgtgcagattcacgtccctcctgggaagaggtttacctggtccataagcactaacctgccatggtctactctgctccagtgccacc

SEQ ID NO: 6854 - protein, 35 aa, Homo sapiens
MGVGRPQAVQIHVPPGKRFTWSISTNLPWSTLLQC

SEQ ID NO: 6855 - DNA, 1809 bp, Homo sapiens
ataaagagaacaagtctcagccagtagctcagctcaggggagaggctctcagctgagtccccactgaacattctggggtatagggtctctaaatcacctccttcttgggattgattcctgagctgccagaacccaacagaaggcaagtttcctgctataagttcctctttccttcttgatgaggacggacacttcagagccaaagaggaaacgaatcccatctgttctgagcccccaagcacagttcaagaggacaggctggggagtggaggaaggggcggtgaagagaaaaataagaagactggaacatccagccacacacggagggcaggaagccacctgatgagagagccagggtgtggcagaagtcgccaaggaatccttctgttcccgacacacgcctacagcactcgctcaagatggagcctgctgactctgtctaaggccctgtggcccttggcataggtttcaggacagcagtcctgtcagggctgtggacctcacacctctatgtaatgtgaagggcaccctctggagttgtgggacttggcagtagtgttactgcactggcctgcaagtccccatccattactgccacccagctcagacacagctcacccattcacatacacaaaaatggacacattgagagggaaacccacattaaagtagggagaagatggagggccctctgacctcctcccatcaggcacgtgtgcctcctctactcagtgcctgcatccacctctgtatgggtacccatcctctattcccctcccactccaatggatgccagggatggaaggacagatggctgtgaaacttatcttcttatttagattaaattccagactttcctatttttagaaaaacaaattccttttgtatttccaagtggtaaaaatggcccgagctgtcatctaggacagtcagcagccaactcaaagttgtctgcagtgtcatgatttggatattaccctggcgagactacttctagtgtcaagcgggtgatcagtctaggtgccaaattttaagagggtcattgacgtcctgagagcttccagaggagggtgaccaggacaatgaaaggttcgaaaaactgggtcattgaaaaaagtactgaaataagctagggactttttctttttctttttggtctagagaatatttgagctatattaagaacatgttgaaatatttggatgaagagttacacccttattctatttttcccagatgacagaatttgaatcaataggtagaagttacagcgaaacagatttcagttgaatatttagaaactttcttataacttaattctgtatgatatggaataagcttcccatcactgtgcctatgcaagccaaggatgaaagactgtctgtcagggatactgtagataagattattgtactagataggaacatggactagtctaaaattactgagaagctttagaaaaatgtggctttctgggtagcagagattctgcattggtaagtctgaggcttagaatttgtatttccaaaaaaccccatcagctataaaactctcagaagaaaacgtaggggaaaagctgcatggcgttagattttgcagtgatttcttagatatgacactcaaagcatagccaacaaaagaaaaaaacagataaaatggatttcatctaaataaaaagcttttgtgcatcaaaggatacatctacagaatgaaaaggaaacccaatacacagaatgaaagaaaatatctccaaatcatacatgtgataaaaggttcatatctagcatatataaagaactcttaacactc

SEQ ID NO: 6856 - protein, 54 aa, Homo sapiens
MRTDTSEPKRKRIPSVLSPQAQFKRTGWGVEEGAVKRKIRRLEHPATHGGQEAT

SEQ ID NO: 6857 - DNA, 2035 bp, Homo sapiens
gtgaattagacattcttcccccctccaatttacaagtgaagaaattggaactcagattaactggcttgggaggatcatataactcaaagtggccccaccagaacagaacccaggcctctgcctctgacattctgggcacgttccagtgcacctactgcctcaccatgtgctccttgaagcctttccctctgtgtgcagcccttgtgtccctgaagcctgtgagcatgacaggggcagggatcacaggccttccactggagtaggagtttcccaaggacagagactctgtcttctctctctctgtttcccctcgacacctagcaatgtaggttctcaggccatgctgtcgactgaccaatgaatcattgttagagaccccctcctggaatgcccttacatgacctctccatcttccaggatagagtcttgctttggggagccacaaagtggccacagtcaggaattctggtccaagggcagaaggagcaacccaagcctctgtgaatacaagtccttgtttgactccagctcaaaggctgagctgtcccaggatgttcatgaggggccagctctggcctctgggctatcagatgtctctggccaggcagtaaaaggccattcactgcagctgaagaaaggccagcaggccaggcagagggacttacctacggaagtgttcagggttgggggtccaaagatgctgaaggactgaatggtggtcatctatatatcagtgtgacgatggaacaagcacaggaaaaggcataaaagtatagatttgcaaagcaggccagaggaaagagtcaggcccatagagaccgaaagcacatagctacattggaggcagatcgacactcactgaatatgcagggcaggatcacggagagacaaggtaggagaggctgacacgggggcatgtgcggtagaaaaacagagtcagcacgttcgtgatgtgcacaccaagcagtggaaatgagagacagacagatactgtgtgagacccatccaaacgtgtgtgagaggtggctggatacaaagaggctgtgtgtgcacaagatcgactgtttgaggacacaggcccgccgatgtgcagggggtgtgcggcaaccagacaggcacagagagtgtctgagaggtggagggacccctccagagaaacaagagtgaccttgtgctcagcctgagggttggggagtgacccagagcagggcgagtatattctcaccagcctaccccccttctcctttggccagctcctactaaaaggggtctgtgtcgtaccttgtctctttcttgtggggcatctccagcttgggagacaggaacaaagctctgacctagtccctgccctctttgactgctcaccctcttccagcccctctacccagcctcaatctctcattcttcctctactttgaagtctggcttctgtcttggcccctgtgggtttgatgacaaagggcagttcaggaatgacactatctacacatacatggccatatggacaatttcaggtggtgggacttgcagcagctggggttcccaggactgctgacattctgctgagtgttattagaagatcagggacagagcttatcatctggctgtcactgcccctttccaagccacagcgagcctccacagaggggccctgggggatagccagctgccctgtgctcatgctggagtgaactttcctctgatcttccctgttttctggatttagccagggaaaatacaagggagctccttgctccctgtgtgaggttccaactgagagatcccacccttcccagctctgatcagatacccctgaagtttggaaggcaacagctatacaatctctctctctcttttttttttttccagcctgggtgacagagcgagactccttctcaaaaaagaaaaaagaaagtaatggcagtgctcgctttggcagcacatatactaaaattggaacaatacagagaagattagcatgtgcaaggatgacacccaaatctgtgaagccttctatatttaaaatatatatatt

SEQ ID NO: 6858 - protein, 104 aa, Homo sapiens [sequence omitted]

SEQ ID NO: 6859 - DNA, 5441 bp, Homo sapiens
ggagaaaagggagcggagggcaggcgagggttaggtttccgaccctccgcgtggcccacagctcataccttttcgggtgtccccgggtgtcaggcgagagcggtcctggggggcgctgggtgcccacccggtgaatggccgcctgagccggggaagatgcttcatctgcccctgcccagatccggaagaacggtgaatttcccccgcagctgggatgaaagcagctccatcagtagtggactcagcgatgcctcagacaatctcagttcagaagaattcaatgccagctcctcactcaactccctcccaagtactcccactgcttctcgcaggaactcaacaatagtgctacgcacagactcagagaagcgctcactggcagaaagtgggctgagctggtttagtgaatcagaggagaaagcccctaaaaaactggagtacgacagtggtagcctgaagatggaacctgggacttctaagtggcggagggagcggcctgagagctgtgatgattcatccaagggtggagaactgaaaaagcccatcagcctgggccaccctggttccctgaagaagggcaagaccccacctgtggctgtaacttcccccatcactcacacagcccagagtgccctcaaagtcgcaggcaaacctgagggcaaagctacagacaagggtaagcttgcagtgaagaatactgggctccaacgctcctcctctgatgctggtcgggaccgcctgagtgatgctaagaagcccccctcgggcattgctcgcccctccacttcgggatcctttggctacaagaagcctcctcctgccacaggcacagccactgtcatgcaaactggtggttcagccactctcagcaagatccagaagtcctcaggcatccctgtcaagccagtaaatgggcgcaagactagcttagatgtttccaacagtgcagagccaggattcctggctcctggagcccgttctaacatccagtaccgcagcctgccccggccagccaagtcaagttctatgagcgtgaccggcgggcggggtggacctcgccctgtgagcagcagcattgaccccagtctcctcagcaccaagcagggaggccttacgccttccagactgaaggagcctaccaaggtagccagtgggcggaccactccagcccctgtcaatcagacagatcgggaaaaggagaaggccaaagccaaggcagtggccttggactcagacaacatctccttgaagagtattggctccccagaaagtactcccaagaaccaagcaagccaccccacagccaccaagctggcagagctgccaccaacccctctcagggccacagcgaagagctttgtcaaaccaccctcactagccaatcttgacaaggtcaactccaacagtctggatctaccatcatccagtgataccacccatgcttcaaaggtcccagatctgcatgctacaagctcagcatctgggggccctctcccttcctgcttcacccccagtccggcacccatcctcaatattaactcagccagcttctcccagggcctggagctaatgagtggtttcagtgtgccaaaagagacccgcatgtaccccaaactctcaggcctgcacaggagcatggagtccctccagatgccaatgagcctccccagtgccttccccagcagtactcccgtccccaccccacctgctccccctgctgctcccacagaagaagagacggaagagctgacttggagtggaagccccagagctgggcaactggacagtaatcagcgggatcggaacactcttcccaagaaagggctcaggtaccagcttcagtcccaggaggagaccaaggagaggcgacattcccataccattggtgggctgcctgaatccgatgaccagtcagagctgccttctccccctgcacttcccatgtctctgagtgcaaagggccaacttaccaacatagtgagtcccactgcggccaccacgccaagaatcacccgctccaacagcatccccacccacgaggcggccttcgagctgtacagcggctcccaaatggggagcaccctgtccctggccgagagacccaagggaatgattcggtcaggatccttccgagaccccacggacgatgttcacggctcagtgctgtccctggcctccagtgcctcctccacctactcctcagctgaggagaggatgcaatctgagcaaatccggaagcttcgtagggaactggaatcatcccaggaaaaagtggccaccttgacgtctcagctttctgccaatgctaatctggtggctgcttttgagcagagcctggtgaatatgacatcccgcctgcgacacctggcagagacggccgaggagaaggacactgagctgctggatttgcgagaaaccatagactttctgaagaaaaagaactctgaggcccaggcagtcattcagggagcccttaatgcctcagaaaccacacccaaagaacttcggatcaagagacaaaactcctcagatagcatctcaagcctcaacagcatcactagccattccagcatcggcagcagcaaggatgctgatgcgaaaaagaagaaaaaaaagagttggcttcgaagttccttcaacaaagcgttcagtataaaaaaggggcccaagtcagcttcctcatactcggatatagaggagattgctacacccgactcttcagccccctcatcccccaaactacagcatggttctacagagactgcttcaccctccatcaagtcctccacctcgtcctccgtgggcactgatgtcaccgagggccctgctcacccagccccccacactaggctgttccatgcaaatgaggaggaggagccagagaagaaggaggtatcggagctgcgctctgagctatgggagaaggaaatgaagcttacagacatccgcttggaggccctcaactctgcccaccaactggatcagcttcgggagaccatgcacaacatgcagttggaggtggacctgctgaaagcagagaatgaccgactgaaggtagccccaggcccctcatcaggctccactccagggcaggtccctggatcatctgcattatcttccccacgccgctccctaggcctggcactcacccattccttcggccccagtcttgcagacacagacctgtcacccatggatggcatcagtacttgtggtccaaaggaggaagtgaccctccgggtggtggtgaggatgcccccgcagcacatcatcaaaggggacttgaagcagcaggaattcttcctgggctgtagcaaggtcagtggaaaagttgactggaagatgctggatgaagctgttttccaagtgttcaaggactatatttctaaaatggacccagcctctaccctgggactaagcactgagtccatccatggctacagcatcagccacgtgaaacgagtgttggatgcagagccccccgagatgcctccttgccgtcgaggtgtcaataacatatcagtctccctcaaaggtctgaaggagaaatgcgtcgacagcctggtgttcgagacgctgatccccaagccgatgatgcagcactacataagcctcctgctgaagcaccggcgcctcgtcctctcgggccccagcggcacgggcaagacctacctgaccaatcgcttggccgagtacctggtggagcgctctggccgtgaggtcacagagggcatcgtcagcaccttcaacatgcaccagcagtcttgcaaggatctgcaactgtatctttccaacctagccaaccagatagaccgggaaacaggaattggggatgtgcccctggtgattctattggatgacctgagtgaagcaggctccatcagtgagttggtcaatggggccctcacctgcaagtatcataaatgtccctatattataggtaccaccaatcagcctgtaaaaatgacacccaaccatggcttgcacttgagcttcaggatgttgaccttctccaacaacgtggagccagccaatggcttcctggttcgttacctgaggaggaagctggtagagtcagacagcgacatcaatgccaacaaggaagagctgcttcgggtgctcgactgggtacccaagctgtggtatcatctccacaccttccttgagaagcacagcacctcagacttcctcatcggcccttgcttctttctgtcgtgtcccattggcattgaggacttccggacctggttcattgacctgtggaacaactctatcattccctatctacaggaaggagccaaggatgggataaaggtccatggacagaaagctgcttgggaggacccagtggaatgggtccgggacacacttccctggccatcagcccaacaagaccaatcaaagctgtaccacctgcccccacccaccgtgggccctcacagcattgcctcacctcccgaggataggacagtcaaagacagcaccccaagttctctggactcagatcctctgatggccatgctgctgaaacttcaagaagctgccaactacattgagtctccagatcgagaaaccatcctggaccccaaccttcaggcaacactttaagggttcggcaatcactgtcacccccggacagcagaacgctggcatcagctatcttagctcctcctctcccctctcctctttcagagcactggctctccagccccaggaggagaacaggagggaggaggagatgaaagaggagggacaggttcttggtgctgtacctttgagaacttcctaggaaggaatggtggggtggcgtttgggaacttgtgccccctaaacacatttactggcctcctctaatgactttggggaaaagatgattctgggtctttcccttgacttcttgtttcaattacaaactcctgggctttctggggaggggttcagaaaacatcaaaacactgcagcagttcctaaatgattctcacaagcaaccctgagagagacagtcttgtgagggagatctgggggaggcaggaagctcctcagattttctcacagacccttcccaattccatcaccactgccaacaactcctcccccagagatctggctggagcccagaaaaagaagcatgtggtttaaaaaatgtttaaatcaatctgtaaaaggtaaaaatgaaaaacaaaaacaagcaaacaaacaaaaaacaatggaaaagatgaagctggagagagaggaaccagttgccaaggtagagagctgcccgctcctgccctctggatgacataggggacatcaacaagacggctgccaacctgagaagtcaccaaaccacaaaaataaccttacagccttcagggaaagactaccagctctgtctttctaccctctaatttaacaatgcataagagtcaataaaccctacttttttatttttggttttt

SEQ ID NO: 6860 - protein, 1483 aa, Homo sapiens
MLHLPLPRSGRTVNFPRSWDESSSISSGLSDASDNLSSEEFNASSSLNSLPSTPTASRRNSTIVLRTDSEKRSLAESGLSWFSESEEKAPKKLEYDSGSLKMEPGTSKWRRERPESCDDSSKGGELKKPISLGHPGSLKKGKTPPVAVTSPITHTAQSALKVAGKPEGKATDKGKLAVKNTGLQRSSSDAGRDRLSDAKKPPSGIARPSTSGSFGYKKPPPATGTATVMQTGGSATLSKIQKSSGIPVKPVNGRKTSLDVSNSAEPGFLAPGARSNIQYRSLPRPAKSSSMSVTGGRGGPRPVSSSIDPSLLSTKQGGLTPSRLKEPTKVASGRTTPAPVNQTDREKEKAKAKAVALDSDNISLKSIGSPESTPKNQASHPTATKLAELPPTPLRATAKSFVKPPSLANLDKVNSNSLDLPSSSDTTHASKVPDLHATSSASGGPLPSCFTPSPAPILNINSASFSQGLELMSGFSVPKETRMYPKLSGLHRSMESLQMPMSLPSAFPSSTPVPTPPAPPAAPTEEETEELTWSGSPRAGQLDSNQRDRNTLPKKGLRYQLQSQEETKERRHSHTIGGLPESDDQSELPSPPALPMSLSAKGQLTNIVSPTAATTPRITRSNSIPTHEAAFELYSGSQMGSTLSLAERPKGMIRSGSFRDPTDDVHGSVLSLASSASSTYSSAEERMQSEQIRKLRRELESSQEKVATLTSQLSANANLVAAFEQSLVNMTSRLRHLAETAEEKDTELLDLRETIDFLKKKNSEAQAVIQGALNASETTPKELRIKRQNSSDSISSLNSITSHSSIGSSKDADAKKKKKKSWLRSSFNKAFSIKKGPKSASSYSDIEEIATPDSSAPSSPKLQHGSTETASPSIKSSTSSSVGTDVTEGPAHPAPHTRLFHANEEEEPEKKEVSELRSELWEKEMKLTDIRLEALNSAHQLDQLRETMHNMQLEVDLLKAENDRLKVAPGPSSGSTPGQVPGSSALSSPRRSLGLALTHSFGPSLADTDLSPMDGISTCGPKEEVTLRVVVRMPPQHIIKGDLKQQEFFLGCSKVSGKVDWKMLDEAVFQVFKDYISKMDPASTLGLSTESIHGYSISHVKRVLDAEPPEMPPCRRGVNNISVSLKGLKEKCVDSLVFETLIPKPMMQHYISLLLKHRRLVLSGPSGTGKTYLTNRLAEYLVERSGREVTEGIVSTFNMHQQSCKDLQLYLSNLANQIDRETGIGDVPLVILLDDLSEAGSISELVNGALTCKYHKCPYIIGTTNQPVKMTPNHGLHLSFRMLTFSNNVEPANGFLVRYLRRKLVESDSDINANKEELLRVLDWVPKLWYHLHTFLEKHSTSDFLIGPCFFLSCPIGIEDFRTWFIDLWNNSIIPYLQEGAKDGIKVHGQKAAWEDPVEWVRDTLPWPSAQQDQSKLYHLPPPTVGPHSIASPPEDRTVKDSTPSSLDSDPLMAMLLKLQEAANYIESPDRETILDPNLQATL

SEQ ID NO: 6861 - DNA, 2800 bp, Homo sapiens
ggggaatctagatctagtaagacttcttcaaaatcctgatttccaaggccgatccagctgcttattcccaagtgctgacccacagccttcttttattccaggatctgcaactgtatctttccaacctagccaaccagatagaccgggaaacaggaattggggatgtgcccctggtgattctattggatgacctgagtgaagcaggctccatcagtgagttggtcaatggggccctcacctgcaagtatcataaatggtaagtaagctgggatcaagacaaaattcatcgaagtgggaggagggagaacccagtccaggacaacctatgagttgtgtgcatgtggcagaaagcaagtgtgaaggcaagtctaagtgaatctttttcccctttctccctacagtccctatattataggtaccaccaatcagcctgtaaaaatgacacccaaccatggcttgcacttgagcttcaggtaagacctctagctctggatgaaccttctgaccctacccaagagtcttcaatcctggactctggccaggaggcagtagataggagaaggaaagagaagtatccagagctttttgggctggaaatagaaagtagatgtatttgtcatgtcagttacaaggtggaggaggacacttgaggagagaaaaggcctgctaagctaagagagagccaggtaggttgctctaagcagaattaggattctctgcccgcacacgctgatctgggtcagtgatgtcagaaggttatccgaagagggctaccaatttgagaatcagctctaccaccccagggctgctgctctgagttccgatgtccccactattacttgaaaagaaaccaagtaggcattagtgagaagcaggcagaaggagggacagactggcaggggctgaaccctgacaatgtccccattgccactctgaccccactttccccatccttggtggcaggatgttgaccttctccaacaacgtggagccagccaatggcttcctggttcgttacctgaggaggaagctggtagagtcagacagcgacatcaatgccaacaaggaagagctgcttcgggtgctcgactgggtacccaagctgtggtatcatctccacaccttccttgagaagcacagcacctcagacttcctcatcggtactggggtccagcttcccccgggggtcaggaggtggcttcccttttccactgtaccacctggagggatgctcccttctcttcctggagtcttcggcatgtaaaggagctgcaagccttgtggcttcagacttagaaccacttaacgagccttcccaacacagttagcaccacttcaatcaccagaaagctaacccctctccttgtttttttcccacaattaacagaaaaaaggaggcacatatgtaggaaggaattaaacagctttcctcactcccttatctcacttctaccttgtgaagcaggacttatgagattgccatctaggcagtcagcacccactagtcttgacaactctaaatttcctttaatcctttgactgtcagacccctctgcctggtactaaggagtaaaagaggcacacaaccgggaagatctaggttcccagccatcttcatggccccatcctcttccctaggcccttgcttctttctgtcgtgtcccattggcattgaggacttccggacctggttcattgacctgtggaacaactctatcattccctatctacaggaaggagccaaggatgggataaaggtccatggacagaaagctgcttgggaggacccagtggaatgggtccgggacacacttccctggccatcagcccaacaagacagcaccccaagttctctggactcagatcctctgatggccatgctgctgaaacttcaagaagctgccaactacattgagtctccagatcgagaaaccatcctggaccccaaccttcaggcaacactttaagggttcggcaatcactgtcacccccggacagcagaacgctggcatcagctatcttagctcctcctctcccctctcctctttcagagcactggctctccagccccaggaggagaacaggagggaggaggagatgaaagaggagggacaggttcttggtgctgtacctttgagaacttcctaggaaggaatggtggggtggcgtttgggaacttgtgccccctaaacacatttactggcctcctctaatgactttggggaaaagatgattctgggtctttcccttgacttcttgtttcaattacaaactcctgggctttctggggaggggttcagaaaacatcaaaacactgcagcagttcctaaatgattctcacaagcaaccctgagagagacagtcttgtgagggagatctgggggaggcaggaagctcctcagattttctcacagacccttcccaattccatcaccactgccaacaactcctcccccagagatctggctggagcccagaaaaagaagcatgtggtttaaaaaatgtttaaatcaatctgtaaaaggtaaaaatgaaaaacaaaaacaagcaaacaaacaaaaaacaatggaaaagatgaagctggagagagaggaaccagttgccaaggtagagagctgcccgctcctgccctctggatgacataggggacatcaacaagacggctgccaacctgagaagtcaccaaaccacaaaaataaccttacagccttcagggaaagactaccagctctgtctttctaccctctaatttaacaatgcataagagtcaataaaccctacttttttatttttggttttt

SEQ ID NO: 6862 - protein, 116 aa, Homo sapiens
MAPSSSLGPCFFLSCPIGIEDFRTWFIDLWNNSIIPYLQEGAKDGIKVHGQKAAWEDPVEWVRDTLPWPSAQQDSTPSSLDSDPLMAMLLKLQEAANYIESPDRETILDPNLQATL

SEQ ID NO: 6863 - DNA, 296 bp, Homo sapiens
cattgccactctgaccccactttccccatccttggtggcaggatgttgaccttctccaacaacgtggagccagccaatggcttcctggttcgttacctgaggaggaagctggtagagtcagacagcgacatcaatgccaacaaggaagagctgcttcgggtgctcgactgggtacccaagctgtggtatcatctccacaccttccttgagaagcacagcacctcagacttcctcatcggtactggggtccagcttcccccgggggtcaggaggtggcttcccttttccactcaccc

SEQ ID NO: 6864 - protein, 83 aa, Homo sapiens
MLTFSNNVEPANGFLVRYLRRKLVESDSDINANKEELLRVLDWVPKLWYHLHTFLEKHSTSDFLIGTGVQLPPGVRRWLPFST

SEQ ID NO: 6865 - DNA, 566 bp, Homo sapiens
gcacctcctgtactggggataggatcccggtgagcgtatccactaacgcttcctttaatccttgtgccactggacccggcagcccggaggccgcaccagctgccgccgccgccgccatcttttctcccctcagcccgccagccccgcggccgggacccgccaccgaatgacggcccccgcgcgcggccaatccgcgaagccgcgcctgcgcaccagaggcgggcgggagcgggcggagggcggggaatgaatctaagcctccagagacagcgcctcctgctgcctgaacgagaactgcacctttctctgcaaggatctctggatttgtgtgaaaactgagccccagacaggttaaggggctttcctaaagttgcacaaatggcttctactcaccagaggatctgagtccagagaacttggggtgctgtctttgactgtcctatcctcgggaggcgcagtggctcatgcctgtaatcccagcatttagggaggccaagacaggaagatcacttgaggtcagaagttcaagaccagcctggccaacgtggtgaaaccctgtttctact

SEQ ID NO: 6866 - protein, 30 aa, Homo sapiens
MNLSLQRQRLLLPERELHLSLQGSLDLCEN

SEQ ID NO: 6867 - DNA, 1290 bp, Homo sapiens
gggaatgaatctaagcctccagagacagcgcctcctgctgcctgaacgagaactgcacctttctctgcaaggatctctggatttgtgtgaaaactgagccccagacaggttaaggggctttcctaaagttgcacaaaccctgtcatccatgggagcttaccacgtggatgcagaagcttttgtgaggggcagcccggaccatcttttggacttaatataccgatatgaagattcagatgcatctactcctcggttgggtggaagagtgatccaggttggcagccgtcttgttgatgtcccctatgtcatccagagggcaggagcgggcagctctctaccttggcaactggttcctctctctccagcttcatcttttccattgttttttgtttgtttgcttgtttttgtttttcatttttaccttttacagattgatttaaacattttttaaaccacatgcttctttttctgggctccagccagatctctgggggaggagttgttggcagtggtgatggaattgggaagggtctgtgagaaaatctgaggagcttcctgcctcccccagatctccctcacaagactgtctctctcagggttgcttgtgagaatcatttaggaactgctgcagtgttttgatgttttctgaacccctccccagaaagcccaggagtttgtaattgaaacaagaagtcaagggaaagacccagaatcatcttttccccaaagtcattagaggaggccagtaaatgtgtttagggggcacaagttcccaaacgccaccccaccattccttcctaggaagttctcaaaggtacagcaccaagaacctgtccctcctctttcatctcctcctccctcctgttctcctcctggggctggagagccagtgctctgaaagaggagaggggagaggaggagctaagatagctgatgccagcgttctgctgtccgggggtgacagtgattgccgaacccttaaagtgttgcctgaaggttggggtccaggatggtttctcgatctggagactcaatgtagttggcagcttcttgaagtttcagcagcatggccatctaaaggggggcaaaaagatggatttatgagagttgggactctgggtcctgcccacagaagggaaacaacaacaacaaaatcccaacactttgggaggccaaggtggaaggatagcttgaagccaggagtttgcaatcagctttgaaaacaaagagagaccctgactctaccaaaaaataaaaataaaacaataaaaaactggccaggcgtggtgg

SEQ ID NO: 6868 - protein, 100 aa, Homo sapiens
MGAYHVDAEAFVRGSPDHLLDLIYRYEDSDASTPRLGGRVIQVGSRLVDVPYVIQRAGAGSSLPWQLVPLSPASSFPLFFVCLLVFVFHFYLLQIDLNIF

SEQ ID NO: 6869 - DNA, 3270 bp, Homo sapiens
tttcctaccttctgaggcttcaaagtattttttaaaatctatgctttgtggcagctctacggtgcttatctctgtctttgtgtcaatccttaagtacccatgtctttttcatgtctaaccattgggaaggtagaggctggcagggaagacaaatctgctacaagtccatgggaagaccctacaatgaaatgttcattggttggtatactgttttagtcttgaattgccaactttccaactgatctatccatattccttaagtactaaagacaaaatagagggcttctttttctctcttaatgtcttgccttctggttttcctggtttgcaagactaagtgtacctaatctcaccatctcttcacttctagctctctgaaacaagggtcacactactcagagggataaccccttacagtggtctgaggagtaactatttcctaaagtattctaaaagagtaggaagagagaaatggtagcctgctgcttctcacagacacctcacatcctcacttgggatggcatccacatagaaaccctgcatttaggtaaaatttgcctgactgaaggggactcagtcctccaaatcaaggtcaagaagatatctgcatgagaccttaagaactctttattgccattatttggagagggcgggggaattgtcctaatcacacatttaacacagggaataagtgctgaagtgacccagatcaccaagcgcagttcctcatcatactttatttttgctttccttattccttggcactgactaagctaaagttaagaagccgacttcataagccaacccctgtgatgggatggaaaaatgggcttttgcagagggtttattaatagagatggatatactactcacaagttctggctcatggctccactgagaaggccatagtaataaaatgatcttatgaacactgttccccaaaggccaaagcctgaagatattgccccttataatccaatcagccttatattttaataagtcctgaatcaacctgactacggatatatggggccaccagggtgcatgggtgcatgtctgctcagcctagccctggaagtgagcactgccggccacagatcctgggaaaggtggtagtaacccagaagatgtagccttgaagggaggatacctatcaaaatgccaaagctgcagggacacgaagacggttgaaaattcaacctgtgtatactagatccttccagtttgatggtttggtcattcttcttcatgattataccatggagaattttctgtgacaagggtggtcatggaagtaagtgagtgatcccctggtttctcattccttaaagcagtggttcgcaaagtatggcacaagaccagcagcatcagcagcctttgggaacttgttagaaacgaaaattctcaatcccatcccagatctgctgaatcagaaactctaatgagaggacccggcaatccacgttttaataagccctcctggtgattctgatgcacactaaattcaactgttttaaagggaaagccctttatagtattggagttcccacagtctcttccagattgctcttctgccgaattatttgtatctattccgagctgattatgtaataggatggaaaaagtaaaaaaaaaaaaaaaaatctaatttgtatttccatgacaacgtgttctcccagcaacatccctctcctttatttgagttataaagggcactgctgggcctgagaaccaggccagaacctccttctgtatggcagctaacagtgtagggctccagtatcccaggaaggccccttatccacactccactcagctcataggagagtcttgcataatgaagacacagacctgggcacttcagtccttgtgctcctcctctcttttccccacagcaggacctggatacagaagtactcagccaaggtgacagaataaaatcctttttttgttgttttctgtttgtttgtttgttttggagaaggagtctcgctttgtcacccaggctggtgtgcagtggcacgatctcggctcactgcaacctccgcctcccaggttcaagcgattctcctgtctcagcctcctgagtagctgggattacagacgtgcgccatcacgcccagctaatttttgtatttttagtagatacggagttttgccttgttggccaggctgtgctggagctcctgacctcaggtgattcacctgccacagcctcccaaagtgctgggattacaggcgtgagccacagcaccctgccaaataagatcctttttaaaaaatatctgaaaaaagcttcatatctttacaaactcataaaatagctgattgggccatggaggagatgaggctgtttagaactggttttgtttcaagtttgtcaattttccctgtatgagaacttgggtaaagcacaaagaaacatacagtgctagtaacaggtctcctgcgccctggaactaagtgtttggaggaaggactaaaccccgggggaggtgagtataaaataattccactaagatcacctcctcagtccccagaaggctgatggtggatcctctggccatctcctgtggggtcttactgctcctctgccatttctctatgcctgaagacacgaagatgatatcaaggcagagctaccatatcgcagccagtctctaggctactgctgtgcagtggctcccactttctaatgcttttttgtttttgctttttctaacaaaacaatcttttttcaaaatgaattccaacccctgctagcttccttccccgcctccatactgttttaggcagcaccgtttatgtgacagagtccgtgtttctcaaatgcatggtgttcctcaggtggagagtgggcagaagtttttgcaacactttttttttaagttattgggtgcaaaatcccaaaccaggatatgtgtatgtctgtgtgtttatgttttttatttgaccctcccctctttcaacctacccccttttatatctaatgtagaaaaagcgaaattgaatctggaaagcaaactgttgtatatagttgcggtaacaatcatgaagagagagccgggctgtcccctcagtaattcattttaaataacaaattatttaaaaataaaattcatgccagagccagctgaagaggccttccttcatcaccactgaggccacccccaatctgggccctctgtccatctggcatgtctcctcccagcaagattcatctgttcaatgccatttgcgtttcaataaagttatctcctgtactgtcca

SEQ ID NO: 6870 - protein, 39 aa, Homo sapiens
MHTKFNCFKGKALYSIGVPTVSSRLLFCRIICIYSELIM

SEQ ID NO: 6871 - DNA, 3232 bp, Homo sapiens
tttcctaccttctgaggcttcaaagtattttttaaaatctatgctttgtggcagctctacggtgcttatctctgtctttgtgtcaatccttaagtacccatgtctttttcatgtctaaccattgggaaggtagaggctggcagggaagacaaatctgctacaagtccatgggaagaccctacaatgaaatgttcattggttggtatactgttttagtcttgaattgccaactttccaactgatctatccatattccttaagtactaaagacaaaatagagggcttctttttctctcttaatgtcttgccttctggttttcctggtttgcaagactaagtgtacctaatctcaccatctcttcacttctagctctctgaaacaagggtcacactactcagagggataaccccttacagtggtctgaggagtaactatttcctaaagtattctaaaagagtaggaagagagaaatggtagcctgctgcttctcacagacacctcacatcctcacttgggatggcatccacatagaaaccctgcatttaggtaaaatttgcctgactgaaggggactcagtcctccaaatcaaggtcaagaagatatctgcatgagaccttaagaactctttattgccattatttggagagggcgggggaattgtcctaatcacacatttaacacagggaataagtgctgaagtgacccagatcaccaagcgcagttcctcatcatactttatttttgctttccttattccttggcactgactaagctaaagttaagaagccgacttcataagccaacccctgtgatgggatggaaaaatgggcttttgcagagggtttattaatagagatggatatactactcacaagttctggctcatggctccactgagaaggccatagtaataaaatgatcttatgaacactgttccccaaaggccaaagcctgaagatattgccccttataatccaatcagccttatattttaataagtcctgaatcaacctgactacggatatatggggccaccagggtgcatgggtgcatgtctgctcagcctagccctggaagtgagcactgccggccacagatcctgggaaaggtggtagtaacccagaagatgtagccttgaagggaggatacctatcaaaatgccaaagctgcagggacacgaagacggttgaaaattcaacctgtgtatactagatccttccagtttgatggtttggtcattcttcttcatgattataccatggagaattttctgtgacaagggtggtcatggaagtaagtgagtgatcccctggtttctcattccttaaagcagtggttcgcaaagtatggcacaagaccagcagcatcagcagcctttgggaacttgttagaaacgaaaattctcaatcccatcccagatctgctgaatcagaaactctaatgagaggacccggcaatccacgttttatacctggcacacaaaggggcttcaacaaggaaaagcagttggaggtctcttccagattgctcttctgccgaattatttgtatctattccgagctgattatgtaataggatggaaaaagtaaaaaaaaaaaaaaaaatctaatttgtatttccatgacaacgtgttctcccagcaacatccctctcctttatttgagttataaagggcactgctgggcctgagaaccaggccagaacctccttctgtatggcagctaacagtgtagggctccagtatcccaggaaggccccttatccacactccactcagctcataggagagtcttgcataatgaagacacagacctgggcacttcagtccttgtgctcctcctctcttttccccacagcaggacctggatacagaagtactcagccaaggtgacagaataaaatcctttttttgttgttttctgtttgtttgtttgttttggagaaggagtctcgctttgtcacccaggctggtgtgcagtggcacgatctcggctcactgcaacctccgcctcccaggttcaagcgattctcctgtctcagcctcctgagtagctgggattacagacgtgcgccatcacgcccagctaatttttgtatttttagtagatacggagttttgccttgttggccaggctgtgctggagctcctgacctcaggtgattcacctgccacagcctcccaaagtgctgggattacaggcgtgagccacagcaccctgccaaataagatcctttttaaaaaatatctgaaaaaagcttcatatctttacaaactcataaaatagctgattgggccatggaggagatgaggctgtttagaactggttttgtttcaagtttgtcaattttccctgtatgagaacttgggtaaagcacaaagaaacatacagtgctagtaacaggtctcctgcgccctggaactaagtgtttggaggaaggactaaaccccgggggaggtgagtataaaataattccactaagatcacctcctcagtccccagaaggctgatggtggatcctctggccatctcctgtggggtcttactgctcctctgccatttctctatgcctgaagacacgaagatgatatcaaggcagagctaccatatcgcagccagtctctaggctactgctgtgcagtggctcccactttctaatgcttttttgtttttgctttttctaacaaaacaatcttttttcaaaatgaattccaacccctgctagcttccttccccgcctccatactgttttaggcagcaccgtttatgtgacagagtccgtgtttctcaaatgcatggtgttcctcaggtggagagtgggcagaagtttttgcaacactttttttttaagttattgggtgcaaaatcccaaaccaggatatgtgtatgtctgtgtgtttatgttttttatttgaccctcccctctttcaacctacccccttttatatctaatgtagaaaaagcgaaattgaatctggaaagcaaactgttgtatatagttgcggtaacaatcatgaagagagagccgggctgtcccctcagtaattcattttaaataacaaattatttaaaaataaaattcatgccagagccagctgaagaggccttccttcatcaccactgaggccacccccaatctgggccctctgtccatctggcatgtctcctcccagcaagattcatctgttcaatgccatttgcgtttcaataaagttatctcctgtactgtcca

SEQ ID NO: 6872 - protein, 43 aa, Homo sapiens [sequence omitted]

SEQ ID NO: 6873 - DNA, 3471 bp, Homo sapiens
ggggctggcgggctgaggggagaaaagatggcggcggcggcggcagctggtgcggcctccgggctgccgggtccagtggcacaaggattaaaggaagcgttagtggatacgctcaccgggatcctatccccagtacaggaggtgcgggcggctgctgaagaacagattaaggtgctggaggtgacggaggaatttggtgttcacttggcagaactgactgtagatccccagggggcactggcaatccgtcagctggcatcagtcatcttgaaacaatatgtggagactcactggtgtgcccaatcagagaaatttaggcctcctgaaactacagaaagggcaaaaattgttatccgggagctattgcctaatgggttgagagaatcgataagcaaagtgcgctccagtgtggcctatgcagtgtcagccattgcccactgggactggcctgaagcttggccccaactcttcaacctgctcatggagatgttggtgagcggagacttaaatgccgtccatggagccatgcgtgtgctgacagaattcactcgtgaagtaacagacacacagatgccacttgttgctcctgtcattctcccagagatgtataagatcttcaccatggctgaggtgtatggtattcgaacccgttcccgagccgtggagatttttaccacttgtgcccatatgatctgtaacatggaggagctggaaaagggtgcagccaaagtcctgatctttcccgtggtacagcagttcacagaggcctttgttcaggccctccagataccagatggccccacatctgacagtgggtttaagatggaggtcctaaaggcagtgacagccctagtgaaaaacttcccaaagcacatggtgtcctccatgcagcagattctgcctattgtttggaacaccctaaccgagagtgcagctttttatgtgaggacagaagtaaattacacagaagaagtagaagatcctgtggattctgatggtgaagtcctgggctttgaaaatctcgtctttagcatttttgaatttgtccatgctctactagaaaatagcaaattcaaaagcactgttaagaaagccttgcctgaattgatttattatattatcctgtacatgcaaatcactgaggagcagattaaagtatggacagccaacccccaacaatttgtagaagatgaagatgatgatacattctcctatactgttagaatagcagctcaagacttgttgctggctgtggccacagatttccagaatgaaagtgcagcagccctggctgctgcagccactcgacatttacaagaagctgagcaaaccaaaaacagtggcactgagcactggtggaagatccatgaggcatgcatgcttgccctaggctcagtgaaggccatcatcactgacagtgtgaaaaatggcaggattcattttgacatgcatgggttcctgaccaatgtcatccttgcagacctcaacctctcagtgtctcctttcctcttgggccgggcactttgggctgccagtcggttcactgttgctatgtcccctgaactgatccagcagttcctacaggcaacagttagtggtcttcacgagacacagcccccatcagttcgaatttctgcagtgagagccatctggggttattgtgaccaactgaaagtctcagagagtacccacgtgctccagcccttcctccccagcatccttgatggcttaattcacctagcagcccagttcagctcagaggtcctcaacctggtgatggagaccctgtgcatcgtttgtacagtagaccccgaattcacagcaagcatggaaagcaaaatctgccccttcaccatcgccattttcctaaagtacagtaatgatcccgtcgtcgcctcactggctcaggacatcttcaaggagctgtcccagattgaagcctgtcagggcccaatgcaaatgaggctgattcccactctggtcagcataatgcaggccccagcagacaagattcctgcagggctttgtgcgacagccattgatatcctgacaacagtagtacgaaatacaaagcctcccctttcccagcttctcatctgccaagctttccctgctgtggcacagtgtacccttcacacagatgacaatgccaccatgcagaatggcggagagtgcttgcgggcctatgtgtcagtgaccctggaacaagtagcccagtggcatgatgagcagggccacaatggactgtggtatgtgatgcaagtggtgagccagctcctggacccccgcacctcagagttcactgcggcctttgtgggccgccttgtttccaccctcatctccaaggcagggcgggaactcggggagaatctagaccagattcttcgtgccatcctcagtaagatgcagcaggcagagacgctcagtgtcatgcagtccctgatcatggtgttcgctcatctggtgcacactcagctagaacctctcttggagttcctgtgtagcctcccaggacctactggcaaacctgctctagagtttgtgatggctgagtggacaagccgacagcacctgttctatggacagtatgaaggcaaagtcagctctgtggcactctgtaagctgctccagcatggcatcaatgcagatgacaaacggctacaggatatccgtgtgaagggagaggagatctacagcatggatgagggcatccgcacccgctctaagtcagccaaaaacccagaacgctggacaaacattcctttgctggtcaagatcctaaagctgatcatcaacgagctctccaacgtcatggaggctaatgccgctcgccaggccactcctgcagagtggagtcaagatgactccaatgatatgtgggaggaccaggaggaggaagaggaggaggaggaggatggtttagctggccaacttttatctgacattcttgctacaagtaaatatgaggaggattactacgaggatgatgaggaagatgaccctgatgccctgaaggatcctctctatcagattgatctgcaggcatatctcacagatttcctctgccagtttgctcagcagccctgctacataatgttttcaggccaccttaatgacaatgagaggcgagttctacagaccatcggcatctaaaaaggggagcctttctacatttgctccttctgggccagccgcaaaccattttgcagccctcactggccttgagatgcactttcttctcaacctaaagtggcatcttgacccttggcccttggcctcggcagtgacactgatgacaattcagaccaggctcaccggtgccgtcacttaggaatgctggaacaaaggacatttctcaaagttcccctgaagacatgccatctctagaaccttttttctccccgactctacccccacctctgttcctagagccctctgctggcgagtccagaaacattattgcccagaagg

SEQ ID NO: 6874 - protein, 1041 aa, Homo sapiens; identical to SEQ ID NO: 368

SEQ ID NO: 6875 - DNA, 3853 bp, Homo sapiens
ggggctggcgggctgaggggagaaaagatggcggcggcggcggcagctggtgcggcctccgggctgccgggtccagtggcacaaggattaaaggaagcgttagtggatacgctcaccgggatcctatccccagtacaggaggtgcgggcggctgctgaagaacagattaaggtgctggaggtgacggaggaatttggtgttcacttggcagaactgactgtagatccccagggggcactggcaatccgtcagctggcatcagtcatcttgaaacaatatgtggagactcactggtgtgcccaatcagagaaatttaggcctcctgaaactacagaaagggcaaaaattgttatccgggagctattgcctaatgggttgagagaatcgataagcaaagtgcgctccagtgtggcctatgcagtgtcagccattgcccactgggactggcctgaagcttggccccaactcttcaacctgctcatggagatgttggtgagcggagacttaaatgccgtccatggagccatgcgtgtgctgacagaattcactcgtgaagtaacagacacacagatgccacttgttgctcctgtcattctcccagagatgtataagatcttcaccatggctgaggtgtatggtattcgaacccgttcccgagccgtggagatttttaccacttgtgcccatatgatctgtaacatggaggagctggaaaagggtgcagccaaagtcctgatctttcccgtggtacagcagttcacagaggcctttgttcaggccctccagataccagatggccccacatctgacagtgggtttaagatggaggtcctaaaggcagtgacagccctagtgaaaaacttcccaaagcacatggtgtcctccatgcagcagattctgcctattgtttggaacaccctaaccgagagtgcagctttttatgtgaggacagaagtaaattacacagaagaagtagaagatcctgtggattctgatggtgaagtcctgggctttgaaaatctcgtctttagcatttttgaatttgtccatgctctactagaaaatagcaaattcaaaagcactgttaagaaagccttgcctgaattgatttattatattatcctgtacatgcaaatcactgaggagcagattaaagtatggacagccaacccccaacaatttgtagaagatgaagatgatgatacattctcctatactgttagaatagcagctcaagacttgttgctggctgtggccacagatttccagaatgaaagtgcagcagccctggctgctgcagccactcgacatttacaagaagctgagcaaaccaaaaacagtggcactgagcactggtggaagatccatgaggcatgcatgcttgccctaggctcagtgaaggccatcatcactgacagtgtgaaaaatggcaggattcattttgacatgcatgggttcctgaccaatgtcatccttgcagacctcaacctctcagtgtctcctttcctcttgggccgggcactttgggctgccagtcggttcactgttgctatgtcccctgaactgatccagcagttcctacaggcaacagttagtggtcttcacgagacacagcccccatcagttcgaatttctgcagtgagagccatctggggttattgtgaccaactgaaagtctcagagagtacccacgtgctccagcccttcctccccagcatccttgatggcttaattcacctagcagcccagttcagctcagaggtcctcaacctggtgatggagaccctgtgcatcgtttgtacagtagaccccgaattcacagcaagcatggaaagcaaaatctgccccttcaccatcgccattttcctaaagtacagtaatgatcccgtcgtcgcctcactggctcaggacatcttcaaggagctgtcccagattgaagcctgtcagggcccaatgcaaatgaggctgattcccactctggtcagcataatgcaggccccagcagacaagattcctgcagggctttgtgcgacagccattgatatcctgacaacagtagtacgaaatacaaagcctcccctttcccagcttctcatctgccaagctttccctgctgtggcacagtgtacccttcacacagatgacaatgccaccatgcagaatggcggagagtgcttgcgggcctatgtgtcagtgaccctggaacaagtagcccagtggcatgatgagcagggccacaatggactgtggtatgtgatgcaagtggtgagccagctcctggacccccgcacctcagagttcactgcggcctttgtgggccgccttgtttccaccctcatctccaaggcagggcgggaactcggggagaatctagaccagattcttcgtgccatcctcagtaagatgcagcaggcagagacgctcagtgtcatgcagtccctgatcatggtgttcgctcatctggtgcacactcagctagaacctctcttggagttcctgtgtagcctcccaggacctactggcaaacctgctctagagtttgtgatggctgagtggacaagccgacagcacctgttctatggacagtatgaaggcaaagtcagctctgtggcactctgtaagctgctccagcatggcatcaatgcagatgacaaacggctacaggatatccgtgtgaagggagaggagatctacagcatggatgagggcatccgcacccgctctaagtcagccaaaaacccagaacgctggacaaacattcctttgctggtcaagatcctaaagctgatcatcaacgagctctccaacgtcatggaggctaatgccgctcgccaggccactcctgcagagtggagtcaagatgactccaatgatatgtgggaggaccaggaggaggaagaggaggaggaggaggatggtttagctggccaacttttatctgacattcttgctacaagtaaatatgaggaggattactacgaggatgatgaggaagatgaccctgatgccctgaaggatcctctctatcagattgatctgcaggcatatctcacagatttcctctgccagtttgctcagcagccctgctacataatgttttcaggccaccttaatgacaatgagaggcgagttctacagaccatcggcatctaaaaaggggagcctttctacatttgctccttctgggccagccgcaaaccattttgcagccctcactggccttgagatgcactttcttctcaacctaaagtggcatcttgacccttggcccttggcctcggcagtgacactgatgacaattcagaccaggctcaccggtgccgtcacttaggaatgctggaacaaaggacatttctcaaagttcccctgaagacatgccatctctagaaccttttttctccccgactctacccccacctctgttcctagagccctctgctggcgagtccagaaacattattgcccagaaggattatgtgtttatggattattttgccccgcctcaggagcgcaggaagtcactaccatttatattctaaaacagacctatctatgttcataggacttctgatgtgttcagataggaatcctcatgagagatcattatgctttgtgccctggaccactgctgctctgggttctcaggaggaacaggcaagagcagcttcattctaagcctttccagtgacctcagccttgcttctcttctacaacactaaggctcctctgtcagaggaggtcgtcttgtttttgcttcattgcatgacataacccttcccctcaagctgttcctatatatacatgcacacacaaaataagccagacagatggcaatttgatcttccttttttag

SEQ ID NO: 6876 - protein, 1041 aa, Homo sapiens; identical to SEQ ID NO: 368

SEQ ID NO: 6877 - DNA, 4075 bp, Homo sapiens
ggggctggcgggctgaggggagaaaagatggcggcggcggcggcagctggtgcggcctccgggctgccgggtccagtggcacaaggattaaaggaagcgttagtggatacgctcaccgggatcctatccccagtacaggaggtgcgggcggctgctgaagaacagattaaggtgctggaggtgacggaggaatttggtgttcacttggcagaactgactgtagatccccagggggcactggcaatccgtcagctggcatcagtcatcttgaaacaatatgtggagactcactggtgtgcccaatcagagaaatttaggcctcctgaaactacagaaagggcaaaaattgttatccgggagctattgcctaatgggttgagagaatcgataagcaaagtgcgctccagtgtggcctatgcagtgtcagccattgcccactgggactggcctgaagcttggccccaactcttcaacctgctcatggagatgttggtgagcggagacttaaatgccgtccatggagccatgcgtgtgctgacagaattcactcgtgaagtaacagacacacagatgccacttgttgctcctgtcattctcccagagatgtataagatcttcaccatggctgaggtgtatggtattcgaacccgttcccgagccgtggagatttttaccacttgtgcccatatgatctgtaacatggaggagctggaaaagggtgcagccaaagtcctgatctttcccgtggtacagcagttcacagaggcctttgttcaggccctccagataccagatggccccacatctgacagtgggtttaagatggaggtcctaaaggcagtgacagccctagtgaaaaacttcccaaagcacatggtgtcctccatgcagcagattctgcctattgtttggaacaccctaaccgagagtgcagctttttatgtgaggacagaagtaaattacacagaagaagtagaagatcctgtggattctgatggtgaagtcctgggctttgaaaatctcgtctttagcatttttgaatttgtccatgctctactagaaaatagcaaattcaaaagcactgttaagaaagccttgcctgaattgatttattatattatcctgtacatgcaaatcactgaggagcagattaaagtatggacagccaacccccaacaatttgtagaagatgaagatgatgatacattctcctatactgttagaatagcagctcaagacttgttgctggctgtggccacagatttccagaatgaaagtgcagcagccctggctgctgcagccactcgacatttacaagaagctgagcaaaccaaaaacagtggcactgagcactggtggaagatccatgaggcatgcatgcttgccctaggctcagtgaaggccatcatcactgacagtgtgaaaaatggcaggattcattttgacatgcatgggttcctgaccaatgtcatccttgcagacctcaacctctcagtgtctcctttcctcttgggccgggcactttgggctgccagtcggttcactgttgctatgtcccctgaactgatccagcagttcctacaggcaacagttagtggtcttcacgagacacagcccccatcagttcgaatttctgcagtgagagccatctggggttattgtgaccaactgaaagtctcagagagtacccacgtgctccagcccttcctccccagcatccttgatggcttaattcacctagcagcccagttcagctcagaggtcctcaacctggtgatggagaccctgtgcatcgtttgtacagtagaccccgaattcacagcaagcatggaaagcaaaatctgccccttcaccatcgccattttcctaaagtacagtaatgatcccgtcgtcgcctcactggctcaggacatcttcaaggagctgtcccagattgaagcctgtcagggcccaatgcaaatgaggctgattcccactctggtcagcataatgcaggccccagcagacaagattcctgcagggctttgtgcgacagccattgatatcctgacaacagtagtacgaaatacaaagcctcccctttcccagcttctcatctgccaagctttccctgctgtggcacagtgtacccttcacacagatgacaatgccaccatgcagaatggcggagagtgcttgcgggcctatgtgtcagtgaccctggaacaagtagcccagtggcatgatgagcagggccacaatggactgtggtatgtgatgcaagtggtgagccagctcctggacccccgcacctcagagttcactgcggcctttgtgggccgccttgtttccaccctcatctccaaggcagggcgggaactcggggagaatctagaccagattcttcgtgccatcctcagtaagatgcagcaggcagagacgctcagtgtcatgcagtccctgatcatggtgttcgctcatctggtgcacactcagctagaacctctcttggagttcctgtgtagcctcccaggacctactggcaaacctgctctagagtttgtgatggctgagtggacaagccgacagcacctgttctatggacagtatgaaggcaaagtcagctctgtggcactctgtaagctgctccagcatggcatcaatgcagatgacaaacggctacaggatatccgtgtgaagggagaggagatctacagcatggatgagggcatccgcacccgctctaagtcagccaaaaacccagaacgctggacaaacattcctttgctggtcaagatcctaaagctgatcatcaacgagctctccaacgtcatggaggctaatgccgctcgccaggccactcctgcagagtggagtcaagatgactccaatgatatgtgggaggaccaggaggaggaagaggaggaggaggaggatggtttagctggccaacttttatctgacattcttgctacaagtaaatatgaggaggattactacgaggatgatgaggaagatgaccctgatgccctgaaggatcctctctatcagattgatctgcaggcatatctcacagatttcctctgccagtttgctcagcagccctgctacataatgttttcaggccaccttaatgacaatgagaggcgagttctacagaccatcggcatctaaaaaggggagcctttctacatttgctccttctgggccagccgcaaaccattttgcagccctcactggccttgagatgcactttcttctcaacctaaagtggcatcttgacccttggcccttggcctcggcagtgacactgatgacaattcagaccaggctcaccggtgccgtcacttaggaatgctggaacaaaggacatttctcaaagttcccctgaagacatgccatctctagaaccttttttctccccgactctacccccacctctgttcctagagccctctgctggcgagtccagaaacattattgcccagaaggattatgtgtttatggattattttgccccgcctcaggagcgcaggaagtcactaccatttatattctaaaacagacctatctatgttcataggacttctgatgtgttcagataggaatcctcatgagagatcattatgctttgtgccctggaccactgctgctctgggttctcaggaggaacaggcaagagcagcttcattctaagcctttccagtgacctcagccttgcttctcttctacaacactaaggctcctctgtcagaggaggtcgtcttgtttttgcttcattgcatgacataacccttcccctcaagctgttcctatatatacatgcacacacaaaataagccagacagatggcaatttgatcttccttttttagaaaaaaaaaaaaaaatggggaaaagggattttttttaaatccacctgacccaactatatttaatatgcctctcccacacattaccacagagtctgatattcaaaggttatcccctttccctcaggaagcctctaaagtgcttaagttgtagccctcaaatttgcaacatgtatttttctaggacagtaaagtaatctttacaaatgaatttagttgcatggt

SEQ ID NO: 6878 - protein, 1041 aa, Homo sapiens; identical to SEQ ID NO: 368

SEQ ID NO: 6879 - DNA, 6050 bp, Homo sapiens
ggggctggcgggctgaggggagaaaagatggcggcggcggcggcagctggtgcggcctccgggctgccgggtccagtggcacaaggattaaaggaagcgttagtggatacgctcaccgggatcctatccccagtacaggaggtgcgggcggctgctgaagaacagattaaggtgctggaggtgacggaggaatttggtgttcacttggcagaactgactgtagatccccagggggcactggcaatccgtcagctggcatcagtcatcttgaaacaatatgtggagactcactggtgtgcccaatcagagaaatttaggcctcctgaaactacagaaagggcaaaaattgttatccgggagctattgcctaatgggttgagagaatcgataagcaaagtgcgctccagtgtggcctatgcagtgtcagccattgcccactgggactggcctgaagcttggccccaactcttcaacctgctcatggagatgttggtgagcggagacttaaatgccgtccatggagccatgcgtgtgctgacagaattcactcgtgaagtaacagacacacagatgccacttgttgctcctgtcattctcccagagatgtataagatcttcaccatggctgaggtgtatggtattcgaacccgttcccgagccgtggagatttttaccacttgtgcccatatgatctgtaacatggaggagctggaaaagggtgcagccaaagtcctgatctttcccgtggtacagcagttcacagaggcctttgttcaggccctccagataccagatggccccacatctgacagtgggtttaagatggaggtcctaaaggcagtgacagccctagtgaaaaacttcccaaagcacatggtgtcctccatgcagcagattctgcctattgtttggaacaccctaaccgagagtgcagctttttatgtgaggacagaagtaaattacacagaagaagtagaagatcctgtggattctgatggtgaagtcctgggctttgaaaatctcgtctttagcatttttgaatttgtccatgctctactagaaaatagcaaattcaaaagcactgttaagaaagccttgcctgaattgatttattatattatcctgtacatgcaaatcactgaggagcagattaaagtatggacagccaacccccaacaatttgtagaagatgaagatgatgatacattctcctatactgttagaatagcagctcaagacttgttgctggctgtggccacagatttccagaatgaaagtgcagcagccctggctgctgcagccactcgacatttacaagaagctgagcaaaccaaaaacagtggcactgagcactggtggaagatccatgaggcatgcatgcttgccctaggctcagtgaaggccatcatcactgacagtgtgaaaaatggcaggattcattttgacatgcatgggttcctgaccaatgtcatccttgcagacctcaacctctcagtgtctcctttcctcttgggccgggcactttgggctgccagtcggttcactgttgctatgtcccctgaactgatccagcagttcctacaggcaacagttagtggtcttcacgagacacagcccccatcagttcgaatttctgcagtgagagccatctggggttattgtgaccaactgaaagtctcagagagtacccacgtgctccagcccttcctccccagcatccttgatggcttaattcacctagcagcccagttcagctcagaggtcctcaacctggtgatggagaccctgtgcatcgtttgtacagtagaccccgaattcacagcaagcatggaaagcaaaatctgccccttcaccatcgccattttcctaaagtacagtaatgatcccgtcgtcgcctcactggctcaggacatcttcaaggagctgtcccagattgaagcctgtcagggcccaatgcaaatgaggctgattcccactctggtcagcataatgcaggccccagcagacaagattcctgcagggctttgtgcgacagccattgatatcctgacaacagtagtacgaaatacaaagcctcccctttcccagcttctcatctgccaagctttccctgctgtggcacagtgtacccttcacacagatgacaatgccaccatgcagaatggcggagagtgcttgcgggcctatgtgtcagtgaccctggaacaagtagcccagtggcatgatgagcagggccacaatggactgtggtatgtgatgcaagtggtgagccagctcctggacccccgcacctcagagttcactgcggcctttgtgggccgccttgtttccaccctcatctccaaggcagggcgggaactcggggagaatctagaccagattcttcgtgccatcctcagtaagatgcagcaggcagagacgctcagtgtcatgcagtccctgatcatggtgttcgctcatctggtgcacactcagctagaacctctcttggagttcctgtgtagcctcccaggacctactggcaaacctgctctagagtttgtgatggctgagtggacaagccgacagcacctgttctatggacagtatgaaggcaaagtcagctctgtggcactctgtaagctgctccagcatggcatcaatgcagatgacaaacggctacaggatatccgtgtgaagggagaggagatctacagcatggatgagggcatccgcacccgctctaagtcagccaaaaacccagaacgctggacaaacattcctttgctggtcaagatcctaaagctgatcatcaacgagctctccaacgtcatggaggctaatgccgctcgccaggccactcctgcagagtggagtcaagatgactccaatgatatgtgggaggaccaggaggaggaagaggaggaggaggaggatggtttagctggccaacttttatctgacattcttgctacaagtaaatatgaggaggattactacgaggatgatgaggaagatgaccctgatgccctgaaggatcctctctatcagattgatctgcaggcatatctcacagatttcctctgccagtttgctcagcagccctgctacataatgttttcaggccaccttaatgacaatgagaggcgagttctacagaccatcggcatctaaaaaggggagcctttctacatttgctccttctgggccagccgcaaaccattttgcagccctcactggccttgagatgcactttcttctcaacctaaagtggcatcttgacccttggcccttggcctcggcagtgacactgatgacaattcagaccaggctcaccggtgccgtcacttaggaatgctggaacaaaggacatttctcaaagttcccctgaagacatgccatctctagaaccttttttctccccgactctacccccacctctgttcctagagccctctgctggcgagtccagaaacattattgcccagaaggattatgtgtttatggattattttgccccgcctcaggagcgcaggaagtcactaccatttatattctaaaacagacctatctatgttcataggacttctgatgtgttcagataggaatcctcatgagagatcattatgctttgtgccctggaccactgctgctctgggttctcaggaggaacaggcaagagcagcttcattctaagcctttccagtgacctcagccttgcttctcttctacaacactaaggctcctctgtcagaggaggtcgtcttgtttttgcttcattgcatgacataacccttcccctcaagctgttcctatatatacatgcacacacaaaataagccagacagatggcaatttgatcttccttttttagaaaaaaaaaaaaaaatggggaaaagggattttttttaaatccacctgacccaactatatttaatatgcctctcccacacattaccacagagtctgatattcaaaggttatcccctttccctcaggaagcctctaaagtgcttaagttgtagccctcaaatttgcaacatgtatttttctaggacagtaaagtaatctttacaaatgaatttagttgcatggtataaggtgtctcagcacctgtttgccttctattccctttagaaggtaagtaaaagtaatgggggaaaggattaggtggagcctgtctaaacattctagtgtgtcttggcaaacatagcctgaaatgattcttaaagaactggcattgtttaatcaaatatttttaagggagattccttaattgggaagtttagtctgtttggggttcaaagagtaaatgaggattagaaaatcatggagagaggctgggcgcggtggctaacgcctgtaatcctagcactttgggaggctgagatgggcggatcacttgagatcaggagtttgaggctagcctggccaacacagtgaaacctgcatttctactaaaaatacaaaaattagctgggcatggtggtgcatgcctgtaatcccagttaacttgagatgctgaggcaggagaatcgcttgaacttgggaagcagaggttgcagtgaaccgatatcacaccgttgcattccaaggcaagactcaatcacacacacacacacacacacacacaaatcatggggagaaagatgaaacctgtgttcccctttttttggtagtgcccacatctggtgccccatttttaataaccacaggatatttctttagattgatattctcacaaagaagaaatagaatataggctgggcgtggtgtgtcacacctgtaatcccagcacttacggaggccgaagccagcggatcaccagaggtcaggagttcgagaccagcctgaccaacatgatgaaaccctgtctctactaaaaatacaaaaattagccaggcatggtggcatgcacttgtaatcccagctactcgggaggctgagacaggagaatcgcttgaacctgggaggcagaggttgcagtaagccaagatcgcaccattgcactacagcctgggcaacaagaggagcgaaactctgtctcaaaaaaaaaaaagagaaagaatataaagtgaatctgaatctccactcaaggggatggccccaaggatattgtagctggtaatttcttcatgccactaggtgtccccagtgttcaacctccatgactgagattggaagaagtagagttaaaagtttttactacctttgagaagcctgcgggcatgttcacagtcgtcccatgccagccaggttctgaggctaactgcttgtgcccctgctgcttcacatggcattgtgggagttgctgatactggggaaatgatggcagatctgaccaagtggtgctgagaaaaccaccctcggccttgcagactccatagtttatctcaaggcagtgccagtcggatttggtgctaaaggcataaggccaagtcagcctctgatattggcacaaaagaatggtctcatgccagtagcattgaactgctgagcttgggaaggcttaaggctcccacacacagactgagaatgatgggggtccctctgcgtctgctaattagacaaacattctatatctagtgccaaaagtggtcctaaatcctttggcaagggtcctttctgctctcatgctgatttgggggaggactgggcatcctgcctcaggagaacttgagtcctgaggaaagggccctagtaacacttaagggctacccctggctaacagatactcggctgtgggtgagagcagaaggtcttggacccctcgatgtgcaggtacttaattgtgtttccagtgcattttcatatacattatcccatttaacctttataacaggttcacagagtggatattcccattctgttgatgagaaaaagagtggagagactgtgtccagtgtcagcaggaagaaaaaagatctgttggaggccagtacatgttgacagaaactctagaccatattttgtctcctgtctttggccaaagagaactagcttcagtctgaaaagggcagggctaagtggttacaaggaactaaaaagttcaaggtaagacaaatgaggta

SEQ ID NO: 6880 - protein, 1041 aa, Homo sapiens; identical to SEQ ID NO: 368

SEQ ID NO: 6881 - DNA, 719 bp, Homo sapiens
agaatttggtgttcacttggcagaactgactgtagatccccagggggcactggcaatccgtcagctggcatcagtcatcttgaaacaatatgtggagactcactggtgtgcccaatcagagaaatttaggcctcctgaaactacagaaagggcaaaaattgttatccgggagctattgcctaatgggttgagagaatcgataagcaaagtgcgctccagtgtggcctatgcagtgtcagccattgcccactgggactggcctgaagcttggccccaactcttcaacctgctcatggagatgttggtgagcggagacttaaatgccgtccatggagccatgcgtgtgctgacagatgagaaccaactaaggctcatggtgtaaaggaaatgcaaatatagcagctaaggattagaagatttgatccaccagatacagctttttcttcgttctcaaagaagtttggagattgagatgttgctggagtcctagaatttttctgacttgctgaatcacctcagaaaacttttggaattaaacctataaagtattaataaattgataccagggatgagtataggagagtaaaaagcagtcaagcactttattagcagaattaaattatactgtatttttcataaaacttgttattatgccatctatcatatttgtttggactaatttccttgaatttctaaataaaatagaacactcaccattc

SEQ ID NO: 6882 - protein, 33 aa, Homo sapiens
MWRLTGVPNQRNLGLLKLQKGQKLLSGSYCLMG

SEQ ID NO: 6883 - DNA, 2852 bp, Homo sapiens
ggctgcagtgagctgtgatcataccactgcactcgagcctgggcgacaaagcaagaccctgtgttcaaaaaaaaaaaaaaatccatttataatttaacatgggagcctcatgggaaagagttcctgtcttgttgagtggtccagggttttgggtgggctggaactttgcacttgatgtgttgtaattcatcttctagaggctatgttgtgaaggtccttggggtgatacagccttggaaaaatgttgtttccctgtggattacctaaactagatccaagaacatgaaagaccatccctcagggagctggcatttgtctaaaaaccagcattccctgtgccatttgattgtggttcttgctccactgcaaatgggtgacttgcaatgtctcactaatgccactcttgctctttcctccaggcatatctcacagatttcctctgccagtttgctcagcagccctgctacataatgttttcaggccaccttaatgacaatgagaggcgagttctacagaccatcggcatctctgtcagaggaggtcgtcttgtttttgcttcattgcatgacataacccttcccctcaagctgttcctatatatacatgcacacacaaaataagccagacagatggcaatttgatcttccttttttagaaaaaaaaaaaaaaatggggaaaagggattttttttaaatccacctgacccaactatatttaatatgcctctcccacacattaccacagagtctgatattcaaaggttatcccctttccctcaggaagcctctaaagtgcttaagttgtagccctcaaatttgcaacatgtatttttctaggacagtaaagtaatctttacaaatgaatttagttgcatggtataaggtgtctcagcacctgtttgccttctattccctttagaaggtaagtaaaagtaatgggggaaaggattaggtggagcctgtctaaacattctagtgtgtcttggcaaacatagcctgaaatgattcttaaagaactggcattgtttaatcaaatatttttaagggagattccttaattgggaagtttagtctgtttggggttcaaagagtaaatgaggattagaaaatcatggagagaggctgggcgcggtggctaacgcctgtaatcctagcactttgggaggctgagatgggcggatcacttgagatcaggagtttgaggctagcctggccaacacagtgaaacctgcatttctactaaaaatacaaaaattagctgggcatggtggtgcatgcctgtaatcccagttaacttgagatgctgaggcaggagaatcgcttgaacttgggaagcagaggttgcagtgaaccgatatcacaccgttgcattccaaggcaagactcaatcacacacacacacacacacacacacaaatcatggggagaaagatgaaacctgtgttcccctttttttggtagtgcccacatctggtgccccatttttaataaccacaggatatttctttagattgatattctcacaaagaagaaatagaatataggctgggcgtggtgtgtcacacctgtaatcccagcacttacggaggccgaagccagcggatcaccagaggtcaggagttcgagaccagcctgaccaacatgatgaaaccctgtctctactaaaaatacaaaaattagccaggcatggtggcatgcacttgtaatcccagctactcgggaggctgagacaggagaatcgcttgaacctgggaggcagaggttgcagtaagccaagatcgcaccattgcactacagcctgggcaacaagaggagcgaaactctgtctcaaaaaaaaaaaagagaaagaatataaagtgaatctgaatctccactcaaggggatggccccaaggatattgtagctggtaatttcttcatgccactaggtgtccccagtgttcaacctccatgactgagattggaagaagtagagttaaaagtttttactacctttgagaagcctgcgggcatgttcacagtcgtcccatgccagccaggttctgaggctaactgcttgtgcccctgctgcttcacatggcattgtgggagttgctgatactggggaaatgatggcagatctgaccaagtggtgctgagaaaaccaccctcggccttgcagactccatagtttatctcaaggcagtgccagtcggatttggtgctaaaggcataaggccaagtcagcctctgatattggcacaaaagaatggtctcatgccagtagcattgaactgctgagcttgggaaggcttaaggctcccacacacagactgagaatgatgggggtccctctgcgtctgctaattagacaaacattctatatctagtgccaaaagtggtcctaaatcctttggcaagggtcctttctgctctcatgctgatttgggggaggactgggcatcctgcctcaggagaacttgagtcctgaggaaagggccctagtaacacttaagggctacccctggctaacagatactcggctgtgggtgagagcagaaggtcttggacccctcgatgtgcaggtacttaattgtgtttccagtgcattttcatatacattatcccatttaacctttataacaggttcacagagtggatattcccattctgttgatgagaaaaagagtggagagactgtgtccagtgtcagcaggaagaaaaaagatctgttggaggccagtacatgttgacagaaactctagaccatattttgtctcctgtctttggccaaagagaactagcttcagtctgaaaagggcagggctaagtggttacaaggaactaaaaagttcaaggtaagacaaatgaggta

SEQ ID NO: 6884 - protein, 49 aa, Homo sapiens
MFSGHLNDNERRVLQTIGISVRGGRLVFASLHDITLPLKLFLYIHAHTK

SEQ ID NO: 6885 - DNA, 1313 bp, Homo sapiens
gacgcggcagaggaggtcccccacaagtgaaggtccagccctgctcctccagggttggcccatgtgtctgggcattcggaggtggcaccaggatcagggcttctggagtccagcatagtgattgggcccaggccgggggcgggtccaggacacagccaggcttccctggccgcagtgcccaactgcccgcagtgcccatggtggctcggatgggaggaaccaccgcggagccggggacagggggagcagggcagtgctctgctgggtgaggggcacccagctccagaggctaggtgggcgtcgctggtgggtggactcctgggcgctgcgcggagccgcgccggctgggttagcgcgggcggggcgcttagtcccacccccagaggaggcggaagaggagcccgagcctggccgcgggctgggccccgccgcagctccagctggccggcttggtcctgcggtcccttctctgggaggcccgaccccggccgcgcccagcccccaccatgccacccgcggggctccgccgggccgcgccgctcaccgcaatcgctctgttggtgctgggggctcccctggtgctggccggcgaggactgcctgtggtacctggaccggaatggctcctggcatccggggtttaactgcgagttcttcaccttctgctgcgggacctgctaccatcggtactgctgcagggacctgaccttgcttatcaccgagaggcagcagaagcactgcctggccttcagccccaagaccatagcaggcatcgcctcagctgtgatcctctttgttgctgtggttgccaccaccatctgctgcttcctctgttcctgttgctacctgtaccgccggcgccagcagctccagagcccatttgaaggccaggagattccaatgacaggcatcccagtgcagccagtatacccatacccccaggaccccaaagctggccctgcacccccacaaccaagccaagccctgggccctactggggacagagccccagggaagtggaacaggagctgaactagaactatgaggggttggggggagggcttggaattatgggctatttttactgggggcaagggagggagatgacagcctgggtcacagtgcctgttttcaaatagtccctctgctcccaagatcccagccaggaaggctggggccctactgtttgtcccctctgggctggggtggggggagggaggaggttccgtcagcagctggcagtagccctcctctctggctgccccactggccacatctctggcctgctagattaaagctgtaaagacataactc

SEQ ID NO: 6886 - protein, 174 aa, Homo sapiens
MPPAGLRRAAPLTAIALLVLGAPLVLAGEDCLWYLDRNGSWHPGFNCEFFTFCCGTCYHRYCCRDLTLLITERQQKHCLAFSPKTIAGIASAVILFVAVVATTICCFLCSCCYLYRRRQQLQSPFEGQEIPMTGIPVQPVYPYPQDPKAGPAPPQPSQALGPTGDRAPGKWNRS

SEQ ID NO: 6887 - DNA, 1559 bp, Homo sapiens
gacgcggcagaggaggtcccccacaagtgaaggtccagccctgctcctccagggttggcccatgtgtctgggcattcggaggtggcaccaggatcagggcttctggagtccagcatagtgattgggcccaggccgggggcgggtccaggacacagccaggcttccctggccgcagtgcccaactgcccgcagtgcccatggtggctcggatgggaggaaccaccgcggagccggggacagggggagcagggcagtgctctgctgggtgaggggcacccagctccagaggctaggtgggcgtcgctggtgggtggactcctgggcgctgcgcggagccgcgccggctgggttagcgcgggcggggcgcttagtcccacccccagaggaggcggaagaggagcccgagcctggccgcgggctgggccccgccgcagctccagctggccggcttggtcctgcggtcccttctctgggaggcccgaccccggccgcgcccagcccccaccatgccacccgcggggctccgccgggccgcgccgctcaccgcaatcgctctgttggtgctgggggctcccctggtgctggccggcgaggactgcctgtggtacctggaccggaatggctcctggcatccggggtttaactgcgagttcttcaccttctgctgcgggacctgctaccatcggtactgctgcagggacctgaccttgcttatcaccgagaggcagcagaagcactgcctggccttcagccccaagaccatagcaggcatcgcctcagctgtgatcctctttgttgctgtggttgccaccaccatctgctgcttcctctgttcctgttgctacctgtaccgccggcgccagcagctccagagcccatttgaaggccaggagattccaatgacaggcatcccagtgcagccagtatacccatacccccaggaccccaaagctggccctgcacccccacagcctggcttcatatacccacctagtggtcctgctccccaatatccactctacccagctgggcccccagtctacaaccctgcagctcctcctccctatatgccaccacagccctcttacccgggagcctgaggaaccagccatgtctctgctgccccttcagtgatgccaaccttgggagatgccctcatcctgtacctgcatctggtcctgggggtggcaggagtcctccagccaccaggccccagaccaagccaagccctgggccctactggggacagagccccagggaagtggaacaggagctgaactagaactatgaggggttggggggagggcttggaattatgggctatttttactgggggcaagggagggagatgacagcctgggtcacagtgcctgttttcaaatagtccctctgctcccaagatcccagccaggaaggctggggccctactgtttgtcccctctgggctggggtggggggagggaggaggttccgtcagcagctggcagtagccctcctctctggctgccccactggccacatctctggcctgctagattaaagctgtaaagacataactc

SEQ ID NO: 6888 - protein, 197 aa, Homo sapiens
MPPAGLRRAAPLTAIALLVLGAPLVLAGEDCLWYLDRNGSWHPGFNCEFFTFCCGTCYHRYCCRDLTLLITERQQKHCLAFSPKTIAGIASAVILFVAVVATTICCFLCSCCYLYRRRQQLQSPFEGQEIPMTGIPVQPVYPYPQDPKAGPAPPQPGFIYPPSGPAPQYPLYPAGPPVYNPAAPPPYMPPQPSYPGA

SEQ ID NO: 6889 - DNA, 1766 bp, Homo sapiens
gacgcggcagaggaggtcccccacaagtgaaggtccagccctgctcctccagggttggcccatgtgtctgggcattcggaggtggcaccaggatcagggcttctggagtccagcatagtgattgggcccaggccgggggcgggtccaggacacagccaggcttccctggccgcagtgcccaactgcccgcagtgcccatggtggctcggatgggaggaaccaccgcggagccggggacagggggagcagggcagtgctctgctgggtgaggggcacccagctccagaggctaggtgggcgtcgctggtgggtggactcctgggcgctgcgcggagccgcgccggctgggttagcgcgggcggggcgcttagtcccacccccagaggaggcggaagaggagcccgagcctggccgcgggctgggccccgccgcagctccagctggccggcttggtcctgcggtcccttctctgggaggcccgaccccggccgcgcccagcccccaccatgccacccgcggggctccgccgggccgcgccgctcaccgcaatcgctctgttggtgctgggggctcccctggtgctggccggcgaggactgcctgtggtacctggaccggaatggctcctggcatccggggtttaactgcgagttcttcaccttctgctgcgggacctgctaccatcggtactgctgcagggacctgaccttgcttatcaccgagaggcagcagaagcactgcctggccttcagccccaagaccatagcaggcatcgcctcagctgtgatcctctttgttgctgtggttgccaccaccatctgctgcttcctctgttcctgttgctacctgtaccgccggcgccagcagctccagagcccatttgaaggccaggagattccaatgacaggcatcccagtgcagccagtatacccatacccccaggaccccaaagctggccctgcacccccacaaccaagccaagccctgggccctactggggacagagccccagggaagtggaacaggagctgaactagaactatgaggggttggggggagggcttggaattatgggctatttttactgggggcaagggagggagatgacagcctgggtcacagtgcctgttttcaaatagtccctctgctcccaagatcccagccaggaaggctggggccctactgtttgtcccctctgggctggggtggggggagggaggaggttccgtcagcagctggcagtagccctcctctctggctgccccactggccacatctctggcctgctagattaaagctgtaaagacataactcatatcagtcgcatcattggacccatccacaccttccaggaacaccgccttcagctgggcccagactgttgcccactccatattccaaaagtaggggagggccagcaccagcatcggagcacagcaccatcctcacccccatccacaagcagaccaaggcggactgttcctggcttcctaaaggcttcctaaagacaatgaggtgaattttgccacagctctgaagagatgctcgtttgcactacagatattccctgctagggatcaacagctctacaacagctgaggcactgctaactgtacaaaggcagttcccattcaggtacccttagattcattctgggccccaccactttctgaccttggccatgtctccaaaggttcccaagcctcaatgtccttatctatagaatggagataggacaggtgcggtagctcatgcctgtaatctcag

SEQ ID NO: 6890 - protein, 174 aa, Homo sapiens; identical to SEQ ID NO: 6886

SEQ ID NO: 6891 - DNA, 2012 bp, Homo sapiens
gacgcggcagaggaggtcccccacaagtgaaggtccagccctgctcctccagggttggcccatgtgtctgggcattcggaggtggcaccaggatcagggcttctggagtccagcatagtgattgggcccaggccgggggcgggtccaggacacagccaggcttccctggccgcagtgcccaactgcccgcagtgcccatggtggctcggatgggaggaaccaccgcggagccggggacagggggagcagggcagtgctctgctgggtgaggggcacccagctccagaggctaggtgggcgtcgctggtgggtggactcctgggcgctgcgcggagccgcgccggctgggttagcgcgggcggggcgcttagtcccacccccagaggaggcggaagaggagcccgagcctggccgcgggctgggccccgccgcagctccagctggccggcttggtcctgcggtcccttctctgggaggcccgaccccggccgcgcccagcccccaccatgccacccgcggggctccgccgggccgcgccgctcaccgcaatcgctctgttggtgctgggggctcccctggtgctggccggcgaggactgcctgtggtacctggaccggaatggctcctggcatccggggtttaactgcgagttcttcaccttctgctgcgggacctgctaccatcggtactgctgcagggacctgaccttgcttatcaccgagaggcagcagaagcactgcctggccttcagccccaagaccatagcaggcatcgcctcagctgtgatcctctttgttgctgtggttgccaccaccatctgctgcttcctctgttcctgttgctacctgtaccgccggcgccagcagctccagagcccatttgaaggccaggagattccaatgacaggcatcccagtgcagccagtatacccatacccccaggaccccaaagctggccctgcacccccacagcctggcttcatatacccacctagtggtcctgctccccaatatccactctacccagctgggcccccagtctacaaccctgcagctcctcctccctatatgccaccacagccctcttacccgggagcctgaggaaccagccatgtctctgctgccccttcagtgatgccaaccttgggagatgccctcatcctgtacctgcatctggtcctgggggtggcaggagtcctccagccaccaggccccagaccaagccaagccctgggccctactggggacagagccccagggaagtggaacaggagctgaactagaactatgaggggttggggggagggcttggaattatgggctatttttactgggggcaagggagggagatgacagcctgggtcacagtgcctgttttcaaatagtccctctgctcccaagatcccagccaggaaggctggggccctactgtttgtcccctctgggctggggtggggggagggaggaggttccgtcagcagctggcagtagccctcctctctggctgccccactggccacatctctggcctgctagattaaagctgtaaagacataactcatatcagtcgcatcattggacccatccacaccttccaggaacaccgccttcagctgggcccagactgttgcccactccatattccaaaagtaggggagggccagcaccagcatcggagcacagcaccatcctcacccccatccacaagcagaccaaggcggactgttcctggcttcctaaaggcttcctaaagacaatgaggtgaattttgccacagctctgaagagatgctcgtttgcactacagatattccctgctagggatcaacagctctacaacagctgaggcactgctaactgtacaaaggcagttcccattcaggtacccttagattcattctgggccccaccactttctgaccttggccatgtctccaaaggttcccaagcctcaatgtccttatctatagaatggagataggacaggtgcggtagctcatgcctgtaatctcag

SEQ ID NO: 6892 - protein, 197 aa, Homo sapiens; identical to SEQ ID NO: 6888

SEQ ID NO: 6893 - DNA, 1077 bp, Homo sapiens
catggtggctcggatgggaggaaccaccgcggagccggggacagggggagcagggcagtgctctgctgggtgaggggcacccagctccagaggctagtgctggccggcgaggactgcctgtggtacctggaccggaatggctcctggcatccggggtttaactgcgagttcttcaccttctgctgcgggacctgctaccatcggtactgctgcagggacctgaccttgcttatcaccgagaggcagcagaagcactgcctggccttcagccccaagaccatagcaggcatcgcctcagctgtgatcctctttgttgctgtggttgccaccaccatctgctgcttcctctgttcctgttgctacctgtaccgccggcgccagcagctccagagcccatttgaaggccaggagattccaatgacaggcatcccagtgcagccagtatacccatacccccaggaccccaaagctggccctgcacccccacagcctggcttcatatacccacctagtggtcctgctccccaatatccactctacccagctgggcccccagtctacaaccctgcagctcctcctccctatatgccaccacagccctcttacccgggagcctgaggaaccagccatgtctctgctgccccttcagtgatgccaaccttgggagatgccctcatcctgtacctgcatctggtcctgggggtggcaggagtcctccagccaccaggccccagaccaagccaagccctgggccctactggggacagagccccagggaagtggaacaggagctgaactagaactatgaggggttggggggagggcttggaattatgggctatttttactgggggcaagggagggagatgacagcctgggtcacagtgcctgttttcaaatagtccctctgctcccaagatcccagccaggaaggctggggccctactgtttgtcccctctgggctggggtggggggagggaggaggttccgtcagcagctggcagtagccctcctctctggctgccccactggccacatctctggcctgctagattaaagctgtaaagacataactc

SEQ ID NO: 6894 - protein, 66 aa, Homo sapiens
MTGIPVQPVYPYPQDPKAGPAPPQPGFIYPPSGPAPQYPLYPAGPPVYNPAAPPPYMPPQPSYPGA

SEQ ID NO: 6895 - DNA, 1530 bp, Homo sapiens
catggtggctcggatgggaggaaccaccgcggagccggggacagggggagcagggcagtgctctgctgggtgaggggcacccagctccagaggctagtgctggccggcgaggactgcctgtggtacctggaccggaatggctcctggcatccggggtttaactgcgagttcttcaccttctgctgcgggacctgctaccatcggtactgctgcagggacctgaccttgcttatcaccgagaggcagcagaagcactgcctggccttcagccccaagaccatagcaggcatcgcctcagctgtgatcctctttgttgctgtggttgccaccaccatctgctgcttcctctgttcctgttgctacctgtaccgccggcgccagcagctccagagcccatttgaaggccaggagattccaatgacaggcatcccagtgcagccagtatacccatacccccaggaccccaaagctggccctgcacccccacagcctggcttcatatacccacctagtggtcctgctccccaatatccactctacccagctgggcccccagtctacaaccctgcagctcctcctccctatatgccaccacagccctcttacccgggagcctgaggaaccagccatgtctctgctgccccttcagtgatgccaaccttgggagatgccctcatcctgtacctgcatctggtcctgggggtggcaggagtcctccagccaccaggccccagaccaagccaagccctgggccctactggggacagagccccagggaagtggaacaggagctgaactagaactatgaggggttggggggagggcttggaattatgggctatttttactgggggcaagggagggagatgacagcctgggtcacagtgcctgttttcaaatagtccctctgctcccaagatcccagccaggaaggctggggccctactgtttgtcccctctgggctggggtggggggagggaggaggttccgtcagcagctggcagtagccctcctctctggctgccccactggccacatctctggcctgctagattaaagctgtaaagacataactcatatcagtcgcatcattggacccatccacaccttccaggaacaccgccttcagctgggcccagactgttgcccactccatattccaaaagtaggggagggccagcaccagcatcggagcacagcaccatcctcacccccatccacaagcagaccaaggcggactgttcctggcttcctaaaggcttcctaaagacaatgaggtgaattttgccacagctctgaagagatgctcgtttgcactacagatattccctgctagggatcaacagctctacaacagctgaggcactgctaactgtacaaaggcagttcccattcaggtacccttagattcattctgggccccaccactttctgaccttggccatgtctccaaaggttcccaagcctcaatgtccttatctatagaatggagataggacaggtgcggtagctcatgcctgtaatctcag

SEQ ID NO: 6896 - protein, 66 aa, Homo sapiens; identical to SEQ ID NO: 6894

SEQ ID NO: 6897 - DNA, 1487 bp, Homo sapiens
ttggtcctgcggtcccttctctgggaggcccgaccccggccgcgcccagcccccaccatgccacccgcggggctccgccgggccgcgccgctcaccgcaatcgctctgttggtgctgggggctcccctgggtaaggggatggggagagatgcggcaggagtgggatgggggcggaggaaggggagggaccgatccgaggggcttgggctcggggcttctccgagaccctccggctgccacgggagccttgggtgttgctgggtcctcaagaagcgggaagagggagctccaggatgctgggccatgggaggctgatcccggggtgcagggtcagcttcaggcagaggcctcgggggctctggggctgagaccctcagggtggagacaaggggcaaccctcagtgttcgggagccgtcaggctggggaccgccgggggagtggggccgagcgcggctggggatgaactggcctggtggccactgggcacccccaatccctgcccgcagtgctggccggcgaggactgcctgtggtacctggaccggaatggctcctggcatccggggtttaactgcgagttcttcaccttctgctgcgggacctgctaccatcggtactgctgcagggacctgaccttgcttatcaccgagaggcagcagaagcactgcctggccttcagccccaagaccatagcaggcatcgcctcagctgtgatcctctttgttgctgtggttgccaccaccatctgctgcttcctctgttcctgttgctacctgtaccgccggcgccagcagctccagagcccatttgaaggccaggagattccaatgacaggcatcccagtgcagccagtatacccatacccccaggaccccaaagctggccctgcacccccacagcctggcttcatatacccacctagtggtcctgctccccaatatccactctacccagctgggcccccagtctacaaccctgcagctcctcctccctatatgccaccacagccctcttacccgggagcctgaggaaccagccatgtctctgctgccccttcagtgatgccaaccttgggagatgccctcatcctgtacctgcatctggtcctgggggtggcaggagtcctccagccaccaggccccagaccaagccaagccctgggccctactggggacagagccccagggaagtggaacaggagctgaactagaactatgaggggttggggggagggcttggaattatgggctatttttactgggggcaagggagggagatgacagcctgggtcacagtgcctgttttcaaatagtccctctgctcccaagatcccagccaggaaggctggggccctactgtttgtcccctctgggctggggtggggggagggaggaggttccgtcagcagctggcagtagccctcctctctggctgccccactggccacatctctggcctgctagattaaagctgtaaagacataactc

SEQ ID NO: 6898 - protein, 66 aa, Homo sapiens; identical to SEQ ID NO: 6894

SEQ ID NO: 6899 - DNA, 493 bp, Homo sapiens
tgtctgcccctggatcagacccagacagggaggggctgctgatgctggtagagacagagctgaggccacagtcctaccctctcctccaggccctacccagccccgccctgttggctcatgcccacaactacttaacttcttgagctgcttgaggttgctggagcggatggcagccaatagctggtcacgggagttcttctcctgggcagggaggactttgtctcccatcttcctctgggtagctgatgtgtcgctggttgtggaagcggagctcggtcagcgtgttgttctggaggagggcccggaagatggccaggatgcctttgcctgtgatgtggttggagtccaggttgaggctggtgatggtcttgttggccttgagcatgatggcaatggcaaaggccacgtggtcatcggctcgcgtgttggccaaggcgaacagcttaaccacagtgttgaactccagagcctcagtaaaccggaccaagatctc

SEQ ID NO: 6900 - protein, 108 aa, Homo sapiens
MAANSWSREFFSWAGRTLSPIFLWVADVSLVVEAELGQRVVLEEGPEDGQDAFACDVVGVQVEAGDGLVGLEHDGNGKGHVVIGSRVGQGEQLNHSVELQSLSKPDQD

SEQ ID NO: 6901 - DNA, 1143 bp, Homo sapiens
ggctgccaggcaccatctgccaatgccatgactgctcaggcctcacctcccagggctacacagaccctgcccaccccatccctggctgacctgctgtggatgtccctattctgccatgggagagtccaggcctgggtcacgctcaaggaaggatgccttatctcttctcactttccttttcttgtctctgaggctctccaaattttgctttagtacatggagctcaggtttctggacaagaagagtccttttagcacatcactgagaagatggcactgtccagggcccatgtagctggcaagctgcaaaaggcctgtgatccaggaaagatgtcccacagggaccacatccaccccagccccactgccctccagggccaggattcaggcctctgaggagcccacggggcaaagctgctgggccagtggcactctgtgtgggaaaatggcagaaagatggagaggcatgggggcccaaaggggagcgtggggaggggctgaggataccccaaagtccaggctaattagaggatgtggcaggggcagtggcctggatgcacagtgcctgatgggagtaggctccagacaggaggagtgggacagacagcagctggacttgaaggtttgatgccaaagcagacattttccctccacccacttgcctgtcaccccagtcacctaagcaatcactgggcccagaggagaggagacagacacacactggctcctggacctaaagggtatgagctggagctaaggccagctagagcttccactgtcagccctcactgtcagtcccactgcacccccctgtgcctgctgggcactgggcactagctagatgctttaggttgcttcagctgatccttcaactctgtgaggtggataccaatattctattttgcagatagaatttggcccagagaggttaactaatatatccatgatcacacagctaataaaagtcagagctcaggtctgttttgtttgttggttttgttttgagcccaggtcttcaggccatagaactgcttctcattaacagctccccttccttccctcactgaaataaggctgtgacggtgctgcaggaaagcactggacgctcacctgaacccaaacaacctgcctccaaatcttaagg

SEQ ID NO: 6902 - protein, 101 aa, Homo sapiens
MWQGQWPGCTVPDGSRLQTGGVGQTAAGLEGLMPKQTFSLHPLACHPSHLSNHWAQRRGDRHTLAPGPKGYELELRPARASTVSPHCQSHCTPLCLLGTGH

SEQ ID NO: 6903 - DNA, 2207 bp, Homo sapiens
aagatgggagacaaagtcctccctgcccaggagaagaactcccgtgaccagctattggctgccatccgctccagcaacctcaagcagctcaagaagtggaagtgcccaaactgcttcagtaggaccaggctgccaggcaccatctgccaatgccatgactgctcaggcctcacctcccagggctacacagaccctgcccaccccatccctggctgacctgctgtggatgtccctattctgccatgggagagtccaggcctgggtcacgctcaaggaaggatgccttatctcttctcactttccttttcttgtctctgaggctctccaaattttgctttagtacatggagctcaggtttctggacaagaagagtccttttagcacatcactgagaagatggcactgtccagggcccatgtagctggcaagctgcaaaaggcctgtgatccaggaaagatgtcccacagggaccacatccaccccagccccactgccctccagggccaggattcaggcctctgaggagcccacggggcaaagctgctgggccagtggcactctgtgtgggaaaatggcagaaagatggagaggcatgggggcccaaaggggagcgtggggaggggctgaggataccccaaagtccaggctaattagaggatgtggcaggggcagtggcctggatgcacagtgcctgatgggagtaggctccagacaggaggagtgggacagacagcagctggacttgaaggtttgatgccaaagcagacattttcctcacacccacctgctgctgtatgaatagctgtgtatctgtttttccataagattttgataatatatacaaacctttagctgtgaatggctgtgccccacctgttgtcctgaactgtgagtcctgatcctaaccctgggctccctggaggactctagaagctcaggttccctgccacactatttgagttggccaagaaataaattcacatcctcagaaagtgcagcatggaggaaaatctgaactctaagcagaagactctccactgacctggttgtccaggtctagaaggccaggcctctactaggtctgctcctgaaccagtcctgctgcctggagtcagtagccagagttgttctcaggggtgctggggcagagtggagcccagggtgctgggatggctatattaggcatgttcagggatgctcattccatgactctgcctaaccatgggctcagggccaggtcctcacagcagtcacaggcccaggaaggcggcaggcagagaagtggagtgactatttggagaatagcacccatatctgtgtgccctagggctcagaggggcctcatcttccccagccctccccacctgctcaccaattccacttcctgccccaactgcaggaatgctgacaatgctgccatgcccaccatcgggtgtaggtgaaaggcatctttctgaatttcattctcttgaaggtgctgccaccccttggcactgtggaactgccaccttgggtctgtgtcacttgtaggtttctctgcctccaggttgcctcaacagcaggaggcacagcagtttcaccatctttgaggtgagggtggggtgccccagctaggaagcaagatcgctgtgctaggtctgaccaaaaccagagggcagtctagtcctgggggtaaagccctcagatcccagggtacactcttctccattccctccacccacttgcctgtcaccccagtcacctaagcaatcactgggcccagaggagaggagacagacacacactggctcctggacctaaagggtatgagctggagctaaggccagctagagcttccactgtcagccctcactgtcagtcccactgcacccccctgtgcctgctgggcactgggcactagctagatgctttaggttgcttcagctgatccttcaactctgtgaggtggataccaatattctattttgcagatagaatttggcccagagaggttaactaatatatccatgatcacacagctaataaaagtcagagctcaggtctgttttgtttgttggttttgttttgagcccaggtcttcaggccatagaactgcttctcattaacagctccccttccttccctcactgaaataaggctgtgacggtgctgcaggaaagcactggacgctcacctgaacccaaacaacctgcctccaaatcttaagg

SEQ ID NO: 6904 - protein, 70 aa, Homo sapiens
MGDKVLPAQEKNSRDQLLAAIRSSNLKQLKKWKCPNCFSRTRLPGTICQCHDCSGLTSQGYTDPAHPIPG

SEQ ID NO: 6905 - DNA, 1388 bp, Homo sapiens
agggcagtggccaccaagaaggaagaggagaagaaagggagtgacaggaacacaggcttgagcagggacaaggataaaaagagagaggagatgaaggaggtggccaagaaagaggatgatgagaaggtaaaaggggagcgtaggaacacagacaccagaaaagagggtgagaagatgaaaagagcaggtgggaacacagacatgaaaaaggaggatgagaaggtaaaaagaggaactgggaacacagacaccaaaaaggacgatgaaaaagtcaagaagaatgaacccttacatgaaaaggaagccaaggatgacagcaagaccaaaacacccgagaaacagacgcccagtggccccaccaagccctctgaaggaccggccaaggtggaggaggaggcagctcccagcatatttgatgagcctctggagagagtgaagaacaatgaccccgagatgactgaggtgaacgtcaacaactcagactgcatcacaaatgagatcttggtccggtttactgaggctctggagttcaacactgtggttaagctgttcgccttggccaacacgcgagccgatgaccacgtggcctttgccattgccatcatgctcaaggccaacaagaccatcaccagcctcaacctggactccaaccacatcacaggcaaaggcatcctggccatcttccgggccctcctccagaacaacacgctgaccgagctccgcttccacaaccagcgacacatctgtggaggcaagacggagatggagatcgccaagctgctgaaggagaatactaccctgctcaagctgggctaccattttgagctggccgggccccgaatgactgtcaccaatctgctcagccgcaacatggacaagcagagacaaaagcggctgcaggagcaaaggcaggcccagtcacctaagcaatcactgggcccagaggagaggagacagacacacactggctcctggacctaaagggtatgagctggagctaaggccagctagagcttccactgtcagccctcactgtcagtcccactgcacccccctgtgcctgctgggcactgggcactagctagatgctttaggttgcttcagctgatccttcaactctgtgaggtggataccaatattctattttgcagatagaatttggcccagagaggttaactaatatatccatgatcacacagctaataaaagtcagagctcaggtctgttttgtttgttggttttgttttgagcccaggtcttcaggccatagaactgcttctcattaacagctccccttccttccctcactgaaataaggctgtgacggtgctgcaggaaagcactggacgctcacctgaacccaaacaacctgcctccaaatcttaagg

SEQ ID NO: 6906 - protein, 296 aa, Homo sapiens
MKEVAKKEDDEKVKGERRNTDTRKEGEKMKRAGGNTDMKKEDEKVKRGTGNTDTKKDDEKVKKNEPLHEKEAKDDSKTKTPEKQTPSGPTKPSEGPAKVEEEAAPSIFDEPLERVKNNDPEMTEVNVNNSDCITNEILVRFTEALEFNTVVKLFALANTRADDHVAFAIAIMLKANKTITSLNLDSNHITGKGILAIFRALLQNNTLTELRFHNQRHICGGKTEMEIAKLLKENTTLLKLGYHFELAGPRMTVTNLLSRNMDKQRQKRLQEQRQAQSPKQSLGPEERRQTHTGSWT

SEQ ID NO: 6907 - DNA, 3719 bp, Homo sapiens
cagcacctgtagcacagaagggccaaggagctgcagtcctcgaccagcaggaggtttgctcctcagcccactcgctgcatccagatcagctcacccctctcccttccctgcccaccaggactctgatagcccctggcagccacagcccattttgccaagatgtctagagtagccaaatatcgccggcaggtgagtgaagaccccgacatcgacagcctgctggagaccctgtctcccgaggagatggaggagctggagaaggagctggacgtggtggacccagacgggagtgttcccgtggggctgcggcagagaaaccagacggagaaacagtccacgggtgtgtacaaccgggaggccatgctcaacttctgtgaaaaggagaccaagaaggaagaggagaagaaagggagtgacaggaacacaggcttgagcagggacaaggataaaaagagagaggagatgaaggaggtggccaagaaagaggatgatgagaaggtaaaaggggagcgtaggaacacagacaccagaaaagagggtgagaagatgaaaagagcaggtgggaacacagacatgaaaaaggaggatgagaaggtaaaaagaggaactgggaacacagacaccaaaaaggacgatgaaaaagtcaagaagaatgaacccttacatgaaaaggaagccaaggatgacagcaagaccaaaacacccgagaaacagacgcccagtggccccaccaagccctctgaaggaccggccaaggtggaggaggaggcagctcccagcatatttgatgagcctctggagagagtgaagaacaatgaccccgagatgactgaggtgaacgtcaacaactcagactgcatcacaaatgagatcttggtccggtttactgaggctctggagttcaacactgtggttaagctgttcgccttggccaacacgcgagccgatgaccacgtggcctttgccattgccatcatgctcaaggccaacaagaccatcaccagcctcaacctggactccaaccacatcacaggcaaaggcatcctggccatcttccgggccctcctccagaacaacacgctgaccgagctccgcttccacaaccagcgacacatctgtggaggcaagacggagatggagatcgccaagctgctgaaggagaatactaccctgctcaagctgggctaccattttgagctggccgggccccgaatgactgtcaccaatctgctcagccgcaacatggacaagcagagacaaaagcggctgcaggagcaaaggcaggcacaggaagccaagggagagaagaaggatctgctggaggtacccaaggccggggccgtggctaagggctccccaaaaccttcacctcaaccatctccaaagccctctccaaagaactcacccaaaaaagggggtgctccagctgccccaccaccccctccccctcccttggctccaccccttatcatggagaacctgaagaattcactctcaccagctacccagaggaagatgggagacaaagtcctccctgcccaggagaagaactcccgtgaccagctattggctgccatccgctccagcaacctcaagcagctcaagaagtggaagtgcccaaactgcttcagtaggaccaggctgccaggcaccatctgccaatgccatgactgctcaggcctcacctcccagggctacacagaccctgcccaccccatccctggctgacctgctgtggatgtccctattctgccatgggagagtccaggcctgggtcacgctcaaggaaggatgccttatctcttctcactttccttttcttgtctctgaggctctccaaattttgctttagtacatggagctcaggtttctggacaagaagagtccttttagcacatcactgagaagatggcactgtccagggcccatgtagctggcaagctgcaaaaggcctgtgatccaggaaagatgtcccacagggaccacatccaccccagccccactgccctccagggccaggattcaggcctctgaggagcccacggggcaaagctgctgggccagtggcactctgtgtgggaaaatggcagaaagatggagaggcatgggggcccaaaggggagcgtggggaggggctgaggataccccaaagtccaggctaattagaggatgtggcaggggcagtggcctggatgcacagtgcctgatgggagtaggctccagacaggaggagtgggacagacagcagctggacttgaaggtttgatgccaaagcagacattttcctcacacccacctgctgctgtatgaatagctgtgtatctgtttttccataagattttgataatatatacaaacctttagctgtgaatggctgtgccccacctgttgtcctgaactgtgagtcctgatcctaaccctgggctccctggaggactctagaagctcaggttccctgccacactatttgagttggccaagaaataaattcacatcctcagaaagtgcagcatggaggaaaatctgaactctaagcagaagactctccactgacctggttgtccaggtctagaaggccaggcctctactaggtctgctcctgaaccagtcctgctgcctggagtcagtagccagagttgttctcaggggtgctggggcagagtggagcccagggtgctgggatggctatattaggcatgttcagggatgctcattccatgactctgcctaaccatgggctcagggccaggtcctcacagcagtcacaggcccaggaaggcggcaggcagagaagtggagtgactatttggagaatagcacccatatctgtgtgccctagggctcagaggggcctcatcttccccagccctccccacctgctcaccaattccacttcctgccccaactgcaggaatgctgacaatgctgccatgcccaccatcgggtgtaggtgaaaggcatctttctgaatttcattctcttgaaggtgctgccaccccttggcactgtggaactgccaccttgggtctgtgtcacttgtaggtttctctgcctccaggttgcctcaacagcaggaggcacagcagtttcaccatctttgaggtgagggtggggtgccccagctaggaagcaagatcgctgtgctaggtctgaccaaaaccagagggcagtctagtcctgggggtaaagccctcagatcccagggtacactcttctccattccctccacccacttgcctgtcaccccagtcacctaagcaatcactgggcccagaggagaggagacagacacacactggctcctggacctaaagggtatgagctggagctaaggccagctagagcttccactgtcagccctcactgtcagtcccactgcacccccctgtgcctgctgggcactgggcactagctagatgctttaggttgcttcagctgatccttcaactctgtgaggtggataccaatattctattttgcagatagaatttggcccagagaggttaactaatatatccatgatcacacagctaataaaagtcagagctcaggtctgttttgtttgttggttttgttttgagcccaggtcttcaggccatagaactgcttctcattaacagctccccttccttccctcactgaaataaggctgtgacggtgctgcaggaaagcactggacgctcacctgaacccaaacaacctgcctccaaatcttaagg

SEQ ID NO: 6908 - protein, 522 aa, Homo sapiens
MSRVAKYRRQVSEDPDIDSLLETLSPEEMEELEKELDVVDPDGSVPVGLRQRNQTEKQSTGVYNREAMLNFCEKETKKEEEKKGSDRNTGLSRDKDKKREEMKEVAKKEDDEKVKGERRNTDTRKEGEKMKRAGGNTDMKKEDEKVKRGTGNTDTKKDDEKVKKNEPLHEKEAKDDSKTKTPEKQTPSGPTKPSEGPAKVEEEAAPSIFDEPLERVKNNDPEMTEVNVNNSDCITNEILVRFTEALEFNTVVKLFALANTRADDHVAFAIAIMLKANKTITSLNLDSNHITGKGILAIFRALLQNNTLTELRFHNQRHICGGKTEMEIAKLLKENTTLLKLGYHFELAGPRMTVTNLLSRNMDKQRQKRLQEQRQAQEAKGEKKDLLEVPKAGAVAKGSPKPSPQPSPKPSPKNSPKKGGAPAAPPPPPPPLAPPLIMENLKNSLSPATQRKMGDKVLPAQEKNSRDQLLAAIRSSNLKQLKKWKCPNCFSRTRLPGTICQCHDCSGLTSQGYTDPAHPIPG

SEQ ID NO: 6909 - DNA, 2042 bp, Homo sapiens
aagatgggagacaaagtcctccctgcccaggagaagaactcccgtgaccagctattggctgccatccgctccagcaacctcaagcagctcaagaagtggaagtgcccaaactgcttcagtaggaccaggctgccaggcaccatctgccaatgccatgactgctcaggcctcacctcccagggctacacagaccctgcccaccccatccctggctgacctgctgtggatgtccctattctgccatgggagagtccaggcctgggtcacgctcaaggaaggatgccttatctcttctcactttccttttcttgtctctgaggctctccaaattttgctttagtacatggagctcaggtttctggacaagaagagtccttttagcacatcactgagaagatggcactgtccagggcccatgtagctggcaagctgcaaaaggcctgtgatccaggaaagatgtcccacagggaccacatccaccccagccccactgccctccagggccaggattcaggcctctgaggagcccacggggcaaagctgctgggccagtggcactctgtgtgggaaaatggcagaaagatggagaggcatgggggcccaaaggggagcgtggggaggggctgaggataccccaaagtccaggctaattagaggatgtggcaggggcagtggcctggatgcacagtgcctgatgggagtaggctccagacaggaggagtgggacagacagcagctggacttgaaggtttgatgccaaagcagacattttcctcacacccacctgctgctgtatgaatagctgtgtatctgtttttccataagattttgataatatatacaaacctttagctgtgaatggctgtgccccacctgttgtcctgaactgtgagtcctgatcctaaccctgggctccctggaggactctagaagctcaggttccctgccacactatttgagttggccaagaaataaattcacatcctcagaaagtgcagcatggaggaaaatctgaactctaagcagaagactctccactgacctggttgtccaggtctagaaggccaggcctctactaggtctgctcctgaaccagtcctgctgcctggagtcagtagccagagttgttctcaggggtgctggggcagagtggagcccagggtgctgggatggctatattaggcatgttcagggatgctcattccatgactctgcctaaccatgggctcagggccaggtcctcacagcagtcacaggcccaggaaggcggcaggcagagaagtggagtgactatttggagaatagcacccatatctgtgtgccctagggctcagaggggcctcatcttccccagccctccccacctgctcaccaattccacttcctgccccaactgcaggaatgctgacaatgctgccatgcccaccatcgggtgtaggtgaaaggcatctttctgaatttcattctcttgaaggtgctgccaccccttggcactgtggaactgccaccttgggtctgtgtcacttgtaggtttctctgcctccaggttgcctcaacagcaggaggcacagcagtttcaccatctttgaggtgagggtggggtgccccagctaggaagcaagatcgctgtgctaggtctgaccaaaaccagagggcagtctagtcctgggggtaaagccctcagatcccagggtacactcttctccattccctccacccacttgcctgtcaccccagtcacctaagcaatcactgggcccagaggagaggagacagacacacactggctcctggacctaaagggtatgagctggagctaaggccagctagagcttccactgtcagccctcactgtcagtcccactgcacccccctgtgcctgctgggcactgggcactagctagatgctttaggttgcttcagctgatccttcaactctgtgaggtggataccaatattctattttgcagatagaatttggcccagagaggttaactaatatatccatgatcacacagctaataaaagtcagagctcaggtc

SEQ ID NO: 6910 - protein, 70 aa, Homo sapiens; identical to SEQ ID NO: 6904

SEQ ID NO: 6911 - DNA, 3554 bp, Homo sapiens
cagcacctgtagcacagaagggccaaggagctgcagtcctcgaccagcaggaggtttgctcctcagcccactcgctgcatccagatcagctcacccctctcccttccctgcccaccaggactctgatagcccctggcagccacagcccattttgccaagatgtctagagtagccaaatatcgccggcaggtgagtgaagaccccgacatcgacagcctgctggagaccctgtctcccgaggagatggaggagctggagaaggagctggacgtggtggacccagacgggagtgttcccgtggggctgcggcagagaaaccagacggagaaacagtccacgggtgtgtacaaccgggaggccatgctcaacttctgtgaaaaggagaccaagaaggaagaggagaagaaagggagtgacaggaacacaggcttgagcagggacaaggataaaaagagagaggagatgaaggaggtggccaagaaagaggatgatgagaaggtaaaaggggagcgtaggaacacagacaccagaaaagagggtgagaagatgaaaagagcaggtgggaacacagacatgaaaaaggaggatgagaaggtaaaaagaggaactgggaacacagacaccaaaaaggacgatgaaaaagtcaagaagaatgaacccttacatgaaaaggaagccaaggatgacagcaagaccaaaacacccgagaaacagacgcccagtggccccaccaagccctctgaaggaccggccaaggtggaggaggaggcagctcccagcatatttgatgagcctctggagagagtgaagaacaatgaccccgagatgactgaggtgaacgtcaacaactcagactgcatcacaaatgagatcttggtccggtttactgaggctctggagttcaacactgtggttaagctgttcgccttggccaacacgcgagccgatgaccacgtggcctttgccattgccatcatgctcaaggccaacaagaccatcaccagcctcaacctggactccaaccacatcacaggcaaaggcatcctggccatcttccgggccctcctccagaacaacacgctgaccgagctccgcttccacaaccagcgacacatctgtggaggcaagacggagatggagatcgccaagctgctgaaggagaatactaccctgctcaagctgggctaccattttgagctggccgggccccgaatgactgtcaccaatctgctcagccgcaacatggacaagcagagacaaaagcggctgcaggagcaaaggcaggcacaggaagccaagggagagaagaaggatctgctggaggtacccaaggccggggccgtggctaagggctccccaaaaccttcacctcaaccatctccaaagccctctccaaagaactcacccaaaaaagggggtgctccagctgccccaccaccccctccccctcccttggctccaccccttatcatggagaacctgaagaattcactctcaccagctacccagaggaagatgggagacaaagtcctccctgcccaggagaagaactcccgtgaccagctattggctgccatccgctccagcaacctcaagcagctcaagaagtggaagtgcccaaactgcttcagtaggaccaggctgccaggcaccatctgccaatgccatgactgctcaggcctcacctcccagggctacacagaccctgcccaccccatccctggctgacctgctgtggatgtccctattctgccatgggagagtccaggcctgggtcacgctcaaggaaggatgccttatctcttctcactttccttttcttgtctctgaggctctccaaattttgctttagtacatggagctcaggtttctggacaagaagagtccttttagcacatcactgagaagatggcactgtccagggcccatgtagctggcaagctgcaaaaggcctgtgatccaggaaagatgtcccacagggaccacatccaccccagccccactgccctccagggccaggattcaggcctctgaggagcccacggggcaaagctgctgggccagtggcactctgtgtgggaaaatggcagaaagatggagaggcatgggggcccaaaggggagcgtggggaggggctgaggataccccaaagtccaggctaattagaggatgtggcaggggcagtggcctggatgcacagtgcctgatgggagtaggctccagacaggaggagtgggacagacagcagctggacttgaaggtttgatgccaaagcagacattttcctcacacccacctgctgctgtatgaatagctgtgtatctgtttttccataagattttgataatatatacaaacctttagctgtgaatggctgtgccccacctgttgtcctgaactgtgagtcctgatcctaaccctgggctccctggaggactctagaagctcaggttccctgccacactatttgagttggccaagaaataaattcacatcctcagaaagtgcagcatggaggaaaatctgaactctaagcagaagactctccactgacctggttgtccaggtctagaaggccaggcctctactaggtctgctcctgaaccagtcctgctgcctggagtcagtagccagagttgttctcaggggtgctggggcagagtggagcccagggtgctgggatggctatattaggcatgttcagggatgctcattccatgactctgcctaaccatgggctcagggccaggtcctcacagcagtcacaggcccaggaaggcggcaggcagagaagtggagtgactatttggagaatagcacccatatctgtgtgccctagggctcagaggggcctcatcttccccagccctccccacctgctcaccaattccacttcctgccccaactgcaggaatgctgacaatgctgccatgcccaccatcgggtgtaggtgaaaggcatctttctgaatttcattctcttgaaggtgctgccaccccttggcactgtggaactgccaccttgggtctgtgtcacttgtaggtttctctgcctccaggttgcctcaacagcaggaggcacagcagtttcaccatctttgaggtgagggtggggtgccccagctaggaagcaagatcgctgtgctaggtctgaccaaaaccagagggcagtctagtcctgggggtaaagccctcagatcccagggtacactcttctccattccctccacccacttgcctgtcaccccagtcacctaagcaatcactgggcccagaggagaggagacagacacacactggctcctggacctaaagggtatgagctggagctaaggccagctagagcttccactgtcagccctcactgtcagtcccactgcacccccctgtgcctgctgggcactgggcactagctagatgctttaggttgcttcagctgatccttcaactctgtgaggtggataccaatattctattttgcagatagaatttggcccagagaggttaactaatatatccatgatcacacagctaataaaagtcagagctcaggtc

SEQ ID NO: 6912 - protein, 522 aa, Homo sapiens; identical to SEQ ID NO: 6908

SEQ ID NO: 6913 - DNA, 3945 bp, Homo sapiens
attagaccagccggggtccactagccctgggcttcagggaggctgctgcgtccagtgaacacttcagcacctgtagcacagaagggccaaggagctgcagtcctcgaccagcaggaggtttgctcctcagcccactcgctgcatccagatcagctcacccctctcccttccctgcccaccaggactctgatagcccctggcagccacagcccattttgccaagatgtctagagtagccaaatatcgccggcaggtgagtgaagaccccgacatcgacagcctgctggagaccctgtctcccgaggagatggaggagctggagaaggagctggacgtggtggacccagacgggagtgttcccgtggggctgcggcagagaaaccagacggagaaacagtccacgggtgtgtacaaccgggaggccatgctcaacttctgtgaaaaggagaccaagaaacttatgcagagggagatgtccatggatgaaagcaagcaagtggagaccaagacagatgccaagaatggagaggaaaggggcagagatgccagcaaaaaagccctgggccccagacgggactcagatctggggaaggagccaaagaggggtggtttaaagaaaagcttctctagagacagagatgaagctggtggcaagagtggcgagaagcccaaggaggagaagatcatccggggcattgacaagggccgggtcagggctgcagtggataagaaggaggcagggaaggatgggagaggagaggagagggcagtggccaccaagaaggaagaggagaagaaagggagtgacaggaacacaggcttgagcagggacaaggataaaaagagagaggagatgaaggaggtggccaagaaagaggatgatgagaaggtaaaaggggagcgtaggaacacagacaccagaaaagagggtgagaagatgaaaagagcaggtgggaacacagacatgaaaaaggaggatgagaaggtaaaaagaggaactgggaacacagacaccaaaaaggacgatgaaaaagtcaagaagaatgaacccttacatgaaaaggaagccaaggatgacagcaagaccaaaacacccgagaaacagacgcccagtggccccaccaagccctctgaaggaccggccaaggtggaggaggaggcagctcccagcatatttgatgagcctctggagagagtgaagaacaatgaccccgagatgactgaggtgaacgtcaacaactcagactgcatcacaaatgagatcttggtccggtttactgaggctctggagttcaacactgtggttaagctgttcgccttggccaacacgcgagccgatgaccacgtggcctttgccattgccatcatgctcaaggccaacaagaccatcaccagcctcaacctggactccaaccacatcacaggcaaaggcatcctggccatcttccgggccctcctccagaacaacacgctgaccgagctccgcttccacaaccagcgacacatctgtggaggcaagacggagatggagatcgccaagctgctgaaggagaatactaccctgctcaagctgggctaccattttgagctggccgggccccgaatgactgtcaccaatctgctcagccgcaacatggacaagcagagacaaaagcggctgcaggagcaaaggcaggcacaggaagccaagggagagaagaaggatctgctggaggtacccaaggccggggccgtggctaagggctccccaaaaccttcacctcaaccatctccaaagccctctccaaagaactcacccaaaaaagggggtgctccagctgccccaccaccccctccccctcccttggctccaccccttatcatggagaacctgaagaattcactctcaccagctacccagaggaagatgggagacaaagtcctccctgcccaggagaagaactcccgtgaccagctattggctgccatccgctccagcaacctcaagcagctcaagaagtggaagtgcccaaactgcttcagtaggaccaggctgccaggcaccatctgccaatgccatgactgctcaggcctcacctcccagggctacacagaccctgcccaccccatccctggctgacctgctgtggatgtccctattctgccatgggagagtccaggcctgggtcacgctcaaggaaggatgccttatctcttctcactttccttttcttgtctctgaggctctccaaattttgctttagtacatggagctcaggtttctggacaagaagagtccttttagcacatcactgagaagatggcactgtccagggcccatgtagctggcaagctgcaaaaggcctgtgatccaggaaagatgtcccacagggaccacatccaccccagccccactgccctccagggccaggattcaggcctctgaggagcccacggggcaaagctgctgggccagtggcactctgtgtgggaaaatggcagaaagatggagaggcatgggggcccaaaggggagcgtggggaggggctgaggataccccaaagtccaggctaattagaggatgtggcaggggcagtggcctggatgcacagtgcctgatgggagtaggctccagacaggaggagtgggacagacagcagctggacttgaaggtttgatgccaaagcagacattttcctcacacccacctgctgctgtatgaatagctgtgtatctgtttttccataagattttgataatatatacaaacctttagctgtgaatggctgtgccccacctgttgtcctgaactgtgagtcctgatcctaaccctgggctccctggaggactctagaagctcaggttccctgccacactatttgagttggccaagaaataaattcacatcctcagaaagtgcagcatggaggaaaatctgaactctaagcagaagactctccactgacctggttgtccaggtctagaaggccaggcctctactaggtctgctcctgaaccagtcctgctgcctggagtcagtagccagagttgttctcaggggtgctggggcagagtggagcccagggtgctgggatggctatattaggcatgttcagggatgctcattccatgactctgcctaaccatgggctcagggccaggtcctcacagcagtcacaggcccaggaaggcggcaggcagagaagtggagtgactatttggagaatagcacccatatctgtgtgccctagggctcagaggggcctcatcttccccagccctccccacctgctcaccaattccacttcctgccccaactgcaggaatgctgacaatgctgccatgcccaccatcgggtgtaggtgaaaggcatctttctgaatttcattctcttgaaggtgctgccaccccttggcactgtggaactgccaccttgggtctgtgtcacttgtaggtttctctgcctccaggttgcctcaacagcaggaggcacagcagtttcaccatctttgaggtgagggtggggtgccccagctaggaagcaagatcgctgtgctaggtctgaccaaaaccagagggcagtctagtcctgggggtaaagccctcagatcccagggtacactcttctccattccctccacccacttgcctgtcaccccagtcacctaagcaatcactgggcccagaggagaggagacagacacacactggctcctggacctaaagggtatgagctggagctaaggccagctagagcttccactgtcagccctcactgtcagtcccactgcacccccctgtgcctgctgggcactgggcactagctagatgctttaggttgcttcagctgatccttcaactctgtgaggtggataccaatattctattttgcagatagaatttggcccagagaggttaactaatatatccatgatcacacagctaataaaagtcagagctcaggtc

SEQ ID NO: 6914 - protein, 631 aa, Homo sapiens
MSRVAKYRRQVSEDPDIDSLLETLSPEEMEELEKELDVVDPDGSVPVGLRQRNQTEKQSTGVYNREAMLNFCEKETKKLMQREMSMDESKQVETKTDAKNGEERGRDASKKALGPRRDSDLGKEPKRGGLKKSFSRDRDEAGGKSGEKPKEEKIIRGIDKGRVRAAVDKKEAGKDGRGEERAVATKKEEEKKGSDRNTGLSRDKDKKREEMKEVAKKEDDEKVKGERRNTDTRKEGEKMKRAGGNTDMKKEDEKVKRGTGNTDTKKDDEKVKKNEPLHEKEAKDDSKTKTPEKQTPSGPTKPSEGPAKVEEEAAPSIFDEPLERVKNNDPEMTEVNVNNSDCITNEILVRFTEALEFNTVVKLFALANTRADDHVAFAIAIMLKANKTITSLNLDSNHITGKGILAIFRALLQNNTLTELRFHNQRHICGGKTEMEIAKLLKENTTLLKLGYHFELAGPRMTVTNLLSRNMDKQRQKRLQEQRQAQEAKGEKKDLLEVPKAGAVAKGSPKPSPQPSPKPSPKNSPKKGGAPAAPPPPPPPLAPPLIMENLKNSLSPATQRKMGDKVLPAQEKNSRDQLLAAIRSSNLKQLKKWKCPNCFSRTRLPGTICQCHDCSGLTSQGYTDPAHPIPG

SEQ ID NO: 6915 - DNA, 699 bp, Homo sapiens
tgaccgagctccgcttccacaaccagcgacacatctgtggaggcaagacggagatggagatcgccaagctgctgaaggagaatactaccctgctcaagctgggctaccattttgagctggccgggccccgaatgactgtcaccaatctgctcagccgcaacatggacaagcagagacaaaagcggctgcaggagcaaaggcaggcacaggaagccaagggagagaagaaggatctgctggaggtacccaaggccggggccgtggctaagggctccccaaaaccttcacctcaaccatctccaaagccctctccaaagaactcacccaaaaaagggggtgctccagctgccccaccaccccctccccctcccttggctccaccccttatcatggagaacctgaagaattcactctcaccagctacccagaggaagatgggagacaaagtcctccctgcccaggagaagaactcccgtgaccagctattggctgccatccgctccagcaacctcaagcagctcaagaagtggaagtgcccaaactgctgggcactgggcactagctagatgctttaggttgcttcagctgatccttcaactctgtgaggtggataccaatattctattttgcagatagaatttggcccagagaggttaactaatatatccatgatcacacagctaataaaagtcagagctc

SEQ ID NO: 6916 - protein, 170 aa, Homo sapiens
MEIAKLLKENTTLLKLGYHFELAGPRMTVTNLLSRNMDKQRQKRLQEQRQAQEAKGEKKDLLEVPKAGAVAKGSPKPSPQPSPKPSPKNSPKKGGAPAAPPPPPPPLAPPLIMENLKNSLSPATQRKMGDKVLPAQEKNSRDQLLAAIRSSNLKQLKKWKCPNCWALGTS

SEQ ID NO: 6917 - DNA, 526 bp, Homo sapiens
cagcacctgtagcacagaagggccaaggagctgcagtcctcgaccagcaggaggtttgctcctcagcccactcgctgcatccagatcagctcacccctctcccttccctgcccaccaggactctgatagcccctggcagccacagcccattttgccaagatgtctagagtagccaaatatcgccggcaggtgagtgaagaccccgacatcgacagcctgctggagaccctgtctcccgaggagatggaggagctggagaaggagctggacgtggtggacccagacgggagtgttcccgtggggctgcggcagagaaaccagacggagaaacagtccacgggtgtgtacaaccgggaggccatgctcaacttctgtgaaaaggagaccaagaaacttatgcagagggagatgtccatggatgtgagtgagcacagtggataccaatattctattttgcagatagaatttggcccagagaggttaactaatatatccatgatcacacagctaataaaagtcagagctc

SEQ ID NO: 6918 - protein, 121 aa, Homo sapiens
MSRVAKYRRQVSEDPDIDSLLETLSPEEMEELEKELDVVDPDGSVPVGLRQRNQTEKQSTGVYNREAMLNFCEKETKKLMQREMSMDVSEHSGYQYSILQIEFGPERLTNISMITQLIKVR

SEQ ID NO: 6919 - DNA, 2095 bp, Homo sapiens
gtgacaggaacacaggcttgagcagggacaaggataaaaagagagaggagatgaaggaggtggccaagaaagaggatgatgagaaggtaaaaggggagcgtaggaacacagacaccagaaaagagggtgagaagatgaaaagagcaggtgggaacacagacatgaaaaaggaggatgagaaggtaaaaagaggaactgggaacacagacaccaaaaaggacgatgaaaaagtcaagaagaatgaacccttacatgaaaaggaagccaaggatgacagcaagaccaaaacacccgagaaacagacgcccagtggccccaccaagccctctgaaggaccggccaaggtggaggaggaggcagctcccagcatatttgatgagcctctggagagagtgaagaacaatgaccccgagatgactgaggtgaacgtcaacaactcagactgcatcacaaatgagatcttggtccggtttactgaggctctggagttcaacactgtggttaagctgttcgccttggccaacacgcgagccgatgaccacgtggcctttgccattgccatcatgctcaaggccaacaagaccatcaccagcctcaacctggactccaaccacatcacaggcaaaggcatcctggccatcttccgggccctcctccagaacaacacgctgaccgagctccgcttccacaaccagcgacacatctgtggaggcaagacggagatggagatcgccaagctgctgaaggagaatactaccctgctcaagctgggctaccattttgagctggccgggccccgaatgactgtcaccaatctgctcagccgcaacatggacaagcagagacaaaagcggctgcaggagcaaaggcaggcacaggaagccaagggagagaagaaggatctgctggaggtacccaaggccggggccgtggctaagggctccccaaaaccttcacctcaaccatctccaaagccctctccaaagaactcacccaaaaaagggggtgctccagctgccccaccaccccctccccctcccttggctccaccccttatcatggagaacctgaagaattcactctcaccagctacccagaggaagatgggagacaaagtcctccctgcccaggagaagaactcccgtgaccagctattggctgccatccgctccagcaacctcaagcagctcaagaagtggaagtgcccaaactgcttcagtaggaccaggctgccaggcaccatctgccaatgccatgactgctcaggcctcacctcccagggctacacagaccctgcccaccccatccctggctgacctgctgtggatgtccctattctgccatgggagagtccaggcctgggtcacgctcaaggaaggatgccttatctcttctcactttccttttcttgtctctgaggctctccaaattttgctttagtacatggagctcaggtttctggacaagaagagtccttttagcacatcactgagaagatggcactgtccagggcccatgtagctggcaagctgcaaaaggcctgtgatccaggaaagatgtcccacagggaccacatccaccccagccccactgccctccagggccaggattcaggcctctgaggagcccacggggcaaagctgctgggccagtggcactctgtgtgggaaaatggcagaaagatggagaggcatgggggcccaaaggggagcgtggggaggggctgaggataccccaaagtccaggctaattagaggatgtggcaggggcagtggcctggatgcacagtgcctgatgggagtaggctccagacaggaggagtgggacagacagcagctggacttgaaggtttgatgccaaagcagacattttcctcacacccacctgctgctgtatgaatagctgtgtatctgtttttccataagattttgataatatatacaaacctttagctgtgaatggctgtgccccacctgttgtcctgaactgtgagtcctgatcctaaccctgggctccctggaggactctagaagctcaggttccctgccacactatttgagttggccaagaaataaattcacatcctcagaaagtg

SEQ ID NO: 6920 - protein, 421 aa, Homo sapiens
MKEVAKKEDDEKVKGERRNTDTRKEGEKMKRAGGNTDMKKEDEKVKRGTGNTDTKKDDEKVKKNEPLHEKEAKDDSKTKTPEKQTPSGPTKPSEGPAKVEEEAAPSIFDEPLERVKNNDPEMTEVNVNNSDCITNEILVRFTEALEFNTVVKLFALANTRADDHVAFAIAIMLKANKTITSLNLDSNHITGKGILAIFRALLQNNTLTELRFHNQRHICGGKTEMEIAKLLKENTTLLKLGYHFELAGPRMTVTNLLSRNMDKQRQKRLQEQRQAQEAKGEKKDLLEVPKAGAVAKGSPKPSPQPSPKPSPKNSPKKGGAPAAPPPPPPPLAPPLIMENLKNSLSPATQRKMGDKVLPAQEKNSRDQLLAAIRSSNLKQLKKWKCPNCFSRTRLPGTICQCHDCSGLTSQGYTDPAHPIPG

SEQ ID NO: 6921 - DNA, 2013 bp, Homo sapiens
gttgtcgggtcttattggccgctgattagaccagccggggtccactagccctgggcttcagggaggctgctgcgtccagtgaacacttcagcacctgtagcacagaagggccaaggagctgcagtcctcgaccagcaggaggtttgctcctcagcccactcgctgcatccagatcagctcacccctctcccttccctgcccaccaggactctgatagcccctggcagccacagcccattttgccaagatgtctagagtagccaaatatcgccggcaggtgagtgaagaccccgacatcgacagcctgctggagaccctgtctcccgaggagatggaggagctggagaaggagctggacgtggtggacccagacgggagtgttcccgtggggctgcggcagagaaaccagacggagaaacagtccacgggtgtgtacaaccgggaggccatgctcaacttctgtgaaaaggagaccaagaaacttatgcagagggagatgtccatggatgaaagcaagcaagtggagaccaagacagatgccaagaatggagaggaaaggggcagagatgccagcaaaaaagccctgggccccagacgggactcagatctggggaaggagccaaagaggggtggtttaaagaaaagcttctctagagacagagatgaagctggtggcaagagtggcgagaagcccaaggaggagaagatcatccggggcattgacaagggccgggtcagggctgcagtggataagaaggaggcagggaaggatgggagaggagaggagagggcagtggccaccaagaaggaagaggagaagaaagggagtgacaggaacacaggcttgagcagggacaaggataaaaagagagaggagatgaaggaggtggccaagaaagaggatgatgagaaggtaaaagggggtgctccagctgccccaccaccccctccccctcccttggctccaccccttatcatggagaacctgaagaattcactctcaccagctacccagaggaagatgggagacaaagtcctccctgcccaggagaagaactcccgtgaccagctattggctgccatccgctccagcaacctcaagcagctcaagaagtggaagtgcccaaactgcttcagtaggaccaggctgccaggcaccatctgccaatgccatgactgctcaggcctcacctcccagggctacacagaccctgcccaccccatccctggctgacctgctgtggatgtccctattctgccatgggagagtccaggcctgggtcacgctcaaggaaggatgccttatctcttctcactttccttttcttgtctctgaggctctccaaattttgctttagtacatggagctcaggtttctggacaagaagagtccttttagcacatcactgagaagatggcactgtccagggcccatgtagctggcaagctgcaaaaggcctgtgatccaggaaagatgtcccacagggaccacatccaccccagccccactgccctccagggccaggattcaggcctctgaggagcccacggggcaaagctgctgggccagtggcactctgtgtgggaaaatggcagaaagatggagaggcatgggggcccaaaggggagcgtggggaggggctgaggataccccaaagtccaggctaattagaggatgtggcaggggcagtggcctggatgcacagtgcctgatgggagtaggctccagacaggaggagtgggacagacagcagctggacttgaaggtttgatgccaaagcagacattttcctcacacccacctgctgctgtatgaatagctgtgtatctgtttttccataagattttgataatatatacaaacctttagctgtgaatggctgtgccccacctgttgtcctgaactgtgagtcctgatcctaaccctgggctccctggaggactctagaagctcaggttccctgccacactatttgagttggccaagaaataaattcacatcctcagaaagtg

SEQ ID NO: 6922 - protein, 328 aa, Homo sapiens
MSRVAKYRRQVSEDPDIDSLLETLSPEEMEELEKELDVVDPDGSVPVGLRQRNQTEKQSTGVYNREAMLNFCEKETKKLMQREMSMDESKQVETKTDAKNGEERGRDASKKALGPRRDSDLGKEPKRGGLKKSFSRDRDEAGGKSGEKPKEEKIIRGIDKGRVRAAVDKKEAGKDGRGEERAVATKKEEEKKGSDRNTGLSRDKDKKREEMKEVAKKEDDEKVKGGAPAAPPPPPPPLAPPLIMENLKNSLSPATQRKMGDKVLPAQEKNSRDQLLAAIRSSNLKQLKKWKCPNCFSRTRLPGTICQCHDCSGLTSQGYTDPAHPIPG

SEQ ID NO: 6923 - DNA, 1957 bp, Homo sapiens
gtgacaggaacacaggcttgagcagggacaaggataaaaagagagaggagatgaaggaggtggccaagaaagaggatgatgagaaggtaaaaggggagcgtaggaacacagacaccagaaaagagggtgagaagatgaaaagagcaggtgggaacacagacatgaaaaaggaggatgagaaggtaaaaagaggaactgggaacacagacaccaaaaaggacgatgaaaaagtcaagaagaatgaacccttacatgaaaaggaagccaaggatgacagcaagaccaaaacacccgagaaacagacgcccagtggccccaccaagccctctgaaggaccggccaaggtggaggaggaggcagctcccagcatatttgatgagcctctggagagagtgaagaacaatgaccccgagatgactgaggtgaacgtcaacaactcagactgcatcacaaatgagatcttggtccggtttactgaggctctggagttcaacactgtggttaagctgttcgccttggccaacacgcgagccgatgaccacgtggcctttgccattgccatcatgctcaaggccaacaagaccatcaccagcctcaacctggactccaaccacatcacaggcaaaggcatcctggccatcttccgggccctcctccagaacaacacgctgaccgagctccgcttccacaaccagcgacacatctgtggaggcaagacggagatggagatcgccaagctgctgaaggagaatactaccctgctcaagctgggctaccattttgagctggccgggccccgaatgactgtcaccaatctgctcagccgcaacatggacaagcagagacaaaagcggctgcaggagcaaaggcaggcacaggaagccaagggagagaagaaggatctgctggaggtacccaaggccggggccgtggctaagggctccccaaaaccttcacctcaaccatctccaaagccctctccaaagaactcacccaaaaaagggggtgctccagctgccccaccaccccctccccctcccttggctccaccccttatcatggagaacctgaagaattcactctcaccagctacccagaggaagatgggagacaaagtcctccctgcccaggagaagaactcccgtgaccagctattggctgccatccgctccagcaacctcaagcagctcaagaagtggaagtgcccaaactgcttcagtaggaccaggctgccaggcaccatctgccaatgccatgactgctcaggcctcacctcccagggctacacagaccctgcccaccccatccctggctgacctgctgtggatgtccctattctgccatgggagagtccaggcctgggtcacgctcaaggaaggatgccttatctcttctcactttccttttcttgtctctgaggctctccaaattttgctttagtacatggagctcaggtttctggacaagaagagtccttttagcacatcactgagaagatggcactgtccagggcccatgtagctggcaagctgcaaaaggcctgtgatccaggaaagatgtcccacagggaccacatccaccccagccccactgccctccagggccaggattcaggcctctgaggagcccacggggcaaagctgctgggccagtggcactctgtgtgggaaaatggcagaaagatggagaggcatgggggcccaaaggggagcgtggggaggggctgaggataccccaaagtccaggctaattagaggatgtggcaggggcagtggcctggatgcacagtgcctgatgggagtaggctccagacaggaggagtgggacagacagcagctggacttgaaggtttgatgccaaagcagacattttcctcacacccacctgctgctgtatgaatagctgtgtatctgtttttccataagattttgataatatatacaaacctttagctgtg

SEQ ID NO: 6924 - protein, 421 aa, Homo sapiens; identical to SEQ ID NO: 6920

SEQ ID NO: 6925 - DNA, 947 bp, Homo sapiens
gtccagctgctgtctgtcccactcctcctgtctggagcctactcccatcaggcactgtgcatccaggccactgcccctgccacatcctctaattagcctggactttggggtatcctcagcccctccccacgctcccctttgggcccccatgcctctccatctttctgccattttcccacacagagtgccactggcccagcagctttgccccgtgggctcctcagaggcctgaatcctggccctggagggcagtggggctggggtggatgtggtccctgtgggacatctttcctggatcacaggccttttgcagcttgccagctacatgggccctggacagtgccatcttctcagtgatgtgctaaaaggactcttcttgtccagaaacctgagctccatgtactaaagcaaaatttggagagcctcagagacaagaaaaggaaagtgagaagagataaggcatccttccttgagcgtgacccaggcctggactctcccatggcagaatagggacatccacagcagtcctaccctctcctccaggccctacccagccccgccctgttggctcatgcccacaactacttaacttcttgagctgcttgaggttgctggagcggatggcagccaatagctggtcacgggagttcttctcctgggcagggaggactttgtctcccatcttcctctgggtagctgatgtgtcgctggttgtggaagcggagctcggtcagcgtgttgttctggaggagggcccggaagatggccaggatgcctttgcctgtgatgtggttggagtccaggttgaggctggtgatggtcttgttggccttgagcatgatggcaatggcaaaggccacgtggtcatcggctcgcgtgttggccaaggcgaacagcttaaccacagtgttgaactccagagcctcagtaaaccggaccaagatctc

SEQ ID NO: 6926 - protein, 108 aa, Homo sapiens; identical to SEQ ID NO: 6900

SEQ ID NO: 6927 - DNA, 945 bp, Homo sapiens
agcttgcccggcatcactcgcggcattggagtcaagatggaggagtacgcgcgagagccttgcccatggcgaattgtggatgactgtggtggggcctttacgatgggtaccattggtggtggtatctttcaagcaatcaaaggttttcgcaattctccagtgggagtaaaccacagactacgagggagtttgacagctattaaaaccagggctccacagttaggaggtagctttgcagtttggggagggctgttttccatgattgactgtagtatggttcaagtcagaggaaaggaagatccctggaactccatcacaagtggtgccttaacgggagccatactggcagcaagaaatggaccagtggccatggttgggtcagccgcaatgggtggcattctcctagctttaattgaaggagctggtatcttgttgacaagatttgcctctgcacagtttcccaatggtcctcagtttgcagaagacccctcccagttgccttcaactcagttaccttcctcaccttttggagactatcgacaatatcagtaggacttctttcctaggatttctttaacagaacgagttgtggttcgagaaggatttcagaagatcaagttacagtctgtttttaaaaccataggtgggacagctatggccaataggctataaagagacatttagcacttttttctatttaaaggaacaagcggggaagggtgctaaaagataatacgtttatttattcacacttgaattgcatttgtgatcaaaataaatgtttaaatcgctaaaggaaaatacagtaagtgcttgaaagatgaaggaccaaaaggccaaaaaacagtgaaatatgatcatcatctccttgcggacttctctgcctggttttgtgtgttctgttattcaaacaataaaaagctggtggaacttactctttctttt

SEQ ID NO: 6928 - protein, 171 aa, Homo sapiens; identical to SEQ ID NO: 374

SEQ ID NO: 6929 - DNA, 1352 bp, Homo sapiens
agcttgcccggcatcactcgcggcattggagtcaagatggaggagtacgcgcgagagccttgcccatggcgaattgtggatgactgtggtggggcctttacgatgggtaccattggtggtggtatctttcaagcaatcaaaggttttcgcaattctccagtgggagtaaaccacagactacgagggagtttgacagctattaaaaccagggctccacagttaggaggtagctttgcagtttggggagggctgttttccatgattgactgtagtatggttcaagtcagaggaaaggaagatccctggaactccatcacaagtggtgccttaacgggagccatactggcagcaagaaatggaccagtggccatggttgggtcagccgcaatgggtggcattctcctagctttaattgaaggagctggtatcttgttgacaagatttgcctctgcacagtttcccaatggtcctcagtttgcagaagacccctcccagttgccttcaactcagttaccttcctcaccttttggagactatcgacaatatcagtaggacttctttcctaggatttctttaacagaacgagttgtggttcgagaaggatttcagaagatcaagttacagtctgtttttaaaaccataggtgggacagctatggccaataggctataaagagacatttagcacttttttctatttaaaggaacaagcggggaagggtgctaaaagataatacgtttatttattcacacttgaattgcatttgtgatcaaaataaatgtttaaatcgctaaaggaaaatacagtaagtgcttgaaagatgaaggaccaaaaggccaaaaaacagtgaaatatgatcatcatctccttgcggacttctctgcctggttttgtgtgttctgttattcaaacaataaaaagctggtggaacttactctttcttttaagataagttgtagacttcgatgtttcatgctcatgtacttcaaataatgcatgttttatagttagtccctcatcacttgaagtgacttctgagaattatgcagagtcaacatggatcatttcacagtgagatgctttatggattgaaggatatggtaaaatgtttatagtttactttgaaagtaaaatatactatgtcttggttttgaggatattggatacaaaactctcttcctttagggctactgagtcttgattcctgatcatcagaaatttcaccagaaacaacttgcttccaatatacccaattctatatgaagaattcatggagagtgtactggcactggaagagtttagtgtttcttgtatgcttgaaaataaagtatgtactgttttgaatgtgttcc

SEQ ID NO: 6930 - protein, 171 aa, Homo sapiens; identical to SEQ ID NO: 374

SEQ ID NO: 6931 - DNA, 1658 bp, Homo sapiens
agcttgcccggcatcactcgcggcattggagtcaagatggaggagtacgcgcgagagccttgcccatggcgaattgtggatgactgtggtggggcctttacgatgggtaccattggtggtggtatctttcaagcaatcaaaggttttcgcaattctccagtgggagtaaaccacagactacgagggagtttgacagctattaaaaccagggctccacagttaggaggtagctttgcagtttggggagggctgttttccatgattgactgtagtatggttcaagtcagaggaaaggaagatccctggaactccatcacaagtggtgccttaacgggagccatactggcagcaagaaatggaccagtggccatggttgggtcagccgcaatgggtggcattctcctagctttaattgaaggagctggtatcttgttgacaagatttgcctctgcacagtttcccaatggtcctcagtttgcagaagacccctcccagttgccttcaactcagttaccttcctcaccttttggagactatcgacaatatcagtaggacttctttcctaggatttctttaacagaacgagttgtggttcgagaaggatttcagaagatcaagttacagtctgtttttaaaaccataggtgggacagctatggccaataggctataaagagacatttagcacttttttctatttaaaggaacaagcggggaagggtgctaaaagataatacgtttatttattcacacttgaattgcatttgtgatcaaaataaatgtttaaatcgctaaaggaaaatacagtaagtgcttgaaagatgaaggaccaaaaggccaaaaaacagtgaaatatgatcatcatctccttgcggacttctctgcctggttttgtgtgttctgttattcaaacaataaaaagctggtggaacttactctttcttttaagataagttgtagacttcgatgtttcatgctcatgtacttcaaataatgcatgttttatagttagtccctcatcacttgaagtgacttctgagaattatgcagagtcaacatggatcatttcacagtgagatgctttatggattgaaggatatggtaaaatgtttatagtttactttgaaagtaaaatatactatgtcttggttttgaggatattggatacaaaactctcttcctttagggctactgagtcttgattcctgatcatcagaaatttcaccagaaacaacttgcttccaatatacccaattctatatgaagaattcatggagagtgtactggcactggaagagtttagtgtttcttgtatgcttgaaaataaagtatgtactgttttgaatgtgttccaagtcctctgcataaacgatgtattttggggtctggttgggcctggaaaatggatgagcacttcagaacaggtcattttcctgatattggaagtgacatgtggccctataggaggcatgatgttagttaattacacatttgcctacatctgtgggaaatggagaacaaagccatgtgggtactgtaaacacacgtttatcttttggcccaatgccatacatatggtaggcatttaattactgattgtgtttggataatttgggaattttcgactgtggtaaaatatacataaaataatacttatta

SEQ ID NO: 6932 - protein, 171 aa, Homo sapiens; identical to SEQ ID NO: 374

SEQ ID NO: 6933 - DNA, 1051 bp, Homo sapiens
actcgcggcattggagtcaagatggaggagtacgcgcgagagccttgcccatggcgaattgtggatgactgtggtggggcctttacgatgggtaccattggtggtggtatctttcaagcaatcaaaggttttcgcaattctccagtgggagtaaaccacagactacgagggagtttgacagctattaaaaccagggctccacagttaggagcatggattggcttacacctgtaatacgttccagaatagctggatttcttttgttttcccatcggtgattttcatagagtagatgctcaatgacatataatgcagaaaggccaaaaatagaggtagctttgcagtttggggagggctgttttccatgattgactgtagtatggttcaagtcagaggaaaggaagatccctggaactccatcacaagtggtgccttaacgggagccatactggcagcaagaaatggaccagtggccatggttgggtcagccgcaatgggtggcattctcctagctttaattgaaggagctggtatcttgttgacaagatttgcctctgcacagtttcccaatggtcctcagtttgcagaagacccctcccagttgccttcaactcagttaccttcctcaccttttggagactatcgacaatatcagtaggacttctttcctaggatttctttaacagaacgagttgtggttcgagaaggatttcagaagatcaagttacagtctgtttttaaaaccataggtgggacagctatggccaataggctataaagagacatttagcacttttttctatttaaaggaacaagcggggaagggtgctaaaagataatacgtttatttattcacacttgaattgcatttgtgatcaaaataaatgtttaaatcgctaaaggaaaatacagtaagtgcttgaaagatgaaggaccaaaaggccaaaaaacagtgaaatatgatcatcatctccttgcggacttctctgcctggttttgtgtgttctgttattcaaacaataaaaagctggtggaacttactctttctttt

SEQ ID NO: 6934 - protein, 97 aa, Homo sapiens [sequence omitted]

SEQ ID NO: 6935 - DNA, 1458 bp, Homo sapiens
actcgcggcattggagtcaagatggaggagtacgcgcgagagccttgcccatggcgaattgtggatgactgtggtggggcctttacgatgggtaccattggtggtggtatctttcaagcaatcaaaggttttcgcaattctccagtgggagtaaaccacagactacgagggagtttgacagctattaaaaccagggctccacagttaggagcatggattggcttacacctgtaatacgttccagaatagctggatttcttttgttttcccatcggtgattttcatagagtagatgctcaatgacatataatgcagaaaggccaaaaatagaggtagctttgcagtttggggagggctgttttccatgattgactgtagtatggttcaagtcagaggaaaggaagatccctggaactccatcacaagtggtgccttaacgggagccatactggcagcaagaaatggaccagtggccatggttgggtcagccgcaatgggtggcattctcctagctttaattgaaggagctggtatcttgttgacaagatttgcctctgcacagtttcccaatggtcctcagtttgcagaagacccctcccagttgccttcaactcagttaccttcctcaccttttggagactatcgacaatatcagtaggacttctttcctaggatttctttaacagaacgagttgtggttcgagaaggatttcagaagatcaagttacagtctgtttttaaaaccataggtgggacagctatggccaataggctataaagagacatttagcacttttttctatttaaaggaacaagcggggaagggtgctaaaagataatacgtttatttattcacacttgaattgcatttgtgatcaaaataaatgtttaaatcgctaaaggaaaatacagtaagtgcttgaaagatgaaggaccaaaaggccaaaaaacagtgaaatatgatcatcatctccttgcggacttctctgcctggttttgtgtgttctgttattcaaacaataaaaagctggtggaacttactctttcttttaagataagttgtagacttcgatgtttcatgctcatgtacttcaaataatgcatgttttatagttagtccctcatcacttgaagtgacttctgagaattatgcagagtcaacatggatcatttcacagtgagatgctttatggattgaaggatatggtaaaatgtttatagtttactttgaaagtaaaatatactatgtcttggttttgaggatattggatacaaaactctcttcctttagggctactgagtcttgattcctgatcatcagaaatttcaccagaaacaacttgcttccaatatacccaattctatatgaagaattcatggagagtgtactggcactggaagagtttagtgtttcttgtatgcttgaaaataaagtatgtactgttttgaatgtgttcc

SEQ ID NO: 6936 - protein, 97 aa, Homo sapiens [sequence omitted]

SEQ ID NO: 6937 - DNA, 1764 bp, Homo sapiens
actcgcggcattggagtcaagatggaggagtacgcgcgagagccttgcccatggcgaattgtggatgactgtggtggggcctttacgatgggtaccattggtggtggtatctttcaagcaatcaaaggttttcgcaattctccagtgggagtaaaccacagactacgagggagtttgacagctattaaaaccagggctccacagttaggagcatggattggcttacacctgtaatacgttccagaatagctggatttcttttgttttcccatcggtgattttcatagagtagatgctcaatgacatataatgcagaaaggccaaaaatagaggtagctttgcagtttggggagggctgttttccatgattgactgtagtatggttcaagtcagaggaaaggaagatccctggaactccatcacaagtggtgccttaacgggagccatactggcagcaagaaatggaccagtggccatggttgggtcagccgcaatgggtggcattctcctagctttaattgaaggagctggtatcttgttgacaagatttgcctctgcacagtttcccaatggtcctcagtttgcagaagacccctcccagttgccttcaactcagttaccttcctcaccttttggagactatcgacaatatcagtaggacttctttcctaggatttctttaacagaacgagttgtggttcgagaaggatttcagaagatcaagttacagtctgtttttaaaaccataggtgggacagctatggccaataggctataaagagacatttagcacttttttctatttaaaggaacaagcggggaagggtgctaaaagataatacgtttatttattcacacttgaattgcatttgtgatcaaaataaatgtttaaatcgctaaaggaaaatacagtaagtgcttgaaagatgaaggaccaaaaggccaaaaaacagtgaaatatgatcatcatctccttgcggacttctctgcctggttttgtgtgttctgttattcaaacaataaaaagctggtggaacttactctttcttttaagataagttgtagacttcgatgtttcatgctcatgtacttcaaataatgcatgttttatagttagtccctcatcacttgaagtgacttctgagaattatgcagagtcaacatggatcatttcacagtgagatgctttatggattgaaggatatggtaaaatgtttatagtttactttgaaagtaaaatatactatgtcttggttttgaggatattggatacaaaactctcttcctttagggctactgagtcttgattcctgatcatcagaaatttcaccagaaacaacttgcttccaatatacccaattctatatgaagaattcatggagagtgtactggcactggaagagtttagtgtttcttgtatgcttgaaaataaagtatgtactgttttgaatgtgttccaagtcctctgcataaacgatgtattttggggtctggttgggcctggaaaatggatgagcacttcagaacaggtcattttcctgatattggaagtgacatgtggccctataggaggcatgatgttagttaattacacatttgcctacatctgtgggaaatggagaacaaagccatgtgggtactgtaaacacacgtttatcttttggcccaatgccatacatatggtaggcatttaattactgattgtgtttggataatttgggaattttcgactgtggtaaaatatacataaaataatacttatta

SEQ ID NO: 6938 - protein, 97 aa, Homo sapiens [sequence omitted]

SEQ ID NO: 6939 - DNA, 746 bp, Homo sapiens
gcggcattggagtcaagatggaggagtacgcgcgagagccttgcccatggcgaattgtggatgactgtggtggggcctttacgatgggtaccattggtggtggtatctttcaagcaatcaaaggttttcgcaattctccagtgggagtaaaccacagactacgagggagtttgacagctattaaaaccagggctccacagttaggaggtaagcagaattttcattttaactgaactatttttttctgttcctttgaagatggagctatttttatttttagattacaacaattagtgattttagtttggtctaacggtttgtcacaaacatatatccctatagtttcttcttgatttgtagtttgtttgaaaaattaacctgaattatgatacccatttgaaaatcttgtctctgtccttcagacactcggtgattttttttttttttccttctccagaagaaagacagttatttaaagctcaggtgtgaggccgggcacggggctcacgcctgtaatcccagcactttgggaggccgaggtgggcagatcacctgaggtcaggagtttgagaccagcctgaccaacatggagaaaccccatctctactaaaaatacaaaattagctgggcgtggtggcgcatgcctgtaatcccagctactcaggagactgaggcaggagaatcacttgaacccgggaggcggaggttgcagtgagccaagatcatgccattgcactccatcctgg

SEQ ID NO: 6940 - protein, 71 aa, Homo sapiens
MEEYAREPCPWRIVDDCGGAFTMGTIGGGIFQAIKGFRNSPVGVNHRLRGSLTAIKTRAPQLGGKQNFHFN

SEQ ID NO: 6941 - DNA, 996 bp, Homo sapiens
gcggcattggagtcaagatggaggagtacgcgcgagagccttgcccatggcgaattgtggatgactgtggtggggcctttacgatgggtaccattggtggtggtatctttcaagcaatcaaaggttttcgcaattctccagtgggagtaaaccacagactacgagggagtttgacagctattaaaaccagggctccacagttaggagtaatgaagaagttagtactattattatctcccattttccagatgaggaaatttagttcctgagggttgaggtagctttgcagtttggggagggctgttttccatgattgactgtagtatggttcaagtcagaggaaaggaagatccctggaactccatcacaagtggtgccttaacgggagccatactggcagcaagaaatggaccagtggccatggttgggtcagccgcaatgggtggcattctcctagctttaattgaaggagctggtatcttgttgacaagatttgcctctgcacagtttcccaatggtcctcagtttgcagaagacccctcccagttgccttcaactcagttaccttcctcaccttttggagactatcgacaatatcagtaggacttctttcctaggatttctttaacagaacgagttgtggttcgagaaggatttcagaagatcaagttacagtctgtttttaaaaccataggtgggacagctatggccaataggctataaagagacatttagcacttttttctatttaaaggaacaagcggggaagggtgctaaaagataatacgtttatttattcacacttgaattgcatttgtgatcaaaataaatgtttaaatcgctaaaggaaaatacagtaagtgcttgaaagatgaaggaccaaaaggccaaaaaacagtgaaatatgatcatcatctccttgcggacttctctgcctggttttgtgtgttctgttattcaaacaataaaaagctggtggaacttactctttctttt

SEQ ID NO: 6942 - protein, 97 aa, Homo sapiens [sequence omitted]

SEQ ID NO: 6943 - DNA, 1403 bp, Homo sapiens
gcggcattggagtcaagatggaggagtacgcgcgagagccttgcccatggcgaattgtggatgactgtggtggggcctttacgatgggtaccattggtggtggtatctttcaagcaatcaaaggttttcgcaattctccagtgggagtaaaccacagactacgagggagtttgacagctattaaaaccagggctccacagttaggagtaatgaagaagttagtactattattatctcccattttccagatgaggaaatttagttcctgagggttgaggtagctttgcagtttggggagggctgttttccatgattgactgtagtatggttcaagtcagaggaaaggaagatccctggaactccatcacaagtggtgccttaacgggagccatactggcagcaagaaatggaccagtggccatggttgggtcagccgcaatgggtggcattctcctagctttaattgaaggagctggtatcttgttgacaagatttgcctctgcacagtttcccaatggtcctcagtttgcagaagacccctcccagttgccttcaactcagttaccttcctcaccttttggagactatcgacaatatcagtaggacttctttcctaggatttctttaacagaacgagttgtggttcgagaaggatttcagaagatcaagttacagtctgtttttaaaaccataggtgggacagctatggccaataggctataaagagacatttagcacttttttctatttaaaggaacaagcggggaagggtgctaaaagataatacgtttatttattcacacttgaattgcatttgtgatcaaaataaatgtttaaatcgctaaaggaaaatacagtaagtgcttgaaagatgaaggaccaaaaggccaaaaaacagtgaaatatgatcatcatctccttgcggacttctctgcctggttttgtgtgttctgttattcaaacaataaaaagctggtggaacttactctttcttttaagataagttgtagacttcgatgtttcatgctcatgtacttcaaataatgcatgttttatagttagtccctcatcacttgaagtgacttctgagaattatgcagagtcaacatggatcatttcacagtgagatgctttatggattgaaggatatggtaaaatgtttatagtttactttgaaagtaaaatatactatgtcttggttttgaggatattggatacaaaactctcttcctttagggctactgagtcttgattcctgatcatcagaaatttcaccagaaacaacttgcttccaatatacccaattctatatgaagaattcatggagagtgtactggcactggaagagtttagtgtttcttgtatgcttgaaaataaagtatgtactgttttgaatgtgttcc

SEQ ID NO: 6944 - protein, 97 aa, Homo sapiens [sequence omitted]

SEQ ID NO: 6945 - DNA, 1709 bp, Homo sapiens
gcggcattggagtcaagatggaggagtacgcgcgagagccttgcccatggcgaattgtggatgactgtggtggggcctttacgatgggtaccattggtggtggtatctttcaagcaatcaaaggttttcgcaattctccagtgggagtaaaccacagactacgagggagtttgacagctattaaaaccagggctccacagttaggagtaatgaagaagttagtactattattatctcccattttccagatgaggaaatttagttcctgagggttgaggtagctttgcagtttggggagggctgttttccatgattgactgtagtatggttcaagtcagaggaaaggaagatccctggaactccatcacaagtggtgccttaacgggagccatactggcagcaagaaatggaccagtggccatggttgggtcagccgcaatgggtggcattctcctagctttaattgaaggagctggtatcttgttgacaagatttgcctctgcacagtttcccaatggtcctcagtttgcagaagacccctcccagttgccttcaactcagttaccttcctcaccttttggagactatcgacaatatcagtaggacttctttcctaggatttctttaacagaacgagttgtggttcgagaaggatttcagaagatcaagttacagtctgtttttaaaaccataggtgggacagctatggccaataggctataaagagacatttagcacttttttctatttaaaggaacaagcggggaagggtgctaaaagataatacgtttatttattcacacttgaattgcatttgtgatcaaaataaatgtttaaatcgctaaaggaaaatacagtaagtgcttgaaagatgaaggaccaaaaggccaaaaaacagtgaaatatgatcatcatctccttgcggacttctctgcctggttttgtgtgttctgttattcaaacaataaaaagctggtggaacttactctttcttttaagataagttgtagacttcgatgtttcatgctcatgtacttcaaataatgcatgttttatagttagtccctcatcacttgaagtgacttctgagaattatgcagagtcaacatggatcatttcacagtgagatgctttatggattgaaggatatggtaaaatgtttatagtttactttgaaagtaaaatatactatgtcttggttttgaggatattggatacaaaactctcttcctttagggctactgagtcttgattcctgatcatcagaaatttcaccagaaacaacttgcttccaatatacccaattctatatgaagaattcatggagagtgtactggcactggaagagtttagtgtttcttgtatgcttgaaaataaagtatgtactgttttgaatgtgttccaagtcctctgcataaacgatgtattttggggtctggttgggcctggaaaatggatgagcacttcagaacaggtcattttcctgatattggaagtgacatgtggccctataggaggcatgatgttagttaattacacatttgcctacatctgtgggaaatggagaacaaagccatgtgggtactgtaaacacacgtttatcttttggcccaatgccatacatatggtaggcatttaattactgattgtgtttggataatttgggaattttcgactgtggtaaaatatacataaaataatacttatta

SEQ ID NO: 6946 - protein, 97 aa, Homo sapiens [sequence omitted]

SEQ ID NO: 6947 - DNA, 707 bp, Homo sapiens
gttcgtgagtcaggaccgatagcttctgaggtaacataaagctgaagagaatgtgatctgaaggattggggtttcatgcaggagaaacccatcaagccgattgggctcttctccaaggttggttttgggacattgtgcagaggtcattggaaaatttgaaaagattctattcattgtactttgtaaacttggttattcagaagctgggaaaagggaggtgacaaaaaatgtttgtaggttatattcacttacaaaggtatagtcagggttgggcgcaatggctcacgccaataatcccagcatgctgggattacaggtgtgagctatggcacccggctggcttatttcttataggctttgggccgttgctaattttccagctgatataatacaatccagctttattcgaaagataagtattctaactcttgttcggtgtttattcaaacttgtgtttgcatgtatttgtttggactataaattttgagactatagtgagtatgtttttgactataatattttaaatggaagatgaaatttaaattagtatttgcttgtttctttttacaataaaataggtagctttgcagtttggggagggctgttttccatgattgactgtagtatggttcaagtcagaggaaaggaagatccctggaactccatcacaagtggtgccttaacgggagccatactggcagcaagaa

SEQ ID NO: 6948 - protein, 53 aa, Homo sapiens
MFVGYIHLQRYSQGWAQWLTPIIPACWDYRCELWHPAGLFLIGFGPLLIFQLI

SEQ ID NO: 6949 - DNA, 2526 bp, Homo sapiens
ctcccagggcatagaattactgagttagaagaaataactggtttgtttttacataggatgtgatgtctaatattgtactaaaaatgaggatgcttatgctatactccactggtactatccactggatttatttattttttttattttttgagacggagtctcgctctgtcgcccaggctggagcacagtggtgcaaacttggctcactgcaagctctgcctcctgggttcacaccattctcctgcctcggcctccagagtagctgggactacaggtgcccgccatcacacctggctaattttttttgtattttttagtagagacgggggtttcaccgtgttggccaggatgccctcgatcttctgacctcatgatccacccgcctcggcctcccaaaatgctgggattgtaggcgtgagctaccgcacctggctgtttttgtatttagatagagtttaagtgcaaagtaatctgctgatttaaggttgttttaaattcatatctgaggaataaaggatggacaggcaatttccatccctttgatgttccatagttctagctatttatatcattcatttgccccttcagcatggattggcttacacctgtaatacgttccagaatagctggatttcttttgttttcccatcggtgattttcatagagtagatgctcaatgacatataatgcagaaaggccaaaaatagaggtaagtaaagctatgaaagaaaagaagaacgaaagaggaagcagagtagtttgattttgtttattgctgcttaaaccagagagatatgttattctggaagggtgatttgcttgtttttacacatatgcagcctgactgttttaggcttggcttcttttttgtttgtttgagatggagtgtcgctcttgttgcccaggctggagtgcagtggcacgatctcggctcactgcaacctccgcctcctgggttcaagcgattctcctgcctcagcctccccagtagctgggattacaggtgctcgccaccacacccggctaatttttacatttttagtagaggcggagtttcgccatgttagccaggctggtcttgaactcctggcctcaggtgatccacccacttcagcctcccaaagtgctgggattacaggtgtgagctatggcacccggctggcttatttcttataggctttgggccgttgctaattttccagctgatataatacaatccagctttattcgaaagataagtattctaactcttgttcggtgtttattcaaacttgtgtttgcatgtatttgtttggactataaattttgagactatagtgagtatgtttttgactataatattttaaatggaagatgaaatttaaattagtatttgcttgtttctttttacaataaaataggtagctttgcagtttggggagggctgttttccatgattgactgtagtatggttcaagtcagaggaaaggaagatccctggaactccatcacaagtggtgccttaacgggagccatactggcagcaagaaatggaccagtggccatggttgggtcagccgcaatgggtggcattctcctagctttaattgaaggagctggtatcttgttgacaagatttgcctctgcacagtttcccaatggtcctcagtttgcagaagacccctcccagttgccttcaactcagttaccttcctcaccttttggagactatcgacaatatcagtaggacttctttcctaggatttctttaacagaacgagttgtggttcgagaaggatttcagaagatcaagttacagtctgtttttaaaaccataggtgggacagctatggccaataggctataaagagacatttagcacttttttctatttaaaggaacaagcggggaagggtgctaaaagataatacgtttatttattcacacttgaattgcatttgtgatcaaaataaatgtttaaatcgctaaaggaaaatacagtaagtgcttgaaagatgaaggaccaaaaggccaaaaaacagtgaaatatgatcatcatctccttgcggacttctctgcctggttttgtgtgttctgttattcaaacaataaaaagctggtggaacttactctttcttttaagataagttgtagacttcgatgtttcatgctcatgtacttcaaataatgcatgttttatagttagtccctcatcacttgaagtgacttctgagaattatgcagagtcaacatggatcatttcacagtgagatgctttatggattgaaggatatggtaaaatgtttatagtttactttgaaagtaaaatatactatgtcttggttttgaggatattggatacaaaactctcttcctttagggctactgagtcttgattcctgatcatcagaaatttcaccagaaacaacttgcttccaatatacccaattctatatgaagaattcatggagagtgtactggcactggaagagtttagtgtttcttgtatgcttgaaaataaagtatgtactgttttgaatgtgttcc

SEQ ID NO: 6950 - protein, 97 aa, Homo sapiens [sequence omitted]

SEQ ID NO: 6951 - DNA, 2832 bp, Homo sapiens
ctcccagggcatagaattactgagttagaagaaataactggtttgtttttacataggatgtgatgtctaatattgtactaaaaatgaggatgcttatgctatactccactggtactatccactggatttatttattttttttattttttgagacggagtctcgctctgtcgcccaggctggagcacagtggtgcaaacttggctcactgcaagctctgcctcctgggttcacaccattctcctgcctcggcctccagagtagctgggactacaggtgcccgccatcacacctggctaattttttttgtattttttagtagagacgggggtttcaccgtgttggccaggatgccctcgatcttctgacctcatgatccacccgcctcggcctcccaaaatgctgggattgtaggcgtgagctaccgcacctggctgtttttgtatttagatagagtttaagtgcaaagtaatctgctgatttaaggttgttttaaattcatatctgaggaataaaggatggacaggcaatttccatccctttgatgttccatagttctagctatttatatcattcatttgccccttcagcatggattggcttacacctgtaatacgttccagaatagctggatttcttttgttttcccatcggtgattttcatagagtagatgctcaatgacatataatgcagaaaggccaaaaatagaggtaagtaaagctatgaaagaaaagaagaacgaaagaggaagcagagtagtttgattttgtttattgctgcttaaaccagagagatatgttattctggaagggtgatttgcttgtttttacacatatgcagcctgactgttttaggcttggcttcttttttgtttgtttgagatggagtgtcgctcttgttgcccaggctggagtgcagtggcacgatctcggctcactgcaacctccgcctcctgggttcaagcgattctcctgcctcagcctccccagtagctgggattacaggtgctcgccaccacacccggctaatttttacatttttagtagaggcggagtttcgccatgttagccaggctggtcttgaactcctggcctcaggtgatccacccacttcagcctcccaaagtgctgggattacaggtgtgagctatggcacccggctggcttatttcttataggctttgggccgttgctaattttccagctgatataatacaatccagctttattcgaaagataagtattctaactcttgttcggtgtttattcaaacttgtgtttgcatgtatttgtttggactataaattttgagactatagtgagtatgtttttgactataatattttaaatggaagatgaaatttaaattagtatttgcttgtttctttttacaataaaataggtagctttgcagtttggggagggctgttttccatgattgactgtagtatggttcaagtcagaggaaaggaagatccctggaactccatcacaagtggtgccttaacgggagccatactggcagcaagaaatggaccagtggccatggttgggtcagccgcaatgggtggcattctcctagctttaattgaaggagctggtatcttgttgacaagatttgcctctgcacagtttcccaatggtcctcagtttgcagaagacccctcccagttgccttcaactcagttaccttcctcaccttttggagactatcgacaatatcagtaggacttctttcctaggatttctttaacagaacgagttgtggttcgagaaggatttcagaagatcaagttacagtctgtttttaaaaccataggtgggacagctatggccaataggctataaagagacatttagcacttttttctatttaaaggaacaagcggggaagggtgctaaaagataatacgtttatttattcacacttgaattgcatttgtgatcaaaataaatgtttaaatcgctaaaggaaaatacagtaagtgcttgaaagatgaaggaccaaaaggccaaaaaacagtgaaatatgatcatcatctccttgcggacttctctgcctggttttgtgtgttctgttattcaaacaataaaaagctggtggaacttactctttcttttaagataagttgtagacttcgatgtttcatgctcatgtacttcaaataatgcatgttttatagttagtccctcatcacttgaagtgacttctgagaattatgcagagtcaacatggatcatttcacagtgagatgctttatggattgaaggatatggtaaaatgtttatagtttactttgaaagtaaaatatactatgtcttggttttgaggatattggatacaaaactctcttcctttagggctactgagtcttgattcctgatcatcagaaatttcaccagaaacaacttgcttccaatatacccaattctatatgaagaattcatggagagtgtactggcactggaagagtttagtgtttcttgtatgcttgaaaataaagtatgtactgttttgaatgtgttccaagtcctctgcataaacgatgtattttggggtctggttgggcctggaaaatggatgagcacttcagaacaggtcattttcctgatattggaagtgacatgtggccctataggaggcatgatgttagttaattacacatttgcctacatctgtgggaaatggagaacaaagccatgtgggtactgtaaacacacgtttatcttttggcccaatgccatacatatggtaggcatttaattactgattgtgtttggataatttgggaattttcgactgtggtaaaatatacataaaataatacttatta

SEQ ID NO: 6952 - protein, 97 aa, Homo sapiens [sequence omitted]

SEQ ID NO: 6953 - DNA, 2431 bp, Homo sapiens
gctcccctcgggttcgcggcccggccggtgagcaacggctctgcggccatggcgagcggcgagcattcccccggcagcggcgcggcccggcggccgctgcactccgcgcaggctgtggacgtggcctcggcctccaacttccgggcctttgagctgctgcacttgcacctggacctgcgggctgagttcgggcctccagggcccggcgcagggagccgggggctgagcggcaccgcggtcctggacctgcgctgcctggagcccgagggcgccgccgagctgcggctggactcgcacccgtgcctggaggtgacggcggcggcgctgcggcgggagcggcccggctcggaggagccgcctgcggagcccgtgagcttctacacgcagcccttctcgcactatggccaggccctgtgcgtgtccttcccgcagccctgccgcgccgccgagcgcctccaggtgctgctcacctaccgcgtcggggagggacccggggtttgctggttggctcccgagcagacagcaggaaagaagaagcccttcgtgtacacccagggccaggctgtcctaaaccgggccttcttcccttgcttcgacacgcctgctgttaaatacaagtattcagctcttattgaggtcccagatggcttcacagctgtgatgagtgctagcacctgggagaagagaggtccaaataagttcttcttccagatgtgtcagcccatcccctcctatctgatagctttggccatcggagatctggtttcggctgaagttggacccaggagccgggtgtgggctgagccctgcctgattgatgctgccaaggaggagtacaacggggtgatagaagaatttttggcaacaggagagaagctttttggaccttatgtttggggaaggtatgacttgctcttcatgccaccgtcctttccatttggaggaatggagaacccttgtctgacctttgtcaccccctgcctgctagctggggaccgctccttggcagatgtcatcatccatgagatctcccacagttggtttgggaacctggtcaccaacgccaactggggtgaattctggctcaatgaaggtttcaccatgtacgcccagaggaggatctccaccatcctctttggcgctgcgtacacctgcttggaggctgcaacggggcgggctctgctgcgtcagcacatggacatcactggagaggaaaacccactcaacaagctccgcgtgaagattgaaccaggcgttgacccggacgacacctataatgagaccccctacgagaaaggtttctgctttgtttcatacctggcccacttggtgggtgatcaggatcagtttgacagttttctcaaggcctatgtgcatgaattcaaattccgaagcatcttagccgatgactttctggacttctacttggaatatttccctgagcttaagaaaaagagagtggatatcattccaggttttgagtttgatcgatggctgaatacccccggctggcccccgtacctccctgatctctcccctggggactcactcatgaagcctgctgaagagctagcccaactgtgggcagccgaggagctggacatgaaggccattgaagccgtggccatctctccctggaagacctaccagctggtctacttcctggataagatcctccagaaatcccctctccctcctgggaatgtgaaaaaacttggagacacatacccaagtatctcaaatgcccggaatgcagagctccggctgcgatggggccaaatcgtccttaagaacgaccaccaggaagatttctggaaagtgaaggagttcctgcataaccaggggaagcagaagtatacacttccgctgtaccacgcaatgatgggtggcagtgaggtggcccagaccctcgccaaggagacttttgcatccaccgcctcccagctccacagcaatgttgtcaactatgtccagcagatcgtggcacccaagggcagttagaggctcgtgtgcatggcccctgcctcttcaggctctccaggctttcagaataattgtttgttcccaaattcctgttccctgatcaacttcctggagtttatatcccctcaggataatctattctctagcttaggtatctgtgactcttgggcctctgctctggtgggaacttacttctctatagcccactgagccccgagacagagaacctgcccacagctctccccgctacaggctgcaggcactgcagggcagcgggtattctcctccccacctaagtctctgggaagaagtggagaggactgatgctcttcttttttctctttctgtcctttttcttgctgattttatgcaaagggctggcattctgattgttcttttttcaggtttaatccttattttaataaagttttcaagcaaaaattaagtt

SEQ ID NO: 6954 - protein, 650 aa, Homo sapiens; identical to SEQ ID NO: 376

SEQ ID NO: 6955 - DNA, 2326 bp, Homo sapiens
aacggctctgcggccatggcgagcggcgagcattcccccggcagcggcgcggcccggcggccgctgcactccgcgcaggctgtggacgtggcctcggcctccaacttccgggcctttgagctgctgcacttgcacctggacctgcgctgcctggagcccgagggcgccgccgagctgcggctggactcgcacccgtgcctggaggtgacggcggcggcgctgcggcgggagcggcccggctcggaggagccgcctgcggagcccgtgagcttctacacgcagcccttctcgcactatggccaggccctgtgcgtgtccttcccgcagccctgccgcgccgccgagcgcctccaggtgctgctcacctaccgcgtcggggagggacccggggtttgctggttggctcccgagcagacagcaggaaagaagaagcccttcgtgtacacccagggccaggctgtcctaaaccgggccttcttcccttgcttcgacacgcctgctgttaaatacaagtattcagctcttattgaggtcccagatggcttcacagctgtgatgagtgctagcacctgggagaagagaggtccaaataagttcttcttccagatgtgtcagcccatcccctcctatctgatagctttggccatcggagatctggtttcggctgaagttggacccaggagccgggtgtgggctgagccctgcctgattgatgctgccaaggaggagtacaacggggtgatagaagaatttttggcaacaggagagaagctttttggaccttatgtttggggaaggtatgacttgctcttcatgccaccgtcctttccatttggaggaatggagaacccttgtctgacctttgtcaccccctgcctgctagctggggaccgctccttggcagatgtcatcatccatgagatctcccacagttggtttgggaacctggtcaccaacgccaactggggtgaattctggctcaatgaaggtttcaccatgtacgcccagaggaggatctccaccatcctctttggcgctgcgtacacctgcttggaggctgcaacggggcgggctctgctgcgtcagcacatggacatcactggagaggaaaacccactcaacaagctccgcgtgaagattgaaccaggcgttgacccggacgacacctataatgagaccccctacgagaaaggtttctgctttgtttcatacctggcccacttggtgggtgatcaggatcagtttgacagttttctcaaggcctatgtgcatgaattcaaattccgaagcatcttagccgatgactttctggacttctacttggaatatttccctgagcttaagaaaaagagagtggatatcattccaggttttgagtttgatcgatggctgaatacccccggctggcccccgtacctccctgatctctcccctggggactcactcatgaagcctgctgaagagctagcccaactgtgggcagccgaggagctggacatgaaggccattgaagccgtggccatctctccctggaagacctaccagctggtctacttcctggataagatcctccagaaatcccctctccctcctgggaatgtgaaaaaacttggagacacatacccaagtatctcaaatgcccggaatgcagagctccggctgcgatggggccaaatcgtccttaagaacgaccaccaggaagatttctggaaagtgaaggagttcctgcataaccaggggaagcagaagtatacacttccgctgtaccacgcaatgatgggtggcagtgaggtggcccagaccctcgccaaggagacttttgcatccaccgcctcccagctccacagcaatgttgtcaactatgtccagcagatcgtggcacccaagggcagttagaggctcgtgtgcatggcccctgcctcttcaggctctccaggctttcagaataattgtttgttcccaaattcctgttccctgatcaacttcctggagtttatatcccctcaggataatctattctctagcttaggtatctgtgactcttgggcctctgctctggtgggaacttacttctctatagcccactgagccccgagacagagaacctgcccacagctctccccgctacaggctgcaggcactgcagggcagcgggtattctcctccccacctaagtctctgggaagaagtggagaggactgatgctcttcttttttctctttctgtcctttttcttgctgattttatgcaaagggctggcattctgattgttcttttttcaggtttaatccttattttaataaagttttcaagcaaaaattaagtt

SEQ ID NO: 6956 - protein, 626 aa, Homo sapiens
MASGEHSPGSGAARRPLHSAQAVDVASASNFRAFELLHLHLDLRCLEPEGAAELRLDSHPCLEVTAAALRRERPGSEEPPAEPVSFYTQPFSHYGQALCVSFPQPCRAAERLQVLLTYRVGEGPGVCWLAPEQTAGKKKPFVYTQGQAVLNRAFFPCFDTPAVKYKYSALIEVPDGFTAVMSASTWEKRGPNKFFFQMCQPIPSYLIALAIGDLVSAEVGPRSRVWAEPCLIDAAKEEYNGVIEEFLATGEKLFGPYVWGRYDLLFMPPSFPFGGMENPCLTFVTPCLLAGDRSLADVIIHEISHSWFGNLVTNANWGEFWLNEGFTMYAQRRISTILFGAAYTCLEAATGRALLRQHMDITGEENPLNKLRVKIEPGVDPDDTYNETPYEKGFCFVSYLAHLVGDQDQFDSFLKAYVHEFKFRSILADDFLDFYLEYFPELKKKRVDIIPGFEFDRWLNTPGWPPYLPDLSPGDSLMKPAEELAQLWAAEELDMKAIEAVAISPWKTYQLVYFLDKILQKSPLPPGNVKKLGDTYPSISNARNAELRLRWGQIVLKNDHQEDFWKVKEFLHNQGKQKYTLPLYHAMMGGSEVAQTLAKETFASTASQLHSNVVNYVQQIVAPKGS

SEQ ID NO: 6957 - DNA, 1477 bp, Homo sapiens
gttctgtaacagtgcacctgaggctcttcatgacccgaccctcttgggcatctcatgtcccacctcctgccactgcctccctcattgcaatctgatcctgtcctcaagtaatcccagactctcggtgcttcctcacatgcatatgcagtgttccatggctacgtctttgcttttgatatttgggaagtacctgatactggtttccctgtatcttttcttcctgttagaatagttcctatgcttcagcaaacgcagaggaagttttccctcatccgggcctggacccatcccactttgccatcagtctcttttttttttttttttgaaacagagtcttactctgtcacccaggctggagtgcgatggtgcaatcttggctccccgcaacctctgccacccaggtgaatcacttgagcccaggagttcaagaccagccagggcaacatagcgaaaccctacctctacaaaaataaaaaaattagccaggcatgatgatgtgcaactgtagtcctagctactggggttggggagctgagatggaaggatcacttgagccccaggaggtggaggttggatcacaccactgtactctagcctgggcaacagagcaagaacctgtcttaaaaaaaaaataaaaaaggtttgtctcttaaggttttattcaattccagattctactattagaacgctttcttatctctcctctaagtagggagaagaaaactaacatttactgtataaatgtttgaagggcttttgtgtgttgtcttatttaatcttcactcattttacagatgaggaaactgaggctcacagaggttaaatcacttttgcaagatcgcattcagtagtgaagccataactgcgtagcacggttccacctccatgaggctgtcttgggttcttgtttctcaggtgtggtgagcggtctcttggatctgtgtggtgatccgatcttgcactccgtcactgtggctgactgcattgtcacattcacttggcggaggccaatttcctacaggtgctttcaggatcaggtcactgcgatggtctctaaacaccattctgctttctctgctctcttgtctttaggagccgggtgtgggctgagccctgcctgattgatgctgccaaggaggagtacaacggggtgatagaagaatttttggcaacaggagagaagctttttggaccttatgtttggggaaggtgtggtatcacattgactctagtgtctcctgttaaactgagtcactggcttccattcttcctcttcgtgtggcttttccacctcctgcctcccagagcaaagtttccctgatcccagaagtgaaggagaggaggaagagaggagggtatgagccaggcttctcactgttgctgaggagagggcctaggagatgaggttctttgtgtgtgtgtgtgtgtgtgtgtgtgtgtgtgtgtgtgtgtgttttgagatggagtctcgctctgt

SEQ ID NO: 6958 - protein, 55 aa, Homo sapiens
MLQQTQRKFSLIRAWTHPTLPSVSFFFFFETESYSVTQAGVRWCNLGSPQPLPPR

SEQ ID NO: 6959 - DNA, 1156 bp, Homo sapiens
aagagatcagaattcagcttccccagggacagcaaggccaagaaggtgtccagatcctggcctctctccagatcttggactctctcaaggccaagactctctctcttaagatctctatctcaaggccaagatctctctccagatattggcctctctcaaggtacttccaagatctcagagggccattcactgtggatctaatatgaagacagagaaaccagccttccagaggagcggacacatttccttagtcccaggatacactttgtgtggaatccacagatctgccctgatgatcatgaaggaatgcgaaagagcctggtaaaacgatatggacttgtgcaaatgcaaagcaatggtgaagtcatcacgaaccgcacagactggacagaactcctatctggctgcaatggcttgggttcagtcagcccaggggccagagaattggctacaaagagctctggagtgcccctccctccaaataaagtattctaagcgtgcactgatcaacatgaagttcgcattaacttggggctccaagctcaattgaggggagtgggtgtcagacagaggagcctcctggacctggttcaatcttcacgcggagcttgttgagtgggttttcctctccagtgatgtccatgtgctgacgcagcagagcccgccccgttgcagcctccaagcaggtgtacgcagcgcctggtgcagaatcaaacgtaagcctcgggaaaacgtctgtcaccacatccaagtgtattttcctgacagagacactgtgctgcctccttgtggcctcaagaagaacagcgacagatacctgaagcttaataacattaccctcctggggacccagggcaaatagggacagttacagagagcctgactcagtccctagctccctgttgctgtgggctacaaaggacttggttaactcaggctgttggtctctctcctaagtgaggactgggggaatcgcacctttctgacagttacctttccttatcaaagtactgtatttttattttatcttatttcatttattttattattttattttttgagacaaagcctcactctgtcacccaggctggagtgcaatggcgtgatcttggctcactgcaacctccgtctcctcctgggttcaagcgattcttct

SEQ ID NO: 6960 - protein, 40 aa, Homo sapiens
MKTEKPAFQRSGHISLVPGYTLCGIHRSALMIMKECERAW

SEQ ID NO: 6961 - DNA, 1437 bp, Homo sapiens
cacggggcactggcctgggcaggtggcgggaacgttgctggggtgggcatctgtgctttcggctgccctctggcccaggaaattcctcccaggggccaggccagagatgggccaggcagggggagggcaagtgagggaacatgaacccctggctgacctgagtcagaaagctgctggcccctaaattccagagattcagcaacaaagaggcctagtagggagaggagttactaggtttaggggtttttcccagaacacccaggactctggccaggggctggaaggtgctccaggctcaatgctgggcaatactcatggattaattggtgctggctgggcctgccagcctagtcgtggccccagggtccccactaaagggctccttctccagcgcccactctgttggcaaggtcttcactaccatcacctgcctggactccatccaagcatcagggttgctgcagtcgctcctgaagagacccggctctgcttgaaagttcttccctcagcgcctgctggagccctccctgccggagttgccagaatccacacggaatccacagatctgccctgatgatcatgaaggaatgcgaaagagcctggtaaaacgatatggacttgtgcaaatgcaaagcaatggtgaagtcatcacgaaccgcacagactggacagaactcctatctggctgcaatggcttgggttcagtcagcccaggggccagagaattggctacaaagagctctggagtgcccctccctccaaataaagtattctaagcgtgcactgatcaacatgaagttcgcattaacttggggctccaagctcaattgaggggagtgggtgtcagacagaggagcctcctggacctggttcaatcttcacgcggagcttgttgagtgggttttcctctccagtgatgtccatgtgctgacgcagcagagcccgccccgttgcagcctccaagcaggtgtacgcagcgcctggtgcagaatcaaacgtaagcctcgggaaaacgtctgtcaccacatccaagtgtattttcctgacagagacactgtgctgcctccttgtggcctcaagaagaacagcgacagatacctgaagcttaataacattaccctcctggggacccagggcaaatagggacagttacagagagcctgactcagtccctagctccctgttgctgtgggctacaaaggacttggttaactcaggctgttggtctctctcctaagtgaggactgggggaatcgcacctttctgacagttacctttccttatcaaagtactgtatttttattttatcttatttcatttattttattattttattttttgagacaaagcctcactctgtcacccaggctggagtgcaatggcgtgatcttggctcactgcaacctccgtctcctcctgggttcaagcgattcttct

SEQ ID NO: 6962 - protein, 91 aa, Homo sapiens
MLGNTHGLIGAGWACQPSRGPRVPTKGLLLQRPLCWQGLHYHHLPGLHPSIRVAAVAPEETRLCLKVLPSAPAGALPAGVARIHTESTDLP

SEQ ID NO: 6963 - DNA, 283 bp, Homo sapiens
gtcaccagagctcataaaagatgtgtgtgctgtcgcatctatgtgaagtatttccatgacccgagcattgaccacaggactgtgctggaggaaactggatcaaggtaccaagacagatacaggagggtctccagaaaccctagagctgaatggaacccgtctggaaaacatacactggaaactaggccgaggattatccaaagggtggttgaaatcaagggttaaagtttggctcaagataaggaagaatcttctaataattaaaactgaccatccaaaaggt

SEQ ID NO: 6964 - protein, 75 aa, Homo sapiens
MTRALTTGLCWRKLDQGTKTDTGGSPETLELNGTRLENIHWKLGRGLSKGWLKSRVKVWLKIRKNLLIIKTDHPK

SEQ ID NO: 6965 - DNA, 525 bp, Homo sapiens
ataatcttctgtcttaagagcacccaggatgtgttttcattggtacggaattagctagccctgggaaagacagtccctccagagttagcaacaccccaagatgtcaaagataaaaatgcaaaaattaaaactccatgattaacacaactttgaagtccttctcacttgtctttagatgaagggcaacatcattgcaacaagtcacactttgagaactcaagagaatatgtttgttctgaaaatccaggaattattgccaacccatggttgtctccatatgtcttgggaaaaataggaaaaggattttttgagttggtgatttgaatccaagacacaaagattcaggctctggtaaaaagattgtataggctatattggctgacataaaaggtaagagcaagaatgcagaggatttctatcaacataaagaagagtcaaagatggagaataagagaagttaagtggttttcctaagatcacataattaagacttattaataaaaagtttgatgctctttctattat

SEQ ID NO: 6966 - protein, 39 aa, Homo sapiens
MKGNIIATSHTLRTQENMFVLKIQELLPTHGCLHMSWEK

SEQ ID NO: 6967 - DNA, 1924 bp, Homo sapiens
ggcggaggtggggttagcttcagttgaccaaccatgccttgaggataaattggatgggatcagatgggaagatgtgacaagaagagaaatcctcctctatataggatgctctgctgtttcctaaggattttcagcaccttgccccaaaatcaaaatgatgcttcaacacccaggccaggtctctgcctcggaagtgagtgcttctgccatcgtcccctgcctgtcccctcctgggtcactggtgtttgaggattttgctaacctgacgccctttgtcaaggaagagctgaggtttgccatccagaacaagcacctctgccaccggatgtcctctgcgctggaatcagtcactgtcagcgacagacccctcggggtgtccatcacaaaagccgaggtagcccctgaagaagatgaaaggaaaaagaggcgacgagaaagaaataagattgcagctgcaaagtgccgaaacaagaagaaggagaagacggagtgcctgcagaaagagtcggagaagctggaaagtgtgaatgctgaactgaaggctcagattgaggagctcaagaacgagaagcagcatttgatatacatgctcaaccttcatcggcccacgtgtattgtccgggctcagaatgggaggactccagaagatgagagaaacctctttatccaacagataaaagaaggaacattgcagagctaagcagtcgtggtatgggggcgactggggagtcctcattgaatcctcattttatacccaaaaccctgaagccattggagagctgtcttcctgtgtacctctagaatcccagcagcagagaaccatcaaggcgggagggcctgcagtgattcagcaggcccttcccattctgccccagagtgggtcttggaccagggcaagtgcatctttgcctcaactccaggatttaggccttaacacactggccattcttatgttccagatggcccccagctggtgtcctgcccgcctttcatctggattctacaaaaaaccaggatgcccaccgttaggattcaggcagcagtgtctgtacctcgggtgggagggatggggccatctccttcaccgtggctaccattgtcactcgtaggggatgtggagtgagaacagcatttagtgaagttgtgcaacggccagggttgtgctttctagcaaatatgctgttatgtccagaaattgtgtgtgcaagaaaactaggcaatgtactcttccgatgtttgtgtcacacaacactgatgtgacttttatatgctttttctcagatctggtttctaagagttttggggggcggggctgtcaccacgtgcagtatctcaagatattcaggtggccagaagagcttgtcagcaagaggaggacagaattctcccagcgttaacacaaaatccatgggcagtatgatggcaggtcctctgttgcaaactcagttccaaagtcacaggaagaaagcagaaagttcaacttccaaagggttaggactctccactcaatgtcttaggtcaggagttgtgtctaggctggaagagccaaagaatattccattttcctttccttgtggttgaaaaccacagtcagtggagagatgtttggaaaccacagtcagtggagcctgggtggtacccaggctttagcattattggatgtcaatagcattgtttttgtcatgtagctgttttaagaaatctggcccagggtgtttgcagctgtgagaagtcactcacactggccacaaggacgctggctactgtctattaaaattctgatgtttctgtgaaattctcagagtgtttaattgtactcaatggtatcattacaattttctgtaagagaaaatattacttatttatcctagtattcctaacctgtcagaataataaatattggaaccaagacatggtaaacatg

SEQ ID NO: 6968 - protein, 181 aa, Homo sapiens; identical to SEQ ID NO: 378

SEQ ID NO: 6969 - DNA, 2077 bp, Homo sapiens
tccgctccgttcggccggttctcccgggaagctattaatagcattacgtcagcctgggactggcaacacggagtaaacgaccgcgccgccagcctgagggctataaaaggggtgatgcaacgctctccaagccacagtcgcacgcagccaggcgcgcactgcacagctctcttctctcgccgccgcccgagcgcacccttcagcccgcgcgccggccgtgagtcctcggtgctcgcccgccggccagacaaacagcccgcccgaccccgtcccgaccctggccgccccgagcggagcctggagcaaaatgatgcttcaacacccaggccaggtctctgcctcggaagtgagtgcttctgccatcgtcccctgcctgtcccctcctgggtcactggtgtttgaggattttgctaacctgacgccctttgtcaaggaagagctgaggtttgccatccagaacaagcacctctgccaccggatgtcctctgcgctggaatcagtcactgtcagcgacagacccctcggggtgtccatcacaaaagccgaggtagcccctgaagaagatgaaaggaaaaagaggcgacgagaaagaaataagattgcagctgcaaagtgccgaaacaagaagaaggagaagacggagtgcctgcagaaagagtcggagaagctggaaagtgtgaatgctgaactgaaggctcagattgaggagctcaagaacgagaagcagcatttgatatacatgctcaaccttcatcggcccacgtgtattgtccgggctcagaatgggaggactccagaagatgagagaaacctctttatccaacagataaaagaaggaacattgcagagctaagcagtcgtggtatgggggcgactggggagtcctcattgaatcctcattttatacccaaaaccctgaagccattggagagctgtcttcctgtgtacctctagaatcccagcagcagagaaccatcaaggcgggagggcctgcagtgattcagcaggcccttcccattctgccccagagtgggtcttggaccagggcaagtgcatctttgcctcaactccaggatttaggccttaacacactggccattcttatgttccagatggcccccagctggtgtcctgcccgcctttcatctggattctacaaaaaaccaggatgcccaccgttaggattcaggcagcagtgtctgtacctcgggtgggagggatggggccatctccttcaccgtggctaccattgtcactcgtaggggatgtggagtgagaacagcatttagtgaagttgtgcaacggccagggttgtgctttctagcaaatatgctgttatgtccagaaattgtgtgtgcaagaaaactaggcaatgtactcttccgatgtttgtgtcacacaacactgatgtgacttttatatgctttttctcagatctggtttctaagagttttggggggcggggctgtcaccacgtgcagtatctcaagatattcaggtggccagaagagcttgtcagcaagaggaggacagaattctcccagcgttaacacaaaatccatgggcagtatgatggcaggtcctctgttgcaaactcagttccaaagtcacaggaagaaagcagaaagttcaacttccaaagggttaggactctccactcaatgtcttaggtcaggagttgtgtctaggctggaagagccaaagaatattccattttcctttccttgtggttgaaaaccacagtcagtggagagatgtttggaaaccacagtcagtggagcctgggtggtacccaggctttagcattattggatgtcaatagcattgtttttgtcatgtagctgttttaagaaatctggcccagggtgtttgcagctgtgagaagtcactcacactggccacaaggacgctggctactgtctattaaaattctgatgtttctgtgaaattctcagagtgtttaattgtactcaatggtatcattacaattttctgtaagagaaaatattacttatttatcctagtattcctaacctgtcagaataataaatattggaaccaagacatggtaaacatg

SEQ ID NO: 6970 - protein, 181 aa, Homo sapiens; identical to SEQ ID NO: 378

SEQ ID NO: 6971 - DNA, 1651 bp, Homo sapiens
cgggaagctattaatagcattacgtcagcctgggactggcaacacggagtaaacgaccgcgccgccagcctgagggctataaaaggggtgatgcaacgctctccaagccacagtcgcacgcagccaggcgcgcactgcacagctctcttctctcgccgccgcccgagcgcacccttcagcccgcgcgccggccgtgagtcctcggtgctcgcccgccggccagacaaacagcccgcccgaccccgtcccgaccctggccgccccgagcggagcctggagcaaaatgatgcttcaacacccaggccaggtctctgcctcggaagtgagtgcttctgccatcgtcccctgcctgtcccctcctgggtcactggtgtttgaggattttgctaacctgacgccctttgtcaaggaagagctgaggtttgccatccagaacaagcacctctgccaccggattcctcattgaatcctcattttatacccaaaaccctgaagccattggagagctgtcttcctgtgtacctctagaatcccagcagcagagaaccatcaaggcgggagggcctgcagtgattcagcaggcccttcccattctgccccagagtgggtcttggaccagggcaagtgcatctttgcctcaactccaggatttaggccttaacacactggccattcttatgttccagatggcccccagctggtgtcctgcccgcctttcatctggattctacaaaaaaccaggatgcccaccgttaggattcaggcagcagtgtctgtacctcgggtgggagggatggggccatctccttcaccgtggctaccattgtcactcgtaggggatgtggagtgagaacagcatttagtgaagttgtgcaacggccagggttgtgctttctagcaaatatgctgttatgtccagaaattgtgtgtgcaagaaaactaggcaatgtactcttccgatgtttgtgtcacacaacactgatgtgacttttatatgctttttctcagatctggtttctaagagttttggggggcggggctgtcaccacgtgcagtatctcaagatattcaggtggccagaagagcttgtcagcaagaggaggacagaattctcccagcgttaacacaaaatccatgggcagtatgatggcaggtcctctgttgcaaactcagttccaaagtcacaggaagaaagcagaaagttcaacttccaaagggttaggactctccactcaatgtcttaggtcaggagttgtgtctaggctggaagagccaaagaatattccattttcctttccttgtggttgaaaaccacagtcagtggagagatgtttggaaaccacagtcagtggagcctgggtggtacccaggctttagcattattggatgtcaatagcattgtttttgtcatgtagctgttttaagaaatctggcccagggtgtttgcagctgtgagaagtcactcacactggccacaaggacgctggctactgtctattaaaattctgatgtttctgtgaaattctcagagtgtttaattgtactcaatggtatcattacaattttctgtaagagaaaatattacttatttatcctagtattcctaacctgtcagaataataaatattggaaccaagacatggtaaacatg

SEQ ID NO: 6972 - protein, 95 aa, Homo sapiens
MQRSPSHSRTQPGAHCTALFSRRRPSAPFSPRAGRESSVLARRPDKQPARPRPDPGRPERSLEQNDASTPRPGLCLGSECFCHRPLPVPSWVTGV

SEQ ID NO: 6973 - DNA, 2085 bp, Homo sapiens
acagtcgcacgcagccaggcgcgcactgcacagctctcttctctcgccgccgcccgagcgcacccttcagcccgcgcgccggccgtgagtcctcggtgctcgcccgccggccagacaaacagcccgcccgaccccgtcccgaccctggccgccccgagcggagcctggagcaaaatgatgcttcaacacccaggccaggtctctgcctcggaagtgagtgcttctgccatcgtcccctgcctgtcccctcctgggtcactggtgtttgaggattttgctaacctgacgccctttgtcaaggaagagctgaggtttgccatccagaacaagcacctctgccaccggatgtcctctgcgctggaatcagtcactgtcagcgacagacccctcggggtgtccatcacaaaagccgaggtagcccctgaagaagatgaaaggaaaaagaggcgacgagaaagaaataagattgcagctgcaaagtgccgaaacaagaagaaggagaagacggagtgcctgcacttcagtattagcagagccacaggccgcctctgtggcatcaccagggtttctctgaagaagagggtctgcattttcctaaacccagtgctgctctcccatctcccatcttcctctcgcagcttgatgagccccggtgtgtcccaggagtcggagaagctggaaagtgtgaatgctgaactgaaggctcagattgaggagctcaagaacgagaagcagcatttgatatacatgctcaaccttcatcggcccacgtgtattgtccgggctcagaatgggaggactccagaagatgagagaaacctctttatccaacagataaaagaaggaacattgcagagctaagcagtcgtggtatgggggcgactggggagtcctcattgaatcctcattttatacccaaaaccctgaagccattggagagctgtcttcctgtgtacctctagaatcccagcagcagagaaccatcaaggcgggagggcctgcagtgattcagcaggcccttcccattctgccccagagtgggtcttggaccagggcaagtgcatctttgcctcaactccaggatttaggccttaacacactggccattcttatgttccagatggcccccagctggtgtcctgcccgcctttcatctggattctacaaaaaaccaggatgcccaccgttaggattcaggcagcagtgtctgtacctcgggtgggagggatggggccatctccttcaccgtggctaccattgtcactcgtaggggatgtggagtgagaacagcatttagtgaagttgtgcaacggccagggttgtgctttctagcaaatatgctgttatgtccagaaattgtgtgtgcaagaaaactaggcaatgtactcttccgatgtttgtgtcacacaacactgatgtgacttttatatgctttttctcagatctggtttctaagagttttggggggcggggctgtcaccacgtgcagtatctcaagatattcaggtggccagaagagcttgtcagcaagaggaggacagaattctcccagcgttaacacaaaatccatgggcagtatgatggcaggtcctctgttgcaaactcagttccaaagtcacaggaagaaagcagaaagttcaacttccaaagggttaggactctccactcaatgtcttaggtcaggagttgtgtctaggctggaagagccaaagaatattccattttcctttccttgtggttgaaaaccacagtcagtggagagatgtttggaaaccacagtcagtggagcctgggtggtacccaggctttagcattattggatgtcaatagcattgtttttgtcatgtagctgttttaagaaatctggcccagggtgtttgcagctgtgagaagtcactcacactggccacaaggacgctggctactgtctattaaaattctgatgtttctgtgaaattctcagagtgtttaattgtactcaatggtatcattacaattttctgtaagagaaaatattacttatttatcctagtattcctaacctgtcagaataataaatattggaaccaagacatggtaaacatg

SEQ ID NO: 6974 - protein, 228 aa, Homo sapiens [sequence omitted]

SEQ ID NO: 6975 - DNA, 3067 bp, Homo sapiens
acagtcgcacgcagccaggcgcgcactgcacagctctcttctctcgccgccgcccgagcgcacccttcagcccgcgcgccggccgtgagtcctcggtgctcgcccgccggccagacaaacagcccgcccgaccccgtcccgaccctggccgccccgagcggagcctggagcaaaatgatgcttcaacacccaggccaggtctctgcctcggaagtgagtgcttctgccatcgtcccctgcctgtcccctcctgggtcactggtgtttgaggattttgctaacctgacgccctttgtcaaggaagagctgaggtttgccatccagaacaagcacctctgccaccggatgtcctctgcgctggaatcagtcactgtcagcgacagacccctcggggtgtccatcacaaaagccgaggtagcccctgaagaagatgaaaggaaaaagaggcgacgagaaagaaataagattgcagctgcaaagtgccgaaacaagaagaaggagaagacggagtgcctgcagaaagtgagtgccttctagccttacccttcctctcgctcacgcctgtcttcaccagcttcatgtggctatcagaagaagagttagaaaaccccctacttggttatagtttcccaagaagggccttgtagctggtagcagaaatgccagttgcagaatgaggaggtggcaaagcagttaacacaatggatgtgacggtggatgtataaaaacaggtgtgtgaattcgtctgatgcctgactcccagcagcctcggccggttcatacatgtccatcagcttccaggctgcaggacatgccagcccagttaaagaggcttcacttgactgttttcctgagaaaaggaagctgccagctctcatttggctcactatgaaaagcctttaattaatctcttcaaacaagttatttccttaatccacaagcagtggttacacttgctttgcattcttgtctggttcctaactctagagcccttctccctggcttagccagtaagctgagcccctggctgcgttcagccggcccgcctgagagacactaggggaaatagcttttgtgggcaagcagggtggccggtggtgctcagcagtctttccagtggctgtgtccctcctccaaatgtggacaggccatgacagagtcttagcccaagtcccacagatccccaaaagttctgttgattgcttcaggggatcagtgaaaattagggaattttgtgtgttgctatatacattttttctggggagatgagcttctcattgagatctgtgactcagaatcgactaagccaccataagtctggatttctccccagctcccaaggcccttttgggtccagaagacctgcatatgggctgttgactcatgcaaatgaggtatctgaactgcagcttcagtattagcagagccacaggccgcctctgtggcatcaccagggtttctctgaagaagagggtctgcattttcctaaacccagtgctgctctcccatctcccatcttcctctcgcagcttgatgagccccggtgtgtcccaggtacacccctgcatccaggcagcagcccaggccaccccctcctcactggcccttggctcctttcttgatgcctctgttgcttgtcccccaggagtcggagaagctggaaagtgtgaatgctgaactgaaggctcagattgaggagctcaagaacgagaagcagcatttgatatacatgctcaaccttcatcggcccacgtgtattgtccgggctcagaatgggaggactccagaagatgagagaaacctctttatccaacagataaaagaaggaacattgcagagctaagcagtcgtggtatgggggcgactggggagtcctcattgaatcctcattttatacccaaaaccctgaagccattggagagctgtcttcctgtgtacctctagaatcccagcagcagagaaccatcaaggcgggagggcctgcagtgattcagcaggcccttcccattctgccccagagtgggtcttggaccagggcaagtgcatctttgcctcaactccaggatttaggccttaacacactggccattcttatgttccagatggcccccagctggtgtcctgcccgcctttcatctggattctacaaaaaaccaggatgcccaccgttaggattcaggcagcagtgtctgtacctcgggtgggagggatggggccatctccttcaccgtggctaccattgtcactcgtaggggatgtggagtgagaacagcatttagtgaagttgtgcaacggccagggttgtgctttctagcaaatatgctgttatgtccagaaattgtgtgtgcaagaaaactaggcaatgtactcttccgatgtttgtgtcacacaacactgatgtgacttttatatgctttttctcagatctggtttctaagagttttggggggcggggctgtcaccacgtgcagtatctcaagatattcaggtggccagaagagcttgtcagcaagaggaggacagaattctcccagcgttaacacaaaatccatgggcagtatgatggcaggtcctctgttgcaaactcagttccaaagtcacaggaagaaagcagaaagttcaacttccaaagggttaggactctccactcaatgtcttaggtcaggagttgtgtctaggctggaagagccaaagaatattccattttcctttccttgtggttgaaaaccacagtcagtggagagatgtttggaaaccacagtcagtggagcctgggtggtacccaggctttagcattattggatgtcaatagcattgtttttgtcatgtagctgttttaagaaatctggcccagggtgtttgcagctgtgagaagtcactcacactggccacaaggacgctggctactgtctattaaaattctgatgtttctgtgaaattctcagagtgtttaattgtactcaatggtatcattacaattttctgtaagagaaaatattacttatttatcctagtattcctaacctgtcagaataataaatattggaaccaagacatggtaaacatg

SEQ ID NO: 6976 - protein, 120 aa, Homo sapiens
MMLQHPGQVSASEVSASAIVPCLSPPGSLVFEDFANLTPFVKEELRFAIQNKHLCHRMSSALESVTVSDRPLGVSITKAEVAPEEDERKKRRRERNKIAAAKCRNKKKEKTECLQKVSAF

SEQ ID NO: 6977 - DNA, 2278 bp, Homo sapiens
cacgcagccaggcgcgcactgcacagctctcttctctcgccgccgcccgagcgcacccttcagcccgcgcgccggccgtgagtcctcggtgctcgcccgccggccagacaaacagcccgcccgaccccgtcccgaccctggccgccccgagcggagcctggaggtgagcgctggaagccgagggagtgagcgcgacgagggctgctcgccttcattcccttcgcgcccctctaagtaaccagtccgccgacccctgacccaccccggatccgcgcccccagcctccggcttggaaataactctggcttaaacttcttctaagccaccgctgctcctcggcgcttcgaaaagtttcccgcaaagcgaaagaactaactttctcttttgacttggggcgcgaaaggttcctggtgacggaggtcgggcgtccactctgccgccagcctcgagcgccgcttctctccgccgacggcgctggcttgcccggctgggagagggcgtaagcaaaatgatgcttcaacacccaggccaggtctctgcctcggaagtgagtgcttctgccatcgtcccctgcctgtcccctcctgggtcactggtgtttgaggattttgctaacctgacgccctttgtcaaggaagagctgaggtttgccatccagaacaagcacctctgccaccggatgtcctctgcgctggaatcagtcactgtcagcgacagacccctcggggtgtccatcacaaaagccgaggtagcccctgaagaagatgaaaggaaaaagaggcgacgagaaagaaataagattgcagctgcaaagtgccgaaacaagaagaaggagaagacggagtgcctgcagaaagagtcggagaagctggaaagtgtgaatgctgaactgaaggctcagattgaggagctcaagaacgagaagcagcatttgatatacatgctcaaccttcatcggcccacgtgtattgtccgggctcagaatgggaggactccagaagatgagagaaacctctttatccaacagataaaagaaggaacattgcagagctaagcagtcgtggtatgggggcgactggggagtcctcattgaatcctcattttatacccaaaaccctgaagccattggagagctgtcttcctgtgtacctctagaatcccagcagcagagaaccatcaaggcgggagggcctgcagtgattcagcaggcccttcccattctgccccagagtgggtcttggaccagggcaagtgcatctttgcctcaactccaggatttaggccttaacacactggccattcttatgttccagatggcccccagctggtgtcctgcccgcctttcatctggattctacaaaaaaccaggatgcccaccgttaggattcaggcagcagtgtctgtacctcgggtgggagggatggggccatctccttcaccgtggctaccattgtcactcgtaggggatgtggagtgagaacagcatttagtgaagttgtgcaacggccagggttgtgctttctagcaaatatgctgttatgtccagaaattgtgtgtgcaagaaaactaggcaatgtactcttccgatgtttgtgtcacacaacactgatgtgacttttatatgctttttctcagatctggtttctaagagttttggggggcggggctgtcaccacgtgcagtatctcaagatattcaggtggccagaagagcttgtcagcaagaggaggacagaattctcccagcgttaacacaaaatccatgggcagtatgatggcaggtcctctgttgcaaactcagttccaaagtcacaggaagaaagcagaaagttcaacttccaaagggttaggactctccactcaatgtcttaggtcaggagttgtgtctaggctggaagagccaaagaatattccattttcctttccttgtggttgaaaaccacagtcagtggagagatgtttggaaaccacagtcagtggagcctgggtggtacccaggctttagcattattggatgtcaatagcattgtttttgtcatgtagctgttttaagaaatctggcccagggtgtttgcagctgtgagaagtcactcacactggccacaaggacgctggctactgtctattaaaattctgatgtttctgtgaaattctcagagtgtttaattgtactcaatggtatcattacaattttctgtaagagaaaatattacttatttatcctagtattcctaacctgtcagaataataaatattggaaccaagacatggtaaacatg

SEQ ID NO: 6978 - protein, 181 aa, Homo sapiens; identical to SEQ ID NO: 378

SEQ ID NO: 6979 - DNA, 2490 bp, Homo sapiens
atgataacacataatggagtaagtgggcttcaaatcttcatcttctgacctcagtctgggaattttgtggataagagacccacttgctcacactcccagaaggcagttagcaagcagcctgggtatgcaccgtgacataaagattagcagttcattaaacagagttcagtttatcccgaggaatctttacttagcctcccctctatcacttcatttccaggcctcccacctaccttaaggcctgccccgagaaaatttgctctggttttttgtttgtttgtgcaatataacataatgcttgtttgtttttgtaatgtagaataatatttgtttgttttttgcaatgtacaaattaagggcatgaatcctggagccaaactaacttaattccaaatcctgatgctgccccatattaattctgtgaattcgggcaaatgacttagtttgtctaaacctcaattatctcatctataaaaggcagctagatcttaactcactgggttctcgtgaggattaaatgagatagtgcccctaaggtttctggtatgaaggaggcactccttaaatgttcgagacttgccagagggcttcttctctgtctggactgtgctaatgaccacagatccccggttgagaggaatgcccagaccacactcatcctacactcatccctatactcattgtcccttgggaaccaactgcagggaggaggggaaatggccaccactggagggagtacacagcaggccaagacttatgggggactcttccaaattggggccatggaactgtcactatttctactctttattttccttttgtcatccttttgggttcaccgagctatagaataacagagggagatgaatttagcaaatacatcactgaagcttctccctcggaagttgggcccaagcaatgggaatgagaaaggtaaccttggaccgtgggggccatttgatttgatgaccccatccccacttcatttatcagttggccaatgaggcatggcgagtcaggcattgggccaggctctgggtaaagcaatggtggagactcaatgcttgcattggaggagctctggaaagtgtgaatgctgaactgaaggctcagattgaggagctcaagaacgagaagcagcatttgatatacatgctcaaccttcatcggcccacgtgtattgtccgggctcagaatgggaggactccagaagatgagagaaacctctttatccaacagataaaagaaggaacattgcagagctaagcagtcgtggtatgggggcgactggggagtcctcattgaatcctcattttatacccaaaaccctgaagccattggagagctgtcttcctgtgtacctctagaatcccagcagcagagaaccatcaaggcgggagggcctgcagtgattcagcaggcccttcccattctgccccagagtgggtcttggaccagggcaagtgcatctttgcctcaactccaggatttaggccttaacacactggccattcttatgttccagatggcccccagctggtgtcctgcccgcctttcatctggattctacaaaaaaccaggatgcccaccgttaggattcaggcagcagtgtctgtacctcgggtgggagggatggggccatctccttcaccgtggctaccattgtcactcgtaggggatgtggagtgagaacagcatttagtgaagttgtgcaacggccagggttgtgctttctagcaaatatgctgttatgtccagaaattgtgtgtgcaagaaaactaggcaatgtactcttccgatgtttgtgtcacacaacactgatgtgacttttatatgctttttctcagatctggtttctaagagttttggggggcggggctgtcaccacgtgcagtatctcaagatattcaggtggccagaagagcttgtcagcaagaggaggacagaattctcccagcgttaacacaaaatccatgggcagtatgatggcaggtcctctgttgcaaactcagttccaaagtcacaggaagaaagcagaaagttcaacttccaaagggttaggactctccactcaatgtcttaggtcaggagttgtgtctaggctggaagagccaaagaatattccattttcctttccttgtggttgaaaaccacagtcagtggagagatgtttggaaaccacagtcagtggagcctgggtggtacccaggctttagcattattggatgtcaatagcattgtttttgtcatgtagctgttttaagaaatctggcccagggtgtttgcagctgtgagaagtcactcacactggccacaaggacgctggctactgtctattaaaattctgatgtttctgtgaaattctcagagtgtttaattgtactcaatggtatcattacaattttctgtaagagaaaatattacttatttatcctagtattcctaacctgtcagaataataaatattggaaccaagacatggtaaacatg

SEQ ID NO: 6980 - protein, 30 aa, Homo sapiens [sequence omitted]

SEQ ID NO: 6981 - DNA, 648 bp, Homo sapiens
gcaatataacataatgcttgtttgtttttgtaatgtagaataatatttgtttgttttttgcaatgtacaaattaagggcatgaatcctggagccaaactaacttaattccaaatcctgatgctgccccatattaattctgtgaattcgggcaaatgacttagtttgtctaaacctcaattatctcatctataaaaggcagctagatcttaactcactgggttctcgtgaggattaaatgagatagtgcccctaaggtttctggtatgaaggaggcactccttaaatgttcgagacttgccagagggcttcttctctgtctggactgtgctaatgaccacagatccccggttgagaggaatgcccagaccacactcatcctacactcatccctatactcattgtcccttgggaaccaactgcagggaggaggggaaatggccaccactggagggagtacacagcaggccaagacttatgggggactcttccaaattggggccatggaactgtcactatttgctaaattcaaggattccccactttttgcttttacttccactcactgatagtttcagcttgacgtcaagcctctttgaaaaagaggcttttttttttaagtgaaagaaactttattttgagtaatatac

SEQ ID NO: 6982 - protein, 100 aa, Homo sapiens
MKEALLKCSRLARGLLLCLDCANDHRSPVERNAQTTLILHSSLYSLSLGNQLQGGGEMATTGGSTQQAKTYGGLFQIGAMELSLFAKFKDSPLFAFTSTH

SEQ ID NO: 6983 - DNA, 2932 bp, Homo sapiens
ccctgaaacagtttgggtttcaatgtgtctttcagcaaaatgatgcttcaacacccaggccaggtctctgcctcggaagtgagtgcttctgccatcgtcccctgcctgtcccctcctgggtcactggtgtttgaggattttgctaacctgacgccctttgtcaaggaagagctgaggtttgccatccagaacaagcacctctgccaccggatgtcctctgcgctggaatcagtcactgtcagcgacagacccctcggggtgtccatcacaaaagccgaggtagcccctgaagaagatgaaaggaaaaagaggcgacgagaaagaaataagattgcagctgcaaagtgccgaaacaagaagaaggagaagacggagtgcctgcagaaagtgagtgccttctagccttacccttcctctcgctcacgcctgtcttcaccagcttcatgtggctatcagaagaagagttagaaaaccccctacttggttatagtttcccaagaagggccttgtagctggtagcagaaatgccagttgcagaatgaggaggtggcaaagcagttaacacaatggatgtgacggtggatgtataaaaacaggtgtgtgaattcgtctgatgcctgactcccagcagcctcggccggttcatacatgtccatcagcttccaggctgcaggacatgccagcccagttaaagaggcttcacttgactgttttcctgagaaaaggaagctgccagctctcatttggctcactatgaaaagcctttaattaatctcttcaaacaagttatttccttaatccacaagcagtggttacacttgctttgcattcttgtctggttcctaactctagagcccttctccctggcttagccagtaagctgagcccctggctgcgttcagccggcccgcctgagagacactaggggaaatagcttttgtgggcaagcagggtggccggtggtgctcagcagtctttccagtggctgtgtccctcctccaaatgtggacaggccatgacagagtcttagcccaagtcccacagatccccaaaagttctgttgattgcttcaggggatcagtgaaaattagggaattttgtgtgttgctatatacattttttctggggagatgagcttctcattgagatctgtgactcagaatcgactaagccaccataagtctggatttctccccagctcccaaggcccttttgggtccagaagacctgcatatgggctgttgactcatgcaaatgaggtatctgaactgcagcttcagtattagcagagccacaggccgcctctgtggcatcaccagggtttctctgaagaagagggtctgcattttcctaaacccagtgctgctctcccatctcccatcttcctctcgcagcttgatgagccccggtgtgtcccaggtacacccctgcatccaggcagcagcccaggccaccccctcctcactggcccttggctcctttcttgatgcctctgttgcttgtcccccaggagtcggagaagctggaaagtgtgaatgctgaactgaaggctcagattgaggagctcaagaacgagaagcagcatttgatatacatgctcaaccttcatcggcccacgtgtattgtccgggctcagaatgggaggactccagaagatgagagaaacctctttatccaacagataaaagaaggaacattgcagagctaagcagtcgtggtatgggggcgactggggagtcctcattgaatcctcattttatacccaaaaccctgaagccattggagagctgtcttcctgtgtacctctagaatcccagcagcagagaaccatcaaggcgggagggcctgcagtgattcagcaggcccttcccattctgccccagagtgggtcttggaccagggcaagtgcatctttgcctcaactccaggatttaggccttaacacactggccattcttatgttccagatggcccccagctggtgtcctgcccgcctttcatctggattctacaaaaaaccaggatgcccaccgttaggattcaggcagcagtgtctgtacctcgggtgggagggatggggccatctccttcaccgtggctaccattgtcactcgtaggggatgtggagtgagaacagcatttagtgaagttgtgcaacggccagggttgtgctttctagcaaatatgctgttatgtccagaaattgtgtgtgcaagaaaactaggcaatgtactcttccgatgtttgtgtcacacaacactgatgtgacttttatatgctttttctcagatctggtttctaagagttttggggggcggggctgtcaccacgtgcagtatctcaagatattcaggtggccagaagagcttgtcagcaagaggaggacagaattctcccagcgttaacacaaaatccatgggcagtatgatggcaggtcctctgttgcaaactcagttccaaagtcacaggaagaaagcagaaagttcaacttccaaagggttaggactctccactcaatgtcttaggtcaggagttgtgtctaggctggaagagccaaagaatattccattttcctttccttgtggttgaaaaccacagtcagtggagagatgtttggaaaccacagtcagtggagcctgggtggtacccaggctttagcattattggatgtcaatagcattgtttttgtcatgtagctgttttaagaaatctggcccagggtgtttgcagctgtgagaagtcactcacactggccacaaggacgctggctactgtctattaaaattctgatgtttctgtgaaattctcagagtgtttaattgtactcaatggtatcattacaattttctgtaagagaaaatattacttatttatcctagtattcctaacctgtcagaataataaatattggaaccaagacatggtaaacatg

SEQ ID NO: 6984 - protein, 120 aa, Homo sapiens; identical to SEQ ID NO: 6976

SEQ ID NO: 6985 - DNA, 1776 bp, Homo sapiens
agcaaaatgatgcttcaacacccaggccaggtctctgcctcggaagtgagtgcttctgccatcgtcccctgcctgtcccctcctgggtcactggtgtttgaggattttgctaacctgacgccctttgtcaaggaagagctgaggtttgccatccagaacaagcacctctgccaccggatgtcctctgcgctggaatcagtcactgtcagcgacagacccctcggggtgtccatcacaaaagccgaggtagcccctgaagaagatgaaaggaaaaagaggcgacgagaaagaaataagattgcagctgcaaagtgccgaaacaagaagaaggagaagacggagtgcctgcagaaagagtcggagaagctggaaagtgtgaatgctgaactgaaggctcagattgaggagctcaagaacgagaagcagcatttgatatacatgctcaaccttcatcggcccacgtgtattgtccgggctcagaatgggaggactccagaagatgagagaaacctctttatccaacagataaaagaaggaacattgcagagctaagcagtcgtggtatgggggcgactggggagtcctcattgaatcctcattttatacccaaaaccctgaagccattggagagctgtcttcctgtgtacctctagaatcccagcagcagagaaccatcaaggcgggagggcctgcagtgattcagcaggcccttcccattctgccccagagtgggtcttggaccagggcaagtgcatctttgcctcaactccaggatttaggccttaacacactggccattcttatgttccagatggcccccagctggtgtcctgcccgcctttcatctggattctacaaaaaaccaggatgcccaccgttaggattcaggcagcagtgtctgtacctcgggtgggagggatggggccatctccttcaccgtggctaccattgtcactcgtaggggatgtggagtgagaacagcatttagtgaagttgtgcaacggccagggttgtgctttctagcaaatatgctgttatgtccagaaattgtgtgtgcaagaaaactaggcaatgtactcttccgatgtttgtgtcacacaacactgatgtgacttttatatgctttttctcagatctggtttctaagagttttggggggcggggctgtcaccacgtgcagtatctcaagatattcaggtggccagaagagcttgtcagcaagaggaggacagaattctcccagcgttaacacaaaatccatgggcagtatgatggcaggtcctctgttgcaaactcagttccaaagtcacaggaagaaagcagaaagttcaacttccaaagggttaggactctccactcaatgtcttaggtcaggagttgtgtctaggctggaagagccaaagaatattccattttcctttccttgtggttgaaaaccacagtcagtggagagatgtttggaaaccacagtcagtggagcctgggtggtacccaggctttagcattattggatgtcaatagcattgtttttgtcatgtagctgttttaagaaatctggcccagggtgtttgcagctgtgagaagtcactcacactggccacaaggacgctggctactgtctattaaaattctgatgtttctgtgaaattctcagagtgtttaattgtactcaatggtatcattacaattttctgtaagagaaaatattacttatttatcctagtattcctaacctgtcagaataataaatattggaaccaagacatggtaaacatg

SEQ ID NO: 6986 - protein, 181 aa, Homo sapiens; identical to SEQ ID NO: 378

SEQ ID NO: 6987 - DNA, 1995 bp, Homo sapiens
atgatgcttcaacacccaggccaggtctctgcctcggaagaagagctgaggtttgccatccagaacaagcacctctgccaccggatgtcctctgcgctggaatcagtcactgtcagcgacagacccctcggggtgtccatcacaaaagccgaggtagcccctgaagaagatgaaaggaaaaagaggcgacgagaaagaaataagattgcagctgcaaagtgccgaaacaagaagaaggagaagacggagtgcctgcagaaactcccaaggcccttttgggtccagaagacctgcatatgggctgttgactcatgcaaatgaggtatctgaactgcagcttcagtattagcagagccacaggccgcctctgtggcatcaccagggtttctctgaagaagagggtctgcattttcctaaacccagtgctgctctcccatctcccatcttcctctcgcagcttgatgagccccggtgtgtcccaggtacacccctgcatccaggcagcagcccaggccaccccctcctcactggcccttggctcctttcttgatgcctctgttgcttgtcccccaggagtcggagaagctggaaagtgtgaatgctgaactgaaggctcagattgaggagctcaagaacgagaagcagcatttgatatacatgctcaaccttcatcggcccacgtgtattgtccgggctcagaatgggaggactccagaagatgagagaaacctctttatccaacagataaaagaaggaacattgcagagctaagcagtcgtggtatgggggcgactggggagtcctcattgaatcctcattttatacccaaaaccctgaagccattggagagctgtcttcctgtgtacctctagaatcccagcagcagagaaccatcaaggcgggagggcctgcagtgattcagcaggcccttcccattctgccccagagtgggtcttggaccagggcaagtgcatctttgcctcaactccaggatttaggccttaacacactggccattcttatgttccagatggcccccagctggtgtcctgcccgcctttcatctggattctacaaaaaaccaggatgcccaccgttaggattcaggcagcagtgtctgtacctcgggtgggagggatggggccatctccttcaccgtggctaccattgtcactcgtaggggatgtggagtgagaacagcatttagtgaagttgtgcaacggccagggttgtgctttctagcaaatatgctgttatgtccagaaattgtgtgtgcaagaaaactaggcaatgtactcttccgatgtttgtgtcacacaacactgatgtgacttttatatgctttttctcagatctggtttctaagagttttggggggcggggctgtcaccacgtgcagtatctcaagatattcaggtggccagaagagcttgtcagcaagaggaggacagaattctcccagcgttaacacaaaatccatgggcagtatgatggcaggtcctctgttgcaaactcagttccaaagtcacaggaagaaagcagaaagttcaacttccaaagggttaggactctccactcaatgtcttaggtcaggagttgtgtctaggctggaagagccaaagaatattccattttcctttccttgtggttgaaaaccacagtcagtggagagatgtttggaaaccacagtcagtggagcctgggtggtacccaggctttagcattattggatgtcaatagcattgtttttgtcatgtagctgttttaagaaatctggcccagggtgtttgcagctgtgagaagtcactcacactggccacaaggacgctggctactgtctattaaaattctgatgtttctgtgaaattctcagagtgtttaattgtactcaatggtatcattacaattttctgtaagagaaaatattacttatttatcctagtattcctaacctgtcagaataataaatattggaaccaagacatggtaaacatg

SEQ ID NO: 6988 - protein, 106 aa, Homo sapiens
MMLQHPGQVSASEEELRFAIQNKHLCHRMSSALESVTVSDRPLGVSITKAEVAPEEDERKKRRRERNKIAAAKCRNKKKEKTECLQKLPRPFWVQKTCIWAVDSCK

SEQ ID NO: 6989 - DNA, 1005 bp, Homo sapiens
accagggtttctctgaagaagagggtctgcattttcctaaacccagtgctgctctcccatctcccatcttcctctcgcagcttgatgagccccggtgtgtcccaggtacacccctgcatccaggcagcagcccaggccaccccctcctcactggcccttggctcctttcttgatgcctctgttgcttgtcccccaggagtcggagaagctggaaagtgtgaatgctgaactgaaggctcagattgaggagctcaagaacgagaagcagcatttgatatacatgctcaaccttcatcggcccacgtgtattgtccgggctcagaatgggaggactccagaagatgagagaaacctctttatccaacagataaaagaaggaacattgcagagctaagcagtcgtggtatgggggcgactggggagtcctcattgaatcctcattttatacccaaaaccctgaagccattggagagctgtcttcctgtgtacctctagaatcccagcagcagagtcctctgttgcaaactcagttccaaagtcacaggaagaaagcagaaagttcaacttccaaagggttaggactctccactcaatgtcttaggtcaggagttgtgtctaggctggaagagccaaagaatattccattttcctttccttgtggttgaaaaccacagtcagtggagagatgtttggaaaccacagtcagtggagcctgggtggtacccaggctttagcattattggatgtcaatagcattgtttttgtcatgtagctgttttaagaaatctggcccagggtgtttgcagctgtgagaagtcactcacactggccacaaggacgctggctactgtctattaaaattctgatgtttctgtgaaattctcagagtgtttaattgtactcaatggtatcattacaattttctgtaagagaaaatattacttatttatcctagtattcctaacctgtcagaataataaatattggaaccaagacatggtaaac

SEQ ID NO: 6990 - protein, 73 aa, Homo sapiens
MPLLLVPQESEKLESVNAELKAQIEELKNEKQHLIYMLNLHRPTCIVRAQNGRTPEDERNLFIQQIKEGTLQS

SEQ ID NO: 6991 - DNA, 2225 bp, Homo sapiens
agatgtatgattctttatttaaacggcagtaaagaacgctggaataggctttccagggacactcccatgagctctgggctcctttgcagcttccagctctgggtcttatttaatgggcttcaaaggtcactgtctccatgatgtccggtgtcatagaaccaaccgtctccagcccctggccaccctctgctgtctcggcgatggccacgttggtgctcctctccgccatcttagccatgacgttcacatctctgccatgtggtgtgcccactacttttgtagtaaggttggctctgacgttcctcaggaaagagctgaccctgccaagtcccttgctggaaccggaactggtggtccataagctcctcccagatttgtgagaggtcctggactcctttgagatgggcgtgtggctgacacctttatgcgagtccctgtgcctgctgctccccgggttgccacagcctttctcctttttgtcatctctattggctctgtggctgaatgaggacctgctggaggacttttgggcaatcttgtctccccttgttttgtggcggctttcacctgtcctgcggcgatgggaactccttccgagagccctgtccttttcccttctttccctcccctccttgcagccttcagcgctggcctgggttcgctcccttccatgctgtccactcaggctgctcttgctctgccgggtggagacgggaggtcccgctgctgcatccatgtctgcttctgcagctgtcctgctggtcagtactactcctgcaatggccaggctcacactgccctctcgggaaaggctcatggatgcgctggaaacatgctctgaggacttgcctgcagcccctgccacagccaccttcgtgctgtttggagccatgctggcagtgcctgcaagggccatgttgcctttgtttcctcctgcaccgatggtggccgccccagctatggctgcgctcacctgtccaggggcagaattggctgctgccacactcaaggcacctgctacggtgcctgttgctgcccctgcagctgcccctgctgctgctgcctctttaatcccccctgttgctggctcctcagcaagttctgtagatgttttggggatggatgcattgagcacattagtgggtttgttaaagtcattttggagtccctcccctccagcataagcagcagaggtggccccacacacctcagagaccatgtggaggctttggatgctgacctggtcctgatccccctttccttgaaggttcacggctcccaggctcctcctgtcttcctgaaacacaggcatccacatcatgtcttcagctggaatgccacaggtactgctgttactctccatgggtggccgcaagaggtaaattagtttttcccaataggcaaagaggtcatcccgtgtgtcaagagcgggacacaattgcagatagcaagatctgccagtggcgaacttcaggcgcagctgttgtttctcatggtcttgaacagagatccgtacaaacctcaggggcagaagcctgttgtcgctgcagtttccccatggtggtgttgaacatgctcatgctggagccactctgggccgtataatacggcagcagaaaatcagcattcatggttgtctttcagcacaacggcagcactggtgaggcaggtctctgggtcttccttggcctcggtggcagatgagggaccagtggtgctcctgggtcacaaagatgtctctgcagctggtctctcaatcccaccccaccccacaggcccccactgttgcctcagagcctcccagaggccggggtgggggtgggagcacggatgattgctgtggggggtgctgtagggtgcctggactccagactcttccaagacgtagagatgcagggtgggctccagagaggttttcttctggacctaaccccctgacctccacctctgatttttttaattacagtttgtagtctctctccctgagagagactacaaactgtagtcctagtgacaggaagtgacgaccctctctgcctaaaccccctgtgcagccatatttatcttctgcttccctttgtgacctgttgctgtcacatacccctttgttctcatcccccaggccagggccacaatgccctcactaatactccattgcccccatagaggacagccccaccgtgccaggtactcaagtgggtgccaaaataaaaatttttcaaatg

SEQ ID NO: 6992 - protein, 260 aa, Homo sapiens
MGVWLTPLCESLCLLLPGLPQPFSFLSSLLALWLNEDLLEDFWAILSPLVLWRLSPVLRRWELLPRALSFSLLSLPSLQPSALAWVRSLPCCPLRLLLLCRVETGGPAAASMSASAAVLLVSTTPAMARLTLPSRERLMDALETCSEDLPAAPATATFVLFGAMLAVPARAMLPLFPPAPMVAAPAMAALTCPGAELAAATLKAPATVPVAAPAAAPAAAASLIPPVAGSSASSVDVLGMDALSTLVGLLKSFWSPSPPA

SEQ ID NO: 6993 - DNA, 2305 bp, Homo sapiens
agagagggtcgtcacttcctgtcactaggactacagtttgtagtctctctcagggagagagactacaaactgtaattaaaaaaatcagaggtggaggtcagggggttaggtccagaagaaaacctctctggagcccaccctgcatctctacgtcttggaagagtctggagtccaggcaccctacagcaccccccacagcaatcatccgtgctcccacccccaccccggcctctgggaggctctgaggcaacagtgggggcctgtggggtggggtgggattgagagaccagctgcagagacatctttgtgacccaggagcaccactggtccctcatctgccaccgaggccaaggaagacccagagacctgcctcaccagtgctgccgttgtgctgaaagacaaccatgaatgctgattttctgctgccgtattatacggcccagagtggctccagcatgagcatgttcaacaccaccatggggaaactgcagcgacaactgtacaagggggagtacgatatattcaagtatgcaccgatatttgagagcgactttatccagatcaccaaaaggggagaagtgattgatgtgcacaaccgtgtccgtatggtgaccatgggcattgcacgtaccagccccatcctcccactcccagatgtcatgctactggcacgaccggccaccggctgcgaagagtatgctggacatggccaggccaccaagagaaaaaaacgcaaggcagcaaagaacttagagctcaccaggcttctgcccctgaggtttgtacggatctctgttcaagaccatgagaaacaacagctgcgcctgaagttcgccactggcagatcttgctatctgcaattgtgtcccgctcttgacacacgggatgacctctttgcctattgggaaaaactaatttacctcttgcggccacccatggagagtaacagcagtacctgtggcattccagctgaagacatgatgtggatgcctgtgtttcaggaagacaggaggagcctgggagccgtgaaccttcaaggaaagggggatcaggaccaggtcagcatccaaagcctccacatggtctctgaggtgtgtggggccacctctgctgcttatgctggaggggagggactccaaaatgactttaacaaacccactaatgtgctcaatgcatccatccccaaaacatctacagaacttgctgaggagccagcaacaggggggattaaagaggcagcagcagcaggggcagctgcaggggcagcaacaggcaccgtagcaggtgccttgagtgtggcagcagccaattctgcccctggacaggtgagcgcagccatagctggggcggccaccatcggtgcaggaggaaacaaaggcaacatggcccttgcaggcactgccagcatggctccaaacagcacgaaggtggctgtggcaggggctgcaggcaagtcctcagagcatgtttccagcgcatccatgagcctttcccgagagggcagtgtgagcctggccattgcaggagtagtactgaccagcaggacagctgcagaagcagacatggatgcagcagcgggacctcccgtctccacccggcagagcaagagcagcctgagtggacagcatggaagggagcgaacccaggccagcgctgaaggctgcaaggaggggagggaaagaagggaaaaggacagggctctcggaaggagttcccatcgccgcaggacaggtgaaagccgccacaaaacaaggggagacaagattgcccaaaagtcctccagcaggtcctcattcagccacagagccaatagagatgacaaaaaggagaaaggctgtggcaacccggggagcagcaggcacagggactcgcataaaggtgtcagccacacgcccatctcaaaggagtccaggacctctcacaaatctgggaggagcttatggaccaccagttccggttccagcaagggacttggcagggtcagctctttcctgaggaacgtcagagccaaccttactacaaaagtagtgggcacaccacatggcagagatgtgaacgtcatggctaagatggcggagaggagcaccaacgtggccatcgccgagacagcagagggtggccaggggctggagacggttggttctatgacaccggacatcatggagacagtgacctttgaagcccattaaataagacccagagctggaagctgcaaaggagcccagagctcatgggagtgtccctggaaagcctattccagcgttctttactgccgtttaaataaagaatcatacatctgaaagtg

SEQ ID NO: 6994 - protein, 594 aa, Homo sapiens
MNADFLLPYYTAQSGSSMSMFNTTMGKLQRQLYKGEYDIFKYAPIFESDFIQITKRGEVIDVHNRVRMVTMGIARTSPILPLPDVMLLARPATGCEEYAGHGQATKRKKRKAAKNLELTRLLPLRFVRISVQDHEKQQLRLKFATGRSCYLQLCPALDTRDDLFAYWEKLIYLLRPPMESNSSTCGIPAEDMMWMPVFQEDRRSLGAVNLQGKGDQDQVSIQSLHMVSEVCGATSAAYAGGEGLQNDFNKPTNVLNASIPKTSTELAEEPATGGIKEAAAAGAAAGAATGTVAGALSVAAANSAPGQVSAAIAGAATIGAGGNKGNMALAGTASMAPNSTKVAVAGAAGKSSEHVSSASMSLSREGSVSLAIAGVVLTSRTAAEADMDAAAGPPVSTRQSKSSLSGQHGRERTQASAEGCKEGRERREKDRALGRSSHRRRTGESRHKTRGDKIAQKSSSRSSFSHRANRDDKKEKGCGNPGSSRHRDSHKGVSHTPISKESRTSHKSGRSLWTTSSGSSKGLGRVSSFLRNVRANLTTKVVGTPHGRDVNVMAKMAERSTNVAIAETAEGGQGLETVGSMTPDIMETVTFEAH

SEQ ID NO: 6995 - DNA, 810 bp, Homo sapiens
atgagtcctttccatggaaatcacactgcaatgtttgcctcggggagggtggctgcagggcccggagtcgcctggatcgcagcgccatctcgtggctgctggcaggtctgccttgggccctcttggcacaaggcaaggaaacaggagctcttcccatcagtgacagcccaggagaatgctccagtgtcaccagtgactcctgctcccacatctgcctacaggaagccctcttggaacaaaagcatctcacttctgggaggcatcaagtatgtgcatcaccagcaggacagacttgcagcgcctattctgagtgaaaaagagaatcttttggtgctaccctcaaccaacctcatcctttctccacttggattcttctcaacattgaccctcttgaaaagatcataaaaactcactttaaggtgtatatgaggagttttgtctcccaggaaggtttgcattgtatctgtaatggtggagtctcaggcattgacttcccaggtgaaggaagggtgattttgggatgggggggccttcctgaaacctctgaagaaacagcacaccagcacctctgccagccagctgcatccaggatcaatgttccccctagttctggttcactcttttgaagctttccaagtcccagaagtgaattcttagcctttctttgagctctctttggtccaggcacagctgtaggaaaaattgtacagtggcatgaaaaaagtgaagggtttagtgtagtaaattctgcaaattttcttttaaaaaaaactgcattttaaaaaataaaaatactatgtcctattgtaa

SEQ ID NO: 6996 - protein, 134 aa, Homo sapiens
MSPFHGNHTAMFASGRVAAGPGVAWIAAPSRGCWQVCLGPSWHKARKQELFPSVTAQENAPVSPVTPAPTSAYRKPSWNKSISLLGGIKYVHHQQDRLAAPILSEKENLLVLPSTNLILSPLGFFSTLTLLKRS

SEQ ID NO: 6997 - DNA, 605 bp, Homo sapiens
gttctacgcctctgtaaaccctgatggagaggaaactgaacaggaatatgagagcctggagcaagaaaacaccatgctgcggagagagatcgggaagctgacagaggagctgaagcacctgacagaggcactgaaggagcacgagaagatgtgcccgctgctgctctgccctatgaactttgtgccagtgcctccccggccggaccctgtggccggctgcttgccccgatgaagccggggacactcctctgcccagcaaggagccttggtcattttcatacctgggaggaaggcttttccttcacaattgtatacagggggcacctgtggccaggcctcctcctgggagctccaggaccagccagctgtgttccctgcagactgggctcagcccgacatccaacaggcgccaaactcacagagcccttgtgcagatccagcatggaggccaccctcaggagtgacttctcatccaccctggcagctagtaggttctgctgttatgcagagccatttcctctagaatttggataataaagatgcttattgtctctcccttctccagttctgggaatttacaggcacaatacacttccttttcctgg

SEQ ID NO: 6998 - protein, 101 aa, Homo sapiens
MKPGTLLCPARSLGHFHTWEEGFSFTIVYRGHLWPGLLLGAPGPASCVPCRLGSARHPTGAKLTEPLCRSSMEATLRSDFSSTLAASRFCCYAEPFPLEFG

SEQ ID NO: 6999 - DNA, 2357 bp, Homo sapiens
attaaatgtttctgctgggttggcaggtgtgatcatggtgatgagtccagtttagagtcagctccccgagggcagtatgcaggctgctttcttgtgctagtgactttttgattacagagagcaaagaggcatgagaagcactatgcagaatacatttttttttaaagtagcaacttcaacaaaggcaggtaacttcttgagggcatactgtatgctgggagctttaggacaaaatctcatttcatcgcatcccaatcctaagcattaggctgttagcaccaagtctgcagagttcactgaccctttgtttagggcttgtatccccagtgtctagaacagtgtctggcacatggtaggtgctcagttaatacatattgaaagaatgaatgaattatgcttacaataaatgagaaaactgaaaatttagagaatttaaaccatttacacaagaccatgttgacactaagagacaaaactaggatctgtgtgattctaaagctaaagagctgtcttctaaccacatgttcccctgtaatgttctggttttgtttatcaagacttctttgcctctctagaagactgtattatcatactttgttcccttaagcttctatttgctatgtatgttatttattcctctcctttttatgcctttatattcttgcatatctgaaacttcttacctgcagtaacttgggaagatgtgtgtcttatgtggaatacaagatgagatcaaatgataactgaaaatatccttttttgtgttattaatatttgcattccgtgaatattaataactgagtagttttccttgtttgtacctcttggctcttaaactctgtaagtgtggtatttttcccgcttggtggtgtcttctcatggggttctagaaagcaaatactgctctcctttttcatgttttctatagctgattgaagtgtttttaccatggtcagtgcatttttccgcctgcctgtttcatgatcactattgagggatttgactgaatttggttaaatcttacatatagctaacagctttcaagacacataaaaaatttgctgacttctgaaacaaaatgtcagccaagcattgttcaaatgagtacactgtcagtggggtttaagatcatttggtgtgttggtagagttatgtggctgcaattagttgtaagtgtaatcatgatttgcatgcagtatcaaaagtacctttcatgtgtggtggtataaggactggcaaacagcaagttccagatagcagatctctccaccgccccccacccccacccagctttccagtctcagatggacgacattgacaccacagctcttccaggcacacgccctgtgggctagaggtttatgaacgttgatttggagaccaacagacctgagttccacttcccactcacccacttagtggctgtaatacctggagcaaggtccttaacctctctgagtttcttattcctcatcttttaaacggcggtcacaccacacacttcacacactcacatggtgagtgctcctgggcaaggggctgttgtgagcccattggtatagcaactagtggtgctgtctactgcaaagcaaatgatgaagctcagtgaacaacgctgagtgatgagacagggcagaaaagggtaaggcgaggggccacgacatcacacccacccagtgtttttccccagagccctgaggatgatgacaggaaggtccgaaggagagaaaaaaaccgagttgctgctcagagaagtcggaagaagcagacccagaaggctgacaagctccatgaggaatatgagagcctggagcaagaaaacaccatgctgcggagagagatcgggaagctgacagaggagctgaagcacctgacagaggcactgaaggagcacgagaagatgtgcccgctgctgctctgccctatgaactttgtgccagtgcctccccggccggaccctgtggccggctgcttgccccgatgaagccggggacactcctctgcccagcaaggagccttggtcattttcatacctgggaggaaggcttttccttcacaattgtatacagggggcacctgtggccaggcctcctcctgggagctccaggaccagccagctgtgttccctgcagactgggctcagcccgacatccaacaggcgccaaactcacagagcccttgtgcagatccagcatggaggccaccctcaggagtgacttctcatccaccctggcagctagtaggttctgctgttatgcagagccatttcctctagaatttggataataaagatgcttattgtctctcccttctccagttctgggaatttacaggcacaatacacttccttttcctgg

SEQ ID NO: 7000 - protein, 50 aa, Homo sapiens
MMTGRSEGEKKTELLLREVGRSRPRRLTSSMRNMRAWSKKTPCCGERSGS

SEQ ID NO: 7001 - DNA, 980 bp, Homo sapiens
ggggcagacgtgggacgggaaggacggctgccgggactggcgcgcggggacactgggccgacgcgtggagtagcggggagagcgggaagcctgagggggcggggccggcgcgaggccgtgggtgcggcacgaggatgccggcggcgggacagcgcccgtaggcagccccacgggcagggcgcgcgggcggggcggggcgggccgggccagaggagcgcccggcatgtcgcaagggctcccggccgccggcagcgtcctgcagaggagcgtcgcggcgcccgggaaccagccgcagccgcagccgcagcagcagagccctgaggatgatgacaggaaggtccgaaggagagaaaaaaaccgagttgctgctcagagaagtcggaagaagcagacccagaaggctgacaagctccatgaggaatatgagagcctggagcaagaaaacaccatgctgcggagagagatcgggaagctgacagaggagctgaagcacctgacagaggcactgaaggagcacgagaagatgtgcccgctgctgctctgccctatgaactttgtgccagtgcctccccggccggaccctgtggccggctgcttgccccgatgaagccggggacactcctctgcccagcaaggagccttggtcattttcatacctgggaggaaggcttttccttcacaattgtatacagggggcacctgtggccaggcctcctcctgggagctccaggaccagccagctgtgttccctgcagactgggctcagcccgacatccaacaggcgccaaactcacagagcccttgtgcagatccagcatggaggccaccctcaggagtgacttctcatccaccctggcagctagtaggttctgctgttatgcagagccatttcctctagaatttggataataaagatgcttattgtctctcccttctccagttctgggaatttacaggcacaatacacttccttttcctgg

SEQ ID NO: 7002 - protein, 127 aa, Homo sapiens; identical to SEQ ID NO: 388

SEQ ID NO: 7003 - DNA, 644 bp, Homo sapiens
agaagagcctgatgcaaggaactcagaggacctgagatgctgtatcctaacatttcaagaactgcgatattgaaaaaagcattggatctactagatgtggttctattaaatggaaccaaacccaacaggaatatgagagcctggagcaagaaaacaccatgctgcggagagagatcgggaagctgacagaggagctgaagcacctgacagaggcactgaaggagcacgagaagatgtgcccgctgctgctctgccctatgaactttgtgccagtgcctccccggccggaccctgtggccggctgcttgccccgatgaagccggggacactcctctgcccagcaaggagccttggtcattttcatacctgggaggaaggcttttccttcacaattgtatacagggggcacctgtggccaggcctcctcctgggagctccaggaccagccagctgtgttccctgcagactgggctcagcccgacatccaacaggcgccaaactcacagagcccttgtgcagatccagcatggaggccaccctcaggagtgacttctcatccaccctggcagctagtaggttctgctgttatgcagagccatttcctctagaatttggataataaagatgcttattgtctctccctt

SEQ ID NO: 7004 - protein, 49 aa, Homo sapiens
MLYPNISRTAILKKALDLLDVVLLNGTKPNRNMRAWSKKTPCCGERSGS

SEQ ID NO: 7005 - DNA, 601 bp, Homo sapiens
cgggctgtgtatgagagtgtgtgagtgtgtttgcggacgtgtgtgagtgtgtgtatatgtgtatgtgtgtaagagtgtgtgaatgtgtatgagaagcctggagcaagaaaacaccatgctgcggagagagatcgggaagctgacagaggagctgaagcacctgacagaggcactgaaggagcacgagaagatgtgcccgctgctgctctgccctatgaactttgtgccagtgcctccccggccggaccctgtggccggctgcttgccccgatgaagccggggacactcctctgcccagcaaggagccttggtcattttcatacctgggaggaaggcttttccttcacaattgtatacagggggcacctgtggccaggcctcctcctgggagctccaggaccagccagctgtgttccctgcagactgggctcagcccgacatccaacaggcgccaaactcacagagcccttgtgcagatccagcatggaggccaccctcaggagtgacttctcatccaccctggcagctagtaggttctgctgttatgcagagccatttcctctagaatttggataataaagatgcttattgtctctccctt

SEQ ID NO: 7006 - protein, 63 aa, Homo sapiens
MCMRSLEQENTMLRREIGKLTEELKHLTEALKEHEKMCPLLLCPMNFVPVPPRPDPVAGCLPR

SEQ ID NO: 7007 - DNA, 549 bp, Homo sapiens
tacgcctctgtaaaccctgatggagaggaaactgaacaggaatatgagagcctggagcaagaaaacaccatgctgcggagagagatcgggaagctgacagaggagctgaagcacctgacagaggcactgaaggagcacgagaagatgtgcccgctgctgctctgccctatgaactttgtgccagtgcctccccggccggaccctgtggccggctgcttgccccgatgaagccggggacactcctctgcccagcaaggagccttggtcattttcatacctgggaggaaggcttttccttcacaattgtatacagggggcacctgtggccaggcctcctcctgggagctccaggaccagccagctgtgttccctgcagactgggctcagcccgacatccaacaggcgccaaactcacagagcccttgtgcagatccagcatggaggccaccctcaggagtgacttctcatccaccctggcagctagtaggttctgctgttatgcagagccatttcctctagaatttggataataaagatgcttattgtctc

SEQ ID NO: 7008 - protein, 101 aa, Homo sapiens; identical to SEQ ID NO: 6998

SEQ ID NO: 7009 - DNA, 923 bp, Homo sapiens
agacgtgggacgggaaggacggctgccgggactggcgcgcggggacactgggccgacgcgtggagtagcggggagagcgggaagcctgagggggcggggccggcgcgaggccgtgggtgcggcacgaggatgccggcggcgggacagcgcccgtaggcagccccacgggcagggcgcgcgggcggggcggggcgggccgggccagaggagcgcccggcatgtcgcaagggctcccggccgccggcagcgtcctgcagaggagcgtcgcggcgcccgggaaccagccgcagccgcagccgcagcagcagagccctgaggatgatgacaggaaggtccgaaggagagaaaaaaaccgagttgctgctcagagaagtcggaagaagcagacccagaaggctgacaagctccatgaggaatatgagagcctggagcaagaaaacaccatgctgcggagagagatcgggaagctgacagaggagctgaagcacctgacagaggcactgaaggagcacgagaagatgtgcccgctgctgctctgccctatgaactttgtgccagtgcctccccggccggaccctgtggccggctgcttgccccgatgaagccggggacactcctctgcccagcaaggagccttggtcattttcatacctgggaggaaggcttttccttcacaattgtatacagggggcacctgtggccaggcctcctcctgggagctccaggaccagccagctgtgttccctgcagactgggctcagcccgacatccaacaggcgccaaactcacagagcccttgtgcagatccagcatggaggccaccctcaggagtgacttctcatccaccctggcagctagtaggttctgctgttatgcagagccatttcctctagaatttggataataaagatgcttattgtctc

SEQ ID NO: 7010 - protein, 127 aa, Homo sapiens; identical to SEQ ID NO: 388

SEQ ID NO: 7011 - DNA, 1555 bp, Homo sapiens
agagtgccccgcccacagttccgacgaaaaatggcggggtctcctgagttggtggtccttgaccctccatgggacaaggagctcgcggctggcacagagagccaggccttggtctccgccactccccgagaagactttcgggtgcgctgcacctcgaagcgggctgtgaccgaaatgctacaactgtgcggccgcttcgtgcaaaagctcggggacgctctgccggaggagattcgggagcccgctctgcgagatgcgcagtggacttttgaatcagctgtgcaagagaatatcagcattaatgggcaagcatggcaggaagcttcagataattgttttatggattctgacatcaaagtacttgaagatcagtttgatgaaatcatagtagatatagccacaaaacgtaagcagtatcccagaaagatcctggaatgtgtcatcaaaaccataaaagcaaaacaagaaattctgaagcagtaccaccctgttgtacatccactggacctaaaatatgaccctgatccaggagccaagcctggtggactagctctaggggcagtttaggagagaaggggatcggggaaccttcatcccttctgcctctggtgaactggcaagatgaagaggatgaagctgggtgacccagagcccgccctccctctctcggcagtcatctccaaggccggagtagactggactggagggcctctgagaggacacagccaggaagcacactctccctgtgctcttcacccaccatgaagagacaggacgggaaagtccgtgctgtgctggtgtccatcagagggagggacaccatccagcccctgggaccgggctcggctctgttgttgcacagaagtcatttggagatccccacgtgccacatggaggattgtgggaggaccccaccgaggtggctggcagcctctcatggacaccatggagagtgacccaatcactctgcatttgaggactgcagagtggctcagcggtctggacattgaagaggagccaacctcaggggtaacacagtgccgctgggagctgagatgagccaggtggtcggtgggggacacaagcctagaacaaattcaataaaccagccacagacgttatcatcagatgtgcccagagacaaggtggacaggggcatttgctgtggagaccagagggccagagagagtacagggacctggatagatggctccagcacctcttcttctccctacacccatatgccatcttgataaacagcagggaaatctgaaaaataccaagtcttcccatagggacagtgttacctcccaaaaactgtttgaataattggcttgaactggattttctgaactgaactaatgctattgttttgtgggtttttttcttcctactgagtagagtagttgtttatgggggacatctgatcctttcattttcttccagagagctaaccacctgttctgacaccatttattgaatagtacctcttttcccccactgatgtgagaggctgcatttttcatctaataaaatcgaatatatatttagatct

SEQ ID NO: 7012 - protein, 178 aa, Homo sapiens
MAGSPELVVLDPPWDKELAAGTESQALVSATPREDFRVRCTSKRAVTEMLQLCGRFVQKLGDALPEEIREPALRDAQWTFESAVQENISINGQAWQEASDNCFMDSDIKVLEDQFDEIIVDIATKRKQYPRKILECVIKTIKAKQEILKQYHPVVHPLDLKYDPDPGAKPGGLALGAV

SEQ ID NO: 7013 - DNA, 315 bp, Homo sapiens
cactgccctttgcagcaccagctgattacattgctttttccatgttctagctgttcttttgagccgttttatagccgagcatctccaccagaagagcggataggaaaaaggaaaagagaggaggatttgaccttggtatcttgcttcatttccttctctgacaaaaatttggtgaaaaggttaaaataagttgttacctcccaaaaactgtttgaataattggcttgaactggattttctgaactgaactaatgctattgttttgtgggtttttttcttcctactgagtagagtagttgtttatgggggacatct

SEQ ID NO: 7014 - protein, 62 aa, Homo sapiens
HCPLQHQLITLLFPCSSCSFEPFYSRASPPEERIGKRKREEDLTLVSCFISFSDKNLVKRLK

SEQ ID NO: 7015 - DNA, 2332 bp, Homo sapiens
gacgaaaaatggcggggtctcctgagttggtggtccttgaccctccatgggacaaggagctcgcggctggcacagagagccaggccttggtctccgccactccccgagaagactttcgggtgcgctgcacctcgaagcgggctgtgaccgaaatgctacaactgtgcggccgcttcgtgcaaaagctcggggacgctctgccggaggagattcgggagcccgctctgcgagatgcgcagtggattctgacatcaaagtacttgaagatcagtttgatgaaatcatagtagatatagccacaaaacgtaagcagtatcccagaaagatcctggaatgtgtcatcaaaaccataaaagcaaaacaagaaattctgaagcagtaccaccctgttgtacatccactggacctaaaatatgaccctgatccagcccctcatatggaaaatttgaaatgcagaggggaaacagtagcaaaggagatcagtgaagccatgaagtccttgcctgcattaattgaacaaggagagggattttcccaagttctcaggatgcagcctgttatccacctccagaggattcaccaagaagtcttttccagttgtcataggaaaccagatgctaaacctgagaactttataacacagatagaaaccacaccaacagagactgcttccaggaaaacctctgacatggtactgaaaagaaagcaaactaaagactgcccccagagaaaatggtatccattgcggccaaagaaaattaatcttgatacatgagctctttctgtttattttgggagttgaaaataggcaccatcaacatttagattacagcctaattaatacctagataagacttcatttgaaataagaaataactcttttactagtgattcatttatacagatatagtatctctgtgcggggatatgatataatattgtatttccttactgttttatctattgtaaataaaaagcattttaaaaagtattgacacaaagcccatcagtgggcattaaaaatattaaaagtgcagacttttactgtccttaagtgccatcaactctcagctcccttgtagcttttgtgggatttaacaagtaacaaattctgttgtgtttccctggtatacatctttctaggaaaaaaaaaaaaaagagagagagctgtataatgatttttcgtttacatgctgaaaagtaattatcagttctgcacagcagcagatgcagggtttttttttaaagatgtagtttgatttatcaaattaatgtgctgatgataatactggctttgactttgttactccatgttcagctaatttaggtttgtgagattaactttaggattttttgttgtgtaagacaatgataactattatttgtgcaacattactctttgaaataaaaattggcatgtagccaatgtttcctgcccacactcacttttttctatagaccattaacataatttgacttggaactaatggtttctttttagggtttcttatttatttctttacaaatcattccagttcaaaatatatatcagattaatacactggcaaagtgtcattgtgttattgaactatttcacatttgaagatgtttatatatcaggtatataatcactgggagaagtctgagaaaacgatattggctttacttctaacatttaactatagtttcttatagctcttattgtgtgtcttacattatacagtgtaggcagggccatcaaacttaccaactgtttccccttttgatgactctgataccttcattcatttttcaaaggaatttactgatcatgaggttggaaaatctgtatttctcttgcttattatgtattaataatcataaatgtctagattcaccagaagtcaccagaaggtctgtctcagtgaagaaaacttataaagccactttgttgcattttgtgtttcagtgttacagtttgagatctgtatatttgtacacagctatgtgtttttcattgaaataatgtacaaagactgatcttgatgctgtgtatttttatgagttgtcttaggcattcctgagctcagcttcagttggatggtgggtcagcaccctgcgtttctgaacatactagacttcagtttaaaactgttttgaggctgtataatatgttgctgtttttacagtgctaatgtttttatagtattaaaattctgtatgatttgtttcacttcagaggtccccaaacaaaagagttattgttaattctattagattatataagctacttgcattttgattatataagaacatggtccctcccttttaagagaggtatattgtgctacat

SEQ ID NO: 7016 - protein, 242 aa, Homo sapiens
MGQGARGWHREPGLGLRHSPRRLSGALHLEAGCDRNATTVRPLRAKARGRSAGGDSGARSARCAVDSDIKVLEDQFDEIIVDIATKRKQYPRKILECVIKTIKAKQEILKQYHPVVHPLDLKYDPDPAPHMENLKCRGETVAKEISEAMKSLPALIEQGEGFSQVLRMQPVIHLQRIHQEVFSSCHRKPDAKPENFITQIETTPTETASRKTSDMVLKRKQTKDCPQRKWYPLRPKKINLDT

SEQ ID NO: 7017 - DNA, 2578 bp, Homo sapiens
ccgacgaaaaatggcggggtctcctgagttggtggtccttgaccctccatgggacaaggagctcgcggctggcacagagagccaggccttggtctccgccactccccgagaagactttcgggtgcgctgcacctcgaagcgggctgtgaccgaaatgctacaactgtgcggccgcttcgtgcaaaagctcggggacgctctgccggaggagattcgggagcccgctctgcgagatgcgcagtgggtacgggaccagttagccagttctttactcatcatcctcttacccaacacccaggatcttaggattcagaaagatcccacgccaggccttggcagaattaacggtgccccaggctactgtagaaccagttcgagaaacgctagaggagaaagaaatagatgctaatgtcagctgggtcttattaattacttagaccagcgctgtccagtgaaaatacaagacttttgaatcagctgtgcaagagaatatcagcattaatgggcaagcatggcaggaagcttcagataattgttttatggattctgacatcaaagtacttgaagatcagtttgatgaaatcatagtagatatagccacaaaacgtaagcagtatcccagaaagatcctggaatgtgtcatcaaaaccataaaagcaaaacaagaaattctgcccctcatatggaaaatttgaaatgcagaggggaaacagtagcaaaggagatcagtgaagccatgaagtccttgcctgcattaattgaacaaggagagggattttcccaagttctcaggatgcagcctgttatccacctccagaggattcaccaagaagtcttttccagttgtcataggaaaccagatgctaaacctgagaactttataacacagatagaaaccacaccaacagagactgcttccaggaaaacctctgacatggtactgaaaagaaagcaaactaaagactgcccccagagaaaatggtatccattgcggccaaagaaaattaatcttgatacatgagctctttctgtttattttgggagttgaaaataggcaccatcaacatttagattacagcctaattaatacctagataagacttcatttgaaataagaaataactcttttactagtgattcatttatacagatatagtatctctgtgcggggatatgatataatattgtatttccttactgttttatctattgtaaataaaaagcattttaaaaagtattgacacaaagcccatcagtgggcattaaaaatattaaaagtgcagacttttactgtccttaagtgccatcaactctcagctcccttgtagcttttgtgggatttaacaagtaacaaattctgttgtgtttccctggtatacatctttctaggaaaaaaaaaaaaaagagagagagctgtataatgatttttcgtttacatgctgaaaagtaattatcagttctgcacagcagcagatgcagggtttttttttaaagatgtagtttgatttatcaaattaatgtgctgatgataatactggctttgactttgttactccatgttcagctaatttaggtttgtgagattaactttaggattttttgttgtgtaagacaatgataactattatttgtgcaacattactctttgaaataaaaattggcatgtagccaatgtttcctgcccacactcacttttttctatagaccattaacataatttgacttggaactaatggtttctttttagggtttcttatttatttctttacaaatcattccagttcaaaatatatatcagattaatacactggcaaagtgtcattgtgttattgaactatttcacatttgaagatgtttatatatcaggtatataatcactgggagaagtctgagaaaacgatattggctttacttctaacatttaactatagtttcttatagctcttattgtgtgtcttacattatacagtgtaggcagggccatcaaacttaccaactgtttccccttttgatgactctgataccttcattcatttttcaaaggaatttactgatcatgaggttggaaaatctgtatttctcttgcttattatgtattaataatcataaatgtctagattcaccagaagtcaccagaaggtctgtctcagtgaagaaaacttataaagccactttgttgcattttgtgtttcagtgttacagtttgagatctgtatatttgtacacagctatgtgtttttcattgaaataatgtacaaagactgatcttgatgctgtgtatttttatgagttgtcttaggcattcctgagctcagcttcagttggatggtgggtcagcaccctgcgtttctgaacatactagacttcagtttaaaactgttttgaggctgtataatatgttgctgtttttacagtgctaatgtttttatagtattaaaattctgtatgatttgtttcacttcagaggtccccaaacaaaagagttattgttaattctattagattatataagctacttgcattttgattatataagaacatggtccctcccttttaagagaggtatattgtgctacat

SEQ ID NO: 7018 - protein, 128 aa, Homo sapiens
MCHQNHKSKTRNSAPHMENLKCRGETVAKEISEAMKSLPALIEQGEGFSQVLRMQPVIHLQRIHQEVFSSCHRKPDAKPENFITQIETTPTETASRKTSDMVLKRKQTKDCPQRKWYPLRPKKINLDT

SEQ ID NO: 7019 - DNA, 2071 bp, Homo sapiens
tccgacgaaaaatggcggggtctcctgagttggtggtccttgaccctccatgggacaaggagctcgcggctggcacagagagccaggccttggtctccgccactccccgagaagactttcgggtgcgctgcacctcgaagcgggctgtgaccgaaatgctacaactgtgcggccgcttcgtgcaaaagctcggggacgctctgccggaggagattcgggagcccgctctgcgagatgcgcagtggacttttgaatcagctgtgcaagagaatatcagcattaatgggcaagcatggcaggaagcttcagataattgttttatggattctgacatcaaagtacttgaagatcagtttgatgaaatcatagtagatatacacagatagaaaccacaccaacagagactgcttccaggaaaacctctgacatggtactgaaaagaaagcaaactaaagactgcccccagagaaaatggtatccattgcggccaaagaaaattaatcttgatacatgagctctttctgtttattttgggagttgaaaataggcaccatcaacatttagattacagcctaattaatacctagataagacttcatttgaaataagaaataactcttttactagtgattcatttatacagatatagtatctctgtgcggggatatgatataatattgtatttccttactgttttatctattgtaaataaaaagcattttaaaaagtattgacacaaagcccatcagtgggcattaaaaatattaaaagtgcagacttttactgtccttaagtgccatcaactctcagctcccttgtagcttttgtgggatttaacaagtaacaaattctgttgtgtttccctggtatacatctttctaggaaaaaaaaaaaaaagagagagagctgtataatgatttttcgtttacatgctgaaaagtaattatcagttctgcacagcagcagatgcagggtttttttttaaagatgtagtttgatttatcaaattaatgtgctgatgataatactggctttgactttgttactccatgttcagctaatttaggtttgtgagattaactttaggattttttgttgtgtaagacaatgataactattatttgtgcaacattactctttgaaataaaaattggcatgtagccaatgtttcctgcccacactcacttttttctatagaccattaacataatttgacttggaactaatggtttctttttagggtttcttatttatttctttacaaatcattccagttcaaaatatatatcagattaatacactggcaaagtgtcattgtgttattgaactatttcacatttgaagatgtttatatatcaggtatataatcactgggagaagtctgagaaaacgatattggctttacttctaacatttaactatagtttcttatagctcttattgtgtgtcttacattatacagtgtaggcagggccatcaaacttaccaactgtttccccttttgatgactctgataccttcattcatttttcaaaggaatttactgatcatgaggttggaaaatctgtatttctcttgcttattatgtattaataatcataaatgtctagattcaccagaagtcaccagaaggtctgtctcagtgaagaaaacttataaagccactttgttgcattttgtgtttcagtgttacagtttgagatctgtatatttgtacacagctatgtgtttttcattgaaataatgtacaaagactgatcttgatgctgtgtatttttatgagttgtcttaggcattcctgagctcagcttcagttggatggtgggtcagcaccctgcgtttctgaacatactagacttcagtttaaaactgttttgaggctgtataatatgttgctgtttttacagtgctaatgtttttatagtattaaaattctgtatgatttgtttcacttcagaggtccccaaacaaaagagttattgttaattctattagattatataagctacttgcattttgattatataagaacatggtccctcccttttaagagaggtatattgtgctacat

SEQ ID NO: 7020 - protein, 124 aa, Homo sapiens
MAGSPELVVLDPPWDKELAAGTESQALVSATPREDFRVRCTSKRAVTEMLQLCGRFVQKLGDALPEEIREPALRDAQWTFESAVQENISINGQAWQEASDNCFMDSDIKVLEDQFDEIIVDIHR

SEQ ID NO: 7021 - DNA, 2296 bp, Homo sapiens
acagttccgacgaaaaatggcggggtctcctgagttggtggtccttgaccctccatgggacaaggagctcgcggctggcacagagagccaggccttggtctccgccactccccgagaagactttcgggtgcgctgcacctcgaagcgggctgtgaccgaaatgctacaactgtgcggccgcttcgtgcaaaagctcggggacgctctgccggaggagattcgggagcccgctctgcgagatgcgcagtggacttttgaatcagctgtgcaagagaatatcagcattaatgggcaagcatggcaggaagcttcagataattgttttatggattctgacatcaaagtacttgaagatcagtttgatgaaatcatagtagatatagccacaaaacgtaagcagtatcccagaaagatcctggaatgtgtcatcaaaaccataaaagcaaaacaagaaattctgtccttgcctgcattaattgaacaaggagagggattttcccaagttctcaggatgcagcctgttatccacctccagaggattcaccaagaagtcttttccagttgtcataggaaaccagatgctaaacctgagaactttataacacagatagaaaccacaccaacagagactgcttccaggaaaacctctgacatggtactgaaaagaaagcaaactaaagactgcccccagagaaaatggtatccattgcggccaaagaaaattaatcttgatacatgagctctttctgtttattttgggagttgaaaataggcaccatcaacatttagattacagcctaattaatacctagataagacttcatttgaaataagaaataactcttttactagtgattcatttatacagatatagtatctctgtgcggggatatgatataatattgtatttccttactgttttatctattgtaaataaaaagcattttaaaaagtattgacacaaagcccatcagtgggcattaaaaatattaaaagtgcagacttttactgtccttaagtgccatcaactctcagctcccttgtagcttttgtgggatttaacaagtaacaaattctgttgtgtttccctggtatacatctttctaggaaaaaaaaaaaaaagagagagagctgtataatgatttttcgtttacatgctgaaaagtaattatcagttctgcacagcagcagatgcagggtttttttttaaagatgtagtttgatttatcaaattaatgtgctgatgataatactggctttgactttgttactccatgttcagctaatttaggtttgtgagattaactttaggattttttgttgtgtaagacaatgataactattatttgtgcaacattactctttgaaataaaaattggcatgtagccaatgtttcctgcccacactcacttttttctatagaccattaacataatttgacttggaactaatggtttctttttagggtttcttatttatttctttacaaatcattccagttcaaaatatatatcagattaatacactggcaaagtgtcattgtgttattgaactatttcacatttgaagatgtttatatatcaggtatataatcactgggagaagtctgagaaaacgatattggctttacttctaacatttaactatagtttcttatagctcttattgtgtgtcttacattatacagtgtaggcagggccatcaaacttaccaactgtttccccttttgatgactctgataccttcattcatttttcaaaggaatttactgatcatgaggttggaaaatctgtatttctcttgcttattatgtattaataatcataaatgtctagattcaccagaagtcaccagaaggtctgtctcagtgaagaaaacttataaagccactttgttgcattttgtgtttcagtgttacagtttgagatctgtatatttgtacacagctatgtgtttttcattgaaataatgtacaaagactgatcttgatgctgtgtatttttatgagttgtcttaggcattcctgagctcagcttcagttggatggtgggtcagcaccctgcgtttctgaacatactagacttcagtttaaaactgttttgaggctgtataatatgttgctgtttttacagtgctaatgtttttatagtattaaaattctgtatgatttgtttcacttcagaggtccccaaacaaaagagttattgttaattctattagattatataagctacttgcattttgattatataagaacatggtccctcccttttaagagaggtatattgtgctacat

SEQ ID NO: 7022 - protein, 240 aa, Homo sapiens
MAGSPELVVLDPPWDKELAAGTESQALVSATPREDFRVRCTSKRAVTEMLQLCGRFVQKLGDALPEEIREPALRDAQWTFESAVQENISINGQAWQEASDNCFMDSDIKVLEDQFDEIIVDIATKRKQYPRKILECVIKTIKAKQEILSLPALIEQGEGFSQVLRMQPVIHLQRIHQEVFSSCHRKPDAKPENFITQIETTPTETASRKTSDMVLKRKQTKDCPQRKWYPLRPKKINLDT

SEQ ID NO: 7023 - DNA, 2368 bp, Homo sapiens
gcccacagttccgacgaaaaatggcggggtctcctgagttggtggtccttgaccctccatgggacaaggagctcgcggctggcacagagagccaggccttggtctccgccactccccgagaagactttcgggtgcgctgcacctcgaagcgggctgtgaccgaaatgctacaactgtgcggccgcttcgtgcaaaagctcggggacgctctgccggaggagattcgggagcccgctctgcgagatgcgcagtggacttttgaatcagctgtgcaagagaatatcagcattaatgggcaagcatggcaggaagcttcagataattgttttatggattctgacatcaaagtacttgaagatcagtttgatgaaatcatagtagatatagccacaaaacgtaagcagtatcccagaaagatcctggaatgtgtcatcaaaaccataaaagcaaaacaagaaattctgcccctcatatggaaaatttgaaatgcagaggggaaacagtagcaaaggagatcagtgaagccatgaagtccttgcctgcattaattgaacaaggagagggattttcccaagttctcaggatgcagcctgttatccacctccagaggattcaccaagaagtcttttccagttgtcataggaaaccagatgctaaacctgagaactttataacacagatagaaaccacaccaacagagactgcttccaggaaaacctctgacatggtactgaaaagaaagcaaactaaagactgcccccagagaaaatggtatccattgcggccaaagaaaattaatcttgatacatgagctctttctgtttattttgggagttgaaaataggcaccatcaacatttagattacagcctaattaatacctagataagacttcatttgaaataagaaataactcttttactagtgattcatttatacagatatagtatctctgtgcggggatatgatataatattgtatttccttactgttttatctattgtaaataaaaagcattttaaaaagtattgacacaaagcccatcagtgggcattaaaaatattaaaagtgcagacttttactgtccttaagtgccatcaactctcagctcccttgtagcttttgtgggatttaacaagtaacaaattctgttgtgtttccctggtatacatctttctaggaaaaaaaaaaaaaagagagagagctgtataatgatttttcgtttacatgctgaaaagtaattatcagttctgcacagcagcagatgcagggtttttttttaaagatgtagtttgatttatcaaattaatgtgctgatgataatactggctttgactttgttactccatgttcagctaatttaggtttgtgagattaactttaggattttttgttgtgtaagacaatgataactattatttgtgcaacattactctttgaaataaaaattggcatgtagccaatgtttcctgcccacactcacttttttctatagaccattaacataatttgacttggaactaatggtttctttttagggtttcttatttatttctttacaaatcattccagttcaaaatatatatcagattaatacactggcaaagtgtcattgtgttattgaactatttcacatttgaagatgtttatatatcaggtatataatcactgggagaagtctgagaaaacgatattggctttacttctaacatttaactatagtttcttatagctcttattgtgtgtcttacattatacagtgtaggcagggccatcaaacttaccaactgtttccccttttgatgactctgataccttcattcatttttcaaaggaatttactgatcatgaggttggaaaatctgtatttctcttgcttattatgtattaataatcataaatgtctagattcaccagaagtcaccagaaggtctgtctcagtgaagaaaacttataaagccactttgttgcattttgtgtttcagtgttacagtttgagatctgtatatttgtacacagctatgtgtttttcattgaaataatgtacaaagactgatcttgatgctgtgtatttttatgagttgtcttaggcattcctgagctcagcttcagttggatggtgggtcagcaccctgcgtttctgaacatactagacttcagtttaaaactgttttgaggctgtataatatgttgctgtttttacagtgctaatgtttttatagtattaaaattctgtatgatttgtttcacttcagaggtccccaaacaaaagagttattgttaattctattagattatataagctacttgcattttgattatataagaacatggtccctcccttttaagagaggtatattgtgctacat

SEQ ID NO: 7024 - protein, 154 aa, Homo sapiens
MAGSPELVVLDPPWDKELAAGTESQALVSATPREDFRVRCTSKRAVTEMLQLCGRFVQKLGDALPEEIREPALRDAQWTFESAVQENISINGQAWQEASDNCFMDSDIKVLEDQFDEIIVDIATKRKQYPRKILECVIKTIKAKQEILPLIWKI

SEQ ID NO: 7025 - DNA, 2518 bp, Homo sapiens
agagtgccccgcccacagttccgacgaaaaatggcggggtctcctgagttggtggtccttgaccctccatgggacaaggagctcgcggctggcacagagagccaggccttggtctccgccactccccgagaagactttcgggtgcgctgcacctcgaagcgggctgtgaccgaaatgctacaactgtgcggccgcttcgtgcaaaagctcggggacgctctgccggaggagattcgggagcccgctctgcgagatgcgcagtggacttttgaatcagctgtgcaagagaatatcagcattaatgggcaagcatggcaggaagcttcagataattgttttatggattctgacatcaaagtacttgaagatcagtttgatgaaatcatagtagatatagccacaaaacgtaagcagtatcccagaaagatcctggaatgtgtcatcaaaaccataaaagcaaaacaagaaattctgaagcagtaccaccctgttgtacatccactggacctaaaatatgaccctgatccagttctcaacgggaatgctttcaacttttccccattcaacatgatgttggctgtggatttgtcatatatggtttttattacttcgagcccctcatatggaaaatttgaaatgcagaggggaaacagtagcaaaggagatcagtgaagccatgaagtccttgcctgcattaattgaacaaggagagggattttcccaagttctcaggatgcagcctgttatccacctccagaggattcaccaagaagtcttttccagttgtcataggaaaccagatgctaaacctgagaactttataacacagatagaaaccacaccaacagagactgcttccaggaaaacctctgacatggtactgaaaagaaagcaaactaaagactgcccccagagaaaatggtatccattgcggccaaagaaaattaatcttgatacatgagctctttctgtttattttgggagttgaaaataggcaccatcaacatttagattacagcctaattaatacctagataagacttcatttgaaataagaaataactcttttactagtgattcatttatacagatatagtatctctgtgcggggatatgatataatattgtatttccttactgttttatctattgtaaataaaaagcattttaaaaagtattgacacaaagcccatcagtgggcattaaaaatattaaaagtgcagacttttactgtccttaagtgccatcaactctcagctcccttgtagcttttgtgggatttaacaagtaacaaattctgttgtgtttccctggtatacatctttctaggaaaaaaaaaaaaaagagagagagctgtataatgatttttcgtttacatgctgaaaagtaattatcagttctgcacagcagcagatgcagggtttttttttaaagatgtagtttgatttatcaaattaatgtgctgatgataatactggctttgactttgttactccatgttcagctaatttaggtttgtgagattaactttaggattttttgttgtgtaagacaatgataactattatttgtgcaacattactctttgaaataaaaattggcatgtagccaatgtttcctgcccacactcacttttttctatagaccattaacataatttgacttggaactaatggtttctttttagggtttcttatttatttctttacaaatcattccagttcaaaatatatatcagattaatacactggcaaagtgtcattgtgttattgaactatttcacatttgaagatgtttatatatcaggtatataatcactgggagaagtctgagaaaacgatattggctttacttctaacatttaactatagtttcttatagctcttattgtgtgtcttacattatacagtgtaggcagggccatcaaacttaccaactgtttccccttttgatgactctgataccttcattcatttttcaaaggaatttactgatcatgaggttggaaaatctgtatttctcttgcttattatgtattaataatcataaatgtctagattcaccagaagtcaccagaaggtctgtctcagtgaagaaaacttataaagccactttgttgcattttgtgtttcagtgttacagtttgagatctgtatatttgtacacagctatgtgtttttcattgaaataatgtacaaagactgatcttgatgctgtgtatttttatgagttgtcttaggcattcctgagctcagcttcagttggatggtgggtcagcaccctgcgtttctgaacatactagacttcagtttaaaactgttttgaggctgtataatatgttgctgtttttacagtgctaatgtttttatagtattaaaattctgtatgatttgtttcacttcagaggtccccaaacaaaagagttattgttaattctattagattatataagctacttgcattttgattatataagaacatggtccctcccttttaagagaggtatattgtgctacat

SEQ ID NO: 7026 - protein, 213 aa, Homo sapiens
MAGSPELVVLDPPWDKELAAGTESQALVSATPREDFRVRCTSKRAVTEMLQLCGRFVQKLGDALPEEIREPALRDAQWTFESAVQENISINGQAWQEASDNCFMDSDIKVLEDQFDEIIVDIATKRKQYPRKILECVIKTIKAKQEILKQYHPVVHPLDLKYDPDPVLNGNAFNFSPFNMMLAVDLSYMVFITSSPSYGKFEMQRGNSSKGDQ

SEQ ID NO: 7027 - DNA, 2365 bp, Homo sapiens
agagtgccccgcccacagttccgacgaaaaatggcggggtctcctgagttggtggtccttgaccctccatgggacaaggagctcgcggctggcacagagagccaggccttggtctccgccactccccgagaagactttcgggtgcgctgcacctcgaagcgggctgtgaccgaaatgctacaactgtgcggccgcttcgtgcaaaagctcggggacgctctgccggaggagattcgggagcccgctctgcgagatgcgcagtggacttttgaatcagctgtgcaagagaatatcagcattaatgggcaagcatggcaggaagcttcagataattgttttatggattctgacatcaaagtacttgaagatcagtttgatgaaatcatagtagatatagccacaaaacgtaagcagtatcccagaaagatcctggaatgtgtcatcaaaaccataaaagcaaaacaagaaattctgaagcagtaccaccctgttgtacatccactggacctaaaatatgaccctgatccagtccttgcctgcattaattgaacaaggagagggattttcccaagttctcaggatgcagcctgttatccacctccagaggattcaccaagaagtcttttccagttgtcataggaaaccagatgctaaacctgagaactttataacacagatagaaaccacaccaacagagactgcttccaggaaaacctctgacatggtactgaaaagaaagcaaactaaagactgcccccagagaaaatggtatccattgcggccaaagaaaattaatcttgatacatgagctctttctgtttattttgggagttgaaaataggcaccatcaacatttagattacagcctaattaatacctagataagacttcatttgaaataagaaataactcttttactagtgattcatttatacagatatagtatctctgtgcggggatatgatataatattgtatttccttactgttttatctattgtaaataaaaagcattttaaaaagtattgacacaaagcccatcagtgggcattaaaaatattaaaagtgcagacttttactgtccttaagtgccatcaactctcagctcccttgtagcttttgtgggatttaacaagtaacaaattctgttgtgtttccctggtatacatctttctaggaaaaaaaaaaaaaagagagagagctgtataatgatttttcgtttacatgctgaaaagtaattatcagttctgcacagcagcagatgcagggtttttttttaaagatgtagtttgatttatcaaattaatgtgctgatgataatactggctttgactttgttactccatgttcagctaatttaggtttgtgagattaactttaggattttttgttgtgtaagacaatgataactattatttgtgcaacattactctttgaaataaaaattggcatgtagccaatgtttcctgcccacactcacttttttctatagaccattaacataatttgacttggaactaatggtttctttttagggtttcttatttatttctttacaaatcattccagttcaaaatatatatcagattaatacactggcaaagtgtcattgtgttattgaactatttcacatttgaagatgtttatatatcaggtatataatcactgggagaagtctgagaaaacgatattggctttacttctaacatttaactatagtttcttatagctcttattgtgtgtcttacattatacagtgtaggcagggccatcaaacttaccaactgtttccccttttgatgactctgataccttcattcatttttcaaaggaatttactgatcatgaggttggaaaatctgtatttctcttgcttattatgtattaataatcataaatgtctagattcaccagaagtcaccagaaggtctgtctcagtgaagaaaacttataaagccactttgttgcattttgtgtttcagtgttacagtttgagatctgtatatttgtacacagctatgtgtttttcattgaaataatgtacaaagactgatcttgatgctgtgtatttttatgagttgtcttaggcattcctgagctcagcttcagttggatggtgggtcagcaccctgcgtttctgaacatactagacttcagtttaaaactgttttgaggctgtataatatgttgctgtttttacagtgctaatgtttttatagtattaaaattctgtatgatttgtttcacttcagaggtccccaaacaaaagagttattgttaattctattagattatataagctacttgcattttgattatataagaacatggtccctcccttttaagagaggtatattgtgctacat

SEQ ID NO: 7028 - protein, 172 aa, Homo sapiens
MAGSPELVVLDPPWDKELAAGTESQALVSATPREDFRVRCTSKRAVTEMLQLCGRFVQKLGDALPEEIREPALRDAQWTFESAVQENISINGQAWQEASDNCFMDSDIKVLEDQFDEIIVDIATKRKQYPRKILECVIKTIKAKQEILKQYHPVVHPLDLKYDPDPVLACIN

SEQ ID NO: 7029 - DNA, 2433 bp, Homo sapiens
agagtgccccgcccacagttccgacgaaaaatggcggggtctcctgagttggtggtccttgaccctccatgggacaaggagctcgcggctggcacagagagccaggccttggtctccgccactccccgagaagactttcgggtgcgctgcacctcgaagcgggctgtgaccgaaatgctacaactgtgcggccgcttcgtgcaaaagctcggggacgctctgccggaggagattcgggagcccgctctgcgagatgcgcagtggacttttgaatcagctgtgcaagagaatatcagcattaatgggcaagcatggcaggaagcttcagataattgttttatggattctgacatcaaagtacttgaagatcagtttgatgaaatcatagtagatatagccacaaaacgtaagcagtatcccagaaagatcctggaatgtgtcatcaaaaccataaaagcaaaacaagaaattctgaagcagtaccaccctgttgtacatccactggacctaaaatatgaccctgatccagcccctcatatggaaaatttgaaatgcagaggggaaacagtagcaaaggagatcagtgaagccatgaagtccttgcctgcattaattgaacaaggagagggattttcccaagttctcaggatgcagcctgttatccacctccagaggattcaccaagaagtcttttccagttgtcataggaaaccagatgctaaacctgagaactttataacacagatagaaaccacaccaacagagactgcttccaggaaaacctctgacatggtactgaaaagaaagcaaactaaagactgcccccagagaaaatggtatccattgcggccaaagaaaattaatcttgatacatgagctctttctgtttattttgggagttgaaaataggcaccatcaacatttagattacagcctaattaatacctagataagacttcatttgaaataagaaataactcttttactagtgattcatttatacagatatagtatctctgtgcggggatatgatataatattgtatttccttactgttttatctattgtaaataaaaagcattttaaaaagtattgacacaaagcccatcagtgggcattaaaaatattaaaagtgcagacttttactgtccttaagtgccatcaactctcagctcccttgtagcttttgtgggatttaacaagtaacaaattctgttgtgtttccctggtatacatctttctaggaaaaaaaaaaaaaagagagagagctgtataatgatttttcgtttacatgctgaaaagtaattatcagttctgcacagcagcagatgcagggtttttttttaaagatgtagtttgatttatcaaattaatgtgctgatgataatactggctttgactttgttactccatgttcagctaatttaggtttgtgagattaactttaggattttttgttgtgtaagacaatgataactattatttgtgcaacattactctttgaaataaaaattggcatgtagccaatgtttcctgcccacactcacttttttctatagaccattaacataatttgacttggaactaatggtttctttttagggtttcttatttatttctttacaaatcattccagttcaaaatatatatcagattaatacactggcaaagtgtcattgtgttattgaactatttcacatttgaagatgtttatatatcaggtatataatcactgggagaagtctgagaaaacgatattggctttacttctaacatttaactatagtttcttatagctcttattgtgtgtcttacattatacagtgtaggcagggccatcaaacttaccaactgtttccccttttgatgactctgataccttcattcatttttcaaaggaatttactgatcatgaggttggaaaatctgtatttctcttgcttattatgtattaataatcataaatgtctagattcaccagaagtcaccagaaggtctgtctcagtgaagaaaacttataaagccactttgttgcattttgtgtttcagtgttacagtttgagatctgtatatttgtacacagctatgtgtttttcattgaaataatgtacaaagactgatcttgatgctgtgtatttttatgagttgtcttaggcattcctgagctcagcttcagttggatggtgggtcagcaccctgcgtttctgaacatactagacttcagtttaaaactgttttgaggctgtataatatgttgctgtttttacagtgctaatgtttttatagtattaaaattctgtatgatttgtttcacttcagaggtccccaaacaaaagagttattgttaattctattagattatataagctacttgcattttgattatataagaacatggtccctcccttttaagagaggtatattgtgctacat

SEQ ID NO: 7030 - protein, 281 aa, Homo sapiens
MAGSPELVVLDPPWDKELAAGTESQALVSATPREDFRVRCTSKRAVTEMLQLCGRFVQKLGDALPEEIREPALRDAQWTFESAVQENISINGQAWQEASDNCFMDSDIKVLEDQFDEIIVDIATKRKQYPRKILECVIKTIKAKQEILKQYHPVVHPLDLKYDPDPAPHMENLKCRGETVAKEISEAMKSLPALIEQGEGFSQVLRMQPVIHLQRIHQEVFSSCHRKPDAKPENFITQIETTPTETASRKTSDMVLKRKQTKDCPQRKWYPLRPKKINLDT

SEQ ID NO: 7031 - DNA, 1440 bp, Homo sapiens
gacgaaaaatggcggggtctcctgagttggtggtccttgaccctccatgggacaaggagctcgcggctggcacagagagccaggccttggtctccgccactccccgagaagactttcgggtgcgctgcacctcgaagcgggctgtgaccgaaatgctacaactgtgcggccgcttcgtgcaaaagctcggggacgctctgccggaggagattcgggagcccgctctgcgagatgcgcagtggattctgacatcaaagtacttgaagatcagtttgatgaaatcatagtagatatagccacaaaacgtaagcagtatcccagaaagatcctggaatgtgtcatcaaaaccataaaagcaaaacaagaaattctgaagcagtaccaccctgttgtacatccactggacctaaaatatgaccctgatccagcccctcatatggaaaatttgaaatgcagaggggaaacagtagcaaaggagatcagtgaagccatgaagtccttgcctgcattaattgaacaaggagagggattttcccaagttctcaggatgcagcctgttatccacctccagaggattcaccaagaagtcttttccagttgtcataggaaaccagatgctaaacctgagaactttataacacagatagaaaccacaccaacagagactgcttccaggaaaacctctgacatggtactgaaaagaaagcaaactaaagactgcccccagagaaaatggtatccattgcggccaaagaaaattaatcttgatacatgagctctttctgtttattttgggagttgaaaataggcaccatcaacatttagattacagcctaattaatacctagataagacttcatttgaaataagaaataactcttttactagtgattcatttatacagatatagtatctctgtgcggggatatgatataatattgtatttccttactgttttatctattgtaaataaaaagcattttaaaaagtattgacacaaagcccatcagtgggcattaaaaatattaaaagtgcagacttttactgtccttaagtgccatcaactctcagctcccttgtagcttttgtgggatttaacaagtaacaaattctgttgtgtttccctggtatacatctttctaggaaaaaaaaaaaaaagagagagagctgtataatgatttttcgtttacatgctgaaaagtaattatcagttctgcacagcagcagatgcagggtttttttttaaagatgtagtttgatttatcaaattaatgtgctgatgataatactggctttgactttgttactccatgttcagctaatttaggtttgtgagattaactttaggattttttgttgtgtaagacaatgataactattatttgtgcaacattactctttgaaataaaaattggcatgtagccaatgtttcctgcccac

SEQ ID NO: 7032 - protein, 242 aa, Homo sapiens; identical to SEQ ID NO: 7016

SEQ ID NO: 7033 - DNA, 1686 bp, Homo sapiens
ccgacgaaaaatggcggggtctcctgagttggtggtccttgaccctccatgggacaaggagctcgcggctggcacagagagccaggccttggtctccgccactccccgagaagactttcgggtgcgctgcacctcgaagcgggctgtgaccgaaatgctacaactgtgcggccgcttcgtgcaaaagctcggggacgctctgccggaggagattcgggagcccgctctgcgagatgcgcagtgggtacgggaccagttagccagttctttactcatcatcctcttacccaacacccaggatcttaggattcagaaagatcccacgccaggccttggcagaattaacggtgccccaggctactgtagaaccagttcgagaaacgctagaggagaaagaaatagatgctaatgtcagctgggtcttattaattacttagaccagcgctgtccagtgaaaatacaagacttttgaatcagctgtgcaagagaatatcagcattaatgggcaagcatggcaggaagcttcagataattgttttatggattctgacatcaaagtacttgaagatcagtttgatgaaatcatagtagatatagccacaaaacgtaagcagtatcccagaaagatcctggaatgtgtcatcaaaaccataaaagcaaaacaagaaattctgcccctcatatggaaaatttgaaatgcagaggggaaacagtagcaaaggagatcagtgaagccatgaagtccttgcctgcattaattgaacaaggagagggattttcccaagttctcaggatgcagcctgttatccacctccagaggattcaccaagaagtcttttccagttgtcataggaaaccagatgctaaacctgagaactttataacacagatagaaaccacaccaacagagactgcttccaggaaaacctctgacatggtactgaaaagaaagcaaactaaagactgcccccagagaaaatggtatccattgcggccaaagaaaattaatcttgatacatgagctctttctgtttattttgggagttgaaaataggcaccatcaacatttagattacagcctaattaatacctagataagacttcatttgaaataagaaataactcttttactagtgattcatttatacagatatagtatctctgtgcggggatatgatataatattgtatttccttactgttttatctattgtaaataaaaagcattttaaaaagtattgacacaaagcccatcagtgggcattaaaaatattaaaagtgcagacttttactgtccttaagtgccatcaactctcagctcccttgtagcttttgtgggatttaacaagtaacaaattctgttgtgtttccctggtatacatctttctaggaaaaaaaaaaaaaagagagagagctgtataatgatttttcgtttacatgctgaaaagtaattatcagttctgcacagcagcagatgcagggtttttttttaaagatgtagtttgatttatcaaattaatgtgctgatgataatactggctttgactttgttactccatgttcagctaatttaggtttgtgagattaactttaggattttttgttgtgtaagacaatgataactattatttgtgcaacattactctttgaaataaaaattggcatgtagccaatgtttcctgcccac

SEQ ID NO: 7034 - protein, 128 aa, Homo sapiens; identical to SEQ ID NO: 7018

SEQ ID NO: 7035 - DNA, 1179 bp, Homo sapiens
tccgacgaaaaatggcggggtctcctgagttggtggtccttgaccctccatgggacaaggagctcgcggctggcacagagagccaggccttggtctccgccactccccgagaagactttcgggtgcgctgcacctcgaagcgggctgtgaccgaaatgctacaactgtgcggccgcttcgtgcaaaagctcggggacgctctgccggaggagattcgggagcccgctctgcgagatgcgcagtggacttttgaatcagctgtgcaagagaatatcagcattaatgggcaagcatggcaggaagcttcagataattgttttatggattctgacatcaaagtacttgaagatcagtttgatgaaatcatagtagatatacacagatagaaaccacaccaacagagactgcttccaggaaaacctctgacatggtactgaaaagaaagcaaactaaagactgcccccagagaaaatggtatccattgcggccaaagaaaattaatcttgatacatgagctctttctgtttattttgggagttgaaaataggcaccatcaacatttagattacagcctaattaatacctagataagacttcatttgaaataagaaataactcttttactagtgattcatttatacagatatagtatctctgtgcggggatatgatataatattgtatttccttactgttttatctattgtaaataaaaagcattttaaaaagtattgacacaaagcccatcagtgggcattaaaaatattaaaagtgcagacttttactgtccttaagtgccatcaactctcagctcccttgtagcttttgtgggatttaacaagtaacaaattctgttgtgtttccctggtatacatctttctaggaaaaaaaaaaaaaagagagagagctgtataatgatttttcgtttacatgctgaaaagtaattatcagttctgcacagcagcagatgcagggtttttttttaaagatgtagtttgatttatcaaattaatgtgctgatgataatactggctttgactttgttactccatgttcagctaatttaggtttgtgagattaactttaggattttttgttgtgtaagacaatgataactattatttgtgcaacattactctttgaaataaaaattggcatgtagccaatgtttcctgcccac

SEQ ID NO: 7036 - protein, 124 aa, Homo sapiens; identical to SEQ ID NO: 7020

SEQ ID NO: 7037 - DNA, 1404 bp, Homo sapiens
acagttccgacgaaaaatggcggggtctcctgagttggtggtccttgaccctccatgggacaaggagctcgcggctggcacagagagccaggccttggtctccgccactccccgagaagactttcgggtgcgctgcacctcgaagcgggctgtgaccgaaatgctacaactgtgcggccgcttcgtgcaaaagctcggggacgctctgccggaggagattcgggagcccgctctgcgagatgcgcagtggacttttgaatcagctgtgcaagagaatatcagcattaatgggcaagcatggcaggaagcttcagataattgttttatggattctgacatcaaagtacttgaagatcagtttgatgaaatcatagtagatatagccacaaaacgtaagcagtatcccagaaagatcctggaatgtgtcatcaaaaccataaaagcaaaacaagaaattctgtccttgcctgcattaattgaacaaggagagggattttcccaagttctcaggatgcagcctgttatccacctccagaggattcaccaagaagtcttttccagttgtcataggaaaccagatgctaaacctgagaactttataacacagatagaaaccacaccaacagagactgcttccaggaaaacctctgacatggtactgaaaagaaagcaaactaaagactgcccccagagaaaatggtatccattgcggccaaagaaaattaatcttgatacatgagctctttctgtttattttgggagttgaaaataggcaccatcaacatttagattacagcctaattaatacctagataagacttcatttgaaataagaaataactcttttactagtgattcatttatacagatatagtatctctgtgcggggatatgatataatattgtatttccttactgttttatctattgtaaataaaaagcattttaaaaagtattgacacaaagcccatcagtgggcattaaaaatattaaaagtgcagacttttactgtccttaagtgccatcaactctcagctcccttgtagcttttgtgggatttaacaagtaacaaattctgttgtgtttccctggtatacatctttctaggaaaaaaaaaaaaaagagagagagctgtataatgatttttcgtttacatgctgaaaagtaattatcagttctgcacagcagcagatgcagggtttttttttaaagatgtagtttgatttatcaaattaatgtgctgatgataatactggctttgactttgttactccatgttcagctaatttaggtttgtgagattaactttaggattttttgttgtgtaagacaatgataactattatttgtgcaacattactctttgaaataaaaattggcatgtagccaatgtttcctgcccac

SEQ ID NO: 7038 - protein, 240 aa, Homo sapiens; identical to SEQ ID NO: 7022

SEQ ID NO: 7039 - DNA, 1476 bp, Homo sapiens
gcccacagttccgacgaaaaatggcggggtctcctgagttggtggtccttgaccctccatgggacaaggagctcgcggctggcacagagagccaggccttggtctccgccactccccgagaagactttcgggtgcgctgcacctcgaagcgggctgtgaccgaaatgctacaactgtgcggccgcttcgtgcaaaagctcggggacgctctgccggaggagattcgggagcccgctctgcgagatgcgcagtggacttttgaatcagctgtgcaagagaatatcagcattaatgggcaagcatggcaggaagcttcagataattgttttatggattctgacatcaaagtacttgaagatcagtttgatgaaatcatagtagatatagccacaaaacgtaagcagtatcccagaaagatcctggaatgtgtcatcaaaaccataaaagcaaaacaagaaattctgcccctcatatggaaaatttgaaatgcagaggggaaacagtagcaaaggagatcagtgaagccatgaagtccttgcctgcattaattgaacaaggagagggattttcccaagttctcaggatgcagcctgttatccacctccagaggattcaccaagaagtcttttccagttgtcataggaaaccagatgctaaacctgagaactttataacacagatagaaaccacaccaacagagactgcttccaggaaaacctctgacatggtactgaaaagaaagcaaactaaagactgcccccagagaaaatggtatccattgcggccaaagaaaattaatcttgatacatgagctctttctgtttattttgggagttgaaaataggcaccatcaacatttagattacagcctaattaatacctagataagacttcatttgaaataagaaataactcttttactagtgattcatttatacagatatagtatctctgtgcggggatatgatataatattgtatttccttactgttttatctattgtaaataaaaagcattttaaaaagtattgacacaaagcccatcagtgggcattaaaaatattaaaagtgcagacttttactgtccttaagtgccatcaactctcagctcccttgtagcttttgtgggatttaacaagtaacaaattctgttgtgtttccctggtatacatctttctaggaaaaaaaaaaaaaagagagagagctgtataatgatttttcgtttacatgctgaaaagtaattatcagttctgcacagcagcagatgcagggtttttttttaaagatgtagtttgatttatcaaattaatgtgctgatgataatactggctttgactttgttactccatgttcagctaatttaggtttgtgagattaactttaggattttttgttgtgtaagacaatgataactattatttgtgcaacattactctttgaaataaaaattggcatgtagccaatgtttcctgcccac

SEQ ID NO: 7040 - protein, 154 aa, Homo sapiens; identical to SEQ ID NO: 7024

SEQ ID NO: 7041 - DNA, 1626 bp, Homo sapiens
agagtgccccgcccacagttccgacgaaaaatggcggggtctcctgagttggtggtccttgaccctccatgggacaaggagctcgcggctggcacagagagccaggccttggtctccgccactccccgagaagactttcgggtgcgctgcacctcgaagcgggctgtgaccgaaatgctacaactgtgcggccgcttcgtgcaaaagctcggggacgctctgccggaggagattcgggagcccgctctgcgagatgcgcagtggacttttgaatcagctgtgcaagagaatatcagcattaatgggcaagcatggcaggaagcttcagataattgttttatggattctgacatcaaagtacttgaagatcagtttgatgaaatcatagtagatatagccacaaaacgtaagcagtatcccagaaagatcctggaatgtgtcatcaaaaccataaaagcaaaacaagaaattctgaagcagtaccaccctgttgtacatccactggacctaaaatatgaccctgatccagttctcaacgggaatgctttcaacttttccccattcaacatgatgttggctgtggatttgtcatatatggtttttattacttcgagcccctcatatggaaaatttgaaatgcagaggggaaacagtagcaaaggagatcagtgaagccatgaagtccttgcctgcattaattgaacaaggagagggattttcccaagttctcaggatgcagcctgttatccacctccagaggattcaccaagaagtcttttccagttgtcataggaaaccagatgctaaacctgagaactttataacacagatagaaaccacaccaacagagactgcttccaggaaaacctctgacatggtactgaaaagaaagcaaactaaagactgcccccagagaaaatggtatccattgcggccaaagaaaattaatcttgatacatgagctctttctgtttattttgggagttgaaaataggcaccatcaacatttagattacagcctaattaatacctagataagacttcatttgaaataagaaataactcttttactagtgattcatttatacagatatagtatctctgtgcggggatatgatataatattgtatttccttactgttttatctattgtaaataaaaagcattttaaaaagtattgacacaaagcccatcagtgggcattaaaaatattaaaagtgcagacttttactgtccttaagtgccatcaactctcagctcccttgtagcttttgtgggatttaacaagtaacaaattctgttgtgtttccctggtatacatctttctaggaaaaaaaaaaaaaagagagagagctgtataatgatttttcgtttacatgctgaaaagtaattatcagttctgcacagcagcagatgcagggtttttttttaaagatgtagtttgatttatcaaattaatgtgctgatgataatactggctttgactttgttactccatgttcagctaatttaggtttgtgagattaactttaggattttttgttgtgtaagacaatgataactattatttgtgcaacattactctttgaaataaaaattggcatgtagccaatgtttcctgcccac

SEQ ID NO: 7042 - protein, 213 aa, Homo sapiens; identical to SEQ ID NO: 7026

SEQ ID NO: 7043 - DNA, 1473 bp, Homo sapiens
agagtgccccgcccacagttccgacgaaaaatggcggggtctcctgagttggtggtccttgaccctccatgggacaaggagctcgcggctggcacagagagccaggccttggtctccgccactccccgagaagactttcgggtgcgctgcacctcgaagcgggctgtgaccgaaatgctacaactgtgcggccgcttcgtgcaaaagctcggggacgctctgccggaggagattcgggagcccgctctgcgagatgcgcagtggacttttgaatcagctgtgcaagagaatatcagcattaatgggcaagcatggcaggaagcttcagataattgttttatggattctgacatcaaagtacttgaagatcagtttgatgaaatcatagtagatatagccacaaaacgtaagcagtatcccagaaagatcctggaatgtgtcatcaaaaccataaaagcaaaacaagaaattctgaagcagtaccaccctgttgtacatccactggacctaaaatatgaccctgatccagtccttgcctgcattaattgaacaaggagagggattttcccaagttctcaggatgcagcctgttatccacctccagaggattcaccaagaagtcttttccagttgtcataggaaaccagatgctaaacctgagaactttataacacagatagaaaccacaccaacagagactgcttccaggaaaacctctgacatggtactgaaaagaaagcaaactaaagactgcccccagagaaaatggtatccattgcggccaaagaaaattaatcttgatacatgagctctttctgtttattttgggagttgaaaataggcaccatcaacatttagattacagcctaattaatacctagataagacttcatttgaaataagaaataactcttttactagtgattcatttatacagatatagtatctctgtgcggggatatgatataatattgtatttccttactgttttatctattgtaaataaaaagcattttaaaaagtattgacacaaagcccatcagtgggcattaaaaatattaaaagtgcagacttttactgtccttaagtgccatcaactctcagctcccttgtagcttttgtgggatttaacaagtaacaaattctgttgtgtttccctggtatacatctttctaggaaaaaaaaaaaaaagagagagagctgtataatgatttttcgtttacatgctgaaaagtaattatcagttctgcacagcagcagatgcagggtttttttttaaagatgtagtttgatttatcaaattaatgtgctgatgataatactggctttgactttgttactccatgttcagctaatttaggtttgtgagattaactttaggattttttgttgtgtaagacaatgataactattatttgtgcaacattactctttgaaataaaaattggcatgtagccaatgtttcctgcccac

SEQ ID NO: 7044 - protein, 172 aa, Homo sapiens; identical to SEQ ID NO: 7028

SEQ ID NO: 7045 - DNA, 1541 bp, Homo sapiens
agagtgccccgcccacagttccgacgaaaaatggcggggtctcctgagttggtggtccttgaccctccatgggacaaggagctcgcggctggcacagagagccaggccttggtctccgccactccccgagaagactttcgggtgcgctgcacctcgaagcgggctgtgaccgaaatgctacaactgtgcggccgcttcgtgcaaaagctcggggacgctctgccggaggagattcgggagcccgctctgcgagatgcgcagtggacttttgaatcagctgtgcaagagaatatcagcattaatgggcaagcatggcaggaagcttcagataattgttttatggattctgacatcaaagtacttgaagatcagtttgatgaaatcatagtagatatagccacaaaacgtaagcagtatcccagaaagatcctggaatgtgtcatcaaaaccataaaagcaaaacaagaaattctgaagcagtaccaccctgttgtacatccactggacctaaaatatgaccctgatccagcccctcatatggaaaatttgaaatgcagaggggaaacagtagcaaaggagatcagtgaagccatgaagtccttgcctgcattaattgaacaaggagagggattttcccaagttctcaggatgcagcctgttatccacctccagaggattcaccaagaagtcttttccagttgtcataggaaaccagatgctaaacctgagaactttataacacagatagaaaccacaccaacagagactgcttccaggaaaacctctgacatggtactgaaaagaaagcaaactaaagactgcccccagagaaaatggtatccattgcggccaaagaaaattaatcttgatacatgagctctttctgtttattttgggagttgaaaataggcaccatcaacatttagattacagcctaattaatacctagataagacttcatttgaaataagaaataactcttttactagtgattcatttatacagatatagtatctctgtgcggggatatgatataatattgtatttccttactgttttatctattgtaaataaaaagcattttaaaaagtattgacacaaagcccatcagtgggcattaaaaatattaaaagtgcagacttttactgtccttaagtgccatcaactctcagctcccttgtagcttttgtgggatttaacaagtaacaaattctgttgtgtttccctggtatacatctttctaggaaaaaaaaaaaaaagagagagagctgtataatgatttttcgtttacatgctgaaaagtaattatcagttctgcacagcagcagatgcagggtttttttttaaagatgtagtttgatttatcaaattaatgtgctgatgataatactggctttgactttgttactccatgttcagctaatttaggtttgtgagattaactttaggattttttgttgtgtaagacaatgataactattatttgtgcaacattactctttgaaataaaaattggcatgtagccaatgtttcctgcccac

SEQ ID NO: 7046 - protein, 281 aa, Homo sapiens; identical to SEQ ID NO: 7030

SEQ ID NO: 7047 - DNA, 769 bp, Homo sapiens
agagtgccccgcccacagttccgacgaaaaatggcggggtctcctgagttggtggtccttgaccctccatgggacaaggagctcgcggctggcacagagagccaggccttggtctccgccactccccgagaagactttcgggtgcgctgcacctcgaagcgggctgtgaccgaaatgctacaactgtgcggccgcttcgtgcaaaagctcggggacgctctgccggaggagattcgggagcccgctctgcgagatgcgcagtggacttttgaatcagctgtgcaagagaatatcagcattaatgggcaagcatggcaggaagcttcagataattgttttatggattctgacatcaaagtacttgaagatcagtttgatgaaatcatagtagatatagccacaaaacgtaagcagtatcccagaaagatcctggaatgtgtcatcaaaaccataaaagcaaaacaagaaattctgaagcagtaccaccctgttgtacatccactggacctaaaatatgaccctgatccagcccctcatatggaaaatttgaaatgcagaggggaaacagtagcaaaggagatcagtgaagccatgaaggtaaaagctatgtgctaaaaaaattatcaaatgaacaaaatgtatggctaggtatttgcattcaacattcatatgtgttttagtctgctctaacaggaattctcagcggtcctttaaataaatctttaatgaatttattaagcaacagtaacatttagaatagctgccattt

SEQ ID NO: 7048 - protein, 194 aa, Homo sapiens
MAGSPELVVLDPPWDKELAAGTESQALVSATPREDFRVRCTSKRAVTEMLQLCGRFVQKLGDALPEEIREPALRDAQWTFESAVQENISINGQAWQEASDNCFMDSDIKVLEDQFDEIIVDIATKRKQYPRKILECVIKTIKAKQEILKQYHPVVHPLDLKYDPDPAPHMENLKCRGETVAKEISEAMKVKAMC

SEQ ID NO: 7049 - DNA, 943 bp, Homo sapiens
acagttccgacgaaaaatggcggggtctcctgagttggtggtccttgaccctccatgggacaaggagctcgcggctggcacagagagccaggccttggtctccgccactccccgagaagactttcgggtgcgctgcacctcgaagcgggctgtgaccgaaatgctacaactgtgcggccgcttcgtgcaaaagctcggggacgctctgccggaggagattcgggagcccgctctgcgagatgcgcagtggacttttgaatcagctgtgcaagagaatatcagcattaatgggcaagcatggcaggaagcttcagataattgttttatggattctgacatcaaagtacttgaagatcagtttgatgaaatcatagtagatatagccacaaaacgtaagcagtatcccagaaagatcctggaatgtgtcatcaaaaccataaaagcaaaacaagaaattctgaagcagtaccaccctgttgtacatccactggacctaaaatatgaccctgatccaggtgagtcagtatccatttgtggtaaaaatgaagcatctgcttataatttttatgggtttctgatattcttctaaaagggtcagcatcaaggatattctccctttgatgctttaacttcctaccagtcattcatgtttagcatttcatctagaattaagaggactagctttacacccattgactcagaattccaggggtgttaccccggaatctgagcttttataaagttcttgcctgacccagactattataacacatacccatctctaacttctaataccctcctatctctgtcattgtactatctattctttgcattacagccaaagctatactattaaagcattctctcatagtgtcacacctggtgcagtaaccatcattggtttctcattatttctaaaatcaaataaaaatatattgaattt

SEQ ID NO: 7050 - protein, 190 aa, Homo sapiens [sequence omitted]

SEQ ID NO: 7051 - DNA, 1351 bp, Homo sapiens
agttccgacgaaaaatggcggggtctcctgagttggtggtccttgaccctccatgggacaaggagctcgcggctggcacagagagccaggccttggtctccgccactccccgagaagactttcgggtgcgctgcacctcgaagcgggctgtgaccgaaatgctacaactgtgcggccgcttcgtgcaaaagctcggggacgctctgccggaggagattcgggagcccgctctgcgagatgcgcagtggacttttgaatcagctgtgcaagagaatatcagcattaatgggcaagcatggcaggaagcttcagataattgttttatggattctgacatcaaagtacttgaagatcagtttgatgaaatcatagtagatatagccacaaaacgtaagcagtatcccagaaagatcctggaatgtgtcatcaaaaccataaaagcaaaacaagaaattctggtaagatgatttgcctttaaaatgttatagtatattttaccacaataaaaacattaaaatataaggctctacgtggagataagtgacattttgttgtctttttctttcctgcctcaattagtattgtttgtctcttgtaagactttactcttctaagttgtactatgacatagtatagtcatactatactgtgttttgaacacactggttcaaaaatgaaaaaaatgaaagttatagtgagtggttaaaattgaaattggtgatggaagactgacaatgactttatgattctgagacaaggatggaaaaagaagcttttcttttaacacttttctttctgtttgttgtttttttttggcatatatttgtatgtttgtatattttggaagaccatttagttaaattgatgatgaagattgttttagtacctgttcataacactgaaatttgctttatgaattgggtgtaatttgttttgctgcaaaaatcatgaacatctgggtgacaagaccaggaattcagctccttcagcacgagctttttagacaagcagagccgtagacttccttcttataattactatagatatcaatgaccaaccatatcacaccctcatcttttcagatttattaggactagaataaataaaaaataggaaatccacaagaaaattggacccaaatcttcccttggtggggaggggaggtttgctgggaatagcattgtccctccagtgaggtacatgttgtgtttagattgtgctatactattgcctttagtttttgaaattagtacataaatgttcacatataaatcttctagttgcctcagtttcaggattgtttcaggtcattatatgcccggcttaatattgtatctaaaacattttagtt

SEQ ID NO: 7052 - protein, 150 aa, Homo sapiens
MAGSPELVVLDPPWDKELAAGTESQALVSATPREDFRVRCTSKRAVTEMLQLCGRFVQKLGDALPEEIREPALRDAQWTFESAVQENISINGQAWQEASDNCFMDSDIKVLEDQFDEIIVDIATKRKQYPRKILECVIKTIKAKQEILVR

SEQ ID NO: 7053 - DNA, 579 bp, Homo sapiens
ggaaactcaggacgctgcagctgaaacgttccggctccggctctgctggccggtctaaagcggcagccgccggggcgcaatgcgagcggctggcgtaggcttggtggactgtcactgccacctctccgccccggactttgaccgcgatttggatgatgtgttggagaaagccaagaaggccaatgttgtggcccttgtggcagttgccgaacattcaggagaatttgaaaagattatgcaactttcagaaaggtataatgggtttgtcctgccatgcttgggtgttcatccagttcaaggacttccaccagaagaccaaagaagtgtcacactaaaggatttggatgtagctttgcccattattgagaattataaggatcggttgttggcaattggagaggttggactagatttctcccccagatttgctggcactggtgaacagaaggaagagcaaagacaagtcctaatcagacagatccagttagccaaaagactaaatttgcctgtgtaggttaattattttcctatgttaatagctatagagcaaattaaataatgatcagagttctcctgaaa

SEQ ID NO: 7054 - protein, 144 aa, Homo sapiens; identical to SEQ ID NO: 394

SEQ ID NO: 7055 - DNA, 2370 bp, Homo sapiens
ggaaactcaggacgctgcagctgaaacgttccggctccggctctgctggccggtctaaagcggcagccgccggggcgcaatgcgagcggctggcgtaggcttggtggactgtcactgccacctctccgccccggactttgaccgcgatttggatgatgtgttggagaaagccaagaaggccaatgttgtggcccttgtggcagttgccgaacattcaggagaatttgaaaagattatgcaactttcagaaaggtataatgggtttgtcctgccatgcttgggtgttcatccagttcaaggacttccaccagaagaccaaagaagtgtcacactaaaggatttggatgtagctttgcccattattgagaattataaggatcggttgttggcaattggagaggttggactagatttctcccccagatttgctggcactggtgaacagaaggaagagcaaagacaagtcctaatcagacagatccagttagccaaaagactaaatttgcctgtaaatgtgcactcacgctctgctggaagacctaccatcaaccttttacaagagcaaggtgctgagaaggtactgctgcatgcatttgatggtcggccatctgtagccatggaaggagtaagagctgggtacttcttctcaattcccccttctatcataagaagtggacagcagaaacttgtgaaacaattgcctttaacttctatatgcttagaaacagattcacctgcactaggaccagaaaaacaggtacggaatgagccctggaacatttctatttcagcagaatatattgcccaggtgaaagggatctcagtggaagaagttatagaagtgacgacacagaatgcattaaaactgtttcctaagctccgacacttgctccagaaatagcttcaaaaccatccattacaaaatcgaatcaactgcagggggcagcatttgaaaaatagaaatgttctgatgaagaatctgaactgaagaagctgttttatagggttatagaagattgtaattgtagagaaatatttctcttagaaataaaactgggcttggatcctgaaaccctgggttctgattctagccttgtgctgcttttcaattagccgagttctggcaggatattgggaaaatactgctacttcttacattgcccttttatatagaaccaccacctgaactgaaaccattgctactgggaagggtggctcccacaggaagagtataagcactactgtgatgaggatggagtaagctaaagtatacttttttttttttttgatggagtttcgctgttgttgcccaggctggagtgcaatggcacgatcttggctcactgcaacctccacttcccaggttctagcgagtctcctccctcagcctcccaagtagctgggattacaggcatgtgccaccatgcccagctaattttgtatttttagtagagacagggtttctccatgttggtcaggctggtctcgaactcccgacctcaggtgatccgcccgcctcggcctcccaaagtgctgggattacaggcatgagccactgcgccagcctaaagtgtgttcttaccacctatttttcttcccataggagttagccagtgaagggagaatgtctggttttctatgctgtcagaaatctcttttctaggtttgtaaaattgaacttttagtacttcgaattatttctctttaagataaaaatgcatacgatttttacactgatcttagatttttgacttatgaggccagtggtttaaacaatcattattgaataccaagcccaaaagtttagttaatacaccaattgtaagttctggtctgaattttgtcaacatatttagaatgtaaatggcattattaaaaatgtatctgatttctctgtgaacagtaatatttcatatttttaagtttaaaaatgttagtgtaagccaggcacagtggcattcacctgtagtgccaaccactcaggaggctgagatgggagaccttttaagcctgagtttgagtcaggcctgggcaacatagatgtgagcacctatctctaaaaatgtaaataaataaaaatctcaaaaaaattaaaaatctcaagtgtaaaaacagttctgtagatagatggtagtgatggtagcacatcaatgtgaaggtatttaatgccactgaactgtacacttataacgaattaggataaattttatgttatgtgtatttactacaattttttaaaaatcgtatatgtagtttaacaggtgtggtcaatatcaaaacttaggtatttaatcttgttaaattatataagcagaaaatgctggaaaaagtacctgtcatagaaaaaaataaacttcctaaatcaaagtg

SEQ ID NO: 7056 - protein, 273 aa, Homo sapiens
MRAAGVGLVDCHCHLSAPDFDRDLDDVLEKAKKANVVALVAVAEHSGEFEKIMQLSERYNGFVLPCLGVHPVQGLPPEDQRSVTLKDLDVALPIIENYKDRLLAIGEVGLDFSPRFAGTGEQKEEQRQVLIRQIQLAKRLNLPVNVHSRSAGRPTINLLQEQGAEKVLLHAFDGRPSVAMEGVRAGYFFSIPPSIIRSGQQKLVKQLPLTSICLETDSPALGPEKQVRNEPWNISISAEYIAQVKGISVEEVIEVTTQNALKLFPKLRHLLQK

SEQ ID NO: 7057 - DNA, 2257 bp, Homo sapiens
ggaaactcaggacgctgcagctgaaacgttccggctccggctctgctggccggtctaaagcggcagccgccggggcgcaatgcgagcggctggcgtaggcttggtggactgtcactgccacctctccgccccggactttgaccgcgatttggatgatgtgttggagaaagccaagaaggccaatgttgtggcccttgtggcagttgccgaacattcaggagaatttgaaaagattatgcaactttcagaaaggtataatgggtttgtcctgccatgcttgggtgttcatccagttcaaggacttccaccagaagaccaaagaagtgtcacactaaaggatttggatgtagctttgcccattattgagaattataaggatcggttgttggcaattggagaggttggactagatttctcccccagatttgctggcactggtgaacagaaggaagagcaaagacaagtcctaatcagacagatccagttagccaaaagactaaatttgcctgtaaatgtgcactcacgctctgctggaagacctaccatcaaccttttacaagagcaagcagaaacttgtgaaacaattgcctttaacttctatatgcttagaaacagattcacctgcactaggaccagaaaaacaggtacggaatgagccctggaacatttctatttcagcagaatatattgcccaggtgaaagggatctcagtggaagaagttatagaagtgacgacacagaatgcattaaaactgtttcctaagctccgacacttgctccagaaatagcttcaaaaccatccattacaaaatcgaatcaactgcagggggcagcatttgaaaaatagaaatgttctgatgaagaatctgaactgaagaagctgttttatagggttatagaagattgtaattgtagagaaatatttctcttagaaataaaactgggcttggatcctgaaaccctgggttctgattctagccttgtgctgcttttcaattagccgagttctggcaggatattgggaaaatactgctacttcttacattgcccttttatatagaaccaccacctgaactgaaaccattgctactgggaagggtggctcccacaggaagagtataagcactactgtgatgaggatggagtaagctaaagtatacttttttttttttttgatggagtttcgctgttgttgcccaggctggagtgcaatggcacgatcttggctcactgcaacctccacttcccaggttctagcgagtctcctccctcagcctcccaagtagctgggattacaggcatgtgccaccatgcccagctaattttgtatttttagtagagacagggtttctccatgttggtcaggctggtctcgaactcccgacctcaggtgatccgcccgcctcggcctcccaaagtgctgggattacaggcatgagccactgcgccagcctaaagtgtgttcttaccacctatttttcttcccataggagttagccagtgaagggagaatgtctggttttctatgctgtcagaaatctcttttctaggtttgtaaaattgaacttttagtacttcgaattatttctctttaagataaaaatgcatacgatttttacactgatcttagatttttgacttatgaggccagtggtttaaacaatcattattgaataccaagcccaaaagtttagttaatacaccaattgtaagttctggtctgaattttgtcaacatatttagaatgtaaatggcattattaaaaatgtatctgatttctctgtgaacagtaatatttcatatttttaagtttaaaaatgttagtgtaagccaggcacagtggcattcacctgtagtgccaaccactcaggaggctgagatgggagaccttttaagcctgagtttgagtcaggcctgggcaacatagatgtgagcacctatctctaaaaatgtaaataaataaaaatctcaaaaaaattaaaaatctcaagtgtaaaaacagttctgtagatagatggtagtgatggtagcacatcaatgtgaaggtatttaatgccactgaactgtacacttataacgaattaggataaattttatgttatgtgtatttactacaattttttaaaaatcgtatatgtagtttaacaggtgtggtcaatatcaaaacttaggtatttaatcttgttaaattatataagcagaaaatgctggaaaaagtacctgtcatagaaaaaaataaacttcctaaatcaaagtg

SEQ ID NO: 7058 - protein, 191 aa, Homo sapiens; identical to SEQ ID NO: 396

SEQ ID NO: 7059 - DNA, 2923 bp, Homo sapiens
ggaaactcaggacgctgcagctgaaacgttccggctccggctctgctggccggtctaaagcggcagccgccggggcgcaatgcgagcggctggcgtaggcttggtggactgtcactgccacctctccgccccggactttgaccgcgatttggatgatgtgttggagaaagccaagaaggccaatgttgtggcccttgtggcagttgccgaacattcaggagaatttgaaaagattatgcaactttcagaaaggtataatgggtttgtcctgccatgcttgggtgttcatccagttcaaggacttccaccagaagaccaaagaagtgtcacactaaaggatttggatgtagctttgcccattattgagaattataaggatcggttgttggcaattggagaggttggactagatttctcccccagatttgctggcactggtgaacagaaggaagagcaaagacaagtcctaatcagacagatccagttagccaaaagactaaatttgcctgtaaatgtgcactcacgctctgctggaagacctaccatcaaccttttacaagagcaaggtgctgagaaggtactgctgcatgcatttgatggtcggccatctgtagccatggaaggagtaagagctgggtacttcttctcaattcccccttctatcataagaagtggacagcagaaacttgtgaaacaattgcctttaacttctatatgcttagaaacagattcacctgcactaggaccagaaaaacaggtacggaatgagccctggaacatttctatttcagcagaatatattgcccaggtgaaagggatctcagtggaagaagttatagaagtgacgacacagaatgcattaaaactgtttcctaagctccgacacttgctccagaaatagcttcaaaaccatccattacaaaatcgaatcaactgcagggggcagcatttgaaaaatagaaatgttctgatgaagaatctgaactgaagaagctgttttatagggttatagaagattgtaattgtagagaaatatttctcttagaaataaaactgggcttggatcctgaaaccctgggttctgattctagccttgtgctgcttttcaattagccgagttctggcaggatattgggaaaatactgctacttcttacattgcccttttatatagaaccaccacctgaactgaaaccattgctactgggaagggtggctcccacaggaagagtataagcactactgtgatgaggatggagtaagctaaagtatacttttttttttttttgatggagtttcgctgttgttgcccaggctggagtgcaatggcacgatcttggctcactgcaacctccacttcccaggttctagcgagtctcctccctcagcctcccaagtagctgggattacaggcatgtgccaccatgcccagctaattttgtatttttagtagagacagggtttctccatgttggtcaggctggtctcgaactcccgacctcaggtgatccgcccgcctcggcctcccaaagtgctgggattacaggcatgagccactgcgccagcctaaagtgtgttcttaccacctatttttcttcccataggagttagccagtgaagggagaatgtctggttttctatgctgtcagaaatctcttttctaggtttgtaaaattgaacttttagtacttcgaattatttctctttaagataaaaatgcatacgatttttacactgatcttagatttttgacttatgaggccagtggtttaaacaatcattattgaataccaagcccaaaagtttagttaatacaccaattgtaagttctggtctgaattttgtcaacatatttagaatgtaaatggcattattaaaaatgtatctgatttctctgtgaacagtaatatttcatatttttaagtttaaaaatgttagtgtaagccaggcacagtggcattcacctgtagtgccaaccactcaggaggctgagatgggagaccttttaagcctgagtttgagtcaggcctgggcaacatagatgtgagcacctatctctaaaaatgtaaataaataaaaatctcaaaaaaattaaaaatctcaagtgtaaaaacagttctgtagatagatggtagtgatggtagcacatcaatgtgaaggtatttaatgccactgaactgtacacttataacgaattaggataaattttatgttatgtgtatttactacaattttttaaaaatcgtatatgtagtttaacaggtgtggtcaatatcaaaacttaggtatttaatcttgttaaattatataagcagaaaatgctggaaaaagtacctgtcatagaaaaaaataaacttcctaaatcaaagtgattttatgaaatgatcttcaataaatattttgaaatgaattcatttatggaagaatcaaaactaggtcagattgtccaaaccagactaagaaactgaatagggtattttatgaggtatttaatgactcatcagcaccattttaaatgaaattcctacatttaacaggagattatattaaaactggacttttaagctctcttccaactctgtatttcttttccctatttcctaccttctgtacacataccctttgtcagactcttaccattaaatcgtttaaggttcaagttaaattacttcatcttgcctcatcacccagccagacatgatctttgccctctaaattgtttagccattttcttcatgtattcatccatttgtttgtttcagttattaagcccctcctcctataggctgcccactagtctaggttcctaggttacaaagatgaataagatatgatctttgccctcagttcacaatttaatcaaggagatagccaagtggacaaataatttcatagcaatgtgagaagtgctattgttagaggaa

SEQ ID NO: 7060 - protein, 273 aa, Homo sapiens; identical to SEQ ID NO: 7056

SEQ ID NO: 7061 - DNA, 2810 bp, Homo sapiens
ggaaactcaggacgctgcagctgaaacgttccggctccggctctgctggccggtctaaagcggcagccgccggggcgcaatgcgagcggctggcgtaggcttggtggactgtcactgccacctctccgccccggactttgaccgcgatttggatgatgtgttggagaaagccaagaaggccaatgttgtggcccttgtggcagttgccgaacattcaggagaatttgaaaagattatgcaactttcagaaaggtataatgggtttgtcctgccatgcttgggtgttcatccagttcaaggacttccaccagaagaccaaagaagtgtcacactaaaggatttggatgtagctttgcccattattgagaattataaggatcggttgttggcaattggagaggttggactagatttctcccccagatttgctggcactggtgaacagaaggaagagcaaagacaagtcctaatcagacagatccagttagccaaaagactaaatttgcctgtaaatgtgcactcacgctctgctggaagacctaccatcaaccttttacaagagcaagcagaaacttgtgaaacaattgcctttaacttctatatgcttagaaacagattcacctgcactaggaccagaaaaacaggtacggaatgagccctggaacatttctatttcagcagaatatattgcccaggtgaaagggatctcagtggaagaagttatagaagtgacgacacagaatgcattaaaactgtttcctaagctccgacacttgctccagaaatagcttcaaaaccatccattacaaaatcgaatcaactgcagggggcagcatttgaaaaatagaaatgttctgatgaagaatctgaactgaagaagctgttttatagggttatagaagattgtaattgtagagaaatatttctcttagaaataaaactgggcttggatcctgaaaccctgggttctgattctagccttgtgctgcttttcaattagccgagttctggcaggatattgggaaaatactgctacttcttacattgcccttttatatagaaccaccacctgaactgaaaccattgctactgggaagggtggctcccacaggaagagtataagcactactgtgatgaggatggagtaagctaaagtatacttttttttttttttgatggagtttcgctgttgttgcccaggctggagtgcaatggcacgatcttggctcactgcaacctccacttcccaggttctagcgagtctcctccctcagcctcccaagtagctgggattacaggcatgtgccaccatgcccagctaattttgtatttttagtagagacagggtttctccatgttggtcaggctggtctcgaactcccgacctcaggtgatccgcccgcctcggcctcccaaagtgctgggattacaggcatgagccactgcgccagcctaaagtgtgttcttaccacctatttttcttcccataggagttagccagtgaagggagaatgtctggttttctatgctgtcagaaatctcttttctaggtttgtaaaattgaacttttagtacttcgaattatttctctttaagataaaaatgcatacgatttttacactgatcttagatttttgacttatgaggccagtggtttaaacaatcattattgaataccaagcccaaaagtttagttaatacaccaattgtaagttctggtctgaattttgtcaacatatttagaatgtaaatggcattattaaaaatgtatctgatttctctgtgaacagtaatatttcatatttttaagtttaaaaatgttagtgtaagccaggcacagtggcattcacctgtagtgccaaccactcaggaggctgagatgggagaccttttaagcctgagtttgagtcaggcctgggcaacatagatgtgagcacctatctctaaaaatgtaaataaataaaaatctcaaaaaaattaaaaatctcaagtgtaaaaacagttctgtagatagatggtagtgatggtagcacatcaatgtgaaggtatttaatgccactgaactgtacacttataacgaattaggataaattttatgttatgtgtatttactacaattttttaaaaatcgtatatgtagtttaacaggtgtggtcaatatcaaaacttaggtatttaatcttgttaaattatataagcagaaaatgctggaaaaagtacctgtcatagaaaaaaataaacttcctaaatcaaagtgattttatgaaatgatcttcaataaatattttgaaatgaattcatttatggaagaatcaaaactaggtcagattgtccaaaccagactaagaaactgaatagggtattttatgaggtatttaatgactcatcagcaccattttaaatgaaattcctacatttaacaggagattatattaaaactggacttttaagctctcttccaactctgtatttcttttccctatttcctaccttctgtacacataccctttgtcagactcttaccattaaatcgtttaaggttcaagttaaattacttcatcttgcctcatcacccagccagacatgatctttgccctctaaattgtttagccattttcttcatgtattcatccatttgtttgtttcagttattaagcccctcctcctataggctgcccactagtctaggttcctaggttacaaagatgaataagatatgatctttgccctcagttcacaatttaatcaaggagatagccaagtggacaaataatttcatagcaatgtgagaagtgctattgttagaggaa

SEQ ID NO: 7062 - protein, 191 aa, Homo sapiens; identical to SEQ ID NO: 396

SEQ ID NO: 7063 - DNA, 502 bp, Homo sapiens
tcccagtgggctaatccacaccagtggacttgaaacacgctttgggttgctgtatggtagtatgctaaaggacagcaagaatcacttgacaattggtttgtgaccataatggcatctataaacagaaccattgaaataatgaaaaaacatggagtaagcaaacaacatctcctggaggagataaacaaaaagcgtgaatccaactgcttggtggaacgaagcaatcaagtcagcttactgagagttcaaaagaggcacttcccggatgcctatcagtcctttactgataccacaaccaaagagcctgttcccaacagtggcaggagctcctggatcaagctgagtctccttgctcacatggagagaaagcactttccaccaaaaaataatgccatatttggataaagtgcatctccagagacacacggaaatacattctctttgattcttcttcagtgtgtctaaattatttacaaattattaattataaacaaagctaaac

SEQ ID NO: 7064 - protein, 98 aa, Homo sapiens; identical to SEQ ID NO: 400

SEQ ID NO: 7065 - DNA, 415 bp, Homo sapiens
cacgctttgggttgctgtatggtagtatgctaaaggacagcaagaatcacttgacaattggtttgtgaccataatggcatctataaacagaaccattgaaataatgaaaaaacatggagtaagcaaacaacatctcctggaggagataaacaaaaagcgtgaatccaactgcttggtggaacgaagcaatcaagtcagcttactgagagttcaaaagaggcacttcccggatgcctatcagtcctttactgataccacaaccaaagagcctgttcccaacagtggcaggagctcctggatcaagctgagtctccttgctcacatggagagaaagcactttccaccaaaaaataatgccatatttggataaagtgcatctccagagacacacggaaatacattctctttgattctt

SEQ ID NO: 7066 - protein, 98 aa, Homo sapiens; identical to SEQ ID NO: 400

SEQ ID NO: 7067 - DNA, 2520 bp, Homo sapiens
cctgcccggaaggatgcatggcccggggtctcctgcacctgagggtgggcgggaggcggccccgcgggttgtgttgctggaaaaaggggtctcgatccagaccccaagagagggttcttgggtctacttcagggaagaattggaggcgagtcacagagcgcagtgaaggaagcaagtttattggaatctactccgttagagagtgcaagtcctcagactgcaggaggaggaactcccgtccttcggtagtgtcactacttagaggcagctgtgaggagctgtgattaatcgtggaatgtgctgatgtgcccactaaagagctttgcccttggagtccaggctggagtgcaatgatgaaatctcagctgactgcaacttctgcctcccgggttcaagtgattctcctgcctcagcctcccaagtaactgagattacaggtgcccacacccgggtaatttttgtatttttagtagagacagggtttctccatgtcggtcaggctggtctcgaactcctgacctcaggtgatccacctacctcagcctcccaaagtgctggggttacaggcatgagccaccgtgcccggccaccattctaatttcttaatcttgtcttctttctctggcttcagtggtagatatttattaaccagtttaaacatgagtcattatttatatcaaatgtttggatgtataacgtaaaatgaaccttaatctctgtcaaaaaagatactactgggagcatcgtttggctgggagtcaagatgagattgagctactttatgggtgtggaatgccaagtcagagagatttgaataagtaacacttcagcaatatgagatctggacagcatccaggagccaaggtccaagatgctaataggagtgatgtagctgtccctgaacaaaggtttgccacagtttacgagcctcagaggttaagatgcaaaccagaacaatgctattggatgtgcaatccatgatgtttcatggggaggtgggtagatttgggcaaccttgccttcagtttactcctactagcatcaggctctgtccacctgatcagcagaggctatatggttctattttgtgaaaagatcaagttggaaatggaggagtagaggagaaggttggaaatcagaatcctcccacatgtattcttccctccattgagacattttatttgtatatatttattcctgaaaaaaaaaaaaaaaaaagagtcccaggattttttctcctgtgtttttgtcttgtttcttctcggtccatgatgccagttgaggtcatcagtacagcgaaaccaaactggtgagatgggaacaaattattctgtcacttttctagatctttttatttatttttttatttattttttgagatggagtctcgctcttgttgcccagtctggagtgcaatggcgagcctgggttcaagaccagcctgggtaacatggcgaaaccccttctctaccaaaaaaatacagtatttagctgggcctggtgcatgcctgtagtcccagctacctgagaggctgaggtgggaagatcgcttgagcccaggaggtcaaggctgcaatgggctgagatcacgccactccagcctaggcaacagagtgaggccttgtcaaaaaaaaaaaagagagagagagagatacaagccttcagagaccctcatattaacttcatggtaaatctgcctctgctcacccctcccacctgtagcaactaatatcttcatttccagatttactctgaaaaaactgtgcaactgcttcacatgtttcctcttgattcactaatttgtaactcacttactgaaactctgatgaaagaattgagtcaaaaaataaatagacctccttcccagccctggcttgttcagagcatctactacagaggagtcttaagggttttgtatgcttagagttgagagaccaaatagctcctgaaaactgtagctagaggaaatgccatatggagacaggccacaaggagaactcaagcccctgtaaaccaaaaatgaaatattctaagcccccaatttactaaacagattcaacctcccacttcagcctcccaaatagctgggattacaggcgcatgcaaccatgcccggcaaatttttgtgttttttgtagagatggggtttcgccatgttggccaggctggtcttgaactcctgacttcaagtgatctgtccacctcaccctcccaaagtgctgggattagtgagccactgcaacagccctctaacacttatttctgaagttttttttcttccctccttctcggaagccccttcctccctctcttgttgccttaaggtaccttcaccctggctaggccctattgttcttttatcggttttttgtttgtttctttagcctacatatgctcttccacctgggttatacaaatgcaaagtacaccctagttccatgctgggccttattattaacaagaactttctgaatctcttaagatgtagtgaaagcagatatacataaactatgttgaact

SEQ ID NO: 7068 - protein, 88 aa, Homo sapiens; identical to SEQ ID NO: 4338

SEQ ID NO: 7069 - DNA, 823 bp, Homo sapiens
cggaaggatgcatggcccggggtctcctgcacctgagggtgggcgggaggcggccccgcgggttgtgttgctggaaaaaggggtctcgatccagaccccaagagagggttcttgggtctacttcagggaagaattggaggcgagtcacagagcgcagtgaaggaagcaagtttattggaatctactccgttagagagtgcaagtcctcagactgcaggaggaggaactcccgtccttcggtagtgtcactacttagaggcagctgtgaggagctgtgattaatcgtggaatgtgctgatgtgcccactaaagaggaataacgccagaaagtgttccagtacaaccagagaaagagagtccatgagaaatctgcccttgtgaagttggaatcccctcaacctcaccccgctgacttgaatgaagcgactgagacgggctatgatggagcagatccggttgctcgaccttctcccttgcaccaacacatgtagttaatagttactggacatgcatattcagtgggttccaggtaccaaacttgtattgaatggtatgtgccagacaccgtcttgagatctggagaataaaaaaataaaaaaataaaaacgagacatccagagcacagtagccttgcggtcttcctggaactagagaaaattcagcccttctgctccttgggaagctatgtttgggaaaaaaaaaaaaagagagagagagagactccaaagagtttgttattaaatttaagttcaaactaggtgtatatagtacaaaagttcttaccatgcatttaatcttaaaatgtgctgatatctagaaccct

SEQ ID NO: 7070 - protein, 88 aa, Homo sapiens; identical to SEQ ID NO: 4338

SEQ ID NO: 7071 - DNA, 1088 bp, Homo sapiens
attttcctgcccggaaggatgcatggcccggggtctcctgcacctgagggtgggcgggaggcggccccgcgggttgtgttgctggaaaaaggggtctcgatccagaccccaagagagggttcttgggtctacttcagggaagaattggaggcgagtcacagagcgcagtgaaggaagcaagtttattggaatctactccgttagagagtgcaagtcctcagactgcaggaggaggaactcccgtccttcggtagtgtcactacttagaggcagctgtgaggagctgtgattaatcgtggaatgtgctgatgtgcccactaaagatgcctggtaagcagtggctcctctaacaagtgggcagcttggaactgggaacgagagagccaccgaaacagaatgagggagacaaagaagtgggcatcacccttaactccacaagggcttcccaagggcgctgtaccgtacgcaggcccaggacgaactttatttctcgccccagcatcgctgtccttgtcggtgagaccctggctttagggcagacaggaccacgtttcataagttcatgctgtcccagcagaggaataacgccagaaagtgttccagtacaaccagagaaagagagtccatgagaaatctgcccttgtgaagttggaatcccctcaacctcaccccgctgacttgaatgaagcgactgagacgggctatgatggagcagatccggttgctcgaccttctcccttgcaccaacacatgtagttaatagttactggacatgcatattcagtgggttccaggtaccaaacttgtattgaatggtatgtgccagacaccgtcttgagatctggagaataaaaaaataaaaaaataaaaacgagacatccagagcacagtagccttgcggtcttcctggaactagagaaaattcagcccttctgctccttgggaagctatgtttgggaaaaaaaaaaaaagagagagagagagactccaaagagtttgttattaaatttaagttcaaactaggtgtatatagtacaaaagttcttaccatgcatttaatcttaaaatgtgctgatatctagaaccct

SEQ ID NO: 7072 - protein, 88 aa, Homo sapiens; identical to SEQ ID NO: 4338

SEQ ID NO: 7073 - DNA, 1991 bp, Homo sapiens
gccgcgcggcgcgggggaggagaccttcatctgttcacgcggtagcgcggattgcggttcgcggcgcgcgccaccggggaaggagcggtgggccgaggggttggaggtggggccccaggaggacctcgggctgtgggccgggagagcggagtcggggagtggggcgggggagcgaggtggcgccggggagcctgggatatggcgcggccagacgatgaggagggggcggcggtggcgcccggacacccgctcgcgaaaggatacctcccgttgccgaggggcgcgcccgttgggaaggagagcgtggagctgcagaacgggcccaaagcgggcaccttcccggtgaatggggccccccgggacagcctcgctgccgcctcgggagttctgggcgggcctcagactccactggccccagaagaggagacccaggcccggctgctgcctgcgggcgcgggagctgagaccccgggggccgagagcagcccgctgccccttacggcgctctccccgcggcgcttcgtggtgctcctgatcttcagcctgtactcgctggtcaacgcctttcagtggatccagtacagcatcattagcaacgtcttcgagggcttctacggtgtcaccttgctgcacatcgactggctgtccatggtgtacatgctggcctacgtgcccctcatcttcccggccacctggctgctggacaccagaggcctgcggctcaccgccctgctgggctccggcctcaactgcctgggtgcctggatcaagtgcggcagtgtgcagcagcatctcttctgggtcaccatgttgggccagtgcttgtgctcggtggcccaggtgttcatcctgggcttgccctcccgcatcgcctcagtgtggtttgggcccaaagaggtgtccacagcttgtgccaccgccgtgctgggcaatcagcttggaactgcagttggctttttgctaccaccagttttagtacccaacacacagaatgacacaaatctcctggcttgtaatatcagcaccatgttttatggaacatcagctgttgccacacttttatttattttaacagcaattgccttcaaagaaaaacctcggtatccaccaagtcaggctcaagcagctcttcaagacagtccccctgaagagtactcctataagaaatcaataagaaacctgtttaaaaacattccttttgtccttctgttgatcacttatggtatcatgactggtgccttttattcagtctcaacgttattaaatcaaatgatattgacatattatgagggagaagaagtcaatgctggaaggattgggctaacgctagtagtagctggaatggtgggctctattctttgtggcttatggctggattatactaaaacatacaaacagactactctgatagtttatattttgtcttttattggaatggttatctttactttcacattggaccttagatatattatcatcgtgtttgttactggaggggtgcttggcttcttcatgactggttacctccctttgggttttgaatttgctgttgaaatcacttaccctgaatctgaaggtacttcatctggtcttcttaatgcttctgcacagatatttggaattttgttcacattggctcaaggaaagctcacatcagactatggtcctaaggcagggaacatttttctctgtgtctggatgtttataggcatcatattaacagcattaatcaagtctgatctgcgaagacacaacataaatataggaattacaaatgttgatgttaaagctataccagctgacagtcccacagaccaagaaccaaaaacggttatgttgtccaagcagtcagaatcagcaatttgaagagaaaggcaaagttactgtcctgtagtaattggggacaatgtgatcatccttggagagagatgtgagcaccaaggctgggtttgtatgtggtgggggaataaacacacttacttgaaaattac

SEQ ID NO: 7074 - protein, 555 aa, Homo sapiens; identical to SEQ ID NO: 402

SEQ ID NO: 7075 - DNA, 3882 bp, Homo sapiens
tcacgcggtagcgcggattgcggttcgcggcgcgcgccaccggggaaggagcggtgggccgaggggttggaggtggggccccaggaggacctcgggctgtgggccgggagagcggagtcggggagtggggcgggggagcgaggtggcgccggggagcctgggatatggcgcggccagacgatgaggagggggcggcggtggcgcccggacacccgctcgcgaaaggatacctcccgttgccgaggggcgcgcccgttgggaaggagagcgtggagctgcagaacgggcccaaagcgggcaccttcccggtgaatggggccccccgggacagcctcgctgccgcctcgggagttctgggcgggcctcagactccactggccccagaagaggagacccaggcccggctgctgcctgcgggcgcgggagctgagaccccgggggccgagagcagcccgctgccccttacggcgctctccccgcggcgcttcgtggtgctcctgatcttcagcctgtactcgctggtcaacgcctttcagtggatccagtacagcatcattagcaacgtcttcgagggcttctacggtgtcaccttgctgcacatcgactggctgtccatggtgtacatgctggcctacgtgcccctcatcttcccggccacctggctgctggacaccagaggcctgcggctcaccgccctgctgggctccggcctcaactgcctgggtgcctggatcaagtgcggcagtgtgcagcagcatctcttctgggtcaccatgttgggccagtgcttgtgctcggtggcccaggtgttcatcctgggcttgccctcccgcatcgcctcagtgtggtttgggcccaaagaggtgtccacagcttgtgccaccgccgtgctgggcaatcagcttggaactgcagttggctttttgctaccaccagttttagtacccaacacacagaatgacacaaatctcctggcttgtaatatcagcaccatgttttatggaacatcagctgttgccacacttttatttattttaacagcaattgccttcaaagaaaaacctcggtatccaccaagtcaggctcaagcagctcttcaagacagtccccctgaagagtactcctataagaaatcaataagaaacctgtttaaaaacattccttttgtccttctgttgatcacttatggtatcatgactggtgccttttattcagtctcaacgttattaaatcaaatgatattgacatattatgagggagaagaagtcaatgctggaaggattgggctaacgctagtagtagctggaatggtgggctctattctttgtggcttatggctggattatactaaaacatacaaacagactactctgatagtttatattttgtcttttattggaatggttatctttactttcacattggaccttagatatattatcatcgtgtttgttactggaggggtgcttggcttcttcatgactggttacctccctttgggttttgaatttgctgttgaaatcacttaccctgaatctgaaggtacttcatctggtcttcttaatgcttctgcacagatatttggaattttgttcacattggctcaaggaaagctcacatcagactatggtcctaaggcagggaacatttttctctgtgtctggatgtttataggcatcatattaacagcattaatcaagtctgatctgcgaagacacaacataaatataggaattacaaatgttgatgttaaagctataccagctgacagtcccacagaccaagaaccaaaaacggttatgttgtccaagcagtcagaatcagcaatttgaagagaaaggcaaagttactgtcctgtagtaattggggacaatgtgatcatccttggagagagatgtgagcaccaaggctgggtttgtatgtggtgggggaataaacacacttacttgaaaattaccatatgaactctaaatgcataattattattttgcttaattgttaaattaagggaaattttcttaaaattcttctgtttacatcatgttaacactactgtttatctaattagtatccggtttttagtctcatattgtatctgaaagtaagcttcttgacgtttactttttaaaagtcgatgtttttcttttttgtagaaaatggaagcttagaatactttttaaagtgataatatggggtgttcagtccccataagatataatagttcatgcagtttatatattaaagtatccagtggaactaaatgtacaatatattcctaattggctgcctttttcactgtgctgaccagctgttcaagccacttcagtttgagtacaacataccaacatgacactactcacccacaaaggacagcattgggatcaggctttcagatgacctctaagatttttcccatttattgtactcttgttacaaagtactttttaacacatgcagtcaatggctataaaaactattctgtgtacagattctacccagactttggtcttagaattatgttctaattaaggagcctggttacaggttcattctgtcttgagttcttttctgtgctgcctttctatcatggataaatgctaacgctgtattttttcactccaacttgagatagagtagttttgtacccattgccttttttttcttttaaactctctttttttttttttcctgatgtgtaactttctagtaagataatttcatcatgtatgttactggctatttcatgatttcatgtatcacatcgtatattttgccttgaagattcctgaaataaggaaatctataataacttcagatagcctacatgtccccatttagtggagacctcttgaatgctatttgaattctgcagtatcatttttatgaccattctcctttgaggaatactatgcccaggtacatgctctatcagtgtgccgggagagtggattcttttcttcactgcagagtcatcacactgttagaatagtctgctcttttacatgctcaggtagggaaaataggaccaaatatatttccacagtgcctaccactgtgtcatgtttacagtgagagtttaaatattgttgatgtcctgactctgtgagctcatagggagtatcttcatagtaatgacatttgatcagccataaaatttacattatgttcatatgcacccaaaaaagctagtcaggtaatgaatacccttgaagtgaatagcaattttgatttaggcagtgtgttaggccatccttgcattgctataaagaaatatttaggctgggcgtggtggctcacgcctgtaatcccagcactttgggaggctgaagcgtgtggatcacctgaggtcaggagttcaagaccagcctggccaacatggtaaaaccccatctctactaaaaaaaaaaaaaaaaaaaaaaaaaaaaaaaaaggccaggcgcagtgctgtggctcatgcctgtaatctcagcactttgggaggccaaggcaggtggatcacaaagtcaggagttcaaaaccagcctggccaagatggtgaaaccccatctctactaaaaatacaaaaattagcgcagtggcaggcgcctgtaatcccagctactcaggaggctgaggcaggagaatcgcttgaatgcgaatggcagaggttgcagtgagcgaaaatcacactactgcactccagcctgggagataaagtgagactgtctcaaataaataaataaataaataaataaataaataaataaataaataaaacctgaggttgagcacgatggctcacacctatagtcccagcactttgggaggctgaggtgggtggatcatttgaggccaggagttgaagaccagtctggccaacatggcaaaaccccatctctacta

SEQ ID NO: 7076 - protein, 555 aa, Homo sapiens; identical to SEQ ID NO: 402

SEQ ID NO: 7077 - DNA, 590 bp, Homo sapiens
gctgccaccactcgtcactgagtcctctcgtctgagcctgtctcttgaagcagtcagtcaaaatcaactgcaagcagccatcatcagtttggaagaagctttgggaagccttcaaagaaaaacctcggtatccaccaagtcaggctcaagcagctcttcaagacagtccccctgaagagtactcctataagaaatcaataagaaacctgtttaaaaacattccttttgtccttctgttgatcacttatggtatcatgactggtgccttttattcagtctcaacgttattaaatcaaatgatattgacatattatgagggagaagaagtcaatgctggaaggattgggctaacgctagtagtagctggaatggtgggctctattctttgtggcttatggctggattatactaaaacatacaagtaagtgaaagtaaatacatgtatggtgtataaccaaaggtattttgattttaaaggacaatttgctttttatttcaagaaatttaaaacatgttattacttaaagatacggattctaaacactagtaggttctcttcacttaacaagtgtttcttttttttttttttt

SEQ ID NO: 7078 - protein, 56 aa, Homo sapiens
MTGAFYSVSTLLNQMILTYYEGEEVNAGRIGLTLVVAGMVGSILCGLWLDYTKTYK

SEQ ID NO: 7079 - DNA, 3303 bp, Homo sapiens
acagaataacattcgagaatgggacatggaatgaggcgacggccccagcaagccccagcagccccagccccagccccaggcccagcagcagcagcagcagcccctgctctcccgccgcccggagaggctctgcagccatgaagccaaccgtcccgaggcaccgccggtaagcagggagcctccgcggagctcccgccgccgctcccccttggtgagtcctgccgcagcgagaggcatggagaaggccgcccccgcggggcgctgatcccctcgccgcgcccgcgcgcacacgccccccgccgccgccgccgctgccgccgccgcgcgcccccagtacctcgctccccgcccaggccccaccatgaccggctccgcggccgacactcaccgctgcccccaccccaaaggcgccaaaggcacccggtcccggagcagccacgcgcggcccgtgagcctcgccaccagcgggggctcagaggaggaggacaaagacggcggggtgctgttccacgtcaacaagagcggcttccccatcgacagccacacctgggagcgcatgtggatgcacgtggccaaggtgcaccctaaggggggagaaatggtgggcgccatcaggaacgccgccttcttggcaaagccttcaataccccaggtcccaaactacaggctgtcgatgacgatcccagactggctccaggcgatccagaattacatgaagaccctacaatataatcacacagggacccagttctttgaaattaggaaaatgagaccgctgagtgggttaatggaaacagcaaaagaaatgacccgagagtccttgcctatcaaatgccttgaagctgtcatcctgggcataacccacagctaaaacaagggtctagcttctcccacactttctgttccatttttcaccagactcccggctcttcagcctgagaggaatatggtgcagagaaactgtgatggcatcgacatattggtggtgatgaccacctcccttacacaatagtctcatccctgcacaattttatacattcgagcatcatgccattggaatcacccacaaccctttgaaattgtggggatagacccaggaacagcctttgagcctgatctgccacaatcagatagaagagcaaagatgctccgaagtcctatgggatggatggctgtaagggacagtggaaaaggaaacactgcaagacaggagcttgagagatggtcccaggcaagatcagttaggtccttgagcgctgtgctgagaaatgacttttttccaaaaggcaatgggcaacccagatgaaagctctgaagcagaggtgtggcatgcttaggtatatgctctagagaggtagttctccaaagcacaggctgaaggacagattgggaaaggctgggctggatcagcaaagcccgttgggagctgttacatgagggaatggtgaggctagactcatggccctggggatgggaatggatttcagggaatggttttaagagctatcaaggagatagaatgtataggacttgcaggccaaccagacgcaggagttaatgaggaaggagtcaacgtctccaggtttctgaattgggcaatcgactgcgggattagctggaggaatgagagtggcagagaaaggatatgcgtcaatgcagacctgaactaagacagtgccagtgaaggtggagggaagggatggaggcatacatcatcaccaccactaggggactgcttagatgggaggagttattggagaaaggcagtgactccacatttctggcttgcatgataatgccacaagggaagaacttcaaggagaggatcggatttagggaaagatgagctcagatttggacatgtgaaatttgaggtgccttgtgggatgtcggaatgaggtatttgcaatgtggagctcacaggggaatctgcactggaaatgcgaatttaggagctgtgattaggaggttgtgcttactgttcaataagtgaaaggagaaaaagatcaaagatgaaatcagtattttttggtctagtttggcacaaagagcccatgaaagagacttaagaaggaaagagaggtagaaagaaaaccaggagagaaaggggatggagaggtcagtggaaggacatgtggctcagaattagactggggacaggaggattggtctagtctgttttctgggtctcctggacatctttgtgggaaggagaatctctgtgcctctctgcagtctgtggaacacttgcagccctgatctgaaaccagattgaccacaggtgccttggctgacatttgaaaaatggaaacttgaaccttactgaggcccctccccaaccctcttgtcatcctcctccctgtttcccacaaaggagatgaaacatgtgcctggggaacccagcaggaagctgggaatgggggtcggggcagcagatggctcagggccccaactctttagtggcaggagtcagccacagctgttcagcgaagcctcctgcaagtttaatgggggcagatgattggctggggatttgctggtggaagagatcaacgaaggggaacacaagcccaggcccttcatggggtagacaagctaacttcagactctttgttgaggggtgtctgagtgcctctggatttaggtcattgaaatgaccacctcccttacacaatagtctcatccctgcacaattttatacatttgcgcatcatgccactggaatcacccacgaccttttggaattgtggggatagacccaggaacagcctttgagcctgtccaaatcagagacagtgtgctcgtggttttcctttgttcttatccttctgacatttcagaaaagtgcaggaaggtggagagcttcagttcacgctgctgaactcagggaaatttgactcttgcacacagacaggaaacacagatccgaattcttcttcttttttttctttttttgagacggagtctcggtctatcgcaccactgcactccagcctgggtgacagagtgagactgtgtctcaaaaaaatgaaaaaaaaaagaccaccattcctccccagaaatgaaaccccatacccgttaaaaagtactccccatttcccccctccagcccctgcccaccaccgttctactctctgtctgtatgcacttgctactccaggtaccgcagatgagtggaatcataccatatttgtccttttgtattaggctgatttcactcagcatgtcttcaaggctcattctgcacattgcagaatttccctcccttatgaggctgaataaattctattacatgtatacact

SEQ ID NO: 7080 - protein, 169 aa, Homo sapiens
MTGSAADTHRCPHPKGAKGTRSRSSHARPVSLATSGGSEEEDKDGGVLFHVNKSGFPIDSHTWERMWMHVAKVHPKGGEMVGAIRNAAFLAKPSIPQVPNYRLSMTIPDWLQAIQNYMKTLQYNHTGTQFFEIRKMRPLSGLMETAKEMTRESLPIKCLEAVILGITHS

SEQ ID NO: 7081 - DNA, 4298 bp, Homo sapiens
acagaataacattcgagaatgggacatggaatgaggcgacggccccagcaagccccagcagccccagccccagccccaggcccagcagcagcagcagcagcccctgctctcccgccgcccggagaggctctgcagccatgaagccaaccgtcccgaggcaccgccggtaagcagggagcctccgcggagctcccgccgccgctcccccttggtgagtcctgccgcagcgagaggcatggagaaggccgcccccgcggggcgctgatcccctcgccgcgcccgcgcgcacacgccccccgccgccgccgccgctgccgccgccgcgcgcccccagtacctcgctccccgcccaggccccaccatgaccggctccgcggccgacactcaccgctgcccccaccccaaaggcgccaaaggcacccggtcccggagcagccacgcgcggcccgtgagcctcgccaccagcgggggctcagaggaggaggacaaagacggcggggtgctgttccacgtcaacaagagcggcttccccatcgacagccacacctgggagcgcatgtggatgcacgtggccaaggtgcaccctaaggggggagaaatggtgggcgccatcaggaacgccgccttcttggcaaagccttcaataccccaggtcccaaactacaggctgtcgatgacgatcccagactggctccaggcgatccagaattacatgaagaccctacactacttaaccaatgggcagccttccattgagcggttccccatcagctttaaaacctacttctcaggaaactactttcaccacgttgtgctggggatttactgcaatggccgctatggctcattgggcatgagccgcagggctgagctgatggacaagccattgacttttcggactctgagtgacctcatctttgactttgaggactcttacaagaaatacctgcacacagtcaagaaggtcaagattgggctgtacgtcccccatgagcctcatagcttccagcccattgagtggaagcagctggtcctcaacgtctcaaagatgctgagggctgacataaggaaggagctggagaaatatgccagggacatgagaatgaagatcctgaaacctgcaagtgcccactctccgacccaagtgagaagccggggaaaatccctgtcccccagaaggagacaggcaagccccccgaggaggctcggccggcgagagaagtcgcctgcactgcctgaaaagaaggtggctgatctgagcactctgaatgaagtgggctatcaaatccgaatttagccaagccataccggccagcaagagggtttctgtggtgcttctctctgcactttacccagcatcttcaggaggaactgcaactatttattaagaacttgtgaattttatttttaaggattcacctggaaatagaatctgagtgggtggtaaccattagctttaaaaaattcactaaaaggcaccatgaaaaggctgaagtaataagccccactggggttggactatgtccctcactcaagatcttaaggataaccgtaactgaagttttatatttttccatttacctactttcttttacttgctttgaacattatgcctcaccaatagtaaatgttcatgaaataatctcttgaacttttggtatagtaaggtaactctaacagtattactgtctttttcagcaataacagaaagcaaaaatgggtgggttttttttaagcagttattacctcagcattttgacatcagatatgcaaacttaatggcgttttgtttttttatattctatttgtattctttccccagtatttcccatggggatctccacaagtttggagttttttcctggtgcacacacgtgaggagatttaaggtactatatgcaagtgttttactaaaaagcactgaaattcttctggcaatacaagaaccattttcaggatcttggagttacttccttcttaatctttcttaaagcattcactgatgtttttgttttttcaaaatgaaacaaaaatatcacattgagaagctagtctatgttctgtcactaacatttaaactttgcagactctaacaaaaagcacaagaggtcacgtactattatacaaatttagcggtactggatttacctctgacattaacacactcaggcagagaccaggagtgatcagcaggtcttcagaaccaaaaaacctttctgttcacatttcatctgatttttaaactgaggcaggctttgattcttctgaaggatgccaagaatcaaactaagggaggactcactgttaaagatgtgttctgatgtcttatattaagaccaaatgtgacatgatgtgattatcttccagtactttgcttttaggtaccatttcatgacattttaggaatgagtattggaaaatataaagaattagaaaagcagcactttttttttaatggaaaagtcttcggtccagtgttacaccttatagtgtaattcagtccctaagcacagaatgaatgtctggcctgcatatggtagttacagtgtaacctctggctgcagaccacacaggacaaccctaacagcctagtcttgtatggtgtaaatatcaagagtacagcttcaatttcatttgctttatcttagcaacaatgccaactcaggagagcagacggccgatttcagtgaagtctggtagtcaacagatgttatttcagtctcagtgcatctcctctggctttctttgactgaaggtgtttataggaaggaagttaaaaaaaaaaaaagctcattgagattctttaccaattctttacaagatttctgggggtgacagggaaagcaaaaggacttcaaagcaaaagggtgcacaagagcttacttcaccctgaaaatcagtattattaatgaaaagtactgttttcttaaagaagtcgaatgtcctttagatgaacaagaccaagtatacatctccattagattaaaatgtagcacagggttaaaaattatcagtttaatctctttaagaacagtattatcagagtttaaaatgagttagctctgtttatctacacacagcaaacccattcgcagcctcttggccacatgtattcagatgtttgaaatagtgaatcatttcattttcattctaaaacaatactgacttagccatataccttctgtttgtcaatctgaaacttgcttacatctaataagtagacctcttataacactgcaaccattctaagagttggaatttatttttgccaagtattaagtactgttacatctaaaatacagaatgtcaaatggttgcatagcttgtttcccacaacaaggaggaaaagaacaggaatacaaactctgtaatatgctgataaagaagccttagaactgccaactggcttgatggttcaattagtaagctaatttctcccacacccgctccttgatttttagactaattttcccaaagcaaggtttagtcacacaaacttgaaagtacatttaaaatgttcttagttgtcatcctacttttattgcctatggaatatgctaatttctaaaaaaaatacgggagaggcaccaaacccctaaattctagtgcaataatttaaaaaacaaaaaacaaaacaaaacaaaaaacatgttatatgcacccccctcccaaagctgattttaagactggctagaattcaaaatataaaaaataaaactatgaagtgatttgaaatcggttttaaaaagttgttagtgcaagagaaattttatgtttaagccatcatggcaatatatgcaaagtttaaatgaatgacagaaatcttgattttagactgtatgttgtgctgttttgagtacactttatttcggagatatttagtattttctatacactctgaaatcatgagcatttcactttttctaagtcaattatttcataaggattttattaatagatattggtaaatagaactttggaaatcttaattcagaattcttactatacctgagtcttttgtaagctatagttttatgtacaaccttgtacagtttttttgacatacaattcagaactttgtttattctcttggactttgttctggccaatacattttttttaaatctttaagaagaactgtgattgttttagtgggtatttttctaattaaatgaaaacttgtataatggtattttagagaatgccagtaagtgcatgtttcaagttaatgtttttctcatcacttgtatgtttctaacacagcatgggactttaataaaaccatcctggaaacttaa

SEQ ID NO: 7082 - protein, 311 aa, Homo sapiens; identical to SEQ ID NO: 404

SEQ ID NO: 7083 - DNA, 4163 bp, Homo sapiens
attcgagaatgggacatggaatgaggcgacggccccagcaagccccagcagccccagccccagccccaggcccagcagcagcagcagcagcccctgctctcccgccgcccggagaggctctgcagccatgaagccaaccgtcccgaggcaccgccggtaagcagggagcctccgcggacccgtgagcctcgccaccagcgggggctcagaggaggaggacaaagacggcggggtgctgttccacgtcaacaagagcggcttccccatcgacagccacacctgggagcgcatgtggatgcacgtggccaaggtgcaccctaaggggggagaaatggtgggcgccatcaggaacgccgccttcttggcaaagccttcaataccccaggtcccaaactacaggctgtcgatgacgatcccagactggctccaggcgatccagaattacatgaagaccctacaatataatcacacagggacccagttctttgaaattaggaaaatgagaccgctgagtgggttaatggaaacagcaaaagaaatgacccgagagtccttgcctatcaaatgccttgaagctgtcatcctgggcatctacttaaccaatgggcagccttccattgagcggttccccatcagctttaaaacctacttctcaggaaactactttcaccacgttgtgctggggatttactgcaatggccgctatggctcattgggcatgagccgcagggctgagctgatggacaagccattgacttttcggactctgagtgacctcatctttgactttgaggactcttacaagaaatacctgcacacagtcaagaaggtcaagattgggctgtacgtcccccatgagcctcatagcttccagcccattgagtggaagcagctggtcctcaacgtctcaaagatgctgagggctgacataaggaaggagctggagaaatatgccagggacatgagaatgaagatcctgaaacctgcaagtgcccactctccgacccaagtgagaagccggggaaaatccctgtcccccagaaggagacaggcaagccccccgaggaggctcggccggcgagagaagtcgcctgcactgcctgaaaagaaggtggctgatctgagcactctgaatgaagtgggctatcaaatccgaatttagccaagccataccggccagcaagagggtttctgtggtgcttctctctgcactttacccagcatcttcaggaggaactgcaactatttattaagaacttgtgaattttatttttaaggattcacctggaaatagaatctgagtgggtggtaaccattagctttaaaaaattcactaaaaggcaccatgaaaaggctgaagtaataagccccactggggttggactatgtccctcactcaagatcttaaggataaccgtaactgaagttttatatttttccatttacctactttcttttacttgctttgaacattatgcctcaccaatagtaaatgttcatgaaataatctcttgaacttttggtatagtaaggtaactctaacagtattactgtctttttcagcaataacagaaagcaaaaatgggtgggttttttttaagcagttattacctcagcattttgacatcagatatgcaaacttaatggcgttttgtttttttatattctatttgtattctttccccagtatttcccatggggatctccacaagtttggagttttttcctggtgcacacacgtgaggagatttaaggtactatatgcaagtgttttactaaaaagcactgaaattcttctggcaatacaagaaccattttcaggatcttggagttacttccttcttaatctttcttaaagcattcactgatgtttttgttttttcaaaatgaaacaaaaatatcacattgagaagctagtctatgttctgtcactaacatttaaactttgcagactctaacaaaaagcacaagaggtcacgtactattatacaaatttagcggtactggatttacctctgacattaacacactcaggcagagaccaggagtgatcagcaggtcttcagaaccaaaaaacctttctgttcacatttcatctgatttttaaactgaggcaggctttgattcttctgaaggatgccaagaatcaaactaagggaggactcactgttaaagatgtgttctgatgtcttatattaagaccaaatgtgacatgatgtgattatcttccagtactttgcttttaggtaccatttcatgacattttaggaatgagtattggaaaatataaagaattagaaaagcagcactttttttttaatggaaaagtcttcggtccagtgttacaccttatagtgtaattcagtccctaagcacagaatgaatgtctggcctgcatatggtagttacagtgtaacctctggctgcagaccacacaggacaaccctaacagcctagtcttgtatggtgtaaatatcaagagtacagcttcaatttcatttgctttatcttagcaacaatgccaactcaggagagcagacggccgatttcagtgaagtctggtagtcaacagatgttatttcagtctcagtgcatctcctctggctttctttgactgaaggtgtttataggaaggaagttaaaaaaaaaaaaagctcattgagattctttaccaattctttacaagatttctgggggtgacagggaaagcaaaaggacttcaaagcaaaagggtgcacaagagcttacttcaccctgaaaatcagtattattaatgaaaagtactgttttcttaaagaagtcgaatgtcctttagatgaacaagaccaagtatacatctccattagattaaaatgtagcacagggttaaaaattatcagtttaatctctttaagaacagtattatcagagtttaaaatgagttagctctgtttatctacacacagcaaacccattcgcagcctcttggccacatgtattcagatgtttgaaatagtgaatcatttcattttcattctaaaacaatactgacttagccatataccttctgtttgtcaatctgaaacttgcttacatctaataagtagacctcttataacactgcaaccattctaagagttggaatttatttttgccaagtattaagtactgttacatctaaaatacagaatgtcaaatggttgcatagcttgtttcccacaacaaggaggaaaagaacaggaatacaaactctgtaatatgctgataaagaagccttagaactgccaactggcttgatggttcaattagtaagctaatttctcccacacccgctccttgatttttagactaattttcccaaagcaaggtttagtcacacaaacttgaaagtacatttaaaatgttcttagttgtcatcctacttttattgcctatggaatatgctaatttctaaaaaaaatacgggagaggcaccaaacccctaaattctagtgcaataatttaaaaaacaaaaaacaaaacaaaacaaaaaacatgttatatgcacccccctcccaaagctgattttaagactggctagaattcaaaatataaaaaataaaactatgaagtgatttgaaatcggttttaaaaagttgttagtgcaagagaaattttatgtttaagccatcatggcaatatatgcaaagtttaaatgaatgacagaaatcttgattttagactgtatgttgtgctgttttgagtacactttatttcggagatatttagtattttctatacactctgaaatcatgagcatttcactttttctaagtcaattatttcataaggattttattaatagatattggtaaatagaactttggaaatcttaattcagaattcttactatacctgagtcttttgtaagctatagttttatgtacaaccttgtacagtttttttgacatacaattcagaactttgtttattctcttggactttgttctggccaatacattttttttaaatctttaagaagaactgtgattgttttagtgggtatttttctaattaaatgaaaacttgtataatggtattttagagaatgccagtaagtgcatgtttcaagttaatgtttttctcatcacttgtatgtttctaacacagcatgggactttaataaaaccatcctggaaacttaa

SEQ ID NO: 7084 - protein, 290 aa, Homo sapiens
MWMHVAKVHPKGGEMVGAIRNAAFLAKPSIPQVPNYRLSMTIPDWLQAIQNYMKTLQYNHTGTQFFEIRKMRPLSGLMETAKEMTRESLPIKCLEAVILGIYLTNGQPSIERFPISFKTYFSGNYFHHVVLGIYCNGRYGSLGMSRRAELMDKPLTFRTLSDLIFDFEDSYKKYLHTVKKVKIGLYVPHEPHSFQPIEWKQLVLNVSKMLRADIRKELEKYARDMRMKILKPASAHSPTQVRSRGKSLSPRRRQASPPRRLGRREKSPALPEKKVADLSTLNEVGYQIRI

SEQ ID NO: 7085 - DNA, 4224 bp, Homo sapiens
attcgagaatgggacatggaatgaggcgacggccccagcaagccccagcagccccagccccagccccaggcccagcagcagcagcagcagcccctgctctcccgccgcccggagaggctctgcagccatgaagccaaccgtcccgaggcaccgccggtaagcagggagcctccgcggagctcccgccgccgctcccccttggcgccaaaggcacccggtcccggagcagccacgcgcggcccgtgagcctcgccaccagcgggggctcagaggaggaggacaaagacggcggggtgctgttccacgtcaacaagagcggcttccccatcgacagccacacctgggagcgcatgtggatgcacgtggccaaggtgcaccctaaggggggagaaatggtgggcgccatcaggaacgccgccttcttggcaaagccttcaataccccaggtcccaaactacaggctgtcgatgacgatcccagactggctccaggcgatccagaattacatgaagaccctacaatataatcacacagggacccagttctttgaaattaggaaaatgagaccgctgagtgggttaatggaaacagcaaaagaaatgacccgagagtccttgcctatcaaatgccttgaagctgtcatcctgggcatctacttaaccaatgggcagccttccattgagcggttccccatcagctttaaaacctacttctcaggaaactactttcaccacgttgtgctggggatttactgcaatggccgctatggctcattgggcatgagccgcagggctgagctgatggacaagccattgacttttcggactctgagtgacctcatctttgactttgaggactcttacaagaaatacctgcacacagtcaagaaggtcaagattgggctgtacgtcccccatgagcctcatagcttccagcccattgagtggaagcagctggtcctcaacgtctcaaagatgctgagggctgacataaggaaggagctggagaaatatgccagggacatgagaatgaagatcctgaaacctgcaagtgcccactctccgacccaagtgagaagccggggaaaatccctgtcccccagaaggagacaggcaagccccccgaggaggctcggccggcgagagaagtcgcctgcactgcctgaaaagaaggtggctgatctgagcactctgaatgaagtgggctatcaaatccgaatttagccaagccataccggccagcaagagggtttctgtggtgcttctctctgcactttacccagcatcttcaggaggaactgcaactatttattaagaacttgtgaattttatttttaaggattcacctggaaatagaatctgagtgggtggtaaccattagctttaaaaaattcactaaaaggcaccatgaaaaggctgaagtaataagccccactggggttggactatgtccctcactcaagatcttaaggataaccgtaactgaagttttatatttttccatttacctactttcttttacttgctttgaacattatgcctcaccaatagtaaatgttcatgaaataatctcttgaacttttggtatagtaaggtaactctaacagtattactgtctttttcagcaataacagaaagcaaaaatgggtgggttttttttaagcagttattacctcagcattttgacatcagatatgcaaacttaatggcgttttgtttttttatattctatttgtattctttccccagtatttcccatggggatctccacaagtttggagttttttcctggtgcacacacgtgaggagatttaaggtactatatgcaagtgttttactaaaaagcactgaaattcttctggcaatacaagaaccattttcaggatcttggagttacttccttcttaatctttcttaaagcattcactgatgtttttgttttttcaaaatgaaacaaaaatatcacattgagaagctagtctatgttctgtcactaacatttaaactttgcagactctaacaaaaagcacaagaggtcacgtactattatacaaatttagcggtactggatttacctctgacattaacacactcaggcagagaccaggagtgatcagcaggtcttcagaaccaaaaaacctttctgttcacatttcatctgatttttaaactgaggcaggctttgattcttctgaaggatgccaagaatcaaactaagggaggactcactgttaaagatgtgttctgatgtcttatattaagaccaaatgtgacatgatgtgattatcttccagtactttgcttttaggtaccatttcatgacattttaggaatgagtattggaaaatataaagaattagaaaagcagcactttttttttaatggaaaagtcttcggtccagtgttacaccttatagtgtaattcagtccctaagcacagaatgaatgtctggcctgcatatggtagttacagtgtaacctctggctgcagaccacacaggacaaccctaacagcctagtcttgtatggtgtaaatatcaagagtacagcttcaatttcatttgctttatcttagcaacaatgccaactcaggagagcagacggccgatttcagtgaagtctggtagtcaacagatgttatttcagtctcagtgcatctcctctggctttctttgactgaaggtgtttataggaaggaagttaaaaaaaaaaaaagctcattgagattctttaccaattctttacaagatttctgggggtgacagggaaagcaaaaggacttcaaagcaaaagggtgcacaagagcttacttcaccctgaaaatcagtattattaatgaaaagtactgttttcttaaagaagtcgaatgtcctttagatgaacaagaccaagtatacatctccattagattaaaatgtagcacagggttaaaaattatcagtttaatctctttaagaacagtattatcagagtttaaaatgagttagctctgtttatctacacacagcaaacccattcgcagcctcttggccacatgtattcagatgtttgaaatagtgaatcatttcattttcattctaaaacaatactgacttagccatataccttctgtttgtcaatctgaaacttgcttacatctaataagtagacctcttataacactgcaaccattctaagagttggaatttatttttgccaagtattaagtactgttacatctaaaatacagaatgtcaaatggttgcatagcttgtttcccacaacaaggaggaaaagaacaggaatacaaactctgtaatatgctgataaagaagccttagaactgccaactggcttgatggttcaattagtaagctaatttctcccacacccgctccttgatttttagactaattttcccaaagcaaggtttagtcacacaaacttgaaagtacatttaaaatgttcttagttgtcatcctacttttattgcctatggaatatgctaatttctaaaaaaaatacgggagaggcaccaaacccctaaattctagtgcaataatttaaaaaacaaaaaacaaaacaaaacaaaaaacatgttatatgcacccccctcccaaagctgattttaagactggctagaattcaaaatataaaaaataaaactatgaagtgatttgaaatcggttttaaaaagttgttagtgcaagagaaattttatgtttaagccatcatggcaatatatgcaaagtttaaatgaatgacagaaatcttgattttagactgtatgttgtgctgttttgagtacactttatttcggagatatttagtattttctatacactctgaaatcatgagcatttcactttttctaagtcaattatttcataaggattttattaatagatattggtaaatagaactttggaaatcttaattcagaattcttactatacctgagtcttttgtaagctatagttttatgtacaaccttgtacagtttttttgacatacaattcagaactttgtttattctcttggactttgttctggccaatacattttttttaaatctttaagaagaactgtgattgttttagtgggtatttttctaattaaatgaaaacttgtataatggtattttagagaatgccagtaagtgcatgtttcaagttaatgtttttctcatcacttgtatgtttctaacacagcatgggactttaataaaaccatcctggaaacttaa

SEQ ID NO: 7086 - protein, 290 aa, Homo sapiens; identical to SEQ ID NO: 7084

SEQ ID NO: 7087 - DNA, 1731 bp, Homo sapiens
agcagccccagccccagccccaggcccagcagcagcagcagcagcccctgctctcccgccgcccggagaggctctgcagccatgaagccaaccgtcccgagccttcaataccccaggtcccaaactacaggctgtcgatgacgatcccagactggctccaggcgatccagaattacatgaagaccctacagtatccttccaaccaaggtctgagcacacccagccaggggacaggcatggtgatcgcaagcctggtggcaaatctgtccccagctggtcatcaaaagctctctaaggttaatggaaacagcaaaagaaatgacccgagagtccttgcctatcaaatgccttgaagctgtcatcctgggcatctacttaaccaatgggcagccttccattgagcggttccccatcagctttaaaacctacttctcaggaaactactttcaccacgttgtgctggggatttactgcaatggccgctatggctcattgggcatgagccgcagggctgagctgatggacaagccattgacttttcggactctgagtgacctcatctttgactttgaggactcttacaagaaatacctgcacacagtcaagaaggtcaagattgggctgtacgtcccccatgagcctcatagcttccagcccattgagtggaagcagctggtcctcaacgtctcaaagatgctgagggctgacataaggaaggagctggagaaatatgccagggacatgagaatgaagggcttgtgcagtcactaagagaaaaggattatgctgacttcaggcctggctatgtttagcacttgtggacttgtcatcttcactctgcaggacctggagtggagattcctgatcaattaaaaccattctgtcatatgtgtgggatgggagcatcagaggaagaacaggctggtttctgaggcaatagagatgggactttgccttcgtgaggagaggaacttgccaagcaaacaaacacagccccggggagactgaggcattgggctgtgttcctctctctacacggcacagggagcacaatgtgaccatctgtatatctgtcttggaagtggtgcccttgctgcttgacagtacaggacgagagaggaatgtgtgtgtctccagcctccttttttagaagtcttcctgctcaatgccttctaaaccatggcatcatgattgggctggggggtggaatgtggtgctagaagaagacctgagggtggaggtcccttaggaaccagggtgattaactcctcacatctccttcagatcctgaaacctgcaagtgcccactctccgacccaagtgagaagccggggaaaatccctgtcccccagaaggagacaggcaagccccccgaggaggctcggccggcgagagaagtcccctgaggccagtgatcccacatctacttcttagaccaaaataacccacttaagcaatgacagattggagatgctggggatgcccaaattcaccagcgataatccgctggcaaatatttgaactatagccatcctgggaaaaaatactgcttttcttaataatagcagcatgctgtgtcacccagcctcttgccatgctggaaccatgtggcacagtgcacagggggcttggttgaatcccaactgtgccacgtgttagctgtgcagctgggcacatccttcctcctcggggagccttggtttcttcatccataaaagagtatcaaatgct

SEQ ID NO: 7088 - protein, 156 aa, Homo sapiens
METAKEMTRESLPIKCLEAVILGIYLTNGQPSIERFPISFKTYFSGNYFHHVVLGIYCNGRYGSLGMSRRAELMDKPLTFRTLSDLIFDFEDSYKKYLHTVKKVKIGLYVPHEPHSFQPIEWKQLVLNVSKMLRADIRKELEKYARDMRMKGLCSH

SEQ ID NO: 7089 - DNA, 5402 bp, Homo sapiens
aagtgttgggattacaggcatgagccaccgcacctggccaacaatttttaatgtggatgaaaccactttatattgcaagaagatgccatctaggacttcataactagaaagaagaagtcagtgcctggtttcaaaggacaggctgactcttttgttaggagctaatatagcttgttactttaagttaaagtcagcattcattgaccattctgaaaatcctagggcacttaaaaattatgctaaatccactctacctgtgctatgtcagtggaaaaacaaagcttggggatgacagtgcatctgtttatggcatagaatattttaagcacactgctgagaccactattcagaaaaacagattcctttccaaagattactgttcgttcacaaggcacctggtcacccaagagctctgatgaagatgtacaaggaaatgaatgttttttcatccctgctaacacggcatccattctgcagcctatggaatcaaggagtaattttgtacctacaggtctccttatttaagaaatacatttcataggctatagctgccatagaagtgatttctctgatggatctggggaaagtaaattgcaaacctgcaaaggattcagcatcctaaatgctattcagaacattcgtgattcatgggaggaggtcaaaatatcaccattaaaaagagtttggtagaagttgattccagccctcatggatgactttgaggggttcaagacttcaggggaggaagtaactgtagatgtggtggaaatagcaagagaactagaagtggagcctgaagaattaactgaattgtttcaatctcatgataaaacttaaatagatgaggagttgcttcttatagatgagcagagtattttcttgagatgcattctattcctggtgaagatgctgtgaacattgctgaaattacaacaaaggattttaaatgttacataaatttaattgataaaacattggaagggtttccaattttgaaaaaaagttccgtggataaagtgctgtcaaatagcatcagatgctacagaaaaatcttttatgaaaggaagcatcaatggctgcagcaaatttcattgttgtcttattttaagaaattgccacagccaacccccactttaagcaaccatcaccctgatcagccagcagtcattaatatctaggcaagatcctccacctgtaaaaagatgatgactcactgaaggctgagatgattgttaggatattttaacaatgaagtatttttaaattaaggtatgtattttcttaggcataatgctattgcacacttagtaaactacagtatagtataaacgcaacttacatgcactgggaaactgaaaaaattatgtgacttgctttattgagatactcactttattgtggtggcctgaaaccaaacccgcagtacctgtgagcatgcctatatttgatacaataggaactatattgcaggtagtaaaaaatgatgaatagtgttagttcaaagcgatagatgatttgtatgtccaaattaaagaaaagcatgtatgggaaaaagattgtcatttttatgtaaatgataagtgctttctgaattgtatttaaagaaaagaagattttataagtccaaagaatcacttaatacaatgaataaagggtaataatttaccacttttggattaccttttatttaagacataaatttttcaactcataagctatttaaaatcttttcacttaagatacctgttgaaattttgtttaggtatctggccaggaacagtcttcacggggacaaagaattttatctattccaatttggcccccaaacctaggtatctcacagaactgtgtgtatgaggtacagcaggtaccaaaagtagaaaagacagacagtgatctgacacaaacacagctgaagcaaacagaggtcctagtgacagctgaaaaattgtcttcaaatttacagcaccatttcagtttgtcatctgtttattcacattactttcctgacactggaattccagaagtgaccacctgtcattcccgaagtgccataactgtggattatattttctactctgcagaaaaggaagatgttgctgggcacccaggagctgaagttgctttggttggtggcttgaaacttctagctagactgtcacttcttacagaacaagacttatggactgttaatggacttccaaacgaaaataactcttcagatcatctgcctttattggcaaagttcagacttgagctctgactctctttgatcacatactaattttctttccaatttgtattgtttttcaaagaatgtaaagttcttaagtgtatgcatgttgtttatttttgcactgtggagattctgaagcggttatgttagatgctttgaaactccatatcagaagaaataactttataacaattttttttaataatgaaaaatattttcgtgacaagtgagctctaaattctctttattgtaaaagagatgtaaaggttttatattctaaatcctagtaaaattgacagtgatttttaaatataatgcatcttcctttgtctgcttagtaaaaaatttcatttcataattttggcaagctctgtagtggatccaaagtatctttgagttcttgcaaactacaagttgtttcctttccagaaggcttgatttcattaggagacccctctattgagttctaaatagtttatcttagaaagccttgggtcattcacaggtatccaaccagccattgtttagtttgtttttgaaggggtttgataatgctttttaagttgtacagaatgcttaatccatcttattactgtcctgagccatgtaatatgcctgcatcgtgttggggaaatgtttgggaaatataagccagcataacgtgtaaagctcactctttcaccctggaacagacaagaggtgggcttaatagaggcagagactggggatatacctttgtttccctagcatttttatttatttatttttattttattttattttttgagatggagtttcactcttgttgcccaggctgggggtgcaatggcgcaatctttgctcactgcaacccctgcctcccgggctcaagcgattctcctgcctcagcctctcgagtagctgggattacaggcatgcgtcaccactcccagctaattttgtattttcagtagagacagggtttccccatgttggttaggctggtctcgaactcccaacctcaggtgatccgcccacctcagctctcaaagtgctgggattacaggcgggagccactgcacatggcagcattttttaaaaattcagttttaagatctctggtttaggggagagattttattttactgaaccagttctatagaaatttattttattaggaaatttgtctttggaacaaagtggcagctataaaattatttttgttaagcctcagaaatatgaggaagcctgtaaaactctagtggggagatattaacttggagacctaatgctctgtaaatagtcatttaaactgttggttttagtggttttgtttctaaaatgttttcttttaccgtgatgcaccagtatgagatggtgctgacactttctatgaagtggttatgagcaggtttaataaatcctctatacaagtgtttgaatcaattttaaaacataaaaagtggaaatttccttttttgtagacagtaggaacaaggaattatatgcatttttactaagtagtaattttacactgaattgtaaatgtttttacagtgagttttattaatagaatgcttcaccttaaattggaaaacaataatagtcttggactaagtctttgtactaaagcatttgctataattatttttaaaaaaacaaacagatgaaaacctcagagaaggcatgtggattataagatttgtctagtaaaaattgtaattgaatatgtttaaatatttaatttctcattttggggggtttttatttttttattttttagatggtgtctcacgctatcgcccaggctggagtgcagtggcgcgaactcggctcactgcaacctccgcctcctgggttcaagcaattctccttcctcagcctcccaagtagctgggattacaggcatgcaccaccatgcccagctaatttttgtatttttagtagagatggaattttgccatgttggccaggctggtcttgaactcctgacctcaggggtgatccacccgcctcgggctcccaaagtgctgtgattacaggcatgagccaccatgcctggcctttggggggattttaattacagtattaattatagttctaggatttcccacattttatagtagtagtttgcaggatattatgtgccctaattagcagatatagacattatcaaattataatgatagtataattatccctttttaatattggggaaagaaaaatgaaaattcattagttaattactgctttgtgttgtgtgaatttattaacaaataacattattacatataggtcattgttaacaaacaaacatccctgaaaacctctgtgaaaatttaattttttatatcctgattaatatattgtgactttaggcccatttttcatgtgcttcactttgatagagttaatccataaaattgctctttactttagcttatcaaatgaagtattattttgtggactggaggccaaaaagtcaatgtgagcttctcacaggtttttaaagctccactaaaaataattatccacttgtctttacttttgttgaccagaatagttggtaactctgccagagcctgtacttacctgccaaaaacaattaaatctggttaatgcctgaaaccaaatctctcagtctcaagtgttatactatccaagttttaaatggaaaggtaaactgtggagtaatgaaattttggttttactgtaccttttgctatcaagataatattcatgtttgaaatcttgtctttatttggaatttagttactgtctgcttttaacctttgctttcctaaagaaagtttgagatccagagagttcaagggattggggaaagagaggcgtcaagtcatttgcactttgtacctgtaagttaggtaataaactattatactcgtacttctgtgcctgaaggttttgtggtaggtatactgagatgtataagctgtactgttgcctttactaaactatttcattgccctttgcagccatttttacttaggggtgatgctaaaagatgagtgaattgagatatgtcaaaatagagtgatagagtgtttttaatatagagtctgcagattgtgaaagaagggtgaaagaacgataaataggttcagtagaataaatatataataagaggaccaaaaaaaaaaatcacaccatcttacttttttttttt

SEQ ID NO: 7090 - protein, 97 aa, Homo sapiens [sequence omitted]

SEQ ID NO: 7091 - DNA, 4603 bp, Homo sapiens
cggcgagactgcacctcccagcatgccttgcagccaggactggagtcggtacttaagagtgatggggttccctagatactttaggccgtcgcatcgattatagagattgaggtggaacccggggcctgggaactggacgcacgcggagggcgaagatggaagcctggcgctgtgtgaggaagggctacggccactgtgtggtgggaagaggccggtgtgataaagcggaattgggaatatatatgtagccatgataaagaaaaaacgaagatcctaggagacaaaaatgttgatcccaaatgtgaagacagtgagaacaagtttgacttttcagtgatgtcctataatatactttcacaagatttactggaagataactctcacctttatagacattgccggcggccagtattacactggagttttaggtttcccaatattctgaaagaaattaaacattttgatgcagacgtactttgtttgcaagaagttcaagaagatcattatggagcagagatcaggccaagtttggaatcactgggttatcactgtgaatataagatgcggacaggaaggaaacctgatggctgtgctatttgcttcaaacattccaaattttcactcttgtcagtgaacccagtggaattcttccgccctgatatttctctgttggacagagacaatgttggattagttttactcttacagcccaaaattccatatgctgcctgccctgcaatctgcgtagcaaatacgcatctgttgtataatccaaggcgaggtgatattaagctgacgcaattggcaatgctactggcagagatttccagtgttgcccaccagaaagatggcagcttctgccctattgttatgtgtggtgactttaattctgttcctggttctccactatatagtttcataaaggaaggaaaattgaattatgaaggacttcccataggaaaggtatctggccaggaacagtcttcacggggacaaagaattttatctattccaatttggcccccaaacctaggtatctcacagaactgtgtgtatgaggtacagcaggtaccaaaagtagaaaagacagacagtgatctgacacaaacacagctgaagcaaacagaggtcctagtgacagctgaaaaattgtcttcaaatttacagcaccatttcagtttgtcatctgtttattcacattactttcctgacactggaattccagaagtgaccacctgtcattcccgaagtgccataactgtggattatattttctactctgcagaaaaggaagatgttgctgggcacccaggagctgaagttgctttggttggtggcttgaaacttctagctagactgtcacttcttacagaacaagacttatggactgttaatggacttccaaacgaaaataactcttcagatcatctgcctttattggcaaagttcagacttgagctctgactctctttgatcacatactaattttctttccaatttgtattgtttttcaaagaatgtaaagttcttaagtgtatgcatgttgtttatttttgcactgtggagattctgaagcggttatgttagatgctttgaaactccatatcagaagaaataactttataacaattttttttaataatgaaaaatattttcgtgacaagtgagctctaaattctctttattgtaaaagagatgtaaaggttttatattctaaatcctagtaaaattgacagtgatttttaaatataatgcatcttcctttgtctgcttagtaaaaaatttcatttcataattttggcaagctctgtagtggatccaaagtatctttgagttcttgcaaactacaagttgtttcctttccagaaggcttgatttcattaggagacccctctattgagttctaaatagtttatcttagaaagccttgggtcattcacaggtatccaaccagccattgtttagtttgtttttgaaggggtttgataatgctttttaagttgtacagaatgcttaatccatcttattactgtcctgagccatgtaatatgcctgcatcgtgttggggaaatgtttgggaaatataagccagcataacgtgtaaagctcactctttcaccctggaacagacaagaggtgggcttaatagaggcagagactggggatatacctttgtttccctagcatttttatttatttatttttattttattttattttttgagatggagtttcactcttgttgcccaggctgggggtgcaatggcgcaatctttgctcactgcaacccctgcctcccgggctcaagcgattctcctgcctcagcctctcgagtagctgggattacaggcatgcgtcaccactcccagctaattttgtattttcagtagagacagggtttccccatgttggttaggctggtctcgaactcccaacctcaggtgatccgcccacctcagctctcaaagtgctgggattacaggcgggagccactgcacatggcagcattttttaaaaattcagttttaagatctctggtttaggggagagattttattttactgaaccagttctatagaaatttattttattaggaaatttgtctttggaacaaagtggcagctataaaattatttttgttaagcctcagaaatatgaggaagcctgtaaaactctagtggggagatattaacttggagacctaatgctctgtaaatagtcatttaaactgttggttttagtggttttgtttctaaaatgttttcttttaccgtgatgcaccagtatgagatggtgctgacactttctatgaagtggttatgagcaggtttaataaatcctctatacaagtgtttgaatcaattttaaaacataaaaagtggaaatttccttttttgtagacagtaggaacaaggaattatatgcatttttactaagtagtaattttacactgaattgtaaatgtttttacagtgagttttattaatagaatgcttcaccttaaattggaaaacaataatagtcttggactaagtctttgtactaaagcatttgctataattatttttaaaaaaacaaacagatgaaaacctcagagaaggcatgtggattataagatttgtctagtaaaaattgtaattgaatatgtttaaatatttaatttctcattttggggggtttttatttttttattttttagatggtgtctcacgctatcgcccaggctggagtgcagtggcgcgaactcggctcactgcaacctccgcctcctgggttcaagcaattctccttcctcagcctcccaagtagctgggattacaggcatgcaccaccatgcccagctaatttttgtatttttagtagagatggaattttgccatgttggccaggctggtcttgaactcctgacctcaggggtgatccacccgcctcgggctcccaaagtgctgtgattacaggcatgagccaccatgcctggcctttggggggattttaattacagtattaattatagttctaggatttcccacattttatagtagtagtttgcaggatattatgtgccctaattagcagatatagacattatcaaattataatgatagtataattatccctttttaatattggggaaagaaaaatgaaaattcattagttaattactgctttgtgttgtgtgaatttattaacaaataacattattacatataggtcattgttaacaaacaaacatccctgaaaacctctgtgaaaatttaattttttatatcctgattaatatattgtgactttaggcccatttttcatgtgcttcactttgatagagttaatccataaaattgctctttactttagcttatcaaatgaagtattattttgtggactggaggccaaaaagtcaatgtgagcttctcacaggtttttaaagctccactaaaaataattatccacttgtctttacttttgttgaccagaatagttggtaactctgccagagcctgtacttacctgccaaaaacaattaaatctggttaatgcctgaaaccaaatctctcagtctcaagtgttatactatccaagttttaaatggaaaggtaaactgtggagtaatgaaattttggttttactgtaccttttgctatcaagataatattcatgtttgaaatcttgtctttatttggaatttagttactgtctgcttttaacctttgctttcctaaagaaagtttgagatccagagagttcaagggattggggaaagagaggcgtcaagtcatttgcactttgtacctgtaagttaggtaataaactattatactcgtacttctgtgcctgaaggttttgtggtaggtatactgagatgtataagctgtactgttgcctttactaaactatttcattgccctttgcagccatttttacttaggggtgatgctaaaagatgagtgaattgagatatgtcaaaatagagtgatagagtgtttttaatatagagtctgcagattgtgaaagaagggtgaaagaacgataaataggttcagtagaataaatatataataagaggaccaaaaaaaaaaatcacaccatcttacttttttttttt

SEQ ID NO: 7092 - protein, 375 aa, Homo sapiens
MSYNILSQDLLEDNSHLYRHCRRPVLHWSFRFPNILKEIKHFDADVLCLQEVQEDHYGAEIRPSLESLGYHCEYKMRTGRKPDGCAICFKHSKFSLLSVNPVEFFRPDISLLDRDNVGLVLLLQPKIPYAACPAICVANTHLLYNPRRGDIKLTQLAMLLAEISSVAHQKDGSFCPIVMCGDFNSVPGSPLYSFIKEGKLNYEGLPIGKVSGQEQSSRGQRILSIPIWPPNLGISQNCVYEVQQVPKVEKTDSDLTQTQLKQTEVLVTAEKLSSNLQHHFSLSSVYSHYFPDTGIPEVTTCHSRSAITVDYIFYSAEKEDVAGHPGAEVALVGGLKLLARLSLLTEQDLWTVNGLPNENNSSDHLPLLAKFRLEL

SEQ ID NO: 7093 - DNA, 5121 bp, Homo sapiens
aagtgttgggattacaggcatgagccaccgcacctggccaacaatttttaatgtggatgaaaccactttatattgcaagaagatgccatctaggacttcataactagaaagaagaagtcagtgcctggtttcaaaggacaggctgactcttttgttaggagctaatatagcttgttactttaagttaaagtcagcattcattgaccattctgaaaatcctagggcacttaaaaattatgctaaatccactctacctgtgctatgtcagtggaaaaacaaagcttggggatgacagtgcatctgtttatggcatagaatattttaagcacactgctgagaccactattcagaaaaacagattcctttccaaagattactgttcgttcacaaggcacctggtcacccaagagctctgatgaagatgtacaaggaaatgaatgttttttcatccctgctaacacggcatccattctgcagcctatggaatcaaggagtaattttgtacctacaggtctccttatttaagaaatacatttcataggctatagctgccatagaagtgatttctctgatggatctggggaaagtaaattgcaaacctgcaaaggattcagcatcctaaatgctattcagaacattcgtgattcatgggaggaggtcaaaatatcaccattaaaaagagtttggtagaagttgattccagccctcatggatgactttgaggggttcaagacttcaggggaggaagtaactgtagatgtggtggaaatagcaagagaactagaagtggagcctgaagaattaactgaattgtttcaatctcatgataaaacttaaatagatgaggagttgcttcttatagatgagcagagtattttcttgagatgcattctattcctggtgaagatgctgtgaacattgctgaaattacaacaaaggattttaaatgttacataaatttaattgataaaacattggaagggtttccaattttgaaaaaaagttccgtggataaagtgctgtcaaatagcatcagatgctacagaaaaatcttttatgaaaggaagcatcaatggctgcagcaaatttcattgttgtcttattttaagaaattgccacagccaacccccactttaagcaaccatcaccctgatcagccagcagtcattaatatctaggcaagatcctccacctgtaaaaagatgatgactcactgaaggctgagatgattgttaggatattttaacaatgaagtatttttaaattaaggtatgtattttcttaggcataatgctattgcacacttagtaaactacagtatagtataaacgcaacttacatgcactgggaaactgaaaaaattatgtgacttgctttattgagatactcactttattgtggtggcctgaaaccaaacccgcagtacctgtgagcatgcctatatttgatacaataggaactatattgcaggtagtaaaaaatgatgaatagtgttagttcaaagcgatagatgatttgtatgtccaaattaaagaaaagcatgtatgggaaaaagattgtcatttttatgtaaatgataagtgctttctgaattgtatttaaagaaaagaagattttataagtccaaagaatcacttaatacaatgaataaagggtaataatttaccacttttggattaccttttatttaagacataaatttttcaactcataagctatttaaaatcttttcacttaagatacctgttgaaattttgtttaggtatctggccaggaacagtcttcacggggacaaagaattttatctattccaatttggcccccaaacctaggtatctcacagaactgtgtgtatgaggtacagcaggtaccaaaagtagaaaagacagacagtgatctgacacaaacacagctgaagcaaacagaggtcctagtgacagctgaaaaattgtcttcaaatttacagcaccatttcagtttgtcatctgtttattcacattactttcctgacactggaattccagaagtgaccacctgtcattcccgaagtgccataactgtggattatattttctactctgcagaaaaggaagatgttgctgggcacccaggagctgaagttgctttggttggtggcttgaaacttctagctagactgtcacttcttacagaacaagacttatggactgttaatggacttccaaacgaaaataactcttcagatcatctgcctttattggcaaagttcagacttgagctctgactctctttgatcacatactaattttctttccaatttgtattgtttttcaaagaatgtaaagttcttaagtgtatgcatgttgtttatttttgcactgtggagattctgaagcggttatgttagatgctttgaaactccatatcagaagaaataactttataacaattttttttaataatgaaaaatattttcgtgacaagtgagctctaaattctctttattgtaaaagagatgtaaaggttttatattctaaatcctagtaaaattgacagtgatttttaaatataatgcatcttcctttgtctgcttagtaaaaaatttcatttcataattttggcaagctctgtagtggatccaaagtatctttgagttcttgcaaactacaagttgtttcctttccagaaggcttgatttcattaggagacccctctattgagttctaaatagtttatcttagaaagccttgggtcattcacaggtatccaaccagccattgtttagtttgtttttgaaggggtttgataatgctttttaagttgtacagaatgcttaatccatcttattactgtcctgagccatgtaatatgcctgcatcgtgttggggaaatgtttgggaaatataagccagcataacgtgtaaagctcactctttcaccctggaacagacaagaggtgggcttaatagaggcagagactggggatatacctttgtttccctagcatttttatttatttatttttattttattttattttttgagatggagtttcactcttgttgcccaggctgggggtgcaatggcgcaatctttgctcactgcaacccctgcctcccgggctcaagcgattctcctgcctcagcctctcgagtagctgggattacaggcatgcgtcaccactcccagctaattttgtattttcagtagagacagggtttccccatgttggttaggctggtctcgaactcccaacctcaggtgatccgcccacctcagctctcaaagtgctgggattacaggcgggagccactgcacatggcagcattttttaaaaattcagttttaagatctctggtttaggggagagattttattttactgaaccagttctatagaaatttattttattaggaaatttgtctttggaacaaagtggcagctataaaattatttttgttaagcctcagaaatatgaggaagcctgtaaaactctagtggggagatattaacttggagacctaatgctctgtaaatagtcatttaaactgttggttttagtggttttgtttctaaaatgttttcttttaccgtgatgcaccagtatgagatggtgctgacactttctatgaagtggttatgagcaggtttaataaatcctctatacaagtgtttgaatcaattttaaaacataaaaagtggaaatttccttttttgtagacagtaggaacaaggaattatatgcatttttactaagtagtaattttacactgaattgtaaatgtttttacagtgagttttattaatagaatgcttcaccttaaattggaaaacaataatagtcttggactaagtctttgtactaaagcatttgctataattatttttaaaaaaacaaacagatgaaaacctcagagaaggcatgtggattataagatttgtctagtaaaaattgtaattgaatatgtttaaatatttaatttctcattttggggggtttttatttttttattttttagatggtgtctcacgctatcgcccaggctggagtgcagtggcgcgaactcggctcactgcaacctccgcctcctgggttcaagcaattctccttcctcagcctcccaagtagctgggattacaggcatgcaccaccatgcccagctaatttttgtatttttagtagagatggaattttgccatgttggccaggctggtcttgaactcctgacctcaggggtgatccacccgcctcgggctcccaaagtgctgtgattacaggcatgagccaccatgcctggcctttggggggattttaattacagtattaattatagttctaggatttcccacattttatagtagtagtttgcaggatattatgtgccctaattagcagatatagacattatcaaattataatgatagtataattatccctttttaatattggggaaagaaaaatgaaaattcattagttaattactgctttgtgttgtgtgaatttattaacaaataacattattacatataggtcattgttaacaaacaaacatccctgaaaacctctgtgaaaatttaattttttatatcctgattaatatattgtgactttaggcccatttttcatgtgcttcactttgatagagttaatccataaaattgctctttactttagcttatcaaatgaagtattattttgtggactggaggccaaaaagtcaatgtgagcttctcacaggtttttaaagctccactaaaaataattatccacttgtctttacttttgttgaccagaatagttggtaactctgccagagcctgtacttacctgccaaaaacaattaaatctggttaatgcctgaaaccaaatctctcagtctcaagtgttatactatccaagttttaaatggaaaggtaaactgtggagtaatgaaattttggttttactgtaccttttgctatcaagataatattcatgtttgaaatcttgtctttatttggaatttagttactgtctgcttttaacctttgctttcctaaagaaagtttgagatccagagagttcaagggattggggaaagagaggcgtcaagtcatttgcactttgtacctgtaagttaggtaataaactattatactcgt

SEQ ID NO: 7094 - protein, 97 aa, Homo sapiens [sequence omitted]

SEQ ID NO: 7095 - DNA, 4322 bp, Homo sapiens
cggcgagactgcacctcccagcatgccttgcagccaggactggagtcggtacttaagagtgatggggttccctagatactttaggccgtcgcatcgattatagagattgaggtggaacccggggcctgggaactggacgcacgcggagggcgaagatggaagcctggcgctgtgtgaggaagggctacggccactgtgtggtgggaagaggccggtgtgataaagcggaattgggaatatatatgtagccatgataaagaaaaaacgaagatcctaggagacaaaaatgttgatcccaaatgtgaagacagtgagaacaagtttgacttttcagtgatgtcctataatatactttcacaagatttactggaagataactctcacctttatagacattgccggcggccagtattacactggagttttaggtttcccaatattctgaaagaaattaaacattttgatgcagacgtactttgtttgcaagaagttcaagaagatcattatggagcagagatcaggccaagtttggaatcactgggttatcactgtgaatataagatgcggacaggaaggaaacctgatggctgtgctatttgcttcaaacattccaaattttcactcttgtcagtgaacccagtggaattcttccgccctgatatttctctgttggacagagacaatgttggattagttttactcttacagcccaaaattccatatgctgcctgccctgcaatctgcgtagcaaatacgcatctgttgtataatccaaggcgaggtgatattaagctgacgcaattggcaatgctactggcagagatttccagtgttgcccaccagaaagatggcagcttctgccctattgttatgtgtggtgactttaattctgttcctggttctccactatatagtttcataaaggaaggaaaattgaattatgaaggacttcccataggaaaggtatctggccaggaacagtcttcacggggacaaagaattttatctattccaatttggcccccaaacctaggtatctcacagaactgtgtgtatgaggtacagcaggtaccaaaagtagaaaagacagacagtgatctgacacaaacacagctgaagcaaacagaggtcctagtgacagctgaaaaattgtcttcaaatttacagcaccatttcagtttgtcatctgtttattcacattactttcctgacactggaattccagaagtgaccacctgtcattcccgaagtgccataactgtggattatattttctactctgcagaaaaggaagatgttgctgggcacccaggagctgaagttgctttggttggtggcttgaaacttctagctagactgtcacttcttacagaacaagacttatggactgttaatggacttccaaacgaaaataactcttcagatcatctgcctttattggcaaagttcagacttgagctctgactctctttgatcacatactaattttctttccaatttgtattgtttttcaaagaatgtaaagttcttaagtgtatgcatgttgtttatttttgcactgtggagattctgaagcggttatgttagatgctttgaaactccatatcagaagaaataactttataacaattttttttaataatgaaaaatattttcgtgacaagtgagctctaaattctctttattgtaaaagagatgtaaaggttttatattctaaatcctagtaaaattgacagtgatttttaaatataatgcatcttcctttgtctgcttagtaaaaaatttcatttcataattttggcaagctctgtagtggatccaaagtatctttgagttcttgcaaactacaagttgtttcctttccagaaggcttgatttcattaggagacccctctattgagttctaaatagtttatcttagaaagccttgggtcattcacaggtatccaaccagccattgtttagtttgtttttgaaggggtttgataatgctttttaagttgtacagaatgcttaatccatcttattactgtcctgagccatgtaatatgcctgcatcgtgttggggaaatgtttgggaaatataagccagcataacgtgtaaagctcactctttcaccctggaacagacaagaggtgggcttaatagaggcagagactggggatatacctttgtttccctagcatttttatttatttatttttattttattttattttttgagatggagtttcactcttgttgcccaggctgggggtgcaatggcgcaatctttgctcactgcaacccctgcctcccgggctcaagcgattctcctgcctcagcctctcgagtagctgggattacaggcatgcgtcaccactcccagctaattttgtattttcagtagagacagggtttccccatgttggttaggctggtctcgaactcccaacctcaggtgatccgcccacctcagctctcaaagtgctgggattacaggcgggagccactgcacatggcagcattttttaaaaattcagttttaagatctctggtttaggggagagattttattttactgaaccagttctatagaaatttattttattaggaaatttgtctttggaacaaagtggcagctataaaattatttttgttaagcctcagaaatatgaggaagcctgtaaaactctagtggggagatattaacttggagacctaatgctctgtaaatagtcatttaaactgttggttttagtggttttgtttctaaaatgttttcttttaccgtgatgcaccagtatgagatggtgctgacactttctatgaagtggttatgagcaggtttaataaatcctctatacaagtgtttgaatcaattttaaaacataaaaagtggaaatttccttttttgtagacagtaggaacaaggaattatatgcatttttactaagtagtaattttacactgaattgtaaatgtttttacagtgagttttattaatagaatgcttcaccttaaattggaaaacaataatagtcttggactaagtctttgtactaaagcatttgctataattatttttaaaaaaacaaacagatgaaaacctcagagaaggcatgtggattataagatttgtctagtaaaaattgtaattgaatatgtttaaatatttaatttctcattttggggggtttttatttttttattttttagatggtgtctcacgctatcgcccaggctggagtgcagtggcgcgaactcggctcactgcaacctccgcctcctgggttcaagcaattctccttcctcagcctcccaagtagctgggattacaggcatgcaccaccatgcccagctaatttttgtatttttagtagagatggaattttgccatgttggccaggctggtcttgaactcctgacctcaggggtgatccacccgcctcgggctcccaaagtgctgtgattacaggcatgagccaccatgcctggcctttggggggattttaattacagtattaattatagttctaggatttcccacattttatagtagtagtttgcaggatattatgtgccctaattagcagatatagacattatcaaattataatgatagtataattatccctttttaatattggggaaagaaaaatgaaaattcattagttaattactgctttgtgttgtgtgaatttattaacaaataacattattacatataggtcattgttaacaaacaaacatccctgaaaacctctgtgaaaatttaattttttatatcctgattaatatattgtgactttaggcccatttttcatgtgcttcactttgatagagttaatccataaaattgctctttactttagcttatcaaatgaagtattattttgtggactggaggccaaaaagtcaatgtgagcttctcacaggtttttaaagctccactaaaaataattatccacttgtctttacttttgttgaccagaatagttggtaactctgccagagcctgtacttacctgccaaaaacaattaaatctggttaatgcctgaaaccaaatctctcagtctcaagtgttatactatccaagttttaaatggaaaggtaaactgtggagtaatgaaattttggttttactgtaccttttgctatcaagataatattcatgtttgaaatcttgtctttatttggaatttagttactgtctgcttttaacctttgctttcctaaagaaagtttgagatccagagagttcaagggattggggaaagagaggcgtcaagtcatttgcactttgtacctgtaagttaggtaataaactattatactcgt

SEQ ID NO: 7096 - protein, 375 aa, Homo sapiens; identical to SEQ ID NO: 7092

SEQ ID NO: 7097 - DNA, 4845 bp, Homo sapiens
aagtgttgggattacaggcatgagccaccgcacctggccaacaatttttaatgtggatgaaaccactttatattgcaagaagatgccatctaggacttcataactagaaagaagaagtcagtgcctggtttcaaaggacaggctgactcttttgttaggagctaatatagcttgttactttaagttaaagtcagcattcattgaccattctgaaaatcctagggcacttaaaaattatgctaaatccactctacctgtgctatgtcagtggaaaaacaaagcttggggatgacagtgcatctgtttatggcatagaatattttaagcacactgctgagaccactattcagaaaaacagattcctttccaaagattactgttcgttcacaaggcacctggtcacccaagagctctgatgaagatgtacaaggaaatgaatgttttttcatccctgctaacacggcatccattctgcagcctatggaatcaaggagtaattttgtacctacaggtctccttatttaagaaatacatttcataggctatagctgccatagaagtgatttctctgatggatctggggaaagtaaattgcaaacctgcaaaggattcagcatcctaaatgctattcagaacattcgtgattcatgggaggaggtcaaaatatcaccattaaaaagagtttggtagaagttgattccagccctcatggatgactttgaggggttcaagacttcaggggaggaagtaactgtagatgtggtggaaatagcaagagaactagaagtggagcctgaagaattaactgaattgtttcaatctcatgataaaacttaaatagatgaggagttgcttcttatagatgagcagagtattttcttgagatgcattctattcctggtgaagatgctgtgaacattgctgaaattacaacaaaggattttaaatgttacataaatttaattgataaaacattggaagggtttccaattttgaaaaaaagttccgtggataaagtgctgtcaaatagcatcagatgctacagaaaaatcttttatgaaaggaagcatcaatggctgcagcaaatttcattgttgtcttattttaagaaattgccacagccaacccccactttaagcaaccatcaccctgatcagccagcagtcattaatatctaggcaagatcctccacctgtaaaaagatgatgactcactgaaggctgagatgattgttaggatattttaacaatgaagtatttttaaattaaggtatgtattttcttaggcataatgctattgcacacttagtaaactacagtatagtataaacgcaacttacatgcactgggaaactgaaaaaattatgtgacttgctttattgagatactcactttattgtggtggcctgaaaccaaacccgcagtacctgtgagcatgcctatatttgatacaataggaactatattgcaggtagtaaaaaatgatgaatagtgttagttcaaagcgatagatgatttgtatgtccaaattaaagaaaagcatgtatgggaaaaagattgtcatttttatgtaaatgataagtgctttctgaattgtatttaaagaaaagaagattttataagtccaaagaatcacttaatacaatgaataaagggtaataatttaccacttttggattaccttttatttaagacataaatttttcaactcataagctatttaaaatcttttcacttaagatacctgttgaaattttgtttaggtatctggccaggaacagtcttcacggggacaaagaattttatctattccaatttggcccccaaacctaggtatctcacagaactgtgtgtatgaggtacagcaggtaccaaaagtagaaaagacagacagtgatctgacacaaacacagctgaagcaaacagaggtcctagtgacagctgaaaaattgtcttcaaatttacagcaccatttcagtttgtcatctgtttattcacattactttcctgacactggaattccagaagtgaccacctgtcattcccgaagtgccataactgtggattatattttctactctgcagaaaaggaagatgttgctgggcacccaggagctgaagttgctttggttggtggcttgaaacttctagctagactgtcacttcttacagaacaagacttatggactgttaatggacttccaaacgaaaataactcttcagatcatctgcctttattggcaaagttcagacttgagctctgactctctttgatcacatactaattttctttccaatttgtattgtttttcaaagaatgtaaagttcttaagtgtatgcatgttgtttatttttgcactgtggagattctgaagcggttatgttagatgctttgaaactccatatcagaagaaataactttataacaattttttttaataatgaaaaatattttcgtgacaagtgagctctaaattctctttattgtaaaagagatgtaaaggttttatattctaaatcctagtaaaattgacagtgatttttaaatataatgcatcttcctttgtctgcttagtaaaaaatttcatttcataattttggcaagctctgtagtggatccaaagtatctttgagttcttgcaaactacaagttgtttcctttccagaaggcttgatttcattaggagacccctctattgagttctaaatagtttatcttagaaagccttgggtcattcacaggtatccaaccagccattgtttagtttgtttttgaaggggtttgataatgctttttaagttgtacagaatgcttaatccatcttattactgtcctgagccatgtaatatgcctgcatcgtgttggggaaatgtttgggaaatataagccagcataacgtgtaaagctcactctttcaccctggaacagacaagaggtgggcttaatagaggcagagactggggatatacctttgtttccctagcatttttatttatttatttttattttattttattttttgagatggagtttcactcttgttgcccaggctgggggtgcaatggcgcaatctttgctcactgcaacccctgcctcccgggctcaagcgattctcctgcctcagcctctcgagtagctgggattacaggcatgcgtcaccactcccagctaattttgtattttcagtagagacagggtttccccatgttggttaggctggtctcgaactcccaacctcaggtgatccgcccacctcagctctcaaagtgctgggattacaggcgggagccactgcacatggcagcattttttaaaaattcagttttaagatctctggtttaggggagagattttattttactgaaccagttctatagaaatttattttattaggaaatttgtctttggaacaaagtggcagctataaaattatttttgttaagcctcagaaatatgaggaagcctgtaaaactctagtggggagatattaacttggagacctaatgctctgtaaatagtcatttaaactgttggttttagtggttttgtttctaaaatgttttcttttaccgtgatgcaccagtatgagatggtgctgacactttctatgaagtggttatgagcaggtttaataaatcctctatacaagtgtttgaatcaattttaaaacataaaaagtggaaatttccttttttgtagacagtaggaacaaggaattatatgcatttttactaagtagtaattttacactgaattgtaaatgtttttacagtgagttttattaatagaatgcttcaccttaaattggaaaacaataatagtcttggactaagtctttgtactaaagcatttgctataattatttttaaaaaaacaaacagatgaaaacctcagagaaggcatgtggattataagatttgtctagtaaaaattgtaattgaatatgtttaaatatttaatttctcattttggggggtttttatttttttattttttagatggtgtctcacgctatcgcccaggctggagtgcagtggcgcgaactcggctcactgcaacctccgcctcctgggttcaagcaattctccttcctcagcctcccaagtagctgggattacaggcatgcaccaccatgcccagctaatttttgtatttttagtagagatggaattttgccatgttggccaggctggtcttgaactcctgacctcaggggtgatccacccgcctcgggctcccaaagtgctgtgattacaggcatgagccaccatgcctggcctttggggggattttaattacagtattaattatagttctaggatttcccacattttatagtagtagtttgcaggatattatgtgccctaattagcagatatagacattatcaaattataatgatagtataattatccctttttaatattggggaaagaaaaatgaaaattcattagttaattactgctttgtgttgtgtgaatttattaacaaataacattattacatataggtcattgttaacaaacaaacatccctgaaaacctctgtgaaaatttaattttttatatcctgattaatatattgtgactttaggcccatttttcatgtgcttcactttgatagagttaatccataaaattgctctttactttagcttatcaaatgaagtattattttgtggactggaggccaaaaagtcaatgtgagcttctcacaggtttttaaagctccactaaaaataattatccacttgtctttacttttgttgaccagaatagttggtaactctgccagagcctgtacttacctgccaaaaacaattaaatctggttaatgcctgaaacc

SEQ ID NO: 7098 - protein, 97 aa, Homo sapiens [sequence omitted]

SEQ ID NO: 7099 - DNA, 4372 bp, Homo sapiens
cggcgagactgcacctcccagcatgccttgcagccaggactggagtcggtacttaagagtgatggggttccctagatactttaggccgtcgcatcgattatagagattgaggtggaacccggggcctgggaactggacgcacgcggagggcgaagatggaagcctggcgctgtgtgaggaagggctacggccactgtgtggtgggaagaggccgataccccatgtttccccatcactcgaggagtctgggcagagactggactacaccgtgggagaatctgcaaaggtgttgctggaacagacatatttctagttgtatgaggtggcctggacattactctcgagctccttacccatacttcagtagtaggcatttttcactaaattggagaccaccctgtttgtttgagtctagaactcagttccagtactgtaactggagacctgacaacctgagccagacatctttgattcatctctctagttacgtcatgaacgctgagggagatgagccttcatcaaaacgaagaaaacaccaaggtgtgataaagcggaattgggaatatatatgtagccatgataaagaaaaaacgaagatcctaggagacaaaaatgttgatcccaaatgtgaagacagtgagaacaagtttgacttttcagtgatgtcctataatatactttcacaagatttactggaagataactctcacctttatagacattgccggcggccagtattacactggagttttaggtttcccaatattctgaaagaaattaaacattttgatgcagacgtactttgtttgcaagaagttcaagaagatcattatggagcagagatcaggccaagtttggaatcactgggttatcactgtgaatataagatgcggacaggaaggaaacctgatggctgtgctatttgcttcaaacattccaaattttcactcttgtcagtgaacccagtggaattcttccgccctgatatttctctgttggacagagacaatgttggattagttttactcttacagcccaaaattccatatgctgcctgccctgcaatctgcgtagcaaatacgcatctgttgtataatccaaggcgaggtgatattaagctgacgcaattggcaatgctactggcagagatttccagtgttgcccaccagaaagatggcagcttctgccctattgttatgtgtggtgactttaattctgttcctggttctccactatatagtttcataaaggaaggaaaattgaattatgaaggacttcccataggaaaggtatctggccaggaacagtcttcacggggacaaagaattttatctattccaatttggcccccaaacctaggtatctcacagaactgtgtgtatgaggtacagcaggtaccaaaagtagaaaagacagacagtgatctgacacaaacacagctgaagcaaacagaggtcctagtgacagctgaaaaattgtcttcaaatttacagcaccatttcagtttgtcatctgtttattcacattactttcctgacactggaattccagaagtgaccacctgtcattcccgaagtgccataactgtggattatattttctactctgcagaaaaggaagatgttgctgggcacccaggagctgaagttgctttggttggtggcttgaaacttctagctagactgtcacttcttacagaacaagacttatggactgttaatggacttccaaacgaaaataactcttcagatcatctgcctttattggcaaagttcagacttgagctctgactctctttgatcacatactaattttctttccaatttgtattgtttttcaaagaatgtaaagttcttaagtgtatgcatgttgtttatttttgcactgtggagattctgaagcggttatgttagatgctttgaaactccatatcagaagaaataactttataacaattttttttaataatgaaaaatattttcgtgacaagtgagctctaaattctctttattgtaaaagagatgtaaaggttttatattctaaatcctagtaaaattgacagtgatttttaaatataatgcatcttcctttgtctgcttagtaaaaaatttcatttcataattttggcaagctctgtagtggatccaaagtatctttgagttcttgcaaactacaagttgtttcctttccagaaggcttgatttcattaggagacccctctattgagttctaaatagtttatcttagaaagccttgggtcattcacaggtatccaaccagccattgtttagtttgtttttgaaggggtttgataatgctttttaagttgtacagaatgcttaatccatcttattactgtcctgagccatgtaatatgcctgcatcgtgttggggaaatgtttgggaaatataagccagcataacgtgtaaagctcactctttcaccctggaacagacaagaggtgggcttaatagaggcagagactggggatatacctttgtttccctagcatttttatttatttatttttattttattttattttttgagatggagtttcactcttgttgcccaggctgggggtgcaatggcgcaatctttgctcactgcaacccctgcctcccgggctcaagcgattctcctgcctcagcctctcgagtagctgggattacaggcatgcgtcaccactcccagctaattttgtattttcagtagagacagggtttccccatgttggttaggctggtctcgaactcccaacctcaggtgatccgcccacctcagctctcaaagtgctgggattacaggcgggagccactgcacatggcagcattttttaaaaattcagttttaagatctctggtttaggggagagattttattttactgaaccagttctatagaaatttattttattaggaaatttgtctttggaacaaagtggcagctataaaattatttttgttaagcctcagaaatatgaggaagcctgtaaaactctagtggggagatattaacttggagacctaatgctctgtaaatagtcatttaaactgttggttttagtggttttgtttctaaaatgttttcttttaccgtgatgcaccagtatgagatggtgctgacactttctatgaagtggttatgagcaggtttaataaatcctctatacaagtgtttgaatcaattttaaaacataaaaagtggaaatttccttttttgtagacagtaggaacaaggaattatatgcatttttactaagtagtaattttacactgaattgtaaatgtttttacagtgagttttattaatagaatgcttcaccttaaattggaaaacaataatagtcttggactaagtctttgtactaaagcatttgctataattatttttaaaaaaacaaacagatgaaaacctcagagaaggcatgtggattataagatttgtctagtaaaaattgtaattgaatatgtttaaatatttaatttctcattttggggggtttttatttttttattttttagatggtgtctcacgctatcgcccaggctggagtgcagtggcgcgaactcggctcactgcaacctccgcctcctgggttcaagcaattctccttcctcagcctcccaagtagctgggattacaggcatgcaccaccatgcccagctaatttttgtatttttagtagagatggaattttgccatgttggccaggctggtcttgaactcctgacctcaggggtgatccacccgcctcgggctcccaaagtgctgtgattacaggcatgagccaccatgcctggcctttggggggattttaattacagtattaattatagttctaggatttcccacattttatagtagtagtttgcaggatattatgtgccctaattagcagatatagacattatcaaattataatgatagtataattatccctttttaatattggggaaagaaaaatgaaaattcattagttaattactgctttgtgttgtgtgaatttattaacaaataacattattacatataggtcattgttaacaaacaaacatccctgaaaacctctgtgaaaatttaattttttatatcctgattaatatattgtgactttaggcccatttttcatgtgcttcactttgatagagttaatccataaaattgctctttactttagcttatcaaatgaagtattattttgtggactggaggccaaaaagtcaatgtgagcttctcacaggtttttaaagctccactaaaaataattatccacttgtctttacttttgttgaccagaatagttggtaactctgccagagcctgtacttacctgccaaaaacaattaaatctggttaatgcctgaaacc

SEQ ID NO: 7100 - protein, 544 aa, Homo sapiens; identical to SEQ ID NO: 406

SEQ ID NO: 7101 - DNA, 4046 bp, Homo sapiens
cggcgagactgcacctcccagcatgccttgcagccaggactggagtcggtacttaagagtgatggggttccctagatactttaggccgtcgcatcgattatagagattgaggtggaacccggggcctgggaactggacgcacgcggagggcgaagatggaagcctggcgctgtgtgaggaagggctacggccactgtgtggtgggaagaggccggtgtgataaagcggaattgggaatatatatgtagccatgataaagaaaaaacgaagatcctaggagacaaaaatgttgatcccaaatgtgaagacagtgagaacaagtttgacttttcagtgatgtcctataatatactttcacaagatttactggaagataactctcacctttatagacattgccggcggccagtattacactggagttttaggtttcccaatattctgaaagaaattaaacattttgatgcagacgtactttgtttgcaagaagttcaagaagatcattatggagcagagatcaggccaagtttggaatcactgggttatcactgtgaatataagatgcggacaggaaggaaacctgatggctgtgctatttgcttcaaacattccaaattttcactcttgtcagtgaacccagtggaattcttccgccctgatatttctctgttggacagagacaatgttggattagttttactcttacagcccaaaattccatatgctgcctgccctgcaatctgcgtagcaaatacgcatctgttgtataatccaaggcgaggtgatattaagctgacgcaattggcaatgctactggcagagatttccagtgttgcccaccagaaagatggcagcttctgccctattgttatgtgtggtgactttaattctgttcctggttctccactatatagtttcataaaggaaggaaaattgaattatgaaggacttcccataggaaaggtatctggccaggaacagtcttcacggggacaaagaattttatctattccaatttggcccccaaacctaggtatctcacagaactgtgtgtatgaggtacagcaggtaccaaaagtagaaaagacagacagtgatctgacacaaacacagctgaagcaaacagaggtcctagtgacagctgaaaaattgtcttcaaatttacagcaccatttcagtttgtcatctgtttattcacattactttcctgacactggaattccagaagtgaccacctgtcattcccgaagtgccataactgtggattatattttctactctgcagaaaaggaagatgttgctgggcacccaggagctgaagttgctttggttggtggcttgaaacttctagctagactgtcacttcttacagaacaagacttatggactgttaatggacttccaaacgaaaataactcttcagatcatctgcctttattggcaaagttcagacttgagctctgactctctttgatcacatactaattttctttccaatttgtattgtttttcaaagaatgtaaagttcttaagtgtatgcatgttgtttatttttgcactgtggagattctgaagcggttatgttagatgctttgaaactccatatcagaagaaataactttataacaattttttttaataatgaaaaatattttcgtgacaagtgagctctaaattctctttattgtaaaagagatgtaaaggttttatattctaaatcctagtaaaattgacagtgatttttaaatataatgcatcttcctttgtctgcttagtaaaaaatttcatttcataattttggcaagctctgtagtggatccaaagtatctttgagttcttgcaaactacaagttgtttcctttccagaaggcttgatttcattaggagacccctctattgagttctaaatagtttatcttagaaagccttgggtcattcacaggtatccaaccagccattgtttagtttgtttttgaaggggtttgataatgctttttaagttgtacagaatgcttaatccatcttattactgtcctgagccatgtaatatgcctgcatcgtgttggggaaatgtttgggaaatataagccagcataacgtgtaaagctcactctttcaccctggaacagacaagaggtgggcttaatagaggcagagactggggatatacctttgtttccctagcatttttatttatttatttttattttattttattttttgagatggagtttcactcttgttgcccaggctgggggtgcaatggcgcaatctttgctcactgcaacccctgcctcccgggctcaagcgattctcctgcctcagcctctcgagtagctgggattacaggcatgcgtcaccactcccagctaattttgtattttcagtagagacagggtttccccatgttggttaggctggtctcgaactcccaacctcaggtgatccgcccacctcagctctcaaagtgctgggattacaggcgggagccactgcacatggcagcattttttaaaaattcagttttaagatctctggtttaggggagagattttattttactgaaccagttctatagaaatttattttattaggaaatttgtctttggaacaaagtggcagctataaaattatttttgttaagcctcagaaatatgaggaagcctgtaaaactctagtggggagatattaacttggagacctaatgctctgtaaatagtcatttaaactgttggttttagtggttttgtttctaaaatgttttcttttaccgtgatgcaccagtatgagatggtgctgacactttctatgaagtggttatgagcaggtttaataaatcctctatacaagtgtttgaatcaattttaaaacataaaaagtggaaatttccttttttgtagacagtaggaacaaggaattatatgcatttttactaagtagtaattttacactgaattgtaaatgtttttacagtgagttttattaatagaatgcttcaccttaaattggaaaacaataatagtcttggactaagtctttgtactaaagcatttgctataattatttttaaaaaaacaaacagatgaaaacctcagagaaggcatgtggattataagatttgtctagtaaaaattgtaattgaatatgtttaaatatttaatttctcattttggggggtttttatttttttattttttagatggtgtctcacgctatcgcccaggctggagtgcagtggcgcgaactcggctcactgcaacctccgcctcctgggttcaagcaattctccttcctcagcctcccaagtagctgggattacaggcatgcaccaccatgcccagctaatttttgtatttttagtagagatggaattttgccatgttggccaggctggtcttgaactcctgacctcaggggtgatccacccgcctcgggctcccaaagtgctgtgattacaggcatgagccaccatgcctggcctttggggggattttaattacagtattaattatagttctaggatttcccacattttatagtagtagtttgcaggatattatgtgccctaattagcagatatagacattatcaaattataatgatagtataattatccctttttaatattggggaaagaaaaatgaaaattcattagttaattactgctttgtgttgtgtgaatttattaacaaataacattattacatataggtcattgttaacaaacaaacatccctgaaaacctctgtgaaaatttaattttttatatcctgattaatatattgtgactttaggcccatttttcatgtgcttcactttgatagagttaatccataaaattgctctttactttagcttatcaaatgaagtattattttgtggactggaggccaaaaagtcaatgtgagcttctcacaggtttttaaagctccactaaaaataattatccacttgtctttacttttgttgaccagaatagttggtaactctgccagagcctgtacttacctgccaaaaacaattaaatctggttaatgcctgaaacc

SEQ ID NO: 7102 - protein, 375 aa, Homo sapiens; identical to SEQ ID NO: 7092

SEQ ID NO: 7103 - DNA, 2076 bp, Homo sapiens
cggcgagactgcacctcccagcatgccttgcagccaggactggagtcggtacttaagagtgatggggttccctagatactttaggccgtcgcatcgattatagagattgaggtggaacccggggcctgggaactggacgcacgcggagggcgaagatggaagcctggcgctgtgtgaggaagggctacggccactgtgtggtgggaagaggccgataccccatgtttccccatcactcgaggagtctgggcagagactggactacaccgtgggagaatctgcaaaggtgttgctggaacagacatatttctagttgtatgaggtggcctggacattactctcgagctccttacccatacttcagtagtaggcatttttcactaaattggagaccaccctgtttgtttgagtctagaactcagttccagtactgtaactggagacctgacaacctgagccagacatctttgattcatctctctagttacgtcatgaacgctgagggagatgagccttcatcaaaacgaagaaaacaccaaggtgtgataaagcggaattgggaatatatatgtagccatgataaagaaaaaacgaagatcctaggagacaaaaatgttgatcccaaatgtgaagacagtgagaacaagtttgacttttcagtgatgtcctataatatactttcacaagatttactggaagataactctcacctttatagacattgccggcggccagtattacactggagttttaggtttcccaatattctgaaagaaattaaacattttgatgcagacgtactttgtttgcaagaagttcaagaagatcattatggagcagagatcaggccaagtttggaatcactgggttatcactgtgaatataagatgcggacaggaaggaaacctgatggctgtgctatttgcttcaaacattccaaattttcactcttgtcagtgaacccagtggaattcttccgccctgatatttctctgttggacagagacaatgttggattagttttactcttacagcccaaaattccatatgctgcctgccctgcaatctgcgtagcaaatacgcatctgttgtataatccaaggcgaggtgatattaagctgacgcaattggcaatgctactggcagagatttccagtgttgcccaccagaaagatggcagcttctgccctattgttatgtgtggtgactttaattctgttcctggttctccactatatagtttcataaaggaaggaaaattgaattatgaaggacttcccataggaaaggtatctggccaggaacagtcttcacggggacaaagaattttatctattccaatttggcccccaaacctaggtatctcacagaactgtgtgtatgaggtacagcaggtaccaaaagtagaaaagacagacagtgatctgacacaaacacagctgaagcaaacagaggtcctagtgacagctgaaaaattgtcttcaaatttacagcaccatttcagtttgtcatctgtttattcacattactttcctgacactggaattccagaagtgaccacctgtcattcccgaagtgccataactgtggattatattttctactctgcagaaaaggaagatgttgctgggcacccaggagctgaagttgctttggttggtggcttgaaacttctagctagactgtcacttcttacagaacaagacttatggactgttaatggacttccaaacgaaaataactcttcagatcatctgcctttattggcaaagttcagacttgagctctgactctctttgatcacatactaattttctttccaatttgtattgtttttcaaagaatgtaaagttcttaagtgtatgcatgttgtttatttttgcactgtggagattctgaagcggttatgttagatgctttgaaactccatatcagaagaaataactttataacaattttttttaataatgaaaaatattttcgtgacaagtgagctctaaattctctttattgtaaaagagatgtaaaggttttatattctaaatcctagtaaaattgacagtgatttttaaatat

SEQ ID NO: 7104 - protein, 544 aa, Homo sapiens; identical to SEQ ID NO: 406

SEQ ID NO: 7105 - DNA, 4190 bp, Homo sapiens
ggaagcagagctgtgcagctgaggcgccgccgtggagccgccttggagccaccgccccctcgccgcttcgccgctgcgttggggaacctggaccgcggcggcgccgggtttccctcatgatcccgggcgggtggcggcggcggcagaggcggcgggaggatgacctcttaccgggagcggagtgccgacctggcccgtttctacactgtcaccgagccccagcgacacccgaggggctacacagtatataaggtcaccgcccgggttgtttcacgaagaaatccagaggatgtccaggagataattgtatggaagagatacagtgattttaagaaactacacaaagaactatggcaaattcacaaaaacttattccgacattcagagttgtttcctccatttgctaaaggaatagtgtttgggcgatttgatgaaactgttatcgaagagagaagacaatgtgctgaagacctgctacagttctctgccaatattcctgctctttacaatagtaaacagcttgaagactttttcaagggtggaataattaatgatagttctgaattaattggtcctgctgaagctcactcagattccctcattgatacctttcctgagtgtagtacggaaggcttctccagtgacagtgatctggtatctcttactgttgatgtggattctcttgctgagttagatgatggaatggcttccaatcaaaattctcccattagaacttttggtctcaatctttcttcggattcttcagcactaggggctgttgcttctgacagtgaacagagcaaaacagaagaagaacgggaaagtcgtagcctctttcctggcagtttaaagccgaagcttggcaagagagattatttggagaaagcaggagaattaataaagctggctttaaaaaaggaagaagaagacgactatgaagctgcttctgatttttataggaagggagttgatttactcctagaaggtgttcaaggagagtcaagccctacccgtcgagaagctgtgaagagaagaacagccgagtacctcatgcgggcagaaagtatctctagtctttatgggaaacctcagcttgatgatgtatctcagcctccaggatcactaagttcaaggcccctttggaacctaaggagccctgccgaggagctgaaggccttcagagtccttggggtgattgacaaggttttacttgtaatggacacaaggacagaacagactttcattttaaaaggtctaaggaaaagcagtgaatacagcaggaacagaaagaccatcatcccccgctgtgtgcccaacatggtgtgtctgcataagtacatcatctctgaggagtcagtatttcttgtgctgcagcatgcggaaggtggcaaactgtggtcatatatcagtaaatttctaaacagaagtcctgaagaaagctttgacatcaaggaagtgaaaaaacctacacttgcaaaagttcacctgcagcagccaacttctagtcctcaggacagcagtagctttgaatccagaggaagtgatggtggaagcatgcttaaagctctgcctttgaagagtagtcttactccaagttctcaagatgacagcaaccaggaagatgatggccaagatagctctccaaagtggccagattctggttcaagttcagaagaagaatgtactactagttatttaacattatgcaatgaatatgggcaagaaaagattgaaccagggtctttgaatgaggagcccttcatgaagactgaagggaatggtgttgatacaaaagctattaaaagcttcccagcacaccttgctgctgacagtgacagccccagcacacagctgagagctcacgagctgaagttcttccccaacgatgacccagaagcagttagttctccaagaacatcagattccctcagtagatcaaaaaatagccccatggaattctttaggatagacagtaaggatagcgcaagtgaactcctgggacttgactttggagaaaaattgtatagtctaaaatcagaacctttgaaaccattctttactcttccagatggagacagtgcttctaggagttttaatactagtgaaagcaaggtagagtttaaagctcaggacaccattagcaggggctcagatgactcagtgccagttatttcatttaaagatgctgcttttgatgatgtcagtggtactgatgaaggaagacctgatcttcttgtaaatttacctggtgaattggagtcaacaagagaagctgcagcaatgggacctactaagtttacacaaactaatatagggataatagaaaataaactcttggaagcccctgatgttttatgcctcaggcttagtactgaacaatgccaagcacatgaggagaaaggcatagaggaactgagtgatccctctgggcccaaatcctatagtataacagagaaacactatgcacaggaggatcccaggatgttatttgtagcagctgttgatcatagtagttcaggagatatgtctttgttacccagctcagatcctaagtttcaaggacttggagtggttgagtcagcagtaactgcaaacaacacagaagaaagcttattccgtatttgtagtccactctcaggtgctaatgaatatattgcaagcacagacactttaaaaacagaagaagtattgctgtttacagatcagactgatgatttggctaaagaggaaccaacttctttattccagagagactctgagactaagggtgaaagtggtttagtgctagaaggagacaaggaaatacatcagatttttgaggaccttgataaaaaattagcactagcctccaggttttacatcccagagggctgcattcaaagatgggcagctgaaatggtggtagcccttgatgctttacatagagagggaattgtgtgccgcgatttgaacccaaacaacatcttattgaatgatagaggacacattcagctaacgtattttagcaggtggagtgaggttgaagattcctgtgacagcgatgccatagagagaatgtactgtgccccagaggttggagcaatcactgaagaaactgaagcctgtgattggtggagtttgggtgctgtcctctttgaacttctcactggcaagactctggttgaatgccatccagcaggaataaatactcacactactttgaacatgccagaatgtgtctctgaagaggctcgctcactcattcaacagctcttgcagttcaatcctctggaacgacttggtgctggagttgctggtgttgaagatatcaaatctcatccattttttacccctgtggattgggcagaactgatgagatgaacgtaatgcagggttatcttcacacattctgatcttctctgtgacaggcatctccagcactgaggcacctctgactcacagttacttatggagcaccaaagcatttggataaagaccgttataggaaatgggggggaaatggctaaaagagaacaattcgtttacaattacaagatattagctaattgtgccaggggctgttatatacatatatacacaaccaaggtgtgatctgaatttaatccacatttggtgttgcagatgagttgtaaagccaactgaaagagttccttcaagaagttcctctgataggaagctagaagtgtagaatgaagttttacttgacagaaggacctttacatggcagctaacagtgctttttgctgaccaggattggtttatatgattaaattaatatttgcttaataatacactaaaagtatatgaacaatgtcatcaatgaaacttaaaagcgagaaaaaagaatatacacataatttctgacggaaaacctgtaccctgatgctgtataatgtatgttgaatgtggtcccagattatttctgtaagaagacactccatgttgtcagctttgtactctttgttgatactgcttatttagagaagggttcatataaacactcactctgtgtcttcaacagcatctttctttccccatctttctattttctgcaccctctgcttgttccctcatattctgttcttccgactcctgctaacacacatgcaacaaaaaagggaagggagtgcttatttccctttgtgtaaggactaagaaatcatgatatcaaataaacatggtgaaacatt

SEQ ID NO: 7106 - protein, 1066 aa, Homo sapiens; identical to SEQ ID NO: 408

SEQ ID NO: 7107 - DNA, 5499 bp, Homo sapiens
ggaagcagagctgtgcagctgaggcgccgccgtggagccgccttggagccaccgccccctcgccgcttcgccgctgcgttggggaacctggaccgcggcggcgccgggtttccctcatgatcccgggcgggtggcggcggcggcagaggcggcgggaggatgacctcttaccgggagcggagtgccgacctggcccgtttctacactgtcaccgagccccagcgacacccgaggggctacacagtatataaggtcaccgcccgggttgtttcacgaagaaatccagaggatgtccaggagataattgtatggaagagatacagtgattttaagaaactacacaaagaactatggcaaattcacaaaaacttattccgacattcagagttgtttcctccatttgctaaaggaatagtgtttgggcgatttgatgaaactgttatcgaagagagaagacaatgtgctgaagacctgctacagttctctgccaatattcctgctctttacaatagtaaacagcttgaagactttttcaagggtggaataattaatgatagttctgaattaattggtcctgctgaagctcactcagattccctcattgatacctttcctgagtgtagtacggaaggcttctccagtgacagtgatctggtatctcttactgttgatgtggattctcttgctgagttagatgatggaatggcttccaatcaaaattctcccattagaacttttggtctcaatctttcttcggattcttcagcactaggggctgttgcttctgacagtgaacagagcaaaacagaagaagaacgggaaagtcgtagcctctttcctggcagtttaaagccgaagcttggcaagagagattatttggagaaagcaggagaattaataaagctggctttaaaaaaggaagaagaagacgactatgaagctgcttctgatttttataggaagggagttgatttactcctagaaggtgttcaaggagagtcaagccctacccgtcgagaagctgtgaagagaagaacagccgagtacctcatgcgggcagaaagtatctctagtctttatgggaaacctcagcttgatgatgtatctcagcctccaggatcactaagttcaaggcccctttggaacctaaggagccctgccgaggagctgaaggccttcagagtccttggggtgattgacaaggttttacttgtaatggacacaaggacagaacagactttcattttaaaaggtctaaggaaaagcagtgaatacagcaggaacagaaagaccatcatcccccgctgtgtgcccaacatggtgtgtctgcataagtacatcatctctgaggagtcagtatttcttgtgctgcagcatgcggaaggtggcaaactgtggtcatatatcagtaaatttctaaacagaagtcctgaagaaagctttgacatcaaggaagtgaaaaaacctacacttgcaaaagttcacctgcagcagccaacttctagtcctcaggacagcagtagctttgaatccagaggaagtgatggtggaagcatgcttaaagctctgcctttgaagagtagtcttactccaagttctcaagatgacagcaaccaggaagatgatggccaagatagctctccaaagtggccagattctggttcaagttcagaagaagaatgtactactagttatttaacattatgcaatgaatatgggcaagaaaagattgaaccagggtctttgaatgaggagcccttcatgaagactgaagggaatggtgttgatacaaaagctattaaaagcttcccagcacaccttgctgctgacagtgacagccccagcacacagctgagagctcacgagctgaagttcttccccaacgatgacccagaagcagttagttctccaagaacatcagattccctcagtagatcaaaaaatagccccatggaattctttaggatagacagtaaggatagcgcaagtgaactcctgggacttgactttggagaaaaattgtatagtctaaaatcagaacctttgaaaccattctttactcttccagatggagacagtgcttctaggagttttaatactagtgaaagcaaggtagagtttaaagctcaggacaccattagcaggggctcagatgactcagtgccagttatttcatttaaagatgctgcttttgatgatgtcagtggtactgatgaaggaagacctgatcttcttgtaaatttacctggtgaattggagtcaacaagagaagctgcagcaatgggacctactaagtttacacaaactaatatagggataatagaaaataaactcttggaagcccctgatgttttatgcctcaggcttagtactgaacaatgccaagcacatgaggagaaaggcatagaggaactgagtgatccctctgggcccaaatcctatagtataacagagaaacactatgcacaggaggatcccaggatgttatttgtagcagctgttgatcatagtagttcaggagatatgtctttgttacccagctcagatcctaagtttcaaggacttggagtggttgagtcagcagtaactgcaaacaacacagaagaaagcttattccgtatttgtagtccactctcaggtgctaatgaatatattgcaagcacagacactttaaaaacagaagaagtattgctgtttacagatcagactgatgatttggctaaagaggaaccaacttctttattccagagagactctgagactaagggtgaaagtggtttagtgctagaaggagacaaggaaatacatcagatttttgaggaccttgataaaaaattagcactagcctccaggttttacatcccagagggctgcattcaaagatgggcagctgaaatggtggtagcccttgatgctttacatagagagggaattgtgtgccgcgatttgaacccaaacaacatcttattgaatgatagaggacacattcagctaacgtattttagcaggtggagtgaggttgaagattcctgtgacagcgatgccatagagagaatgtactgtgccccagaggttggagcaatcactgaagaaactgaagcctgtgattggtggagtttgggtgctgtcctctttgaacttctcactggcaagactctggttgaatgccatccagcaggaataaatactcacactactttgaacatgccagaatgtgtctctgaagaggctcgctcactcattcaacagctcttgcagttcaatcctctggaacgacttggtgctggagttgctggtgttgaagatatcaaatctcatccattttttacccctgtggattgggcagaactgatgagatgaacgtaatgcagggttatcttcacacattctgatcttctctgtgacaggcatctccagcactgaggcacctctgactcacagttacttatggagcaccaaagcatttggataaagaccgttataggaaatgggggggaaatggctaaaagagaacaattcgtttacaattacaagatattagctaattgtgccaggggctgttatatacatatatacacaaccaaggtgtgatctgaatttaatccacatttggtgttgcagatgagttgtaaagccaactgaaagagttccttcaagaagttcctctgataggaagctagaagtgtagaatgaagttttacttgacagaaggacctttacatggcagctaacagtgctttttgctgaccaggattggtttatatgattaaattaatatttgcttaataatacactaaaagtatatgaacaatgtcatcaatgaaacttaaaagcgagaaaaaagaatatacacataatttctgacggaaaacctgtaccctgatgctgtataatgtatgttgaatgtggtcccagattatttctgtaagaagacactccatgttgtcagctttgtactctttgttgatactgcttatttagagaagggttcatataaacactcactctgtgtcttcaacagcatctttctttccccatctttctattttctgcaccctctgcttgttccctcatattctgttcttccgactcctgctaacacacatgcaacaaaaaagggaagggagtgcttatttccctttgtgtaaggactaagaaatcatgatatcaaataaacatggtgaaacattagatctcttcttcatttaataaccctcccccctttttttccttgaagaaatgcgtctgttcctttccttgtgaaatattatcagtttctaccattgcttctcatgcttgactttgttttactttttggcttggtatactaagaagcaaaggatctcatctaaatggaattgaatggcagtcctagtttgttacttatggtgatgagattttcagatttgaactaatctatttgacgtgatttagaaagaatgtaagtattcacacatctccaaacatttgtatttgttacttctttttgttgctaaggtagctcctgtagttatgcattgttgcaaaaatttacaaatgttttaaaagtgttaacatctgtttttttttaaacgttagccaaagaagaagtcactatttccaagttagaaaccaccagaaataattgaaatttttgatatgttctaatcttctttgcatttttgagatctgtgtgagagcccaaccccactccaggagcatctgtacagcttccatctgccatcgaccaggtcctctcatcaaattaaatggaacagaaaatgctctagtgaaacaaaggaaatgtgcaagcatttttcctttttctattattctatttccctttttcctttttggcccccttataatccaaaccccagctgaaaggctgcaacaacaccaggttggggagcaggtcaccaggatcatagttcagtcaaaatgacatcactccctggaactagatttcaactcactagtcccctggcctcataacaggaacttatgcaggtgagacacaagaatgacttcctgtgtaggactagtaggaaatctgcaagtacttagagctggccattacagaacttccttccagaagtgccctgtgacatgaaagtaggacttcacaactaaggtgaagatccctgccctaccacatgatttgagtctcttggattcaaaggacattaatgtcaacagatggttgccatgtcagtctgttgacacaattccattgcttcagtttctccccttttctctctatatgtttggttggagcttgtgcctaatgtaaatacatcattcataattagaatggacattaattattttagtaataaacacaggataaatagctttggggtgatgaaccagagtctgtttttattttatggtgtgtacatattttaagctgtacttctgtgaatggtactgatttttgtggttgttttttttttatattttgtttgtttaagcagaagagtggaatatggggtcaaaatcataaaagaagttgccatg

SEQ ID NO: 7108 - protein, 1066 aa, Homo sapiens; identical to SEQ ID NO: 408

SEQ ID NO: 7109 - DNA, 4138 bp, Homo sapiens
agctgaggcgccgccgtggagccgccttggagccaccgccccctcgccgcttcgccgctgcgttggggaacctggaccgcggcggcgccgggtttccctcatgatcccgggcgggtggcggcggcggcagaggcggcgggaggatgacctcttaccgggagcggagtgccgacctggcccgtttctacactgtcaccgagccccagcgacacccgaggggctacacagtatataaggtcaccgcccggataattgtatggaagagatacagtgattttaagaaactacacaaagaactatggcaaattcacaaaaacttattccgacattcagagttgtttcctccatttgctaaaggaatagtgtttgggcgatttgatgaaactgttatcgaagagagaagacaatgtgctgaagacctgctacagttctctgccaatattcctgctctttacaatagtaaacagcttgaagactttttcaagggtggaataattaatgatagttctgaattaattggtcctgctgaagctcactcagattccctcattgatacctttcctgagtgtagtacggaaggcttctccagtgacagtgatctggtatctcttactgttgatgtggattctcttgctgagttagatgatggaatggcttccaatcaaaattctcccattagaacttttggtctcaatctttcttcggattcttcagcactaggggctgttgcttctgacagtgaacagagcaaaacagaagaagaacgggaaagtcgtagcctctttcctggcagtttaaagccgaagcttggcaagagagattatttggagaaagcaggagaattaataaagctggctttaaaaaaggaagaagaagacgactatgaagctgcttctgatttttataggaagggagttgatttactcctagaaggtgttcaaggagagtcaagccctacccgtcgagaagctgtgaagagaagaacagccgagtacctcatgcgggcagaaagtatctctagtctttatgggaaacctcagcttgatgatgtatctcagcctccaggatcactaagttcaaggcccctttggaacctaaggagccctgccgaggagctgaaggccttcagagtccttggggtgattgacaaggttttacttgtaatggacacaaggacagaacagactttcattttaaaaggtctaaggaaaagcagtgaatacagcaggaacagaaagaccatcatcccccgctgtgtgcccaacatggtgtgtctgcataagtacatcatctctgaggagtcagtatttcttgtgctgcagcatgcggaaggtggcaaactgtggtcatatatcagtaaatttctaaacagaagtcctgaagaaagctttgacatcaaggaagtgaaaaaacctacacttgcaaaagttcacctgcagcagccaacttctagtcctcaggacagcagtagctttgaatccagaggaagtgatggtggaagcatgcttaaagctctgcctttgaagagtagtcttactccaagttctcaagatgacagcaaccaggaagatgatggccaagatagctctccaaagtggccagattctggttcaagttcagaagaagaatgtactactagttatttaacattatgcaatgaatatgggcaagaaaagattgaaccagggtctttgaatgaggagcccttcatgaagactgaagggaatggtgttgatacaaaagctattaaaagcttcccagcacaccttgctgctgacagtgacagccccagcacacagctgagagctcacgagctgaagttcttccccaacgatgacccagaagcagttagttctccaagaacatcagattccctcagtagatcaaaaaatagccccatggaattctttaggatagacagtaaggatagcgcaagtgaactcctgggacttgactttggagaaaaattgtatagtctaaaatcagaacctttgaaaccattctttactcttccagatggagacagtgcttctaggagttttaatactagtgaaagcaaggtagagtttaaagctcaggacaccattagcaggggctcagatgactcagtgccagttatttcatttaaagatgctgcttttgatgatgtcagtggtactgatgaaggaagacctgatcttcttgtaaatttacctggtgaattggagtcaacaagagaagctgcagcaatgggacctactaagtttacacaaactaatatagggataatagaaaataaactcttggaagcccctgatgttttatgcctcaggcttagtactgaacaatgccaagcacatgaggagaaaggcatagaggaactgagtgatccctctgggcccaaatcctatagtataacagagaaacactatgcacaggaggatcccaggatgttatttgtagcagctgttgatcatagtagttcaggagatatgtctttgttacccagctcagatcctaagtttcaaggacttggagtggttgagtcagcagtaactgcaaacaacacagaagaaagcttattccgtatttgtagtccactctcaggtgctaatgaatatattgcaagcacagacactttaaaaacagaagaagtattgctgtttacagatcagactgatgatttggctaaagaggaaccaacttctttattccagagagactctgagactaagggtgaaagtggtttagtgctagaaggagacaaggaaatacatcagatttttgaggaccttgataaaaaattagcactagcctccaggttttacatcccagagggctgcattcaaagatgggcagctgaaatggtggtagcccttgatgctttacatagagagggaattgtgtgccgcgatttgaacccaaacaacatcttattgaatgatagaggacacattcagctaacgtattttagcaggtggagtgaggttgaagattcctgtgacagcgatgccatagagagaatgtactgtgccccagaggttggagcaatcactgaagaaactgaagcctgtgattggtggagtttgggtgctgtcctctttgaacttctcactggcaagactctggttgaatgccatccagcaggaataaatactcacactactttgaacatgccagaatgtgtctctgaagaggctcgctcactcattcaacagctcttgcagttcaatcctctggaacgacttggtgctggagttgctggtgttgaagatatcaaatctcatccattttttacccctgtggattgggcagaactgatgagatgaacgtaatgcagggttatcttcacacattctgatcttctctgtgacaggcatctccagcactgaggcacctctgactcacagttacttatggagcaccaaagcatttggataaagaccgttataggaaatgggggggaaatggctaaaagagaacaattcgtttacaattacaagatattagctaattgtgccaggggctgttatatacatatatacacaaccaaggtgtgatctgaatttaatccacatttggtgttgcagatgagttgtaaagccaactgaaagagttccttcaagaagttcctctgataggaagctagaagtgtagaatgaagttttacttgacagaaggacctttacatggcagctaacagtgctttttgctgaccaggattggtttatatgattaaattaatatttgcttaataatacactaaaagtatatgaacaatgtcatcaatgaaacttaaaagcgagaaaaaagaatatacacataatttctgacggaaaacctgtaccctgatgctgtataatgtatgttgaatgtggtcccagattatttctgtaagaagacactccatgttgtcagctttgtactctttgttgatactgcttatttagagaagggttcatataaacactcactctgtgtcttcaacagcatctttctttccccatctttctattttctgcaccctctgcttgttccctcatattctgttcttccgactcctgctaacacacatgcaacaaaaaagggaagggagtgcttatttccctttgtgtaaggactaagaaatcatgatatcaaataaacatggtgaaacatt

SEQ ID NO: 7110 - protein, 1054 aa, Homo sapiens
MTSYRERSADLARFYTVTEPQRHPRGYTVYKVTARIIVWKRYSDFKKLHKELWQIHKNLFRHSELFPPFAKGIVFGRFDETVIEERRQCAEDLLQFSANIPALYNSKQLEDFFKGGIINDSSELIGPAEAHSDSLIDTFPECSTEGFSSDSDLVSLTVDVDSLAELDDGMASNQNSPIRTFGLNLSSDSSALGAVASDSEQSKTEEERESRSLFPGSLKPKLGKRDYLEKAGELIKLALKKEEEDDYEAASDFYRKGVDLLLEGVQGESSPTRREAVKRRTAEYLMRAESISSLYGKPQLDDVSQPPGSLSSRPLWNLRSPAEELKAFRVLGVIDKVLLVMDTRTEQTFILKGLRKSSEYSRNRKTIIPRCVPNMVCLHKYIISEESVFLVLQHAEGGKLWSYISKFLNRSPEESFDIKEVKKPTLAKVHLQQPTSSPQDSSSFESRGSDGGSMLKALPLKSSLTPSSQDDSNQEDDGQDSSPKWPDSGSSSEEECTTSYLTLCNEYGQEKIEPGSLNEEPFMKTEGNGVDTKAIKSFPAHLAADSDSPSTQLRAHELKFFPNDDPEAVSSPRTSDSLSRSKNSPMEFFRIDSKDSASELLGLDFGEKLYSLKSEPLKPFFTLPDGDSASRSFNTSESKVEFKAQDTISRGSDDSVPVISFKDAAFDDVSGTDEGRPDLLVNLPGELESTREAAAMGPTKFTQTNIGIIENKLLEAPDVLCLRLSTEQCQAHEEKGIEELSDPSGPKSYSITEKHYAQEDPRMLFVAAVDHSSSGDMSLLPSSDPKFQGLGVVESAVTANNTEESLFRICSPLSGANEYIASTDTLKTEEVLLFTDQTDDLAKEEPTSLFQRDSETKGESGLVLEGDKEIHQIFEDLDKKLALASRFYIPEGCIQRWAAEMVVALDALHREGIVCRDLNPNNILLNDRGHIQLTYFSRWSEVEDSCDSDAIERMYCAPEVGAITEETEACDWWSLGAVLFELLTGKTLVECHPAGINTHTTLNMPECVSEEARSLIQQLLQFNPLERLGAGVAGVEDIKSHPFFTPVDWAELMR

SEQ ID NO: 7111 - DNA, 5447 bp, Homo sapiens
agctgaggcgccgccgtggagccgccttggagccaccgccccctcgccgcttcgccgctgcgttggggaacctggaccgcggcggcgccgggtttccctcatgatcccgggcgggtggcggcggcggcagaggcggcgggaggatgacctcttaccgggagcggagtgccgacctggcccgtttctacactgtcaccgagccccagcgacacccgaggggctacacagtatataaggtcaccgcccggataattgtatggaagagatacagtgattttaagaaactacacaaagaactatggcaaattcacaaaaacttattccgacattcagagttgtttcctccatttgctaaaggaatagtgtttgggcgatttgatgaaactgttatcgaagagagaagacaatgtgctgaagacctgctacagttctctgccaatattcctgctctttacaatagtaaacagcttgaagactttttcaagggtggaataattaatgatagttctgaattaattggtcctgctgaagctcactcagattccctcattgatacctttcctgagtgtagtacggaaggcttctccagtgacagtgatctggtatctcttactgttgatgtggattctcttgctgagttagatgatggaatggcttccaatcaaaattctcccattagaacttttggtctcaatctttcttcggattcttcagcactaggggctgttgcttctgacagtgaacagagcaaaacagaagaagaacgggaaagtcgtagcctctttcctggcagtttaaagccgaagcttggcaagagagattatttggagaaagcaggagaattaataaagctggctttaaaaaaggaagaagaagacgactatgaagctgcttctgatttttataggaagggagttgatttactcctagaaggtgttcaaggagagtcaagccctacccgtcgagaagctgtgaagagaagaacagccgagtacctcatgcgggcagaaagtatctctagtctttatgggaaacctcagcttgatgatgtatctcagcctccaggatcactaagttcaaggcccctttggaacctaaggagccctgccgaggagctgaaggccttcagagtccttggggtgattgacaaggttttacttgtaatggacacaaggacagaacagactttcattttaaaaggtctaaggaaaagcagtgaatacagcaggaacagaaagaccatcatcccccgctgtgtgcccaacatggtgtgtctgcataagtacatcatctctgaggagtcagtatttcttgtgctgcagcatgcggaaggtggcaaactgtggtcatatatcagtaaatttctaaacagaagtcctgaagaaagctttgacatcaaggaagtgaaaaaacctacacttgcaaaagttcacctgcagcagccaacttctagtcctcaggacagcagtagctttgaatccagaggaagtgatggtggaagcatgcttaaagctctgcctttgaagagtagtcttactccaagttctcaagatgacagcaaccaggaagatgatggccaagatagctctccaaagtggccagattctggttcaagttcagaagaagaatgtactactagttatttaacattatgcaatgaatatgggcaagaaaagattgaaccagggtctttgaatgaggagcccttcatgaagactgaagggaatggtgttgatacaaaagctattaaaagcttcccagcacaccttgctgctgacagtgacagccccagcacacagctgagagctcacgagctgaagttcttccccaacgatgacccagaagcagttagttctccaagaacatcagattccctcagtagatcaaaaaatagccccatggaattctttaggatagacagtaaggatagcgcaagtgaactcctgggacttgactttggagaaaaattgtatagtctaaaatcagaacctttgaaaccattctttactcttccagatggagacagtgcttctaggagttttaatactagtgaaagcaaggtagagtttaaagctcaggacaccattagcaggggctcagatgactcagtgccagttatttcatttaaagatgctgcttttgatgatgtcagtggtactgatgaaggaagacctgatcttcttgtaaatttacctggtgaattggagtcaacaagagaagctgcagcaatgggacctactaagtttacacaaactaatatagggataatagaaaataaactcttggaagcccctgatgttttatgcctcaggcttagtactgaacaatgccaagcacatgaggagaaaggcatagaggaactgagtgatccctctgggcccaaatcctatagtataacagagaaacactatgcacaggaggatcccaggatgttatttgtagcagctgttgatcatagtagttcaggagatatgtctttgttacccagctcagatcctaagtttcaaggacttggagtggttgagtcagcagtaactgcaaacaacacagaagaaagcttattccgtatttgtagtccactctcaggtgctaatgaatatattgcaagcacagacactttaaaaacagaagaagtattgctgtttacagatcagactgatgatttggctaaagaggaaccaacttctttattccagagagactctgagactaagggtgaaagtggtttagtgctagaaggagacaaggaaatacatcagatttttgaggaccttgataaaaaattagcactagcctccaggttttacatcccagagggctgcattcaaagatgggcagctgaaatggtggtagcccttgatgctttacatagagagggaattgtgtgccgcgatttgaacccaaacaacatcttattgaatgatagaggacacattcagctaacgtattttagcaggtggagtgaggttgaagattcctgtgacagcgatgccatagagagaatgtactgtgccccagaggttggagcaatcactgaagaaactgaagcctgtgattggtggagtttgggtgctgtcctctttgaacttctcactggcaagactctggttgaatgccatccagcaggaataaatactcacactactttgaacatgccagaatgtgtctctgaagaggctcgctcactcattcaacagctcttgcagttcaatcctctggaacgacttggtgctggagttgctggtgttgaagatatcaaatctcatccattttttacccctgtggattgggcagaactgatgagatgaacgtaatgcagggttatcttcacacattctgatcttctctgtgacaggcatctccagcactgaggcacctctgactcacagttacttatggagcaccaaagcatttggataaagaccgttataggaaatgggggggaaatggctaaaagagaacaattcgtttacaattacaagatattagctaattgtgccaggggctgttatatacatatatacacaaccaaggtgtgatctgaatttaatccacatttggtgttgcagatgagttgtaaagccaactgaaagagttccttcaagaagttcctctgataggaagctagaagtgtagaatgaagttttacttgacagaaggacctttacatggcagctaacagtgctttttgctgaccaggattggtttatatgattaaattaatatttgcttaataatacactaaaagtatatgaacaatgtcatcaatgaaacttaaaagcgagaaaaaagaatatacacataatttctgacggaaaacctgtaccctgatgctgtataatgtatgttgaatgtggtcccagattatttctgtaagaagacactccatgttgtcagctttgtactctttgttgatactgcttatttagagaagggttcatataaacactcactctgtgtcttcaacagcatctttctttccccatctttctattttctgcaccctctgcttgttccctcatattctgttcttccgactcctgctaacacacatgcaacaaaaaagggaagggagtgcttatttccctttgtgtaaggactaagaaatcatgatatcaaataaacatggtgaaacattagatctcttcttcatttaataaccctcccccctttttttccttgaagaaatgcgtctgttcctttccttgtgaaatattatcagtttctaccattgcttctcatgcttgactttgttttactttttggcttggtatactaagaagcaaaggatctcatctaaatggaattgaatggcagtcctagtttgttacttatggtgatgagattttcagatttgaactaatctatttgacgtgatttagaaagaatgtaagtattcacacatctccaaacatttgtatttgttacttctttttgttgctaaggtagctcctgtagttatgcattgttgcaaaaatttacaaatgttttaaaagtgttaacatctgtttttttttaaacgttagccaaagaagaagtcactatttccaagttagaaaccaccagaaataattgaaatttttgatatgttctaatcttctttgcatttttgagatctgtgtgagagcccaaccccactccaggagcatctgtacagcttccatctgccatcgaccaggtcctctcatcaaattaaatggaacagaaaatgctctagtgaaacaaaggaaatgtgcaagcatttttcctttttctattattctatttccctttttcctttttggcccccttataatccaaaccccagctgaaaggctgcaacaacaccaggttggggagcaggtcaccaggatcatagttcagtcaaaatgacatcactccctggaactagatttcaactcactagtcccctggcctcataacaggaacttatgcaggtgagacacaagaatgacttcctgtgtaggactagtaggaaatctgcaagtacttagagctggccattacagaacttccttccagaagtgccctgtgacatgaaagtaggacttcacaactaaggtgaagatccctgccctaccacatgatttgagtctcttggattcaaaggacattaatgtcaacagatggttgccatgtcagtctgttgacacaattccattgcttcagtttctccccttttctctctatatgtttggttggagcttgtgcctaatgtaaatacatcattcataattagaatggacattaattattttagtaataaacacaggataaatagctttggggtgatgaaccagagtctgtttttattttatggtgtgtacatattttaagctgtacttctgtgaatggtactgatttttgtggttgttttttttttatattttgtttgtttaagcagaagagtggaatatggggtcaaaatcataaaagaagttgccatg

SEQ ID NO: 7112 - protein, 1054 aa, Homo sapiens; identical to SEQ ID NO: 7110

SEQ ID NO: 7113 - DNA, 3845 bp, Homo sapiens
actcttttataataacaactgttggtgaaccattcatctgaaaactcttataattgtatggaagagatacagtgattttaagaaactacacaaagaactatggcaaattcacaaaaacttattccgacattcagagttgtttcctccatttgctaaaggaatagtgtttgggcgatttgatgaaactgttatcgaagagagaagacaatgtgctgaagacctgctacagttctctgccaatattcctgctctttacaatagtaaacagcttgaagactttttcaaggcttctccagtgacagtgatctggtatctcttactgttgatgtggattctcttgctgagttagatgatggaatggcttccaatcaaaattctcccattagaacttttggtctcaatctttcttcggattcttcagcactaggggctgttgcttctgacagtgaacagagcaaaacagaagaagaacgggaaagtcgtagcctctttcctggcagtttaaagccgaagcttggcaagagagattatttggagaaagcaggagaattaataaagctggctttaaaaaaggaagaagaagacgactatgaagctgcttctgatttttataggaagggagttgatttactcctagaaggtgttcaaggagagtcaagccctacccgtcgagaagctgtgaagagaagaacagccgagtacctcatgcgggcagaaagtatctctagtctttatgggaaacctcagcttgatgatgtatctcagcctccaggatcactaagttcaaggcccctttggaacctaaggagccctgccgaggagctgaaggccttcagagtccttggggtgattgacaaggttttacttgtaatggacacaaggacagaacagactttcattttaaaaggtctaaggaaaagcagtgaatacagcaggaacagaaagaccatcatcccccgctgtgtgcccaacatggtgtgtctgcataagtacatcatctctgaggagtcagtatttcttgtgctgcagcatgcggaaggtggcaaactgtggtcatatatcagtaaatttctaaacagaagtcctgaagaaagctttgacatcaaggaagtgaaaaaacctacacttgcaaaagttcacctgcagcagccaacttctagtcctcaggacagcagtagctttgaatccagaggaagtgatggtggaagcatgcttaaagctctgcctttgaagagtagtcttactccaagttctcaagatgacagcaaccaggaagatgatggccaagatagctctccaaagtggccagattctggttcaagttcagaagaagaatgtactactagttatttaacattatgcaatgaatatgggcaagaaaagattgaaccagggtctttgaatgaggagcccttcatgaagactgaagggaatggtgttgatacaaaagctattaaaagcttcccagcacaccttgctgctgacagtgacagccccagcacacagctgagagctcacgagctgaagttcttccccaacgatgacccagaagcagttagttctccaagaacatcagattccctcagtagatcaaaaaatagccccatggaattctttaggatagacagtaaggatagcgcaagtgaactcctgggacttgactttggagaaaaattgtatagtctaaaatcagaacctttgaaaccattctttactcttccagatggagacagtgcttctaggagttttaatactagtgaaagcaaggtagagtttaaagctcaggacaccattagcaggggctcagatgactcagtgccagttatttcatttaaagatgctgcttttgatgatgtcagtggtactgatgaaggaagacctgatcttcttgtaaatttacctggtgaattggagtcaacaagagaagctgcagcaatgggacctactaagtttacacaaactaatatagggataatagaaaataaactcttggaagcccctgatgttttatgcctcaggcttagtactgaacaatgccaagcacatgaggagaaaggcatagaggaactgagtgatccctctgggcccaaatcctatagtataacagagaaacactatgcacaggaggatcccaggatgttatttgtagcagctgttgatcatagtagttcaggagatatgtctttgttacccagctcagatcctaagtttcaaggacttggagtggttgagtcagcagtaactgcaaacaacacagaagaaagcttattccgtatttgtagtccactctcaggtgctaatgaatatattgcaagcacagacactttaaaaacagaagaagtattgctgtttacagatcagactgatgatttggctaaagaggaaccaacttctttattccagagagactctgagactaagggtgaaagtggtttagtgctagaaggagacaaggaaatacatcagatttttgaggaccttgataaaaaattagcactagcctccaggttttacatcccagagggctgcattcaaagatgggcagctgaaatggtggtagcccttgatgctttacatagagagggaattgtgtgccgcgatttgaacccaaacaacatcttattgaatgatagaggacacattcagctaacgtattttagcaggtggagtgaggttgaagattcctgtgacagcgatgccatagagagaatgtactgtgccccagaggttggagcaatcactgaagaaactgaagcctgtgattggtggagtttgggtgctgtcctctttgaacttctcactggcaagactctggttgaatgccatccagcaggaataaatactcacactactttgaacatgccagaatgtgtctctgaagaggctcgctcactcattcaacagctcttgcagttcaatcctctggaacgacttggtgctggagttgctggtgttgaagatatcaaatctcatccattttttacccctgtggattgggcagaactgatgagatgaacgtaatgcagggttatcttcacacattctgatcttctctgtgacaggcatctccagcactgaggcacctctgactcacagttacttatggagcaccaaagcatttggataaagaccgttataggaaatgggggggaaatggctaaaagagaacaattcgtttacaattacaagatattagctaattgtgccaggggctgttatatacatatatacacaaccaaggtgtgatctgaatttaatccacatttggtgttgcagatgagttgtaaagccaactgaaagagttccttcaagaagttcctctgataggaagctagaagtgtagaatgaagttttacttgacagaaggacctttacatggcagctaacagtgctttttgctgaccaggattggtttatatgattaaattaatatttgcttaataatacactaaaagtatatgaacaatgtcatcaatgaaacttaaaagcgagaaaaaagaatatacacataatttctgacggaaaacctgtaccctgatgctgtataatgtatgttgaatgtggtcccagattatttctgtaagaagacactccatgttgtcagctttgtactctttgttgatactgcttatttagagaagggttcatataaacactcactctgtgtcttcaacagcatctttctttccccatctttctattttctgcaccctctgcttgttccctcatattctgttcttccgactcctgctaacacacatgcaacaaaaaagggaagggagtgcttatttccctttgtgtaaggactaagaaatcatgatatcaaataaacatggtgaaacatt

SEQ ID NO: 7114 - protein, 885 aa, Homo sapiens
MASNQNSPIRTFGLNLSSDSSALGAVASDSEQSKTEEERESRSLFPGSLKPKLGKRDYLEKAGELIKLALKKEEEDDYEAASDFYRKGVDLLLEGVQGESSPTRREAVKRRTAEYLMRAESISSLYGKPQLDDVSQPPGSLSSRPLWNLRSPAEELKAFRVLGVIDKVLLVMDTRTEQTFILKGLRKSSEYSRNRKTIIPRCVPNMVCLHKYIISEESVFLVLQHAEGGKLWSYISKFLNRSPEESFDIKEVKKPTLAKVHLQQPTSSPQDSSSFESRGSDGGSMLKALPLKSSLTPSSQDDSNQEDDGQDSSPKWPDSGSSSEEECTTSYLTLCNEYGQEKIEPGSLNEEPFMKTEGNGVDTKAIKSFPAHLAADSDSPSTQLRAHELKFFPNDDPEAVSSPRTSDSLSRSKNSPMEFFRIDSKDSASELLGLDFGEKLYSLKSEPLKPFFTLPDGDSASRSFNTSESKVEFKAQDTISRGSDDSVPVISFKDAAFDDVSGTDEGRPDLLVNLPGELESTREAAAMGPTKFTQTNIGIIENKLLEAPDVLCLRLSTEQCQAHEEKGIEELSDPSGPKSYSITEKHYAQEDPRMLFVAAVDHSSSGDMSLLPSSDPKFQGLGVVESAVTANNTEESLFRICSPLSGANEYIASTDTLKTEEVLLFTDQTDDLAKEEPTSLFQRDSETKGESGLVLEGDKEIHQIFEDLDKKLALASRFYIPEGCIQRWAAEMVVALDALHREGIVCRDLNPNNILLNDRGHIQLTYFSRWSEVEDSCDSDAIERMYCAPEVGAITEETEACDWWSLGAVLFELLTGKTLVECHPAGINTHTTLNMPECVSEEARSLIQQLLQFNPLERLGAGVAGVEDIKSHPFFTPVDWAELMR

SEQ ID NO: 7115 - DNA, 8192 bp, Homo sapiens
tctgagcttcaggtaaccaagtgtttgctctgcagaatactttacctgggcacccaagtcttccttccagcattcctgctgctacagcctatttgctgagtaaccaggggttacagcagcgttgccaggcaacgagggacagcggtcctgttgaagagccatttgtcacactgaggggactggttgaaatgcaataaagaaatgataccagcagctactcatgtcttcgccattgctaagaacgtcgttggtattaccttactctgagaacgtgtctgcagtttccagaaaatggagtatcgcaacatcacttaaagtaccctgcttcaaagtattgctggcaagtggcgtgggcctgattatttatttagaaatgctttatcaggaggagaatgcttttttgtaaacatgaattgcccagttctttcattgggctctggcttcttgtttcaggtcattgaaatgttgatctttgcctattttgcttcaatatccttgactgagtcacgaggtcttttcccaaggctggagaacgtgggagctttcaagaaagtttccatcgtgccaacccaagcagtatgtggactcccagaccgaagcactttttgtcacagctctgctgctgctgaaagtattcagttctgtacccagcggttttgtattcaggattgcccatacagatcttcacaccctacctacactgcccttttctcagcaggcctcagtagctgcatcacaccagacaagaatgatctgcatcctaacgcccatagcaattctgcaagttttatttttggaaatcacaagagctgcttttcttctcctccttctccaaagctgatggcatcatttaccttagctgtatggctgaaacctgagcaacaaggtgtaatgtgtgttatagaaaagacagtagatgggcagattgtgttcaaacttacaatatctgagaaagagaccatgttttattatcgcacagtaaatggtttgcaacctccaataaaagtaatgacactggggagaattcttgtgaagaaatggattcatcttagtgtgcaggtgcatcagacaaaaatcagcttctttatcaatggcgtggagaaggatcatacacctttcaatgcaagaactctaagtggttcaattacagattttgcatctggtactgtgcaaataggacagagtttaaatggtttagagcagtttgtcggaagaatgcaagattttcgattataccaagtggcacttacaaacagagagattctggaagtcttctctggagatcttctcagattgcatgcccaatcacattgccgttgccctggcagccacccgcgggtccaccctttggcacagcggtactgcattcctaatgatgcaggagacacagctgataatagagtgtcacggttgaatcctgaagcccatcctctctcttttgtcaatgataatgatgttggtacttcatgggtttcaaatgtgtttacaaacattacacagcttaatcaaggagtgactatttcagttgatttggaaaatggacagtatcaggtgttttatattatcattcagttctttagtccacaaccaacggaaataaggattcaaaggaagaaggaaaatagtttagattgggaggactggcaatattttgccaggaattgtggtgcttttggaatgaaaaacaatggagatttggaaaaacctgattctgtcaactgtcttcagctttccaattttactccatattcccgtggcaatgtcacatttagcatcctgacacctggaccaaattatcgtcctggatacaataacttctataataccccatctcttcaagagttcgtaaaagccacgcaaataaggtttcattttcatgggcagtactatacaactgagactgctgttaacctcagacacagatattatgcagtggacgaaatcaccattagtgggagatgtcagtgccatggtcatgccgataactgcgacacaacaagccagccatatagatgcctctgctcccaggagagcttcactgaaggacttcattgtgatcgctgcttgcctctttataatgacaagcctttccgccaaggtgatcaagtttacgctttcaattgtaaaccttgtcaatgcaacagccattccaaaagctgccattacaacatctctgtagacccatttccttttgagcacttcagagggggaggaggagtttgtgatgattgtgagcataacactacaggaaggaactgtgagctgtgcaaggattactttttccgacaagttggtgcagatccttcggccatagatgtttgcaaaccctgtgactgtgatacagttggcactagaaatggtagcattctttgtgatcagattggaggacagtgtaattgtaagagacacgtgtctggcaggcagtgcaatcagtgccagaatggattctacaatctacaagagttggatcctgatggctgcagtccctgtaactgcaatacctctgggacagtggatggagatattacctgtcaccaaaattcaggccagtgcaagtgcaaagcaaacgttattgggcttaggtgtgatcattgcaattttggatttaaatttctccgaagctttaatgatgttggatgtgagccctgccagtgtaacctccatggctcagtgaacaaattctgcaatcctcactctgggcagtgtgagtgcaaaaaagaagccaaaggacttcagtgtgacacctgcagagaaaacttttatgggttagatgtcaccaattgtaaggcctgtgactgtgacacagctggatccctccctgggactgtctgtaatgctaagacagggcagtgcatctgcaagcccaatgttgaagggagacagtgcaataaatgtttggagggaaacttctacctacggcaaaataattctttcctctgtctgccttgcaactgtgataagactgggacaataaatggctctctgctgtgtaacaaatcaacaggacaatgtccttgcaaattaggggtaacaggtcttcgctgtaatcagtgtgagcctcacaggtacaatttgaccattgacaattttcaacactgccagatgtgtgagtgtgattccttggggacattacctgggaccatttgtgacccaatcagtggccagtgcctgtgtgtgcctaatcgtcaaggaagaaggtgtaatcagtgtcaaccaggtttttatatttctccaggcaatgccactggctgcctgccatgctcatgccatacaactggtgcagttaatcacatctgtaatagcctgactggtcagtgtgtttgccaagatgcttccattgctgggcaacgttgtgaccaatgcaaagaccattactttggatttgatcctcagactggaagatgtcagccttgtaattgtcatctctcaggagccttgaatgaaacctgtcacttggtcacaggccagtgtttctgtaaacaatttgtcactggctcaaagtgtgatgcttgtgttcccagtgcaagccacttggatgtcaacaatctattgggttgcagcaaaactccattccagcaacctccgcccagaggacaagttcaaagttcttctgctatcaatctctcctggagtccacctgattctccaaatgcccactggcttacttacagtttactcagggatggttttgaaatctacacaacagaggatcaatacccatacagtattcaatacttcttagacacagacctgttaccatataccaaatattcctattacattgagaccaccaatgtgcatggttcaacaaggagtgtagctgtcacttacaagacaaaaccaggggtcccagagggaaacttgactttaagttatatcattcctattggctcagactctgtgacacttacctggacaacactctcaaatcaatctggtcccatagagaaatatattttgtcctgtgcccctttggctggtggtcagccatgtgtttcctacgaaggtcatgaaacctcagctaccatctggaatctggttccatttgccaagtacgatttttctgtacaggcgtgtactagcgggggctgtttacacagcttgcccattacagtgaccacagcccaggcccctccccaaagactaagtccacctaagatgcagaaaatcagttctacagaacttcatgtagaatggtctccaccagcggaactaaatggaataattataagatatgaactatacatgagaagactgagatctactaaagaaaccacatctgaggaaagtcgagtttttcagagcagtggttggctcagtcctcattcatttgtagaatcggccaatgaaaatgcattaaaacctcctcaaacaatgacaaccatcactggcttggagccatacaccaagtatgagttcagagtcttagctgtgaatatggctggaagtgtgtcttctgcctgggtctcagaaagaacgggagaatcagcacctgtattcatgatccctccttcagtctttcccctctcttcgtactctctcaatatctcctgggagaagccagcagataatgttacaagaggaaaagttgtggggtatgacatcaatatgctttctgaacaatcacctcaacagtctattcccatggcgttttcacagctgttgcacactgctaaatcccaagaactatcttacactgtagaaggactgaaaccttataggatatatgagtttactattactctctgcaattcagttggttgtgtgaccagtgcttcgggagcaggacaaactttagcagcagcaccagcacaactgaggccacctctggttaaaggaatcaacagcacaacaatccatcttaggtggtttccacctgaagaactgaatggaccctctcctatatatcagctggaaaggagagagtcatctctaccagctctgatgaccacgatgatgaaaggaatccgtttcataggaaatgggtattgtaaatttcccagctccactcacccagtcaatacagacttcactggcattaaggccagctttcgaacaaaagtgcctgaaggtttgattgtctttgcagcatcacctggcaatcaggaagagtattttgcacttcagttgaagaagggacgtctttattttctttttgatcctcaggggtcaccagtggaagtaactacaactaatgatcatggcaaacaatatagtgatggaaaatggcatgaaataattgctattaggcatcaggcttttggccaaatcactctggatgggatatatacaggttcctctgccatcctgaatggtagtactgttattggagataacacaggagtctttctgggagggctcccgcgaagttataccatcctcaggaaggatcctgagataatccaaaaaggttttgtgggctgtctcaaggatgtacattttatgaagaattacaatccgtcagctatttgggaacctctggattggcagagttctgaagaacaaatcaacgtgtataacagctgggagggatgtcccgcttcattaaatgagggagctcagttcctaggagcagggttcctggaacttcatccatatatgtttcatggtggaatgaactttgagatttcctttaagttcagaactgaccaattaaatggattgcttcttttcgtttataacaaagatggacctgattttcttgctatggagctgaaaagtggaatattgaccttccggttaaataccagtcttgcctttacacaagtggatctattgctggggctatcctattgtaatggaaagtggaataaagtcattattaaaaaggaaggctctttcatatcagcaagtgtgaatggactgatgaagcatgcatcggagtccggagaccagccactggtggtgaattcaccagtttatgtgggaggaatcccacaggaactgctgaactcttatcaacatttgtgtttggaacaaggtttcggtggttgcatgaaggatgttaaatttacacggggtgctgtcgttaacttggcatctgtgtccagcggtgctgtcagagtcaatctggatggatgcctatcaactgacagtgctgttaactgcaggggaaatgactccatcctggtttaccagggaaaagagcagagtgtttacgagggtggtctccagccttttacagaatacctgtatcgagtgatagcctcgcatgaaggaggttcagtatatagtgattggagtcgaggacgtacaacaggagcagctccacaaagtgtgccaactccctcaagagtccgcagcttaaatggatacagcattgaggtgacctgggatgaacctgttgtcagaggtgtaattgagaagtacattctgaaagcctatagtgaggacagcacccgtccaccccgcatgccctctgccagtgctgaatttgtcaatacaagcaacctcacaggcatattgacaggcttgctacccttcaaaaactatgcagtaaccctaactgcttgcactttggctggctgtactgagagctcacatgcattgaacatctctactccacaagaagccccacaagaggttcagccaccagtagccaaatcccttcccagttctttgctgctctcctggaacccacccaaaaaggcaaatggtattataactcagtactgtttatacatggatgggaggctgatctattcaggcagtgaggagaactacatagtcacagatttagcagtatttacaccccaccagtttctactaagtgcatgcacacatgtgggctgtacaaacagttcctgggtcctactgtacacagcacagctgccaccagaacacgtggattccccagttctgactgtcctggattctagaactatacacatacagtggaaacaaccaagaaaaataagtgggattctggaacgctatgtattatatatgtcaaaccatacacatgattttacaatttggagtgtcatctataacagtacagaacttttccaggatcatatgctacaatacgttttacctggtaataaatatctcatcaagctgggagcttgcacaggtggtgggtgcacagtgagtgaggccagtgaggccctaactgacgaggacatacccgaaggcgtgccagcccccaaagcccactcatattcacctgactcctttaatgtctcctggactgagcctgaatatccgaatggtgttatcacgagttatggattatatctagatggtatattaatccacaattcctcagaactcagctatcgtgcttacggatttgctccttggagtttacattccttcagagtccaagcatgcacggccaaaggttgtgctctgggcccactggtggaaaatcgaactctagaagctcctcctgaaggaacagtaaatgtgtttgtcaaaacacagggatcccggaaagcccacgtgaggtgggaagcaccttttcgccctaatggactcttaacacactcagtccttttcactgggatattctatgtagacccagtaggtaataactacacccttctgaatgtcacaaaagtcatgtacagcggagaagagacaaacctttgggtgctcatcgatgggctggttccttttaccaactatactgtacaagtgaatatttcaaatagccaaggcagcttgataactgatcctataacaattgcaatgcctccaggagctccagatggcgtgctgcctcccaggctttcatctgccactccaaccagtcttcaggttgtctggtctacaccagctcgtaataacgctcctggctctcccagataccaactccagatgaggtctggcgactccacccatggatttctagagttattttccaatccttctgcatcgttaagctatgaagtgagtgatctccaaccgtacacagagtatatgtttcggttggttgcctccaatggatttggcagtgcacatagttcttggattccattcatgaccgcagaggacaaacctggacctgtagttcctccgattcttctggatgtgaagtcaagaatgatgttggtcacctggcagcatcctagaaaatccaatggggttattacccattataacatttatctacatggccgtctatacttgagaactcctggaaatgtcactaattgcacagtgatgcatttacacccatacactgc

SEQ ID NO: 7116 - protein, 4000 aa, Homo sapiens
MNCPVLSLGSGFLFQVIEMLIFAYFASISLTESRGLFPRLENVGAFKKVSIVPTQAVCGLPDRSTFCHSSAAAESIQFCTQRFCIQDCPYRSSHPTYTALFSAGLSSCITPDKNDLHPNAHSNSASFIFGNHKSCFSSPPSPKLMASFTLAVWLKPEQQGVMCVIEKTVDGQIVFKLTISEKETMFYYRTVNGLQPPIKVMTLGRILVKKWIHLSVQVHQTKISFFINGVEKDHTPFNARTLSGSITDFASGTVQIGQSLNGLEQFVGRMQDFRLYQVALTNREILEVFSGDLLRLHAQSHCRCPGSHPRVHPLAQRYCIPNDAGDTADNRVSRLNPEAHPLSFVNDNDVGTSWVSNVFTNITQLNQGVTISVDLENGQYQVFYIIIQFFSPQPTEIRIQRKKENSLDWEDWQYFARNCGAFGMKNNGDLEKPDSVNCLQLSNFTPYSRGNVTFSILTPGPNYRPGYNNFYNTPSLQEFVKATQIRFHFHGQYYTTETAVNLRHRYYAVDEITISGRCQCHGHADNCDTTSQPYRCLCSQESFTEGLHCDRCLPLYNDKPFRQGDQVYAFNCKPCQCNSHSKSCHYNISVDPFPFEHFRGGGGVCDDCEHNTTGRNCELCKDYFFRQVGADPSAIDVCKPCDCDTVGTRNGSILCDQIGGQCNCKRHVSGRQCNQCQNGFYNLQELDPDGCSPCNCNTSGTVDGDITCHQNSGQCKCKANVIGLRCDHCNFGFKFLRSFNDVGCEPCQCNLHGSVNKFCNPHSGQCECKKEAKGLQCDTCRENFYGLDVTNCKACDCDTAGSLPGTVCNAKTGQCICKPNVEGRQCNKCLEGNFYLRQNNSFLCLPCNCDKTGTINGSLLCNKSTGQCPCKLGVTGLRCNQCEPHRYNLTIDNFQHCQMCECDSLGTLPGTICDPISGQCLCVPNRQGRRCNQCQPGFYISPGNATGCLPCSCHTTGAVNHICNSLTGQCVCQDASIAGQRCDQCKDHYFGFDPQTGRCQPCNCHLSGALNETCHLVTGQCFCKQFVTGSKCDACVPSASHLDVNNLLGCSKTPFQQPPPRGQVQSSSAINLSWSPPDSPNAHWLTYSLLRDGFEIYTTEDQYPYSIQYFLDTDLLPYTKYSYYIETTNVHGSTRSVAVTYKTKPGVPEGNLTLSYIIPIGSDSVTLTWTTLSNQSGPIEKYILSCAPLAGGQPCVSYEGHETSATIWNLVPFAKYDFSVQACTSGGCLHSLPITVTTAQAPPQRLSPPKMQKISSTELHVEWSPPAELNGIIIRYELYMRRLRSTKETTSEESRVFQSSGWLSPHSFVESANENALKPPQTMTTITGLEPYTKYEFRVLAVNMAGSVSSAWVSERTGESAPVFMIPPSVFPLSSYSLNISWEKPADNVTRGKVVGYDINMLSEQSPQQSIPMAFSQLLHTAKSQELSYTVEGLKPYRIYEFTITLCNSVGCVTSASGAGQTLAAAPAQLRPPLVKGINSTTIHLRWFPPEELNGPSPIYQLERRESSLPALMTTMMKGIRFIGNGYCKFPSSTHPVNTDFTGIKASFRTKVPEGLIVFAASPGNQEEYFALQLKKGRLYFLFDPQGSPVEVTTTNDHGKQYSDGKWHEIIAIRHQAFGQITLDGIYTGSSAILNGSTVIGDNTGVFLGGLPRSYTILRKDPEIIQKGFVGCLKDVHFMKNYNPSAIWEPLDWQSSEEQINVYNSWEGCPASLNEGAQFLGAGFLELHPYMFHGGMNFEISFKFRTDQLNGLLLFVYNKDGPDFLAMELKSGILTFRLNTSLAFTQVDLLLGLSYCNGKWNKVIIKKEGSFISASVNGLMKHASESGDQPLVVNSPVYVGGIPQELLNSYQHLCLEQGFGGCMKDVKFTRGAVVNLASVSSGAVRVNLDGCLSTDSAVNCRGNDSILVYQGKEQSVYEGGLQPFTEYLYRVIASHEGGSVYSDWSRGRTTGAAPQSVPTPSRVRSLNGYSIEVTWDEPVVRGVIEKYILKAYSEDSTRPPRMPSASAEFVNTSNLTGILTGLLPFKNYAVTLTACTLAGCTESSHALNISTPQEAPQEVQPPVAKSLPSSLLLSWNPPKKANGIITQYCLYMDGRLIYSGSEENYIVTDLAVFTPHQFLLSACTHVGCTNSSWVLLYTAQLPPEHVDSPVLTVLDSRTIHIQWKQPRKISGILERYVLYMSNHTHDFTIWSVIYNSTELFQDHMLQYVLPGNKYLIKLGACTGGGCTVSEASEALTDEDIPEGVPAPKAHSYSPDSFNVSWTEPEYPNGVITSYGLYLDGILIHNSSELSYRAYGFAPWSLHSFRVQACTAKGCALGPLVENRTLEAPPEGTVNVFVKTQGSRKAHVRWEAPFRPNGLLTHSVLFTGIFYVDPVGNNYTLLNVTKVMYSGEETNLWVLIDGLVPFTNYTVQVNISNSQGSLITDPITIAMPPGAPDGVLPPRLSSATPTSLQVVWSTPARNNAPGSPRYQLQMRSGDSTHGFLELFSNPSASLSYEVSDLQPYTEYMFRLVASNGFGSAHSSWIPFMTAEDKPGPVVPPILLDVKSRMMLVTWQHPRKSNGVITHYNIYLHGRLYLRTPGNVTNCTVMHLHPYTAYKFQVEACTSKGCSLSPESQTVWTLPGAPEGIPSPELFSDTPTSVIISWQPPTHPNGLVENFTIERRVKGKEEVTTLVTLPRSHSMRFIDKTSALSPWTKYEYRVLMSTLHGGTNSSAWVEVTTRPSRPAGVQPPVVTVLEPDAVQVTWKPPLIQNGDILSYEIHMPDPHITLTNVTSAVLSQKVTHLIPFTNYSVTIVACSGGNGYLGGCTESLPTYVTTHPTVPQNVGPLSVIPLSESYVVISWQPPSKPNGPNLRYELLRRKIQQPLASNPPEDLNRWHNIYSGTQWLYEDKGLSRFTTYEYMLFVHNSVGFTPSREVTVTTLAGLPERGANLTASVLNHTAIDVRWAKPTVQDLQGEVEYYTLFWSSATSNDSLKILPDVNSHVIGHLKPNTEYWIFISVFNGVHSINSAGLHATTCDGEPQGMLPPEVVIINSTAVRVIWTSPSNPNGVVTEYSIYVNNKLYKTGMNVPGSFILRDLSPFTIYDIQVEVCTIYACVKSNGTQITTVEDTPSDIPTPTIRGITSRSLQIDWVSPRKPNGIILGYDLLWKTWYPCAKTQKLVQDQSDELCKAVRCQKPESICGHICYSSEAKVCCNGVLYNPKPGHRCCEEKYIPFVLNSTGVCCGGRIQEAQPNHQCCSGYYARILPGEVCCPDEQHNRVSVGIGDSCCGRMPYSTSGNQICCAGRLHDGHGQKCCGRQIVSNDLECCGGEEGVVYNRLPGMFCCGQDYVNMSDTICCSASSGESKAHIKKNDPVPVKCCETELIPKSQKCCNGVGYNPLKYVCSDKISTGMMMKETKECRILCPASMEATEHCGRCDFNFTSHICTVIRGSHNSTGKASIEEMCSSAEETIHTGSVNTYSYTDVNLKPYMTYEYRISAWNSYGRGLSKAVRARTKEDVPQGVSPPTWTKIDNLEDTIVLNWRKPIQSNGPIIYYILLRNGIERFRGTSLSFSDKEGIQPFQEYSYQLKACTVAGCATSSKVVAATTQGVPESILPPSITALSAVALHLSWSVPEKSNGVIKEYQIRQVGKGLIHTDTTDRRQHTVTGLQPYTNYSFTLTACTSAGCTSSEPFLGQTLQAAPEGVWVTPRHIIINSTTVELYWSLPEKPNGLVSQYQLSRNGNLLFLGGSEEQNFTDKNLEPNSRYTYKLEVKTGGGSSASDDYIVQTPMSTPEEIYPPYNITVIGPYSIFVAWIPPGILIPEIPVEYNVLLNDGSVTPLAFSVGHHQSTLLENLTPFTQYEIRIQACQNGSCGVSSRMFVKTPEAAPMDLNSPVLKALGSACIEIKWMPPEKPNGIIINYFIYRRPAGIEEESVLFVWSEGALEFMDEGDTLRPFTLYEYRVRACNSKGSVESLWSLTQTLEAPPQDFPAPWAQATSAHSVLLNWTKPESPNGIISHYRV

SEQ ID NO: 7117 - DNA, 255 bp, Homo sapiens
ttcagccaccagtagccaaatcccttcccagttctttgctgctctcctggaacccacccaaaaaggcaaatggtattataactcagtactgtttatacatggatgggaggctgatctattcaggcagtgaggagaactacatagtcacagatcatgagtactttgagggcaggaactttatctttcatctttcatcctgaagacatggatcagcatatgtgtatagtaggagaacaataaatagttttcagaatg

SEQ ID NO: 7118 - protein, 33 aa, Homo sapiens
MDGRLIYSGSEENYIVTDHEYFEGRNFIFHLSS

SEQ ID NO: 7119 - DNA, 461 bp, Homo sapiens
gttgcaggtttcaaatgtgctttctgtgagaaagtcaagaaggtgccactcccagccaaggataatcctaatccctgacttcagcttcttgctatctacaccatctgtaaaggttacctatccttagacatgttagaaaccatatcagtaaccatatgatatttaaaatcttgagatcaattgtgtcgagtaaaacaaattaaatcatgccagataaaaattatgaatttttccataaaagcatcatcttcaggaaggacctcaggatccttcctgaggatggtataacttcgcgggagccctcccagaaagactcctgtgttatctccaataacagtactaccattcaggatggcagaggaacctagagaagaggagatgagaaatacaccttcaccaggatactctagttttactagctcagcaaataataaaatccttcaccagcctttgggatacca

SEQ ID NO: 7120 - protein, 53 aa, Homo sapiens
MPDKNYEFFHKSIIFRKDLRILPEDGITSREPSQKDSCVISNNSTTIQDGRGT

SEQ ID NO: 7121 - DNA, 280 bp, Homo sapiens
ctcccagccaaggataatcctaatccctgacttcagcttcttgctatctacaccatctgtaaaggttacctatccttagacatgttaggatccttcctgaggatggtataacttcgcgggagccctcccagaaagactcctgtgttatctccaataacagtactaccattcaggatggcagaggaacctagagaagaggagatgagaaatacaccttcaccaggatactctagttttactagctcagcaaataataaaatccttcaccagcctttgggat

SEQ ID NO: 7122 - protein, 34 aa, Homo sapiens
MAEEPREEEMRNTPSPGYSSFTSSANNKILHQPL

SEQ ID NO: 7123 - DNA, 391 bp, Homo sapiens
cattttagccattgacagatgtattttcaaaccaaggcatgctctgtcagaagactacaaaaatattactgcttcaggaaaccatatcagtaaccatatgatatttaaaatcttgagatcaattgtgtcgagtaaaacaaattaaatcatgccagataaaaattatgaatttttccataaaagcatcatcttcaggaaggacctcaggatccttcctgaggatggtataacttcgcgggagccctcccagaaagactcctgtgttatctccaataacagtactaccattcaggatggcagaggaacctagagaagaggagatgagaaatacaccttcaccaggatactctagttttactagctcagcaaataataaaatccttcaccagcc

SEQ ID NO: 7124 - protein, 53 aa, Homo sapiens; identical to SEQ ID NO: 7120

SEQ ID NO: 7125 - DNA, 342 bp, Homo sapiens
ggtaatagtccttccttttatataaatgcacaaatacatgcatgtgtgtgtgtgcacatatgcatttgaagataagtatttacctgctcctgttgtacgtcctcgactccaatcactatatactgaacctccttcatgcgaggctatcactcgatacaggatccttcctgaggatggtataacttcgcgggagccctcccagaaagactcctgtgttatctccaataacagtactaccattcaggatggcagaggaacctagagaagaggagatgagaaatacaccttcaccaggatactctagttttactagctcagcaaataataaaatccttcaccagc

SEQ ID NO: 7126 - protein, 78 aa, Homo sapiens
MHKYMHVCVCTYAFEDKYLPAPVVRPRLQSLYTEPPSCEAITRYRILPEDGITSREPSQKDSCVISNNSTTIQDGRGT

SEQ ID NO: 7127 - DNA, 386 bp, Homo sapiens
catatcagtaaccatatgatatttaaaatcttgagatcaattgtgtcgagtaaaacaaattaaatcatgccagataaaaattatgaatttttccataaaagcatcatcttcaggaaggacctcaggagggtgttctgccatcatcacgttatgaaaagcatttgaaagaaatgctgactgttgttgttgacaaggaggaggggatccttcctgaggatggtataacttcgcgggagccctcccagaaagactcctgtgttatctccaataacagtactaccattcaggatggcagaggaacctagagaagaggagatgagaaatacaccttcaccaggatactctagttttactagctcagcaaataataaaatccttcaccagcc

SEQ ID NO: 7128 - protein, 44 aa, Homo sapiens
MLTVVVDKEEGILPEDGITSREPSQKDSCVISNNSTTIQDGRGT

SEQ ID NO: 7129 - DNA, 647 bp, Homo sapiens
cttaaggggtcaccagtggaagtaactacaactaatgatcatggcaaacaatatagtgatggaaaatggcatgaaataattgctattaggcatcaggcttttggccaaatcactctggatgggatatatacaggttcctctgccatcctgaatggtagtactgttattggagataacacaggagtctttctgggagggctcccgcgaagttataccatcctcaggaaggatcctgagataatccaaaaaggttttgtgggctgtctcaaggatgtacattttatgaagaattacaatccgtcagctatttgggaacctctggattggcagagttctgaagaacaaatcaacgtgtataacagctgggagggatgtcccgcttcattaaatgagggagctcagttcctaggagcagggttcctggaacttcatccatatatgtttcatggtggaatgaactttgagatttcctttaagttcagaactgaccaattaaatggattgcttcttttcgtttataacaaagatggacctgattttcttgctgtatgtgaattaatttgattaaaattactttaaaatataggacccaactttaaaataaataaaccatgtgttggcattacacttaattggggtttctttac

SEQ ID NO: 7130 - protein, 93 aa, Homo sapiens
MKNYNPSAIWEPLDWQSSEEQINVYNSWEGCPASLNEGAQFLGAGFLELHPYMFHGGMNFEISFKFRTDQLNGLLLFVYNKDGPDFLAVCELI

SEQ ID NO: 7131 - DNA, 617 bp, Homo sapiens
ataaacatctgtttctgcagatatgatgggtttgaaccagcactaaacattataattgctatcatttactatagctgatggtgtggtgtttacatgaatcattaagaggcttgcagtaaataggtagtgagagctagtgcctatttctttgactttaatggcacataaaattaattgcttgaaaataatctttcaaaatatatatttcttgatatctataaactcctgcagagataatccaaaaaggttttgtgggctgtctcaaggatgtacattttatgaagaattacaatccgtcagctatttgggaacctctggattggcagagttctgaagaacaaatcaacgtgtataacagctgggagggatgtcccgcttcattaaatgagggagctcagttcctaggagcagggttcctggaacttcatccatatatgtttcatggtggaatgaactttgagatttcctttaagttcagaactgaccaattaaatggattgcttcttttcgtttataacaaagatggacctgattttcttgctgtatgtgaattaatttgattaaaattactttaaaatataggacccaactttaaaataaataaaccatgtgttggc

SEQ ID NO: 7132 - protein, 93 aa, Homo sapiens; identical to SEQ ID NO: 7130

SEQ ID NO: 7133 - DNA, 6336 bp, Homo sapiens
tctgagcttcaggtaaccaagtgtttgctctgcagaatactttacctgggcacccaagtcttccttccagcattcctgctgctacagcctatttgctgagtaaccaggggttacagcagcgttgccaggcaacgagggacagcggtcctgttgaagagccatttgtcacactgaggggactggttgaaatgcaataaagaaatgataccagcagctactcatgtcttcgccattgctaagaacgtcgttggtattaccttactctgagaacgtgtctgcagtttccagaaaatggagtatcgcaacatcacttaaagtaccctgcttcaaagtattgctggcaagtggcgtgggcctgattatttatttagaaatgctttatcaggaggagaatgcttttttgtaaacatgaattgcccagttctttcattgggctctggcttcttgtttcaggtcattgaaatgttgatctttgcctattttgcttcaatatccttgactgagtcacgaggtcttttcccaaggctggagaacgtgggagctttcaagaaagtttccatcgtgccaacccaagcagtatgtggactcccagaccgaagcactttttgtcacagctctgctgctgctgaaagtattcagttctgtacccagcggttttgtattcaggattgcccatacagatcttcacaccctacctacactgcccttttctcagcaggcctcagtagctgcatcacaccagacaagaatgatctgcatcctaacgcccatagcaattctgcaagttttatttttggaaatcacaagagctgcttttcttctcctccttctccaaagctgatggcatcatttaccttagctgtatggctgaaacctgagcaacaaggtgtaatgtgtgttatagaaaagacagtagatgggcagattgtgttcaaacttacaatatctgagaaagagaccatgttttattatcgcacagtaaatggtttgcaacctccaataaaagtaatgacactggggagaattcttgtgaagaaatggattcatcttagtgtgcaggtgcatcagacaaaaatcagcttctttatcaatggcgtggagaaggatcatacacctttcaatgcaagaactctaagtggttcaattacagattttgcatctggtactgtgcaaataggacagagtttaaatggtttagagcagtttgtcggaagaatgcaagattttcgattataccaagtggcacttacaaacagagagattctggaagtcttctctggagatcttctcagattgcatgcccaatcacattgccgttgccctggcagccacccgcgggtccaccctttggcacagcggtactgcattcctaatgatgcaggagacacagctgataatagagtgtcacggttgaatcctgaagcccatcctctctcttttgtcaatgataatgatgttggtacttcatgggtttcaaatgtgtttacaaacattacacagcttaatcaaggagtgactatttcagttgatttggaaaatggacagtatcaggtgttttatattatcattcagttctttagtccacaaccaacggaaataaggattcaaaggaagaaggaaaatagtttagattgggaggactggcaatattttgccaggaattgtggtgcttttggaatgaaaaacaatggagatttggaaaaacctgattctgtcaactgtcttcagctttccaattttactccatattcccgtggcaatgtcacatttagcatcctgacacctggaccaaattatcgtcctggatacaataacttctataataccccatctcttcaagagttcgtaaaagccacgcaaataaggtttcattttcatgggcagtactatacaactgagactgctgttaacctcagacacagatattatgcagtggacgaaatcaccattagtgggagatgtcagtgccatggtcatgccgataactgcgacacaacaagccagccatatagatgcctctgctcccaggagagcttcactgaaggacttcattgtgatcgctgcttgcctctttataatgacaagcctttccgccaaggtgatcaagtttacgctttcaattgtaaaccttgtcaatgcaacagccattccaaaagctgccattacaacatctctgtagacccatttccttttgagcacttcagagggggaggaggagtttgtgatgattgtgagcataacactacaggaaggaactgtgagctgtgcaaggattactttttccgacaagttggtgcagatccttcggccatagatgtttgcaaaccctgtgactgtgatacagttggcactagaaatggtagcattctttgtgatcagattggaggacagtgtaattgtaagagacacgtgtctggcaggcagtgcaatcagtgccagaatggattctacaatctacaagagttggatcctgatggctgcagtccctgtaactgcaatacctctgggacagtggatggagatattacctgtcaccaaaattcaggccagtgcaagtgcaaagcaaacgttattgggcttaggtgtgatcattgcaattttggatttaaatttctccgaagctttaatgatgttggatgtgagccctgccagtgtaacctccatggctcagtgaacaaattctgcaatcctcactctgggcagtgtgagtgcaaaaaagaagccaaaggacttcagtgtgacacctgcagagaaaacttttatgggttagatgtcaccaattgtaaggcctgtgactgtgacacagctggatccctccctgggactgtctgtaatgctaagacagggcagtgcatctgcaagcccaatgttgaagggagacagtgcaataaatgtttggagggaaacttctacctacggcaaaataattctttcctctgtctgccttgcaactgtgataagactgggacaataaatggctctctgctgtgtaacaaatcaacaggacaatgtccttgcaaattaggggtaacaggtcttcgctgtaatcagtgtgagcctcacaggtacaatttgaccattgacaattttcaacactgccagatgtgtgagtgtgattccttggggacattacctgggaccatttgtgacccaatcagtggccagtgcctgtgtgtgcctaatcgtcaaggaagaaggtgtaatcagtgtcaaccaggtttttatatttctccaggcaatgccactggctgcctgccatgctcatgccatacaactggtgcagttaatcacatctgtaatagcctgactggtcagtgtgtttgccaagatgcttccattgctgggcaacgttgtgaccaatgcaaagaccattactttggatttgatcctcagactggaagatgtcagccttgtaattgtcatctctcaggagccttgaatgaaacctgtcacttggtcacaggccagtgtttctgtaaacaatttgtcactggctcaaagtgtgatgcttgtgttcccagtgcaagccacttggatgtcaacaatctattgggttgcagcaaaactccattccagcaacctccgcccagaggacaagttcaaagttcttctgctatcaatctctcctggagtccacctgattctccaaatgcccactggcttacttacagtttactcagggatggttttgaaatctacacaacagaggatcaatacccatacagtattcaatacttcttagacacagacctgttaccatataccaaatattcctattacattgagaccaccaatgtgcatggttcaacaaggagtgtagctgtcacttacaagacaaaaccaggggtcccagagggaaacttgactttaagttatatcattcctattggctcagactctgtgacacttacctggacaacactctcaaatcaatctggtcccatagagaaatatattttgtcctgtgcccctttggctggtggtcagccatgtgtttcctacgaaggtcatgaaacctcagctaccatctggaatctggttccatttgccaagtacgatttttctgtacaggcgtgtactagcgggggctgtttacacagcttgcccattacagtgaccacagcccaggcccctccccaaagactaagtccacctaagatgcagaaaatcagttctacagaacttcatgtagaatggtctccaccagcggaactaaatggaataattataagatatgaactatacatgagaagactgagatctactaaagaaaccacatctgaggaaagtcgagtttttcagagcagtggttggctcagtcctcattcatttgtagaatcggccaatgaaaatgcattaaaacctcctcaaacaatgacaaccatcactggcttggagccatacaccaagtatgagttcagagtcttagctgtgaatatggctggaagtgtgtcttctgcctgggtctcagaaagaacgggagaatcagcacctgtattcatgatccctccttcagtctttcccctctcttcgtactctctcaatatctcctgggagaagccagcagataatgttacaagaggaaaagttgtggggtatgacatcaatatgctttctgaacaatcacctcaacagtctattcccatggcgttttcacagctgttgcacactgctaaatcccaagaactatcttacactgtagaaggactgaaaccttataggatatatgagtttactattactctctgcaattcagttggttgtgtgaccagtgcttcgggagcaggacaaactttagcagcagcaccagcacaactgaggccacctctggttaaaggaatcaacagcacaacaatccatcttaggtggtttccacctgaagaactgaatggaccctctcctatatatcagctggaaaggagagagtcatctctaccagctctgatgaccacgatgatgaaaggaatccgtttcataggaaatgggtattgtaaatttcccagctccactcacccagtcaatacagacttcactggtaagtgtgtttgacattgctttatttaggagacacgaagctccaaaatgttttctatattttcatatccctttacaatgaatttttattatacctacttagagaaatactaattcagccctttgatagcttttgcctgattgtttcagcatgtccatctttttagaattctggggaaaaaagtcaggtaagtgaaggaaaggaaaaataaaagatgaagatgaagaagcagccttattggatcaaagtatgtgctttgtatttgtctttttgtgaagtatgtgccaggacatgtttcttgaaatattattcactgtgttctctgagcaaatgagtttgcaaaatgccctcatgctattggagattctcagtatgcaccccgttactgaaactccaaaaagcattgtaagaaagctattcaactttgcttagctaatcatgcctaacagatatttgatgtaatgttttctttttctttctcttgctgtttccttcttctttttttcactgtgacaacttaatatctcatgttctatgaagaacattgtggggaaaactaatcccagggaaaagataacttctctaagccaggactatggtaaagcaagtgaggctcttgtttcggtcacaaaatttaaaggcactaaaaaactcagtgttaatgtaaattttaatgcaatatttttaaaaatgaaaatcaatgtgaaagcactataaaaatattatcaaaagcttaaataaagacagattgaactctgtaccagcacaatcctgcctcactggccttaccctcctcctggccttactagtaccgcaatattttggaagtcccatgacctctgtgacttacagcttctaatagcatgatttcaatatagctgtaaaaaaactctacttatggtacaccatttttccaatttttaaaaaaatttacaaagtataagatatatattattatgtaaactcataaagatgttcatttaatcatccatgagaaagtcattttggagcaaatagctagtctttaaaatattgcatatgtgaagacaatgaaatggaattcgagctataaaaatttgtattgttttatttttacttaaaatagtaaatagtttgcttttcattgagactggctgctgatgcaccttggtaatgaatcatgattatattctaactgagatatattgagattaatgcatgattaactactctctcagtacatcaaaatcattgcagagtattagaaattgaaccattgagctaaaaatgctcaacttctgctttatattcttaaaatggca

SEQ ID NO: 7134 - protein, 1546 aa, Homo sapiens; identical to SEQ ID NO: 410

SEQ ID NO: 7135 - DNA, 704 bp, Homo sapiens
ctgaaagagttcccccaataaacctcctgtactcagtcctctaccaagagtctgcttccgggggaatttgccctaagatagtcgtaacaggactggccctaggaaggagactctaaaatgatattttggagctccatcatccacttgctggtttacaatgatctcatcatagacagcagagaagagcatctctctcagaggaggcactgaacagccaaatacacagaagaacttgttcggttgacatccttccatcagcttctgctattggccacctggatgctggtaaaatgggcagagaggtatatcagccacaactgtaaactggagagaacaagagcctcctatcctctaggattgctgaaaaaggatatagtctctaatctgactttcatcagtaatgaagatcgtttttatttttaaatttgatctgcctactatgtctagtgctcctttgattccaaactcaaataggaacaacaccaaaaaacagtatgagttactgtccactccctaaacctgcaacactaacagaagagtgctatttcctccaataactgttcacttccttcctatgacacgtaagatacctatgagcaacccagaagggggctacaatagagatactgttagggctgattatgtatgattctcgaagcgctagcttgacctctaccttaaataaaacgtaaagatataccttg

SEQ ID NO: 7136 - protein, 47 aa, Homo sapiens
MLVKWAERYISHNCKLERTRASYPLGLLKKDIVSNLTFISNEDRFYF

SEQ ID NO: 7137 - DNA, 1063 bp, Homo sapiens
actgtcaggtgacgcttccggcgcagaaaaatggcagccgccgctccggactcacgtgtgagtgaggaagaaaacctgaaaaagaccccaaagaagaagatgaaaatggtaactggagccgtagcgtcggtgctggaagacgaggccacagacacttctgatagtgaaggaagctgtggatcggaaaaggaccacttttattctgatgatgacgcaatagaagctgacagtgagggtgatgctgagccctgtgacaaagaaaatgaaaatgatggagaatcaagtgttgggactaatatgggctgggcagatgctatggctaaagtcctcaacaagaaaactcctgaaagtaaacctactattctggtcaaaaataagaagctggaaaaggaaaaagaaaagttaaagcaagaaagactagagaaaataaaacagcgtgataagaggctggagtgggaaatgatgtgcagagtaaagccagatgttgtccaagacaaagagacagagagaaatcttcagagaattgcaacaaggggtgtggtgcaattatttaatgctgttcagaaacatcaaaagaatgttgatgaaaaggttaaggaagctggaagttctatgagaaagcgtgctaagttgatatcaactgtttccaagaaagatttcatcagtgttttgagagggatggatggaagtacaaatgagactgcttcaagcaggaagaaaccaaaagccaaacagactgaagtgaaatcagaagaaggcccaggttggacgatcctacgtgatgatttcatgatgggagcatctatgaaagactgggacaaggaaagtgatgggccagatgacagcagaccagaatctgcaagtgactctgatacataaagcatcataggaaatacaattgcagtcgttttattttttctagaaaaatatgtcatcctctgatagttggggaattataaggataccatttgtaagaaagccaaaagacttttgccagatttcatatttccccttttcatgtacactttatatatacttcattaaaattatattttaaaccctt

SEQ ID NO: 7138 - protein, 282 aa, Homo sapiens
MAAAAPDSRVSEEENLKKTPKKKMKMVTGAVASVLEDEATDTSDSEGSCGSEKDHFYSDDDAIEADSEGDAEPCDKENENDGESSVGTNMGWADAMAKVLNKKTPESKPTILVKNKKLEKEKEKLKQERLEKIKQRDKRLEWEMMCRVKPDVVQDKETERNLQRIATRGVVQLFNAVQKHQKNVDEKVKEAGSSMRKRAKLISTVSKKDFISVLRGMDGSTNETASSRKKPKAKQTEVKSEEGPGWTILRDDFMMGASMKDWDKESDGPDDSRPESASDSDT

SEQ ID NO: 7139 - DNA, 1373 bp, Homo sapiens
actgtcaggtgacgcttccggcgcagaaaaatggcagccgccgctccggactcacgtgtgagtgaggaagaaaacctgaaaaagaccccaaagaagaagatgaaaatggtaactggagccgtagcgtcggtgctggaagacgaggccacagacacttctgatagtgaaggaagctgtggatcggaaaaggaccacttttattctgatgatgacgcaatagaagctgacagtgagggtgatgctgagccctgtgacaaagaaaatgaaaatgatggagaatcaagtgttgggactaatatgggctgggcagatgctatggctaaagtcctcaacaagaaaactcctgaaagtaaacctactattctggtcaaaaataagaagctggaaaaggaaaaagaaaagttaaagcaagaaagactagagaaaataaaacagcgtgataagaggctggagtgggaaatgatgtgcagagtaaagccagatgttgtccaagacaaagagacagagagaaatcttcagagaattgcaacaaggggtgtggtgcaattatttaatgctgttcagaaacatcaaaagaatgttgatgaaaaggttaaggaagctggaagttctatgagaaagcgtgctaagttgatatcaactgtttccaagaaagatttcatcagtgttttgagagggatggatggaagtacaaatgagactgcttcaagcaggaagaaaccaaaagccaaacagactgaagtgaaatcagaagaaggcccaggttggacgatcctacgtgatgatttcatgatgggagcatctatgaaagactgggacaaggaaagtgatgggccagatgacagcagaccagaatctgcaagtgactctgatacataaagcatcataggaaatacaattgcagtcgttttattttttctagaaaaatatgtcatcctctgatagttggggaattataaggataccatttgtaagaaagccaaaagacttttgccagatttcatatttccccttttcatgtacactttatatatacttcattaaaattatattttaaacccttgtataattttaagcattgttcctcagaacatttgtaaaaggatatatttctgcttgaccagcgagatgtgcattttgccaggatcatattggtcatgtctattggtgtattatttcagtatcaccaatgttttcagaaatacagtactaattcatcattaaactctttgaagttaatatttttctgccttctaacttatagactcaactatgtatctgtagtttttgggaatggttggtgttttttgctttgtgttgggaagttattgagaaaacctatataataaaatttaaaattatagtttttcaga

SEQ ID NO: 7140 - protein, 282 aa, Homo sapiens; identical to SEQ ID NO: 7138

SEQ ID NO: 7141 - DNA, 492 bp, Homo sapiens
gtgtgagtgaggaagaaaacctgaaaaagaccccaaagaagaagatgaaaatggtaactggagccgtagcgtcggtgctggaagacgaggccacagacacttctgatagtgaaggaagctgtggatcggaaaaggaccacttttattctgatgatgacgcaatagaagctgacagtgagggtgatgctgagccctgtgacaaagaaaatgaaaatgatggagaatcaagtgttgggactaatatgggctgggcagatgctatggctaaagtcctcaacaagaaaactcctgaaagtaaacctactattctggtcaaaaataagaagctggaaaaggaaaaagaaaagttaaagcaagaaagactagagaaaataaaacaggtatgttccaccagttctcttgtagattagattgtttgtctaggctagctcttatcttgaccgaactgtttcttgcagtgtttgaccaattaacgttccagtttttaacttg

SEQ ID NO: 7142 - protein, 121 aa, Homo sapiens
MKMVTGAVASVLEDEATDTSDSEGSCGSEKDHFYSDDDAIEADSEGDAEPCDKENENDGESSVGTNMGWADAMAKVLNKKTPESKPTILVKNKKLEKEKEKLKQERLEKIKQVCSTSSLVD

SEQ ID NO: 7143 - DNA, 784 bp, Homo sapiens
tgtcgcttcaccagctggaaacctctgtgaccagtggtgcctttgcctgttttgctcggtcctatgggctcgttttgcccactcagcctggcagtctgcgctcggctcgtgctaccagcctggatcccatgcctgccaagagcgagggatgtatgagcgagagtggggtcctgccactgaacacagccaggcatgccagctgcggcagggtccatagctcccggcaatggcatgggcgccggctacttgcgaggctgcagctggaccaggtgtactgtaagcagcttccatggccgacaccagggaacgtcgtggcgttctggaagcttggagatgccagtaactgcagagccctaaagaggtgtcacagccctggctcagggagctcctaggtctgggcttcccgaagggctgcagctcttctctccttcttctttccttgtcacctgcaacgtgactgaagtgaaatcagaagaaggcccaggttggacgatcctacgtgatgatttcatgatgggagcatctatgaaagactgggacaaggaaagtgatgggccagatgacagcagaccagaatctgcaagtgactctgatacataaagcatcataggaaatacaattgcagtcgttttattttttctagaaaaatatgtcatcctctgatagttggggaattataaggataccatttgtaagaaagccaaaagacttttgccagatttcatatttccccttttcatgtacactttatatatacttcattaaaattatattttaaaccctt

SEQ ID NO: 7144 - protein, 87 aa, Homo sapiens
MPAKSEGCMSESGVLPLNTARHASCGRVHSSRQWHGRRLLARLQLDQVYCKQLPWPTPGNVVAFWKLGDASNCRALKRCHSPGSGSS

SEQ ID NO: 7145 - DNA, 1091 bp, Homo sapiens
tgtcgcttcaccagctggaaacctctgtgaccagtggtgcctttgcctgttttgctcggtcctatgggctcgttttgcccactcagcctggcagtctgcgctcggctcgtgctaccagcctggatcccatgcctgccaagagcgagggatgtatgagcgagagtggggtcctgccactgaacacagccaggcatgccagctgcggcagggtccatagctcccggcaatggcatgggcgccggctacttgcgaggctgcagctggaccaggtgtactgtaagcagcttccatggccgacaccagggaacgtcgtggcgttctggaagcttggagatgccagtaactgcagagccctaaagaggtgtcacagccctggctcagggagctcctaggtctgggcttcccgaagggctgcagctcttctctccttcttctttccttgtcacctgcaacgtgactgaagtgaaatcagaagaaggcccaggttggacgatcctacgtgatgatttcatgatgggagcatctatgaaagactgggacaaggaaagtgatgggccagatgacagcagaccagaatctgcaagtgactctgatacataaagcatcataggaaatacaattgcagtcgttttattttttctagaaaaatatgtcatcctctgatagttggggaattataaggataccatttgtaagaaagccaaaagacttttgccagatttcatatttccccttttcatgtacactttatatatacttcattaaaattatattttaaacccttgtataattttaagcattgttcctcagaacatttgtaaaaggatatatttctgcttgaccagcgagatgtgcattttgccaggatcatattggtcatgtctattggtgtattatttcagtatcaccaatgttttcagaaatacagtactaattcatcattaaactctttgaagttaatatttttctgccttctaacttatagactcaactatgtatctgtagtttttgggaatggttggtgttttttgctttgtgttgggaagttattgagaaaacctatataataaaatttaaaattatagtttttc

SEQ ID NO: 7146 - protein, 87 aa, Homo sapiens; identical to SEQ ID NO: 7144

SEQ ID NO: 7147 - DNA, 1187 bp, Homo sapiens
atgctctttcgggtcctcacttccaaggtgacaaaaggaacaatgatcatgccaaaaagggtggcagccacatgtgtgcccaaggacagggctattaagaatttctttattcaaaacacagtagaggctgcagcaagtgtcttcaatgcatatgtgcttcccgagctgtatgtgaagctacattattgtgtgagttgtgccattcacagcaggaagcctgcaagaactgaacatctccacttctatttagacctgcagatgctggcaccaaagctcatgaataaaactccccagccagggtgtcgcaagggctgccgttgtgatccgcagggggtgaacgcaaccgcgacggctgatcgtctgtggctgggttggcgtttggagcaagagaaggaggagcaggagaaggagggagctggaggctggaagcgtttgcaagcggcggcggcagcaacgtggagtaaccaagcggttcgccagctgccagccccgggaccttttcatctcttcccttttggccggaggagccgagttcagatccgccactccgcacccgagactgacacactgaactccacttcctcctcttaaatttatttctacttaatagccactcgtctctttttttccccatctcattgctccaagaatttttttcttcttactcgccaaagtcagggttccctctgcccgtcccgtattaatatttccacttttggaactactggccttttctttttaaaggaattcaagcaggatacgtttttctgttgggcattgactagattgtttgcaaaagtttcgcatcaaaaacaacaacaacaaaaaaccaaacaactctccttgatctatactttgagaattgttgatttcttttttttattctgacttttaaaaacaacttttttttccacttttttaaaaaatgcactactgtgtgctgagcgcttttctgatcctgcatctggtcacggtcgcgctcagcctgtctacctgcagcacactcgatatggaccagttcatgcgcaagaggatcgaggcgatccgcgggcagatcctgagcaagctgaagctcaccagtcccccagaagactatcctgagcccgaggaagtccccccggaggtgatttccatctacaacagcaccagggacttgctccaggagaaggcgagccggagggcggccg

SEQ ID NO: 7148 - protein, 196 aa, Homo sapiens
MLFRVLTSKVTKGTMIMPKRVAATCVPKDRAIKNFFIQNTVEAAASVFNAYVLPELYVKLHYCVSCAIHSRKPARTEHLHFYLDLQMLAPKLMNKTPQPGCRKGCRCDPQGVNATATADRLWLGWRLEQEKEEQEKEGAGGWKRLQAAAAATWSNQAVRQLPAPGPFHLFPFGRRSRVQIRHSAPETDTLNSTSSS

SEQ ID NO: 7149 - DNA, 557 bp, Homo sapiens
cgcaggggctcccttggactcccaccctttcccaacctctgctggcttctccccaacgtggaattgctcgcttagggagcttctggagctccgctcggagcgaaccttctgctgccagcagataacatcacgatcttgccggggaggggagatttataagttctctctgaaccacgtgtctgccttcaacaaagtgacgtgctaggattacagtcagaagtcctctcgttacttagaccacgagctctccccgaaccgttgagggagtgtggaaatgaggaccgctgtggttactcaaagtcaacattttcatttcggcatgactctgcagccatactgaccagacagatgatttaaactggaaactctgttgaatgtactcccaaacccaagatctctatactgttctctacttcagatgttcctgagttcagaaaagtcacaaagaactttctatcacttttggaatttatacttcagttgtgtatggggcctaggttattagtagagcactgaataaataaaataataatagctaacatatactacacttagta

SEQ ID NO: 7150 - protein, 67 aa, Homo sapiens
AGAPLDSHPFPTSAGFSPTWNCSLRELLELRSERTFCCQQITSRSCRGGEIYKFSLNHVSAFNKVTC

SEQ ID NO: 7151 - DNA, 5310 bp, Homo sapiens
cagaaggttcgctccgagcggagctccagaagctcctgacaagagaaagacagattgagatagagatagaaagagaaagagagaaagagacagcagagcgagagcgcaagtgaaagaggcaggggagggggatggagaatattagcctgacggtctagggagtcatccaggaacaaactgaggggctgcccggctgcagacaggaggagacagagaggatctattttagggtggcaagtgcctacctaccctaagcgagcaattccacgttggggagaagccagcagaggttgggaaagggtgggagtccaagggagcccctgcgcaaccccctcaggaataaaactccccagccagggtgtcgcaagggctgccgttgtgatccgcagggggtgaacgcaaccgcgacggctgatcgtctgtggctgggttggcgtttggagcaagagaaggaggagcaggagaaggagggagctggaggctggaagcgtttgcaagcggcggcggcagcaacgtggagtaaccaagcgggtcagcgcgcgcccgccagggtgtaggccacggagcgcagctcccagagcaggatccgcgccgcctcagcagcctctgcggcccctgcggcacccgaccgagtaccgagcgccctgcgaagcgcaccctcctccccgcggtgcgctgggctcgcccccagcgcgcgcacacgcacacacacacacacacacacacacgcacgcacacacgtgtgcgcttctctgctccggagctgctgctgctcctgctctcagcgccgcagtggaaggcaggaccgaaccgctccttctttaaatatataaatttcagcccaggtcagcctcggcggcccccctcaccgcgctcccggcgcccctcccgtcagttcgccagctgccagccccgggaccttttcatctcttcccttttggccggaggagccgagttcagatccgccactccgcacccgagactgacacactgaactccacttcctcctcttaaatttatttctacttaatagccactcgtctctttttttccccatctcattgctccaagaatttttttcttcttactcgccaaagtcagggttccctctgcccgtcccgtattaatatttccacttttggaactactggccttttctttttaaaggaattcaagcaggatacgtttttctgttgggcattgactagattgtttgcaaaagtttcgcatcaaaaacaacaacaacaaaaaaccaaacaactctccttgatctatactttgagaattgttgatttcttttttttattctgacttttaaaaacaacttttttttccacttttttaaaaaatgcactactgtgtgctgagcgcttttctgatcctgcatctggtcacggtcgcgctcagcctgtctacctgcagcacactcgatatggaccagttcatgcgcaagaggatcgaggcgatccgcgggcagatcctgagcaagctgaagctcaccagtcccccagaagactatcctgagcccgaggaagtccccccggaggtgatttccatctacaacagcaccagggacttgctccaggagaaggcgagccggagggcggccgcctgcgagcgcgagaggagcgacgaagagtactacgccaaggaggtttacaaaatagacatgccgcccttcttcccctccgaaactgtctgcccagttgttacaacaccctctggctcagtgggcagcttgtgctccagacagtcccaggtgctctgtgggtaccttgatgccatcccgcccactttctacagaccctacttcagaattgttcgatttgacgtctcagcaatggagaagaatgcttccaatttggtgaaagcagagttcagagtctttcgtttgcagaacccaaaagccagagtgcctgaacaacggattgagctatatcagattctcaagtccaaagatttaacatctccaacccagcgctacatcgacagcaaagttgtgaaaacaagagcagaaggcgaatggctctccttcgatgtaactgatgctgttcatgaatggcttcaccataaagacaggaacctgggatttaaaataagcttacactgtccctgctgcacttttgtaccatctaataattacatcatcccaaataaaagtgaagaactagaagcaagatttgcaggtattgatggcacctccacatataccagtggtgatcagaaaactataaagtccactaggaaaaaaaacagtgggaagaccccacatctcctgctaatgttattgccctcctacagacttgagtcacaacagaccaaccggcggaagaagcgtgctttggatgcggcctattgctttagaaatgtgcaggataattgctgcctacgtccactttacattgatttcaagagggatctagggtggaaatggatacacgaacccaaagggtacaatgccaacttctgtgctggagcatgcccgtatttatggagttcagacactcagcacagcagggtcctgagcttatataataccataaatccagaagcatctgcttctccttgctgcgtgtcccaagatttagaacctctaaccattctctactacattggcaaaacacccaagattgaacagctttctaatatgattgtaaagtcttgcaaatgcagctaaaattcttggaaaagtggcaagaccaaaatgacaatgatgatgataatgatgatgacgacgacaacgatgatgcttgtaacaagaaaacataagagagccttggttcatcagtgttaaaaaatttttgaaaaggcggtactagttcagacactttggaagtttgtgttctgtttgttaaaactggcatctgacacaaaaaaagttgaaggccttattctacatttcacctactttgtaagtgagagagacaagaagcaaattttttttaaagaaaaaaataaacactggaagaatttattagtgttaattatgtgaacaacgacaacaacaacaacaacaacaaacaggaaaatcccattaagtggagttgctgtacgtaccgttcctatcccgcgcctcacttgatttttctgtattgctatgcaataggcacccttcccattcttactcttagagttaacagtgagttatttattgtgtgttactatataatgaacgtttcattgcccttggaaaataaaacaggtgtataaagtggagaccaaatactttgccagaaactcatggatggcttaaggaacttgaactcaaacgagccagaaaaaaagaggtcatattaatgggatgaaaacccaagtgagttattatatgaccgagaaagtctgcattaagataaagaccctgaaaacacatgttatgtatcagctgcctaaggaagcttcttgtaaggtccaaaaactaaaaagactgttaataaaagaaactttcagtcagaataagtctgtaagtttttttttttctttttaattgtaaatggttctttgtcagtttagtaaaccagtgaaatgttgaaatgttttgacatgtactggtcaaacttcagaccttaaaatattgctgtatagctatgctataggttttttcctttgttttggtatatgtaaccatacctatattattaaaatagatggatatagaagccagcataattgaaaacacatctgcagatctcttttgcaaactattaaatcaaaacattaactactttatgtgtaatgtgtaaatttttaccatattttttatattctgtaataatgtcaactatgatttagattgacttaaatttgggctctttttaatgatcactcacaaatgtatgtttcttttagctggccagtacttttgagtaaagcccctatagtttgacttgcactacaaatgcattttttttttaataacatttgccctacttgtgctttgtgtttctttcattattatgacataagctacctgggtccacttgtcttttcttttttttgtttcacagaaaagatgggttcgagttcagtggtcttcatcttccaagcatcattactaaccaagtcagacgttaacaaatttttatgttaggaaaaggaggaatgttatagatacatagaaaattgaagtaaaatgttttcattttagcaaggatttagggttctaactaaaactcagaatctttattgagttaagaaaagtttctctaccttggtttaatcaatatttttgtaaaatcctattgttattacaaagaggacacttcataggaaacatctttttctttagtcaggtttttaatattcagggggaaattgaaagatatatattttagtcgatttttcaaaaggggaaaaaagtccaggtcagcataagtcattttgtgtatttcactgaagttataaggtttttataaatgttctttgaaggggaaaaggcacaagccaatttttcctatgatcaaaaaattctttctttcctctgagtgagagttatctatatctgaggctaaagtttaccttgctttaataaataatttgccacatcattgcagaagaggtatcctcatgctggggttaatagaatatgtcagtttatcacttgtcgcttatttagctttaaaataaaaattaataggcaaagcaatggaatatttgcagtttcacctaaagagcagcataaggaggcgggaatccaaagtgaagttgtttgatatggtctacttcttttttggaatttcctgaccattaattaaagaattggatttgcaagtttgaaaactggaaaagcaagagatgggatgccataatagtaaacagcccttgtgttggatgtaacccaatcccagatttgagtgtgtgttgattatttttttgtcttccacttttctattatgtgtaaatcacttttatttctgcagacattttcctctcagataggatgacattttgttttgtattattttgtctttcctcatgaatgcactgataatattttaaatgctctattttaagatctcttgaatctgttttttttttttttaatttgggggttctgtaaggtctttatttcccataagtaaatattgccatgggaggggggtggaggtggcaaggaaggggtgaagtgctagtatgcaagtgggcagcaattatttttgtgttaatcagcagtacaatttgatcgttggcatggttaaaaaatggaatataagattagctgttttgtattttgatgaccaattacgctgtattttaacacgatgtatgtctgtttttgtggtgctctagtggtaaataaattatttcgatgat

SEQ ID NO: 7152 - protein, 442 aa, Homo sapiens
MHYCVLSAFLILHLVTVALSLSTCSTLDMDQFMRKRIEAIRGQILSKLKLTSPPEDYPEPEEVPPEVISIYNSTRDLLQEKASRRAAACERERSDEEYYAKEVYKIDMPPFFPSETVCPVVTTPSGSVGSLCSRQSQVLCGYLDAIPPTFYRPYFRIVRFDVSAMEKNASNLVKAEFRVFRLQNPKARVPEQRIELYQILKSKDLTSPTQRYIDSKVVKTRAEGEWLSFDVTDAVHEWLHHKDRNLGFKISLHCPCCTFVPSNNYIIPNKSEELEARFAGIDGTSTYTSGDQKTIKSTRKKNSGKTPHLLLMLLPSYRLESQQTNRRKKRALDAAYCFRNVQDNCCLRPLYIDFKRDLGWKWIHEPKGYNANFCAGACPYLWSSDTQHSRVLSLYNTINPEASASPCCVSQDLEPLTILYYIGKTPKIEQLSNMIVKSCKCS

SEQ ID NO: 7153 - DNA, 5934 bp, Homo sapiens
cagaaggttcgctccgagcggagctccagaagctcctgacaagagaaagacagattgagatagagatagaaagagaaagagagaaagagacagcagagcgagagcgcaagtgaaagaggcaggggagggggatggagaatattagcctgacggtctagggagtcatccaggaacaaactgaggggctgcccggctgcagacaggaggagacagagaggatctattttagggtggcaagtgcctacctaccctaagcgagcaattccacgttggggagaagccagcagaggttgggaaagggtgggagtccaagggagcccctgcgcaaccccctcaggaataaaactccccagccagggtgtcgcaagggctgccgttgtgatccgcagggggtgaacgcaaccgcgacggctgatcgtctgtggctgggttggcgtttggagcaagagaaggaggagcaggagaaggagggagctggaggctggaagcgtttgcaagcggcggcggcagcaacgtggagtaaccaagcgggtcagcgcgcgcccgccagggtgtaggccacggagcgcagctcccagagcaggatccgcgccgcctcagcagcctctgcggcccctgcggcacccgaccgagtaccgagcgccctgcgaagcgcaccctcctccccgcggtgcgctgggctcgcccccagcgcgcgcacacgcacacacacacacacacacacacacgcacgcacacacgtgtgcgcttctctgctccggagctgctgctgctcctgctctcagcgccgcagtggaaggcaggaccgaaccgctccttctttaaatatataaatttcagcccaggtcagcctcggcggcccccctcaccgcgctcccggcgcccctcccgtcagttcgccagctgccagccccgggaccttttcatctcttcccttttggccggaggagccgagttcagatccgccactccgcacccgagactgacacactgaactccacttcctcctcttaaatttatttctacttaatagccactcgtctctttttttccccatctcattgctccaagaatttttttcttcttactcgccaaagtcagggttccctctgcccgtcccgtattaatatttccacttttggaactactggccttttctttttaaaggaattcaagcaggatacgtttttctgttgggcattgactagattgtttgcaaaagtttcgcatcaaaaacaacaacaacaaaaaaccaaacaactctccttgatctatactttgagaattgttgatttcttttttttattctgacttttaaaaacaacttttttttccacttttttaaaaaatgcactactgtgtgctgagcgcttttctgatcctgcatctggtcacggtcgcgctcagcctgtctacctgcagcacactcgatatggaccagttcatgcgcaagaggatcgaggcgatccgcgggcagatcctgagcaagctgaagctcaccagtcccccagaagactatcctgagcccgaggaagtccccccggaggtgatttccatctacaacagcaccagggacttgctccaggagaaggcgagccggagggcggccgcctgcgagcgcgagaggagcgacgaagagtactacgccaaggaggtttacaaaatagacatgccgcccttcttcccctccgaaactgtctgcccagttgttacaacaccctctggctcagtgggcagcttgtgctccagacagtcccaggtgctctgtgggtaccttgatgccatcccgcccactttctacagaccctacttcagaattgttcgatttgacgtctcagcaatggagaagaatgcttccaatttggtgaaagcagagttcagagtctttcgtttgcagaacccaaaagccagagtgcctgaacaacggattgagctatatcagattctcaagtccaaagatttaacatctccaacccagcgctacatcgacagcaaagttgtgaaaacaagagcagaaggcgaatggctctccttcgatgtaactgatgctgttcatgaatggcttcaccataaagacaggaacctgggatttaaaataagcttacactgtccctgctgcacttttgtaccatctaataattacatcatcccaaataaaagtgaagaactagaagcaagatttgcaggtattgatggcacctccacatataccagtggtgatcagaaaactataaagtccactaggaaaaaaaacagtgggaagaccccacatctcctgctaatgttattgccctcctacagacttgagtcacaacagaccaaccggcggaagaagcgtgctttggatgcggcctattgctttagaaatgtgcaggataattgctgcctacgtccactttacattgatttcaagagggatctagggtggaaatggatacacgaacccaaagggtacaatgccaacttctgtgctggagcatgcccgtatttatggagttcagacactcagcacagcagggtcctgagcttatataataccataaatccagaagcatctgcttctccttgctgcgtgtcccaagatttagaacctctaaccattctctactacattggcaaaacacccaagattgaacagctttctaatatgattgtaaagtcttgcaaatgcagctaaaattcttggaaaagtggcaagaccaaaatgacaatgatgatgataatgatgatgacgacgacaacgatgatgcttgtaacaagaaaacataagagagccttggttcatcagtgttaaaaaatttttgaaaaggcggtactagttcagacactttggaagtttgtgttctgtttgttaaaactggcatctgacacaaaaaaagttgaaggccttattctacatttcacctactttgtaagtgagagagacaagaagcaaattttttttaaagaaaaaaataaacactggaagaatttattagtgttaattatgtgaacaacgacaacaacaacaacaacaacaaacaggaaaatcccattaagtggagttgctgtacgtaccgttcctatcccgcgcctcacttgatttttctgtattgctatgcaataggcacccttcccattcttactcttagagttaacagtgagttatttattgtgtgttactatataatgaacgtttcattgcccttggaaaataaaacaggtgtataaagtggagaccaaatactttgccagaaactcatggatggcttaaggaacttgaactcaaacgagccagaaaaaaagaggtcatattaatgggatgaaaacccaagtgagttattatatgaccgagaaagtctgcattaagataaagaccctgaaaacacatgttatgtatcagctgcctaaggaagcttcttgtaaggtccaaaaactaaaaagactgttaataaaagaaactttcagtcagaataagtctgtaagtttttttttttctttttaattgtaaatggttctttgtcagtttagtaaaccagtgaaatgttgaaatgttttgacatgtactggtcaaacttcagaccttaaaatattgctgtatagctatgctataggttttttcctttgttttggtatatgtaaccatacctatattattaaaatagatggatatagaagccagcataattgaaaacacatctgcagatctcttttgcaaactattaaatcaaaacattaactactttatgtgtaatgtgtaaatttttaccatattttttatattctgtaataatgtcaactatgatttagattgacttaaatttgggctctttttaatgatcactcacaaatgtatgtttcttttagctggccagtacttttgagtaaagcccctatagtttgacttgcactacaaatgcattttttttttaataacatttgccctacttgtgctttgtgtttctttcattattatgacataagctacctgggtccacttgtcttttcttttttttgtttcacagaaaagatgggttcgagttcagtggtcttcatcttccaagcatcattactaaccaagtcagacgttaacaaatttttatgttaggaaaaggaggaatgttatagatacatagaaaattgaagtaaaatgttttcattttagcaaggatttagggttctaactaaaactcagaatctttattgagttaagaaaagtttctctaccttggtttaatcaatatttttgtaaaatcctattgttattacaaagaggacacttcataggaaacatctttttctttagtcaggtttttaatattcagggggaaattgaaagatatatattttagtcgatttttcaaaaggggaaaaaagtccaggtcagcataagtcattttgtgtatttcactgaagttataaggtttttataaatgttctttgaaggggaaaaggcacaagccaatttttcctatgatcaaaaaattctttctttcctctgagtgagagttatctatatctgaggctaaagtttaccttgctttaataaataatttgccacatcattgcagaagaggtatcctcatgctggggttaatagaatatgtcagtttatcacttgtcgcttatttagctttaaaataaaaattaataggcaaagcaatggaatatttgcagtttcacctaaagagcagcataaggaggcgggaatccaaagtgaagttgtttgatatggtctacttcttttttggaatttcctgaccattaattaaagaattggatttgcaagtttgaaaactggaaaagcaagagatgggatgccataatagtaaacagcccttgtgttggatgtaacccaatcccagatttgagtgtgtgttgattatttttttgtcttccacttttctattatgtgtaaatcacttttatttctgcagacattttcctctcagataggatgacattttgttttgtattattttgtctttcctcatgaatgcactgataatattttaaatgctctattttaagatctcttgaatctgttttttttttttttaatttgggggttctgtaaggtctttatttcccataagtaaatattgccatgggaggggggtggaggtggcaaggaaggggtgaagtgctagtatgcaagtgggcagcaattatttttgtgttaatcagcagtacaatttgatcgttggcatggttaaaaaatggaatataagattagctgttttgtattttgatgaccaattacgctgtattttaacacgatgtatgtctgtttttgtggtgctctagtggtaaataaattatttcgatgatatgtggatgtctttttcctatcagtaccatcatcgagtctagaaaacacctgtgatgcaataagactatctcaagctggaaaagtcataccacctttccgattgccctctgtgctttctcccttaaggacagtcacttcagaagtcatgctttaaagcacaagagtcaggccatatccatcaaggatagaagaaatccctgtgccgtctttttattcccttatttattgctatttggtaattgtttgagatttagtttccatccagcttgactgccgaccagaaaaaatgcagagagatgtttgcaccatgctttggctttctggttctatgttctgccaacgccagggccaaaagaactggtctagacagtatcccctgtagccccataacttggatagttgctgagccagccagatataacaagagccacgtgctttctggggttggttgtttgggatcagctacttgcctgtcagtttcactggtaccactgcaccacaaacaaaaaaacccaccctatttcctccaatttttttggctgctacctacaagaccagactcctcaaacgagttgccaatctcttaataaataggattaataaaaaaagtaattgtgactcaa

SEQ ID NO: 7154 - protein, 442 aa, Homo sapiens; identical to SEQ ID NO: 7152

SEQ ID NO: 7155 - DNA, 4518 bp, Homo sapiens
acacacacacacacacacacgcacgcacacacgtgtgcgcttctctgctccggagctgctgctgctcctgctctcagcgccgcagtggaaggcaggaccgaaccgctccttctttaaatatataaatttcagcccaggtcagcctcggcggcccccctcaccgcgctcccggcgcccctcccgtcagttcgccagctgccagccccgggaccttttcatctcttcccttttggccggaggagccgagttcagatccgccactccgcacccgagactgacacactgaactccacttcctcctcttaaatttatttctacttaatagccactcgtctctttttttccccatctcattgctccaagaatttttttcttcttactcgccaaagtcagggttccctctgcccgtcccgtattaatatttccacttttggaactactggccttttctttttaaaggaattcaagcaggatacgtttttctgttgggcattgactagattgtttgcaaaagtttcgcatcaaaaacaacaacaacaaaaaaccaaacaactctccttgatctatactttgagaattgttgatttcttttttttattctgacttttaaaaacaacttttttttccacttttttaaaaaatgcactactgtgtgctgagcgcttttctgatcctgcatctggtcacggtcgcgctcagcctgtctacctgcagcacactcgatatggaccagttcatgcgcaagaggatcgaggcgatccgcgggcagatcctgagcaagctgaagctcaccagtcccccagaagactatcctgagcccgaggaagtccccccggaggtgatttccatctacaacagcaccagggacttgctccaggagaaggcgagccggagggcggccgcctgcgagcgcgagaggagcgacgaagagtactacgccaaggaggtttacaaaatagacatgccgcccttcttcccctccgaaaatgccatcccgcccactttctacagaccctacttcagaattgttcgatttgacgtctcagcaatggagaagaatgcttccaatttggtgaaagcagagttcagagtctttcgtttgcagaacccaaaagccagagtgcctgaacaacggattgagctatatcagattctcaagtccaaagatttaacatctccaacccagcgctacatcgacagcaaagttgtgaaaacaagagcagaaggcgaatggctctccttcgatgtaactgatgctgttcatgaatggcttcaccataaagacaggaacctgggatttaaaataagcttacactgtccctgctgcacttttgtaccatctaataattacatcatcccaaataaaagtgaagaactagaagcaagatttgcaggtattgatggcacctccacatataccagtggtgatcagaaaactataaagtccactaggaaaaaaaacagtgggaagaccccacatctcctgctaatgttattgccctcctacagacttgagtcacaacagaccaaccggcggaagaagcgtgctttggatgcggcctattgctttagaaatgtgcaggataattgctgcctacgtccactttacattgatttcaagagggatctagggtggaaatggatacacgaacccaaagggtacaatgccaacttctgtgctggagcatgcccgtatttatggagttcagacactcagcacagcagggtcctgagcttatataataccataaatccagaagcatctgcttctccttgctgcgtgtcccaagatttagaacctctaaccattctctactacattggcaaaacacccaagattgaacagctttctaatatgattgtaaagtcttgcaaatgcagctaaaattcttggaaaagtggcaagaccaaaatgacaatgatgatgataatgatgatgacgacgacaacgatgatgcttgtaacaagaaaacataagagagccttggttcatcagtgttaaaaaatttttgaaaaggcggtactagttcagacactttggaagtttgtgttctgtttgttaaaactggcatctgacacaaaaaaagttgaaggccttattctacatttcacctactttgtaagtgagagagacaagaagcaaattttttttaaagaaaaaaataaacactggaagaatttattagtgttaattatgtgaacaacgacaacaacaacaacaacaacaaacaggaaaatcccattaagtggagttgctgtacgtaccgttcctatcccgcgcctcacttgatttttctgtattgctatgcaataggcacccttcccattcttactcttagagttaacagtgagttatttattgtgtgttactatataatgaacgtttcattgcccttggaaaataaaacaggtgtataaagtggagaccaaatactttgccagaaactcatggatggcttaaggaacttgaactcaaacgagccagaaaaaaagaggtcatattaatgggatgaaaacccaagtgagttattatatgaccgagaaagtctgcattaagataaagaccctgaaaacacatgttatgtatcagctgcctaaggaagcttcttgtaaggtccaaaaactaaaaagactgttaataaaagaaactttcagtcagaataagtctgtaagtttttttttttctttttaattgtaaatggttctttgtcagtttagtaaaccagtgaaatgttgaaatgttttgacatgtactggtcaaacttcagaccttaaaatattgctgtatagctatgctataggttttttcctttgttttggtatatgtaaccatacctatattattaaaatagatggatatagaagccagcataattgaaaacacatctgcagatctcttttgcaaactattaaatcaaaacattaactactttatgtgtaatgtgtaaatttttaccatattttttatattctgtaataatgtcaactatgatttagattgacttaaatttgggctctttttaatgatcactcacaaatgtatgtttcttttagctggccagtacttttgagtaaagcccctatagtttgacttgcactacaaatgcattttttttttaataacatttgccctacttgtgctttgtgtttctttcattattatgacataagctacctgggtccacttgtcttttcttttttttgtttcacagaaaagatgggttcgagttcagtggtcttcatcttccaagcatcattactaaccaagtcagacgttaacaaatttttatgttaggaaaaggaggaatgttatagatacatagaaaattgaagtaaaatgttttcattttagcaaggatttagggttctaactaaaactcagaatctttattgagttaagaaaagtttctctaccttggtttaatcaatatttttgtaaaatcctattgttattacaaagaggacacttcataggaaacatctttttctttagtcaggtttttaatattcagggggaaattgaaagatatatattttagtcgatttttcaaaaggggaaaaaagtccaggtcagcataagtcattttgtgtatttcactgaagttataaggtttttataaatgttctttgaaggggaaaaggcacaagccaatttttcctatgatcaaaaaattctttctttcctctgagtgagagttatctatatctgaggctaaagtttaccttgctttaataaataatttgccacatcattgcagaagaggtatcctcatgctggggttaatagaatatgtcagtttatcacttgtcgcttatttagctttaaaataaaaattaataggcaaagcaatggaatatttgcagtttcacctaaagagcagcataaggaggcgggaatccaaagtgaagttgtttgatatggtctacttcttttttggaatttcctgaccattaattaaagaattggatttgcaagtttgaaaactggaaaagcaagagatgggatgccataatagtaaacagcccttgtgttggatgtaacccaatcccagatttgagtgtgtgttgattatttttttgtcttccacttttctattatgtgtaaatcacttttatttctgcagacattttcctctcagataggatgacattttgttttgtattattttgtctttcctcatgaatgcactgataatattttaaatgctctattttaagatctcttgaatctgttttttttttttttaatttgggggttctgtaaggtctttatttcccataagtaaatattgccatgggaggggggtggaggtggcaaggaaggggtgaagtgctagtatgcaagtgggcagcaattatttttgtgttaatcagcagtacaatttgatcgttggcatggttaaaaaatggaatataagattagctgttttgtattttgatgaccaattacgctgtattttaacacgatgtatgtctgtttttgtggtgctctagtggtaaataaattatttcgatgat

SEQ ID NO: 7156 - protein, 414 aa, Homo sapiens; identical to SEQ ID NO: 418

SEQ ID NO: 7157 - DNA, 5142 bp, Homo sapiens
acacacacacacacacacacgcacgcacacacgtgtgcgcttctctgctccggagctgctgctgctcctgctctcagcgccgcagtggaaggcaggaccgaaccgctccttctttaaatatataaatttcagcccaggtcagcctcggcggcccccctcaccgcgctcccggcgcccctcccgtcagttcgccagctgccagccccgggaccttttcatctcttcccttttggccggaggagccgagttcagatccgccactccgcacccgagactgacacactgaactccacttcctcctcttaaatttatttctacttaatagccactcgtctctttttttccccatctcattgctccaagaatttttttcttcttactcgccaaagtcagggttccctctgcccgtcccgtattaatatttccacttttggaactactggccttttctttttaaaggaattcaagcaggatacgtttttctgttgggcattgactagattgtttgcaaaagtttcgcatcaaaaacaacaacaacaaaaaaccaaacaactctccttgatctatactttgagaattgttgatttcttttttttattctgacttttaaaaacaacttttttttccacttttttaaaaaatgcactactgtgtgctgagcgcttttctgatcctgcatctggtcacggtcgcgctcagcctgtctacctgcagcacactcgatatggaccagttcatgcgcaagaggatcgaggcgatccgcgggcagatcctgagcaagctgaagctcaccagtcccccagaagactatcctgagcccgaggaagtccccccggaggtgatttccatctacaacagcaccagggacttgctccaggagaaggcgagccggagggcggccgcctgcgagcgcgagaggagcgacgaagagtactacgccaaggaggtttacaaaatagacatgccgcccttcttcccctccgaaaatgccatcccgcccactttctacagaccctacttcagaattgttcgatttgacgtctcagcaatggagaagaatgcttccaatttggtgaaagcagagttcagagtctttcgtttgcagaacccaaaagccagagtgcctgaacaacggattgagctatatcagattctcaagtccaaagatttaacatctccaacccagcgctacatcgacagcaaagttgtgaaaacaagagcagaaggcgaatggctctccttcgatgtaactgatgctgttcatgaatggcttcaccataaagacaggaacctgggatttaaaataagcttacactgtccctgctgcacttttgtaccatctaataattacatcatcccaaataaaagtgaagaactagaagcaagatttgcaggtattgatggcacctccacatataccagtggtgatcagaaaactataaagtccactaggaaaaaaaacagtgggaagaccccacatctcctgctaatgttattgccctcctacagacttgagtcacaacagaccaaccggcggaagaagcgtgctttggatgcggcctattgctttagaaatgtgcaggataattgctgcctacgtccactttacattgatttcaagagggatctagggtggaaatggatacacgaacccaaagggtacaatgccaacttctgtgctggagcatgcccgtatttatggagttcagacactcagcacagcagggtcctgagcttatataataccataaatccagaagcatctgcttctccttgctgcgtgtcccaagatttagaacctctaaccattctctactacattggcaaaacacccaagattgaacagctttctaatatgattgtaaagtcttgcaaatgcagctaaaattcttggaaaagtggcaagaccaaaatgacaatgatgatgataatgatgatgacgacgacaacgatgatgcttgtaacaagaaaacataagagagccttggttcatcagtgttaaaaaatttttgaaaaggcggtactagttcagacactttggaagtttgtgttctgtttgttaaaactggcatctgacacaaaaaaagttgaaggccttattctacatttcacctactttgtaagtgagagagacaagaagcaaattttttttaaagaaaaaaataaacactggaagaatttattagtgttaattatgtgaacaacgacaacaacaacaacaacaacaaacaggaaaatcccattaagtggagttgctgtacgtaccgttcctatcccgcgcctcacttgatttttctgtattgctatgcaataggcacccttcccattcttactcttagagttaacagtgagttatttattgtgtgttactatataatgaacgtttcattgcccttggaaaataaaacaggtgtataaagtggagaccaaatactttgccagaaactcatggatggcttaaggaacttgaactcaaacgagccagaaaaaaagaggtcatattaatgggatgaaaacccaagtgagttattatatgaccgagaaagtctgcattaagataaagaccctgaaaacacatgttatgtatcagctgcctaaggaagcttcttgtaaggtccaaaaactaaaaagactgttaataaaagaaactttcagtcagaataagtctgtaagtttttttttttctttttaattgtaaatggttctttgtcagtttagtaaaccagtgaaatgttgaaatgttttgacatgtactggtcaaacttcagaccttaaaatattgctgtatagctatgctataggttttttcctttgttttggtatatgtaaccatacctatattattaaaatagatggatatagaagccagcataattgaaaacacatctgcagatctcttttgcaaactattaaatcaaaacattaactactttatgtgtaatgtgtaaatttttaccatattttttatattctgtaataatgtcaactatgatttagattgacttaaatttgggctctttttaatgatcactcacaaatgtatgtttcttttagctggccagtacttttgagtaaagcccctatagtttgacttgcactacaaatgcattttttttttaataacatttgccctacttgtgctttgtgtttctttcattattatgacataagctacctgggtccacttgtcttttcttttttttgtttcacagaaaagatgggttcgagttcagtggtcttcatcttccaagcatcattactaaccaagtcagacgttaacaaatttttatgttaggaaaaggaggaatgttatagatacatagaaaattgaagtaaaatgttttcattttagcaaggatttagggttctaactaaaactcagaatctttattgagttaagaaaagtttctctaccttggtttaatcaatatttttgtaaaatcctattgttattacaaagaggacacttcataggaaacatctttttctttagtcaggtttttaatattcagggggaaattgaaagatatatattttagtcgatttttcaaaaggggaaaaaagtccaggtcagcataagtcattttgtgtatttcactgaagttataaggtttttataaatgttctttgaaggggaaaaggcacaagccaatttttcctatgatcaaaaaattctttctttcctctgagtgagagttatctatatctgaggctaaagtttaccttgctttaataaataatttgccacatcattgcagaagaggtatcctcatgctggggttaatagaatatgtcagtttatcacttgtcgcttatttagctttaaaataaaaattaataggcaaagcaatggaatatttgcagtttcacctaaagagcagcataaggaggcgggaatccaaagtgaagttgtttgatatggtctacttcttttttggaatttcctgaccattaattaaagaattggatttgcaagtttgaaaactggaaaagcaagagatgggatgccataatagtaaacagcccttgtgttggatgtaacccaatcccagatttgagtgtgtgttgattatttttttgtcttccacttttctattatgtgtaaatcacttttatttctgcagacattttcctctcagataggatgacattttgttttgtattattttgtctttcctcatgaatgcactgataatattttaaatgctctattttaagatctcttgaatctgttttttttttttttaatttgggggttctgtaaggtctttatttcccataagtaaatattgccatgggaggggggtggaggtggcaaggaaggggtgaagtgctagtatgcaagtgggcagcaattatttttgtgttaatcagcagtacaatttgatcgttggcatggttaaaaaatggaatataagattagctgttttgtattttgatgaccaattacgctgtattttaacacgatgtatgtctgtttttgtggtgctctagtggtaaataaattatttcgatgatatgtggatgtctttttcctatcagtaccatcatcgagtctagaaaacacctgtgatgcaataagactatctcaagctggaaaagtcataccacctttccgattgccctctgtgctttctcccttaaggacagtcacttcagaagtcatgctttaaagcacaagagtcaggccatatccatcaaggatagaagaaatccctgtgccgtctttttattcccttatttattgctatttggtaattgtttgagatttagtttccatccagcttgactgccgaccagaaaaaatgcagagagatgtttgcaccatgctttggctttctggttctatgttctgccaacgccagggccaaaagaactggtctagacagtatcccctgtagccccataacttggatagttgctgagccagccagatataacaagagccacgtgctttctggggttggttgtttgggatcagctacttgcctgtcagtttcactggtaccactgcaccacaaacaaaaaaacccaccctatttcctccaatttttttggctgctacctacaagaccagactcctcaaacgagttgccaatctcttaataaataggattaataaaaaaagtaattgtgactcaa

SEQ ID NO: 7158 - protein, 414 aa, Homo sapiens; identical to SEQ ID NO: 418

SEQ ID NO: 7159 - DNA, 395 bp, Homo sapiens
atgccatcccgcccactttctacagaccctacttcagaattgttcgatttgacgtctcagcaatggagaagaatgcttccaatttggtgaaagcagagttcagagtctttcgtttgcagaacccaaaagccagagtgcctgaacaacggattgagctatatcagattctcaagtccaaagatttaacatctccaacccagcgctacatcgacagcaaagttgtgaaaacaagagcagaaggcgaatggctctccttcgatgtaactgatgctgttcatgaatggcttcaccataaaggttacaagccactctctcttttcctcccaagatgttcagtatccctaagttactttaaattgattgcagatttaagggtatagacacacatacaaatg

SEQ ID NO: 7160 - protein, 105 aa, Homo sapiens [sequence omitted]

SEQ ID NO: 7161 - DNA, 3362 bp, Homo sapiens
cgacagcaaagttgtgaaaacaagagcagaaggcgaatggctctccttcgatgtaactgatgctgttcatgaatggcttcaccataaaggttacaagccactctctcttttcctcccaagatgttcaacaggaacctgggatttaaaataagcttacactgtccctgctgcacttttgtaccatctaataattacatcatcccaaataaaagtgaagaactagaagcaagatttgcaggtattgatggcacctccacatataccagtggtgatcagaaaactataaagtccactaggaaaaaaaacagtgggaagaccccacatctcctgctaatgttattgccctcctacagacttgagtcacaacagaccaaccggcggaagaagcgtgctttggatgcggcctattgctttagaaatgtgcaggataattgctgcctacgtccactttacattgatttcaagagggatctagggtggaaatggatacacgaacccaaagggtacaatgccaacttctgtgctggagcatgcccgtatttatggagttcagacactcagcacagcagggtcctgagcttatataataccataaatccagaagcatctgcttctccttgctgcgtgtcccaagatttagaacctctaaccattctctactacattggcaaaacacccaagattgaacagctttctaatatgattgtaaagtcttgcaaatgcagctaaaattcttggaaaagtggcaagaccaaaatgacaatgatgatgataatgatgatgacgacgacaacgatgatgcttgtaacaagaaaacataagagagccttggttcatcagtgttaaaaaatttttgaaaaggcggtactagttcagacactttggaagtttgtgttctgtttgttaaaactggcatctgacacaaaaaaagttgaaggccttattctacatttcacctactttgtaagtgagagagacaagaagcaaattttttttaaagaaaaaaataaacactggaagaatttattagtgttaattatgtgaacaacgacaacaacaacaacaacaacaaacaggaaaatcccattaagtggagttgctgtacgtaccgttcctatcccgcgcctcacttgatttttctgtattgctatgcaataggcacccttcccattcttactcttagagttaacagtgagttatttattgtgtgttactatataatgaacgtttcattgcccttggaaaataaaacaggtgtataaagtggagaccaaatactttgccagaaactcatggatggcttaaggaacttgaactcaaacgagccagaaaaaaagaggtcatattaatgggatgaaaacccaagtgagttattatatgaccgagaaagtctgcattaagataaagaccctgaaaacacatgttatgtatcagctgcctaaggaagcttcttgtaaggtccaaaaactaaaaagactgttaataaaagaaactttcagtcagaataagtctgtaagtttttttttttctttttaattgtaaatggttctttgtcagtttagtaaaccagtgaaatgttgaaatgttttgacatgtactggtcaaacttcagaccttaaaatattgctgtatagctatgctataggttttttcctttgttttggtatatgtaaccatacctatattattaaaatagatggatatagaagccagcataattgaaaacacatctgcagatctcttttgcaaactattaaatcaaaacattaactactttatgtgtaatgtgtaaatttttaccatattttttatattctgtaataatgtcaactatgatttagattgacttaaatttgggctctttttaatgatcactcacaaatgtatgtttcttttagctggccagtacttttgagtaaagcccctatagtttgacttgcactacaaatgcattttttttttaataacatttgccctacttgtgctttgtgtttctttcattattatgacataagctacctgggtccacttgtcttttcttttttttgtttcacagaaaagatgggttcgagttcagtggtcttcatcttccaagcatcattactaaccaagtcagacgttaacaaatttttatgttaggaaaaggaggaatgttatagatacatagaaaattgaagtaaaatgttttcattttagcaaggatttagggttctaactaaaactcagaatctttattgagttaagaaaagtttctctaccttggtttaatcaatatttttgtaaaatcctattgttattacaaagaggacacttcataggaaacatctttttctttagtcaggtttttaatattcagggggaaattgaaagatatatattttagtcgatttttcaaaaggggaaaaaagtccaggtcagcataagtcattttgtgtatttcactgaagttataaggtttttataaatgttctttgaaggggaaaaggcacaagccaatttttcctatgatcaaaaaattctttctttcctctgagtgagagttatctatatctgaggctaaagtttaccttgctttaataaataatttgccacatcattgcagaagaggtatcctcatgctggggttaatagaatatgtcagtttatcacttgtcgcttatttagctttaaaataaaaattaataggcaaagcaatggaatatttgcagtttcacctaaagagcagcataaggaggcgggaatccaaagtgaagttgtttgatatggtctacttcttttttggaatttcctgaccattaattaaagaattggatttgcaagtttgaaaactggaaaagcaagagatgggatgccataatagtaaacagcccttgtgttggatgtaacccaatcccagatttgagtgtgtgttgattatttttttgtcttccacttttctattatgtgtaaatcacttttatttctgcagacattttcctctcagataggatgacattttgttttgtattattttgtctttcctcatgaatgcactgataatattttaaatgctctattttaagatctcttgaatctgttttttttttttttaatttgggggttctgtaaggtctttatttcccataagtaaatattgccatgggaggggggtggaggtggcaaggaaggggtgaagtgctagtatgcaagtgggcagcaattatttttgtgttaatcagcagtacaatttgatcgttggcatggttaaaaaatggaatataagattagctgttttgtattttgatgaccaattacgctgtattttaacacgatgtatgtctgtttttgtggtgctctagtggtaaataaattatttcgatgat

SEQ ID NO: 7162 - protein, 202 aa, Homo sapiens
MFNRNLGFKISLHCPCCTFVPSNNYIIPNKSEELEARFAGIDGTSTYTSGDQKTIKSTRKKNSGKTPHLLLMLLPSYRLESQQTNRRKKRALDAAYCFRNVQDNCCLRPLYIDFKRDLGWKWIHEPKGYNANFCAGACPYLWSSDTQHSRVLSLYNTINPEASASPCCVSQDLEPLTILYYIGKTPKIEQLSNMIVKSCKCS

SEQ ID NO: 7163 - DNA, 3986 bp, Homo sapiens
cgacagcaaagttgtgaaaacaagagcagaaggcgaatggctctccttcgatgtaactgatgctgttcatgaatggcttcaccataaaggttacaagccactctctcttttcctcccaagatgttcaacaggaacctgggatttaaaataagcttacactgtccctgctgcacttttgtaccatctaataattacatcatcccaaataaaagtgaagaactagaagcaagatttgcaggtattgatggcacctccacatataccagtggtgatcagaaaactataaagtccactaggaaaaaaaacagtgggaagaccccacatctcctgctaatgttattgccctcctacagacttgagtcacaacagaccaaccggcggaagaagcgtgctttggatgcggcctattgctttagaaatgtgcaggataattgctgcctacgtccactttacattgatttcaagagggatctagggtggaaatggatacacgaacccaaagggtacaatgccaacttctgtgctggagcatgcccgtatttatggagttcagacactcagcacagcagggtcctgagcttatataataccataaatccagaagcatctgcttctccttgctgcgtgtcccaagatttagaacctctaaccattctctactacattggcaaaacacccaagattgaacagctttctaatatgattgtaaagtcttgcaaatgcagctaaaattcttggaaaagtggcaagaccaaaatgacaatgatgatgataatgatgatgacgacgacaacgatgatgcttgtaacaagaaaacataagagagccttggttcatcagtgttaaaaaatttttgaaaaggcggtactagttcagacactttggaagtttgtgttctgtttgttaaaactggcatctgacacaaaaaaagttgaaggccttattctacatttcacctactttgtaagtgagagagacaagaagcaaattttttttaaagaaaaaaataaacactggaagaatttattagtgttaattatgtgaacaacgacaacaacaacaacaacaacaaacaggaaaatcccattaagtggagttgctgtacgtaccgttcctatcccgcgcctcacttgatttttctgtattgctatgcaataggcacccttcccattcttactcttagagttaacagtgagttatttattgtgtgttactatataatgaacgtttcattgcccttggaaaataaaacaggtgtataaagtggagaccaaatactttgccagaaactcatggatggcttaaggaacttgaactcaaacgagccagaaaaaaagaggtcatattaatgggatgaaaacccaagtgagttattatatgaccgagaaagtctgcattaagataaagaccctgaaaacacatgttatgtatcagctgcctaaggaagcttcttgtaaggtccaaaaactaaaaagactgttaataaaagaaactttcagtcagaataagtctgtaagtttttttttttctttttaattgtaaatggttctttgtcagtttagtaaaccagtgaaatgttgaaatgttttgacatgtactggtcaaacttcagaccttaaaatattgctgtatagctatgctataggttttttcctttgttttggtatatgtaaccatacctatattattaaaatagatggatatagaagccagcataattgaaaacacatctgcagatctcttttgcaaactattaaatcaaaacattaactactttatgtgtaatgtgtaaatttttaccatattttttatattctgtaataatgtcaactatgatttagattgacttaaatttgggctctttttaatgatcactcacaaatgtatgtttcttttagctggccagtacttttgagtaaagcccctatagtttgacttgcactacaaatgcattttttttttaataacatttgccctacttgtgctttgtgtttctttcattattatgacataagctacctgggtccacttgtcttttcttttttttgtttcacagaaaagatgggttcgagttcagtggtcttcatcttccaagcatcattactaaccaagtcagacgttaacaaatttttatgttaggaaaaggaggaatgttatagatacatagaaaattgaagtaaaatgttttcattttagcaaggatttagggttctaactaaaactcagaatctttattgagttaagaaaagtttctctaccttggtttaatcaatatttttgtaaaatcctattgttattacaaagaggacacttcataggaaacatctttttctttagtcaggtttttaatattcagggggaaattgaaagatatatattttagtcgatttttcaaaaggggaaaaaagtccaggtcagcataagtcattttgtgtatttcactgaagttataaggtttttataaatgttctttgaaggggaaaaggcacaagccaatttttcctatgatcaaaaaattctttctttcctctgagtgagagttatctatatctgaggctaaagtttaccttgctttaataaataatttgccacatcattgcagaagaggtatcctcatgctggggttaatagaatatgtcagtttatcacttgtcgcttatttagctttaaaataaaaattaataggcaaagcaatggaatatttgcagtttcacctaaagagcagcataaggaggcgggaatccaaagtgaagttgtttgatatggtctacttcttttttggaatttcctgaccattaattaaagaattggatttgcaagtttgaaaactggaaaagcaagagatgggatgccataatagtaaacagcccttgtgttggatgtaacccaatcccagatttgagtgtgtgttgattatttttttgtcttccacttttctattatgtgtaaatcacttttatttctgcagacattttcctctcagataggatgacattttgttttgtattattttgtctttcctcatgaatgcactgataatattttaaatgctctattttaagatctcttgaatctgttttttttttttttaatttgggggttctgtaaggtctttatttcccataagtaaatattgccatgggaggggggtggaggtggcaaggaaggggtgaagtgctagtatgcaagtgggcagcaattatttttgtgttaatcagcagtacaatttgatcgttggcatggttaaaaaatggaatataagattagctgttttgtattttgatgaccaattacgctgtattttaacacgatgtatgtctgtttttgtggtgctctagtggtaaataaattatttcgatgatatgtggatgtctttttcctatcagtaccatcatcgagtctagaaaacacctgtgatgcaataagactatctcaagctggaaaagtcataccacctttccgattgccctctgtgctttctcccttaaggacagtcacttcagaagtcatgctttaaagcacaagagtcaggccatatccatcaaggatagaagaaatccctgtgccgtctttttattcccttatttattgctatttggtaattgtttgagatttagtttccatccagcttgactgccgaccagaaaaaatgcagagagatgtttgcaccatgctttggctttctggttctatgttctgccaacgccagggccaaaagaactggtctagacagtatcccctgtagccccataacttggatagttgctgagccagccagatataacaagagccacgtgctttctggggttggttgtttgggatcagctacttgcctgtcagtttcactggtaccactgcaccacaaacaaaaaaacccaccctatttcctccaatttttttggctgctacctacaagaccagactcctcaaacgagttgccaatctcttaataaataggattaataaaaaaagtaattgtgactcaa

SEQ ID NO: 7164 - protein, 202 aa, Homo sapiens; identical to SEQ ID NO: 7162

SEQ ID NO: 7165 - DNA, 1285 bp, Homo sapiens
ggggtcatatcagaaagatatgtttgatgaaattaactacagaatcaagaagtatatactcaaaaatgcaaatactacaatatataagacaatgctggagtgcaatggtgcaatcttggctcactgcaacctccgcctcctgggttcaaatgattctcctgcctcagcctcccaagtagctgggactacagaccgcaaccaattgctcttccttcccattgaaagaaacccaggctgtacctgctctttcatctcctgtgtggaaaacatctatcggctggaagccctgagtcttcattttcaaggattttagttgtaagctgtttaaggcataagctaaagtttcaggcagaggtaattttagtagttaagcctgatttttacttccaccctctgtcctccagggctatatgggaagctttctgtgagtggataagctctttagctaagatgtaaacatgttccctgctatctgataaaggttcctggagactgacactttaaaaaaaaaaaaaaaaagaaagtgaggaaaaaaagaaaaggagaaactgaatccaaggcttacaaagggattagaaaactgtaccccagatggaaaattttatgggctctggagaaaatgtgtaagtgaaatatcggtatcataaaataacaggaaatagtgtaatctacctgatggagaaaattgtcactttaaaaaaactatcctaatttccttcaaaattgttcttgtttttgagccaataaacttcagctaagctcaccatgggtctttcttctgccaaactcctacttaccaacagaacctttgtgtgtttacaattgaaacttttccattctatttttttctaattaaaataaagccacccagaggcggacagaaatcatacaataaggaaagaaaattgctaatgatctgggtaaattatgatccagaagtttagaggaaaattagagtgcatattatagcaaagaactcaaaacaaatttggggtcaacccaaagaaatgtataagggggaaatcctaagttttcctttaataagtaataatgataatacaattagttttaactatgtgcatggtagaagataaatcagcagatgaatgcctgaggcacttactatggggaaatgtgatagtcatgtaatttttgctttgttttttttcttccccttcaactgctaggatagattatatgacttagtaaaccattgctgagtatacgaggaaaaacttgtttggttgcttagaccacatattatcaggattaatttcctcttatc

SEQ ID NO: 7166 - protein, 97 aa, Homo sapiens
MFDEINYRIKKYILKNANTTIYKTMLECNGAILAHCNLRLLGSNDSPASASQVAGTTDRNQLLFLPIERNPGCTCSFISCVENIYRLEALSLHFQGF

SEQ ID NO: 7167 - DNA, 1335 bp, Homo sapiens
gctatcctccccttcatttgaacagaggaagttcttcaccttttagaacccaatattcactcccagctttcctacttgaaaattcgtttgttatccttcccatattttctctaaacaaactttctcagaatgttgttaaaattctgaaagggatgacaaaaactgttggtacaggaaggcggcagagcaaggatatgtccagtgggagaaaagttaaaccattgcatgccaataaacaaagaccgcaaccaattgctcttccttcccattgaaagaaacccaggctgtacctgctctttcatctcctgtgtggaaaacatctatcggctggaagccctgagtcttcattttcaaggattttagttgtaagctgtttaaggcataagctaaagtttcaggcagaggtaattttagtagttaagcctgatttttacttccaccctctgtcctccagggctatatgggaagctttctgtgagtggataagctctttagctaagatgtaaacatgttccctgctatctgataaaggttcctggagactgacactttaaaaaaaaaaaaaaaaagaaagtgaggaaaaaaagaaaaggagaaactgaatccaaggcttacaaagggattagaaaactgtaccccagatggaaaattttatgggctctggagaaaatgtgtaagtgaaatatcggtatcataaaataacaggaaatagtgtaatctacctgatggagaaaattgtcactttaaaaaaactatcctaatttccttcaaaattgttcttgtttttgagccaataaacttcagctaagctcaccatgggtctttcttctgccaaactcctacttaccaacagaacctttgtgtgtttacaattgaaacttttccattctatttttttctaattaaaataaagccacccagaggcggacagaaatcatacaataaggaaagaaaattgctaatgatctgggtaaattatgatccagaagtttagaggaaaattagagtgcatattatagcaaagaactcaaaacaaatttggggtcaacccaaagaaatgtataagggggaaatcctaagttttcctttaataagtaataatgataatacaattagttttaactatgtgcatggtagaagataaatcagcagatgaatgcctgaggcacttactatggggaaatgtgatagtcatgtaatttttgctttgttttttttcttccccttcaactgctaggatagattatatgacttagtaaaccattgctgagtatacgaggaaaaacttgtttggttgcttagaccacatattatcaggattaatttcctcttatc

SEQ ID NO: 7168 - protein, 45 aa, Homo sapiens
MPINKDRNQLLFLPIERNPGCTCSFISCVENIYRLEALSLHFQGF

SEQ ID NO: 7169 - DNA, 1324 bp, Homo sapiens
ggagggctggctgagcggcgggacacaaggccccaaagcgagggtggtggaccagtgaccgcccgatagaaagaggaagactaacgggggaggctgggggcaggtggcgctgcccgtgcatctacagccggggctggcgacgggggagccacccactgggccctatttgggcccggcgacacctccacttgggcaatactggggtaaccgaggggaggatgtttcccgagctgtagaaaaccaggacgtaaaattgaaatccacctgagccatgcaggaagatcagagaggcgctatgcctccctgccggcgacacgatacagcgctgcagaaccgaccccgacgcagccgccatcgctgatgccactgccagtcatgcggttccgcccctgcgttgccgcgcggggccgcgcacgcaaatacgcaggcacgcgcgggagcacgcccgggagcgcgcatgcgcagcgctgctggcccgctctctgaggagctttcaatactttggggtcaagtttgaggcagttgtaactgtactgagtttagttttgctaataatggtattctacgtgtgtcagcctcgtgtggacttctgtaatgactaatggatatgtttatatcctgagcatttgctgtaggaattttaaatgcaatcccaaaactcaagattaccttatttggagaaatattcgtgttactatgtttaaaatttaatagaaccatattttacctttcactttgggactcgcacaggatgtttgcagctcttgatatacaggaactagaacgtgtcttttaagagcatgcggttttataattacgtggaagtatgctacgcaagggaaaaaagcctcttgctagtgttaagggtcttcataaacagaaaccgcaaggaacctgggatctgacagctgttggaggaatgcctgtgaggaaggaggaggaacagaagaatgctttgatgtcttaaatggtacatccaaacttaagtgaaatagagctgtgaggacattttggggagaagtgacctagataagcactgactgttgcattcatctctcttcttgctgattgtgatgatttcctgtgccatagccattcaaagtctgccaaaaaagctagcatgtaattttctttctctacttctctacatttggaggatggaaatgtagatgttcttccattgtgccagcctcctcattcttctttctccaatgccgcatcttcctgcaaacttcctgccacaactcaaacaacaggaaaataaatgatctgaaatcctcctgaactgcagcctacctatcgtggtctctatgggtgcaaactt

SEQ ID NO: 7170 - protein, 46 aa, Homo sapiens [sequence omitted]

SEQ ID NO: 7171 - DNA, 1403 bp, Homo sapiens
ggagggctggctgagcggcgggacacaaggccccaaagcgagggtggtggaccagtgaccgcccgatagaaagaggaagactaacgggggaggctgggggcaggtggcgctgcccgtgcatctacagccggggctggcgacgggggagccacccactgggccctatttgggcccggcgacacctccacttgggcaatactggggtaaccgaggggaggatgtttcccgagctgtagaaaaccaggacgtaaaattgaaatccacctgagccatgcaggaagatcagagaggcgctatgcctccctgccggcgacacgatacagcgctgcagaaccgaccccgacgcagccgccatcgctgatgccactgccagtcatgcggttccgcccctgcgttgccgcgcggggccgcgcacgcaaatacgcaggcacgcgcgggagcacgcccgggagcgcgcatgcgcagcgctgctggcccgctctctgaggagctttcaatactttggggtcaagtttgaggcagttgtaactgtactgagtttagttttgctaataatggtattctacgtgtgtcagcctcgtgtggacttctgtaatgactaatggatatgtttatatcctgagcatttgctgtaggaattttaaatgcaatcccaaaactcaagattaccttatttggagaaatattcgtgttactatgtttaaaatttaatagaaccatattttacctttcactttgggactcgcacaggatgtttgcagctcttgatatacaggaactagaacgtgtcttttaagagcatgcggttttataattacgtggaagtatgctacgcaagggaaaaaagcctcttgctagtgttaagggtcttcataaacagaaaccgcaaggaacctgggatctgacagctgttggaggaatgcctgtgaggaaggaggaggaacagaagaatgctttgatgtcttaaatggtacatccaaacttaagtgaaatagagctgtgaggacattttggggagaagtgacctagataagcactgactgttgcattcatctctcttcttgctgattgtgatgatttcctgtgccatagccattcaaagtctgccaaaaaaggccttgcctcctggatggcatttttgaacccaccctgggccagaggggagcccacttctttgaagacagaaacacaggactggcaacatttaccataagctgactgagcagccattgggccttgagtgaacattggtggtagccaggcagtacttgtctcagtacttgcctcaggcctggggtgtcggtgaccacagggagagcatccatctgcttgaggaaaggagaacaaagaaaataaagggcttaatcttgcacttgattgccagctcagccatagtagaatac

SEQ ID NO: 7172 - protein, 46 aa, Homo sapiens [sequence omitted]

SEQ ID NO: 7173 - DNA, 1897 bp, Homo sapiens
cgcggcaacgcaggggcggaaccgcatgactggcagtggcatcagcgatggcggctgcgtcggggtcggttctgcagcgctgtatcgtgtcgccggcagggaggcatagcgcctctctgatcttcctgcatggctcaggtgattctggacaaggattaagaatgtggatcaagcaggttttaaatcaagatttaacattccaacacataaaaattatttatccaacagctcctcccagatcatatactcctatgaaaggaggaatctccaatgtatggtttgacagatttaaaataaccaatgactgcccagaacaccttgaatcaattgatgtcatgtgtcaagtgcttactgatttgattgatgaagaagtaaaaagtggcatcaagaagaacaggatattaataggaggattctctatgggaggatgcatggcaatacatttagcatatagaaatcatcaagatgtggcaggagtatttgctctttctagttttctgaataaagcatctgctgtttaccaggctcttcagaagagtaatggtgtacttcctgaattatttcagtgtcatggtactgcagatgagttagttcttcattcttgggcagaagagacaaactcaatgttaaaatctctaggagtgaccacgaagtttcatagttttccaaatgtttaccatgagctaagcaaaactgagttagacatattgaagttatggattcttacaaagctgccaggagaaatggaaaaacaaaaatgaatgaatcaagagtgatttgttaatgtaagtgtaatgtctttgtgaaaagtgatttttactgccaaattataatgataattaaaatattaagaaataacactttcctgacttttttattattaaaatgcttatcactgtagacagtagctaatcttattaatgaaaaacaatagacaaacatctgtgcataatttttcagacacaattctgtaaatatttggaaaccttttaagtatttaaacttttaaatttttgaaataaagtattctaaactaatataaataaggacaatgaaaaaacatgaaaggacttagcataatgttattttatcttttctacaactttgtttaaattacctttccaaagatatttgtgtttatgtaattttccacggaataacattaatactctaggtttataaaccggtttcacattatttcatttgatcatcacaagagctttgtgaagtaagccgagaagttgttactggtatttaataatagcaatagaggagttaaagactttcccacagcttgcaggtcaagacaagaaattcaggtctcctaattctcagtggagctctatttctgttaacccaaattgctgctctgttttaggtctcaatttcatctgtaaaatgatactaatagtacttatcccattggatttttgttgagatttaaataaatagccaaaagccaatacataataaacactcaataaagattaaccataaggagagtcatgatctggttccaggaatacattgttagatgactgaaaaattgtattacttcaatgaaaatactataaataataacattttcatatattagttggttctcatgcatacataatctaattttatttgatcctcacaactgtttaagttttattaaatatacattatccctatttgtataaatagaatcatacaatacctgcctgctttcattcaacaaaattatcatgagatttttccatgttgtgtacatcaatagttcatctattttattgctcagtaatattccattgtgtggatgtatcactatttgtttacacattcaccactgatatataagttgcttccagtgtgaggctgttttaaataaagctgctatgaatattcatgtaag

SEQ ID NO: 7174 - protein, 237 aa, Homo sapiens
MAAASGSVLQRCIVSPAGRHSASLIFLHGSGDSGQGLRMWIKQVLNQDLTFQHIKIIYPTAPPRSYTPMKGGISNVWFDRFKITNDCPEHLESIDVMCQVLTDLIDEEVKSGIKKNRILIGGFSMGGCMAIHLAYRNHQDVAGVFALSSFLNKASAVYQALQKSNGVLPELFQCHGTADELVLHSWAEETNSMLKSLGVTTKFHSFPNVYHELSKTELDILKLWILTKLPGEMEKQK

SEQ ID NO: 7175 - DNA, 848 bp, Homo sapiens
aggggcggaaccgcatgactggcagtggcatcagcgatggcggctgcgtcggggtcggttctgcagcgctgtatcgtgtcgccggcagggaggcatagcgcctctctgatcttcctgcatggctcaggtgattctggacaaggattaagaatgtggatcaagcaggttttaaatcaagatttaacattccaacacataaaaattatttatccaacagctcctcccagatcatatactcctatgaaaggaggaatctccaatgtatggtttgacagatttaaaataaccaatgactgcccagaacaccttgaatcaattgatgtcatgtgtcaagtgcttactgatttgattgatgaagaagtaaaaagtggcatcaagaagaacaggatattaataggaggattctctatgggaggatgcatggcaatacatttagcatatagaaatcatcaagatgtggcaggagtatttgctctttctagttttctgaataaagcatctgctgtttaccaggctcttcagaagagtaatggtgtacttcctgaattatttcagtgtcatggtactgcagatgagttagttcttcattcttgggcagaagagacaaactcaatgttaaaatctctaggagtgaccacgaagtttcatagttttccaaatgtttaccatgagctaagcaaaactgagttagacatattgaagttatggattcttacaaagctgccaggagaaatggaaaaacaaaaatgaatgaatcaagagtgatttgttaatgtaagtgtaatgtctttgtgaaaagtgatttttactgccaaattataatgataattaaaatattaagaaataac

SEQ ID NO: 7176 - protein, 237 aa, Homo sapiens; identical to SEQ ID NO: 7174

SEQ ID NO: 7177 - DNA, 1702 bp, Homo sapiens
atgactggcagtggcatcagcgatggcggctgcgtcggggtcggttctgcagcgctgtatcgtgtcgccggcagggaggcatagcgcctctctgatcttcctgcatggctcaggtgattctggacaaggattaagaatgtggatcaagcaggttttaaatcaagatttaacattccaacacataaaaattatttatccaacagctcctcccaggaggattctctatgggaggatgcatggcaatacatttagcatatagaaatcatcaagatgtggcaggagtatttgctctttctagttttctgaataaagcatctgctgtttaccaggctcttcagaagagtaatggtgtacttcctgaattatttcagtgtcatggtactgcagatgagttagttcttcattcttgggcagaagagacaaactcaatgttaaaatctctaggagtgaccacgaagtttcatagttttccaaatgtttaccatgagctaagcaaaactgagttagacatattgaagttatggattcttacaaagctgccaggagaaatggaaaaacaaaaatgaatgaatcaagagtgatttgttaatgtaagtgtaatgtctttgtgaaaagtgatttttactgccaaattataatgataattaaaatattaagaaataacactttcctgacttttttattattaaaatgcttatcactgtagacagtagctaatcttattaatgaaaaacaatagacaaacatctgtgcataatttttcagacacaattctgtaaatatttggaaaccttttaagtatttaaacttttaaatttttgaaataaagtattctaaactaatataaataaggacaatgaaaaaacatgaaaggacttagcataatgttattttatcttttctacaactttgtttaaattacctttccaaagatatttgtgtttatgtaattttccacggaataacattaatactctaggtttataaaccggtttcacattatttcatttgatcatcacaagagctttgtgaagtaagccgagaagttgttactggtatttaataatagcaatagaggagttaaagactttcccacagcttgcaggtcaagacaagaaattcaggtctcctaattctcagtggagctctatttctgttaacccaaattgctgctctgttttaggtctcaatttcatctgtaaaatgatactaatagtacttatcccattggatttttgttgagatttaaataaatagccaaaagccaatacataataaacactcaataaagattaaccataaggagagtcatgatctggttccaggaatacattgttagatgactgaaaaattgtattacttcaatgaaaatactataaataataacattttcatatattagttggttctcatgcatacataatctaattttatttgatcctcacaactgtttaagttttattaaatatacattatccctatttgtataaatagaatcatacaatacctgcctgctttcattcaacaaaattatcatgagatttttccatgttgtgtacatcaatagttcatctattttattgctcagtaatattccattgtgtggatgtatcactatttgtttacacattcaccactgatatataagttgcttccagtgtgaggctgttttaaataaagctgctatgaatattcatgtaag

SEQ ID NO: 7178 - protein, 113 aa, Homo sapiens [sequence omitted]

SEQ ID NO: 7179 - DNA, 780 bp, Homo sapiens
ggcagtggcatcagcgatggcggctgcgtcggggtcggttctgcagcgctgtatcgtgtcgccggcagggaggcatagcgcctctctgatcttcctgcatggctcaggtgattctggacaaggattaagaatgtggatcaagcaggttttaaatcaagatttaacattccaacacataaaaattatttatccaacagctcctcccagatttaaaataaccaatgactgcccagaacaccttgaatcaattgatgtcatgtgtcaagtgcttactgatttgattgatgaagaagtaaaaagtggcatcaagaagaacaggatattaataggaggattctctatgggaggatgcatggcaatacatttagcatatagaaatcatcaagatgtggcaggagtatttgctctttctagttttctgaataaagcatctgctgtttaccaggctcttcagaagagtaatggtgtacttcctgaattatttcagtgtcatggtactgcagatgagttagttcttcattcttgggcagaagagacaaactcaatgttaaaatctctaggagtgaccacgaagtttcatagttttccaaatgtttaccatgagctaagcaaaactgagttagacatattgaagttatggattcttacaaagctgccaggagaaatggaaaaacaaaaatgaatgaatcaagagtgatttgttaatgtaagtgtaatgtctttgtgaaaagtgatttttactgccaaattataatgataattaaaatattaagaaataac

SEQ ID NO: 7180 - protein, 221 aa, Homo sapiens
MAAASGSVLQRCIVSPAGRHSASLIFLHGSGDSGQGLRMWIKQVLNQDLTFQHIKIIYPTAPPRFKITNDCPEHLESIDVMCQVLTDLIDEEVKSGIKKNRILIGGFSMGGCMAIHLAYRNHQDVAGVFALSSFLNKASAVYQALQKSNGVLPELFQCHGTADELVLHSWAEETNSMLKSLGVTTKFHSFPNVYHELSKTELDILKLWILTKLPGEMEKQK

SEQ ID NO: 7181 - DNA, 1818 bp, Homo sapiens
ggcagtggcatcagcgatggcggctgcgtcggggtcggttctgcagcgctgtatcgtgtcgccggcagggaggcatagcgcctctctgatcttcctgcatggctcaggtgattctggacaaggattaagaatgtggatcaagcaggttttaaatcaagatttaacattccaacacataaaaattatttatccaacagctcctcccagatttaaaataaccaatgactgcccagaacaccttgaatcaattgatgtcatgtgtcaagtgcttactgatttgattgatgaagaagtaaaaagtggcatcaagaagaacaggatattaataggaggattctctatgggaggatgcatggcaatacatttagcatatagaaatcatcaagatgtggcaggagtatttgctctttctagttttctgaataaagcatctgctgtttaccaggctcttcagaagagtaatggtgtacttcctgaattatttcagtgtcatggtactgcagatgagttagttcttcattcttgggcagaagagacaaactcaatgttaaaatctctaggagtgaccacgaagtttcatagttttccaaatgtttaccatgagctaagcaaaactgagttagacatattgaagttatggattcttacaaagctgccaggagaaatggaaaaacaaaaatgaatgaatcaagagtgatttgttaatgtaagtgtaatgtctttgtgaaaagtgatttttactgccaaattataatgataattaaaatattaagaaataacactttcctgacttttttattattaaaatgcttatcactgtagacagtagctaatcttattaatgaaaaacaatagacaaacatctgtgcataatttttcagacacaattctgtaaatatttggaaaccttttaagtatttaaacttttaaatttttgaaataaagtattctaaactaatataaataaggacaatgaaaaaacatgaaaggacttagcataatgttattttatcttttctacaactttgtttaaattacctttccaaagatatttgtgtttatgtaattttccacggaataacattaatactctaggtttataaaccggtttcacattatttcatttgatcatcacaagagctttgtgaagtaagccgagaagttgttactggtatttaataatagcaatagaggagttaaagactttcccacagcttgcaggtcaagacaagaaattcaggtctcctaattctcagtggagctctatttctgttaacccaaattgctgctctgttttaggtctcaatttcatctgtaaaatgatactaatagtacttatcccattggatttttgttgagatttaaataaatagccaaaagccaatacataataaacactcaataaagattaaccataaggagagtcatgatctggttccaggaatacattgttagatgactgaaaaattgtattacttcaatgaaaatactataaataataacattttcatatattagttggttctcatgcatacataatctaattttatttgatcctcacaactgtttaagttttattaaatatacattatccctatttgtataaatagaatcatacaatacctgcctgctttcattcaacaaaattatcatgagatttttccatgttgtgtacatcaatagttcatctattttattgctcagtaatattccattgtgtggatgtatcactatttgtttacacattcaccactgatatataagttgcttccagtgtgaggctgttttaaataaagctgctatgaatattcatgtaag

SEQ ID NO: 7182 - protein, 221 aa, Homo sapiens; identical to SEQ ID NO: 7180

SEQ ID NO: 7183 - DNA, 637 bp, Homo sapiens
gcagtggcatcagcgatggcggctgcgtcggggtcggttctgcagcgctgtatcgtgtcgccggcagggaggcatagcgcctctctgatcttcctgcatggctcaggtgattctggacaaggattaagaatgtggatcaagcaggttttaaatcaagatttaacattccaacacataaaaattatttatccaacagctcctcccagttacactgttggaccaagttttgccagatcatatactcctatgaaaggaggaatctccaatgtatggtttgacagatttaaaataaccaatgactgcccagaacaccttgaatcaattgatgtcatgtgtcaagtgcttactgatttgattgatgaagaagtaaaaagtggcatcaagaagaacaggatattaataggtaagacctttaaatgttggtaatttatcactgttcacttttgtctaattctatacatcaaatcttacttggaacattatttagaagcacttgtatatcattcgatgcattcatagtttcagataaactttacatattgaggatttcaaagatattagaattataaacagcagcgcatgaaactttaattgattttctttttgaataataacggattttgagactcttgtggca

SEQ ID NO: 7184 - protein, 136 aa, Homo sapiens
MAAASGSVLQRCIVSPAGRHSASLIFLHGSGDSGQGLRMWIKQVLNQDLTFQHIKIIYPTAPPSYTVGPSFARSYTPMKGGISNVWFDRFKITNDCPEHLESIDVMCQVLTDLIDEEVKSGIKKNRILIGKTFKCW

SEQ ID NO: 7185 - DNA, 650 bp, Homo sapiens
catcagcgatggcggctgcgtcggggtcggttctgcagcgctgtatcgtgtcgccggcagggaggcatagcgcctctctgatcttcctgcatggctcaggtgattctggacaaggattaagaatgtggatcaagcaggttttaaatcaagatttaacattccaacacataaaaattatttatccaacagctcctcccaggaggattctctatgggaggatgcatggcaatacatttagcatatagaaatcatcaagatgtggcaggagtatttgctctttctagttttctgaataaagcatctgctgtttaccaggctcttcagaagagtaatggtgtacttcctgaattatttcagtgtcatggtactgcagatgagttagttcttcattcttgggcagaagagacaaactcaatgttaaaatctctaggagtgaccacgaagtttcatagttttccaaatgtttaccatgagctaagcaaaactgagttagacatattgaagttatggattcttacaaagctgccaggagaaatggaaaaacaaaaatgaatgaatcaagagtgatttgttaatgtaagtgtaatgtctttgtgaaaagtgatttttactgccaaattataatgataattaaaatattaagaaataac

SEQ ID NO: 7186 - protein, 113 aa, Homo sapiens [sequence omitted]

SEQ ID NO: 7187 - DNA, 1714 bp, Homo sapiens
atcagcgatggcggctgcgtcggggtcggttctgcagcgctgtatcgtgtcgccggcagggaggcatagcgcctctctgatcttcctgcatggctcaggtgattctggacaaggattaagaatgtggatcaagcaggttttaaatcaagatttaacattccaacacataaaaattatttatccaacagctcctcccagttacactgttggaccaagttttgccaggaggattctctatgggaggatgcatggcaatacatttagcatatagaaatcatcaagatgtggcaggagtatttgctctttctagttttctgaataaagcatctgctgtttaccaggctcttcagaagagtaatggtgtacttcctgaattatttcagtgtcatggtactgcagatgagttagttcttcattcttgggcagaagagacaaactcaatgttaaaatctctaggagtgaccacgaagtttcatagttttccaaatgtttaccatgagctaagcaaaactgagttagacatattgaagttatggattcttacaaagctgccaggagaaatggaaaaacaaaaatgaatgaatcaagagtgatttgttaatgtaagtgtaatgtctttgtgaaaagtgatttttactgccaaattataatgataattaaaatattaagaaataacactttcctgacttttttattattaaaatgcttatcactgtagacagtagctaatcttattaatgaaaaacaatagacaaacatctgtgcataatttttcagacacaattctgtaaatatttggaaaccttttaagtatttaaacttttaaatttttgaaataaagtattctaaactaatataaataaggacaatgaaaaaacatgaaaggacttagcataatgttattttatcttttctacaactttgtttaaattacctttccaaagatatttgtgtttatgtaattttccacggaataacattaatactctaggtttataaaccggtttcacattatttcatttgatcatcacaagagctttgtgaagtaagccgagaagttgttactggtatttaataatagcaatagaggagttaaagactttcccacagcttgcaggtcaagacaagaaattcaggtctcctaattctcagtggagctctatttctgttaacccaaattgctgctctgttttaggtctcaatttcatctgtaaaatgatactaatagtacttatcccattggatttttgttgagatttaaataaatagccaaaagccaatacataataaacactcaataaagattaaccataaggagagtcatgatctggttccaggaatacattgttagatgactgaaaaattgtattacttcaatgaaaatactataaataataacattttcatatattagttggttctcatgcatacataatctaattttatttgatcctcacaactgtttaagttttattaaatatacattatccctatttgtataaatagaatcatacaatacctgcctgctttcattcaacaaaattatcatgagatttttccatgttgtgtacatcaatagttcatctattttattgctcagtaatattccattgtgtggatgtatcactatttgtttacacattcaccactgatatataagttgcttccagtgtgaggctgttttaaataaagctgctatgaatattcatgtaag

SEQ ID NO: 7188 - protein, 113 aa, Homo sapiens [sequence omitted]

SEQ ID NO: 7189 - DNA, 1140 bp, Homo sapiens
cagcgatggcggctgcgtcggggtcggttctgcagcgctgtatcgtgtcgccggcagggaggcatagcgcctctctgatcttcctgcatggctcaggtggatttcaattttacgtcctggttttctacagctcgggaaacatcctcccctcggttaccccagtattgcccaagtggaggtgtcgccgggcccaaatagggcccagtgggtggctcccccgtcgccagccccggctgtagatgcacgggcagcgccacctgcccccagcctcccccgttagtcttcctctttctatcgggcggtcactggtccaccaccctcgctttggggccttgtgtcccgccgctcagccagccctccatccccacaacacacctccccattcctcgccccaagtttaaacagagcaagttagtaaggtgattctggacaaggattaagaatgtggatcaagcaggttttaaatcaagatttaacattccaacacataaaaattatttatccaacagctcctcccagatcatatactcctatgaaaggaggaatctccaatgtatggtttgacagatttaaaataaccaatgactgcccagaacaccttgaatcaattgatgtcatgtgtcaagtgcttactgatttgattgatgaagaagtaaaaagtggcatcaagaagaacaggatattaataggaggattctctatgggaggatgcatggcaatacatttagcatatagaaatcatcaagatgtggcaggagtatttgctctttctagttttctgaataaagcatctgctgtttaccaggctcttcagaagagtaatggtgtacttcctgaattatttcagtgtcatggtactgcagatgagttagttcttcattcttgggcagaagagacaaactcaatgttaaaatctctaggagtgaccacgaagtttcatagttttccaaatgtttaccatgagctaagcaaaactgagttagacatattgaagttatggattcttacaaagctgccaggagaaatggaaaaacaaaaatgaatgaatcaagagtgatttgttaatgtaagtgtaatgtctttgtgaaaagtgatttttactgccaaattataatgataattaaaatattaagaaataac

SEQ ID NO: 7190 - protein, 199 aa, Homo sapiens
MWIKQVLNQDLTFQHIKIIYPTAPPRSYTPMKGGISNVWFDRFKITNDCPEHLESIDVMCQVLTDLIDEEVKSGIKKNRILIGGFSMGGCMAIHLAYRNHQDVAGVFALSSFLNKASAVYQALQKSNGVLPELFQCHGTADELVLHSWAEETNSMLKSLGVTTKFHSFPNVYHELSKTELDILKLWILTKLPGEMEKQK

SEQ ID NO: 7191 - DNA, 2178 bp, Homo sapiens
cagcgatggcggctgcgtcggggtcggttctgcagcgctgtatcgtgtcgccggcagggaggcatagcgcctctctgatcttcctgcatggctcaggtggatttcaattttacgtcctggttttctacagctcgggaaacatcctcccctcggttaccccagtattgcccaagtggaggtgtcgccgggcccaaatagggcccagtgggtggctcccccgtcgccagccccggctgtagatgcacgggcagcgccacctgcccccagcctcccccgttagtcttcctctttctatcgggcggtcactggtccaccaccctcgctttggggccttgtgtcccgccgctcagccagccctccatccccacaacacacctccccattcctcgccccaagtttaaacagagcaagttagtaaggtgattctggacaaggattaagaatgtggatcaagcaggttttaaatcaagatttaacattccaacacataaaaattatttatccaacagctcctcccagatcatatactcctatgaaaggaggaatctccaatgtatggtttgacagatttaaaataaccaatgactgcccagaacaccttgaatcaattgatgtcatgtgtcaagtgcttactgatttgattgatgaagaagtaaaaagtggcatcaagaagaacaggatattaataggaggattctctatgggaggatgcatggcaatacatttagcatatagaaatcatcaagatgtggcaggagtatttgctctttctagttttctgaataaagcatctgctgtttaccaggctcttcagaagagtaatggtgtacttcctgaattatttcagtgtcatggtactgcagatgagttagttcttcattcttgggcagaagagacaaactcaatgttaaaatctctaggagtgaccacgaagtttcatagttttccaaatgtttaccatgagctaagcaaaactgagttagacatattgaagttatggattcttacaaagctgccaggagaaatggaaaaacaaaaatgaatgaatcaagagtgatttgttaatgtaagtgtaatgtctttgtgaaaagtgatttttactgccaaattataatgataattaaaatattaagaaataacactttcctgacttttttattattaaaatgcttatcactgtagacagtagctaatcttattaatgaaaaacaatagacaaacatctgtgcataatttttcagacacaattctgtaaatatttggaaaccttttaagtatttaaacttttaaatttttgaaataaagtattctaaactaatataaataaggacaatgaaaaaacatgaaaggacttagcataatgttattttatcttttctacaactttgtttaaattacctttccaaagatatttgtgtttatgtaattttccacggaataacattaatactctaggtttataaaccggtttcacattatttcatttgatcatcacaagagctttgtgaagtaagccgagaagttgttactggtatttaataatagcaatagaggagttaaagactttcccacagcttgcaggtcaagacaagaaattcaggtctcctaattctcagtggagctctatttctgttaacccaaattgctgctctgttttaggtctcaatttcatctgtaaaatgatactaatagtacttatcccattggatttttgttgagatttaaataaatagccaaaagccaatacataataaacactcaataaagattaaccataaggagagtcatgatctggttccaggaatacattgttagatgactgaaaaattgtattacttcaatgaaaatactataaataataacattttcatatattagttggttctcatgcatacataatctaattttatttgatcctcacaactgtttaagttttattaaatatacattatccctatttgtataaatagaatcatacaatacctgcctgctttcattcaacaaaattatcatgagatttttccatgttgtgtacatcaatagttcatctattttattgctcagtaatattccattgtgtggatgtatcactatttgtttacacattcaccactgatatataagttgcttccagtgtgaggctgttttaaataaagctgctatgaatattcatgtaag

SEQ ID NO: 7192 - protein, 199 aa, Homo sapiens; identical to SEQ ID NO: 7190

SEQ ID NO: 7193 - DNA, 835 bp, Homo sapiens
cggctgcgtcggggtcggttctgcagcgctgtatcgtgtcgccggcagggaggcatagcgcctctctgatcttcctgcatggctcaggtgattctggacaaggattaagaatgtggatcaagcaggttttaaatcaagatttaacattccaacacataaaaattatttatccaacagctcctcccagttacactgttggaccaagttttgccagatcatatactcctatgaaaggaggaatctccaatgtatggtttgacagatttaaaataaccaatgactgcccagaacaccttgaatcaattgatgtcatgtgtcaagtgcttactgatttgattgatgaagaagtaaaaagtggcatcaagaagaacaggatattaataggaggattctctatgggaggatgcatggcaatacatttagcatatagaaatcatcaagatgtggcaggagtatttgctctttctagttttctgaataaagcatctgctgtttaccaggctcttcagaagagtaatggtgtacttcctgaattatttcagtgtcatggtactgcagatgagttagttcttcattcttgggcagaagagacaaactcaatgttaaaatctctaggagtgaccacgaagtttcatagttttccaaatgtttaccatgagctaagcaaaactgagttagacatattgaagttatggattcttacaaagctgccaggagaaatggaaaaacaaaaatgaatgaatcaagagtgatttgttaatgtaagtgtaatgtctttgtgaaaagtgatttttactgccaaattataatgataattaaaatattaagaaataac

SEQ ID NO: 7194 - protein, 208 aa, Homo sapiens
MWIKQVLNQDLTFQHIKIIYPTAPPSYTVGPSFARSYTPMKGGISNVWFDRFKITNDCPEHLESIDVMCQVLTDLIDEEVKSGIKKNRILIGGFSMGGCMAIHLAYRNHQDVAGVFALSSFLNKASAVYQALQKSNGVLPELFQCHGTADELVLHSWAEETNSMLKSLGVTTKFHSFPNVYHELSKTELDILKLWILTKLPGEMEKQK

SEQ ID NO: 7195 - DNA, 1873 bp, Homo sapiens
cggctgcgtcggggtcggttctgcagcgctgtatcgtgtcgccggcagggaggcatagcgcctctctgatcttcctgcatggctcaggtgattctggacaaggattaagaatgtggatcaagcaggttttaaatcaagatttaacattccaacacataaaaattatttatccaacagctcctcccagttacactgttggaccaagttttgccagatcatatactcctatgaaaggaggaatctccaatgtatggtttgacagatttaaaataaccaatgactgcccagaacaccttgaatcaattgatgtcatgtgtcaagtgcttactgatttgattgatgaagaagtaaaaagtggcatcaagaagaacaggatattaataggaggattctctatgggaggatgcatggcaatacatttagcatatagaaatcatcaagatgtggcaggagtatttgctctttctagttttctgaataaagcatctgctgtttaccaggctcttcagaagagtaatggtgtacttcctgaattatttcagtgtcatggtactgcagatgagttagttcttcattcttgggcagaagagacaaactcaatgttaaaatctctaggagtgaccacgaagtttcatagttttccaaatgtttaccatgagctaagcaaaactgagttagacatattgaagttatggattcttacaaagctgccaggagaaatggaaaaacaaaaatgaatgaatcaagagtgatttgttaatgtaagtgtaatgtctttgtgaaaagtgatttttactgccaaattataatgataattaaaatattaagaaataacactttcctgacttttttattattaaaatgcttatcactgtagacagtagctaatcttattaatgaaaaacaatagacaaacatctgtgcataatttttcagacacaattctgtaaatatttggaaaccttttaagtatttaaacttttaaatttttgaaataaagtattctaaactaatataaataaggacaatgaaaaaacatgaaaggacttagcataatgttattttatcttttctacaactttgtttaaattacctttccaaagatatttgtgtttatgtaattttccacggaataacattaatactctaggtttataaaccggtttcacattatttcatttgatcatcacaagagctttgtgaagtaagccgagaagttgttactggtatttaataatagcaatagaggagttaaagactttcccacagcttgcaggtcaagacaagaaattcaggtctcctaattctcagtggagctctatttctgttaacccaaattgctgctctgttttaggtctcaatttcatctgtaaaatgatactaatagtacttatcccattggatttttgttgagatttaaataaatagccaaaagccaatacataataaacactcaataaagattaaccataaggagagtcatgatctggttccaggaatacattgttagatgactgaaaaattgtattacttcaatgaaaatactataaataataacattttcatatattagttggttctcatgcatacataatctaattttatttgatcctcacaactgtttaagttttattaaatatacattatccctatttgtataaatagaatcatacaatacctgcctgctttcattcaacaaaattatcatgagatttttccatgttgtgtacatcaatagttcatctattttattgctcagtaatattccattgtgtggatgtatcactatttgtttacacattcaccactgatatataagttgcttccagtgtgaggctgttttaaataaagctgctatgaatattcatgtaag

SEQ ID NO: 7196 - protein, 208 aa, Homo sapiens; identical to SEQ ID NO: 7194

SEQ ID NO: 7197 - DNA, 905 bp, Homo sapiens
agcgcctctctgatcttcctgcatggctcaggtggatttcaattttacgtcctggttttctacagctcgggaaacatcctcccctcggttaccccagtattgcccaagtggaggtgtcgccgggcccaaatagggcccagtgggtggctcccccgtcgccagccccggctgtagatgcacgggcagcgccacctgcccccagcctcccccgttagtcttcctctttctatcgggcggtcactggtccaccaccctcgctttggggccttgtgtcccgccgctcagccagccctccatccccacaacacacctccccattcctcgccccaagtttaaacagagcaagttagtaaggtgattctggacaaggattaagaatgtggatcaagcaggttttaaatcaagatttaacattccaacacataaaaattatttatccaacagctcctcccaggaggattctctatgggaggatgcatggcaatacatttagcatatagaaatcatcaagatgtggcaggagtatttgctctttctagttttctgaataaagcatctgctgtttaccaggctcttcagaagagtaatggtgtacttcctgaattatttcagtgtcatggtactgcagatgagttagttcttcattcttgggcagaagagacaaactcaatgttaaaatctctaggagtgaccacgaagtttcatagttttccaaatgtttaccatgagctaagcaaaactgagttagacatattgaagttatggattcttacaaagctgccaggagaaatggaaaaacaaaaatgaatgaatcaagagtgatttgttaatgtaagtgtaatgtctttgtgaaaagtgatttttactgccaaattataatgataattaaaatattaagaaataac

SEQ ID NO: 7198 - protein, 113 aa, Homo sapiens [sequence omitted]

SEQ ID NO: 7199 - DNA, 773 bp, Homo sapiens
gatgaaaagcttgtcagacttttcgaagaaagtggtctttgagccgagacgggtgattctggacaaggattaagaatgtggatcaagcaggttttaaatcaagatttaacattccaacacataaaaattatttatccaacagctcctcccagatcatatactcctatgaaaggaggaatctccaatgtatggtttgacagatttaaaataaccaatgactgcccagaacaccttgaatcaattgatgtcatgtgtcaagtgcttactgatttgattgatgaagaagtaaaaagtggcatcaagaagaacaggatattaataggaggattctctatgggaggatgcatggcaatacatttagcatatagaaatcatcaagatgtggcaggagtatttgctctttctagttttctgaataaagcatctgctgtttaccaggctcttcagaagagtaatggtgtacttcctgaattatttcagtgtcatggtactgcagatgagttagttcttcattcttgggcagaagagacaaactcaatgttaaaatctctaggagtgaccacgaagtttcatagttttccaaatgtttaccatgagctaagcaaaactgagttagacatattgaagttatggattcttacaaagctgccaggagaaatggaaaaacaaaaatgaatgaatcaagagtgatttgttaatgtaagtgtaatgtctttgtgaaaagtgatttttactgccaaattataatgataattaaaatattaagaaataac

SEQ ID NO: 7200 - protein, 199 aa, Homo sapiens; identical to SEQ ID NO: 7190

SEQ ID NO: 7201 - DNA, 1811 bp, Homo sapiens
gatgaaaagcttgtcagacttttcgaagaaagtggtctttgagccgagacgggtgattctggacaaggattaagaatgtggatcaagcaggttttaaatcaagatttaacattccaacacataaaaattatttatccaacagctcctcccagatcatatactcctatgaaaggaggaatctccaatgtatggtttgacagatttaaaataaccaatgactgcccagaacaccttgaatcaattgatgtcatgtgtcaagtgcttactgatttgattgatgaagaagtaaaaagtggcatcaagaagaacaggatattaataggaggattctctatgggaggatgcatggcaatacatttagcatatagaaatcatcaagatgtggcaggagtatttgctctttctagttttctgaataaagcatctgctgtttaccaggctcttcagaagagtaatggtgtacttcctgaattatttcagtgtcatggtactgcagatgagttagttcttcattcttgggcagaagagacaaactcaatgttaaaatctctaggagtgaccacgaagtttcatagttttccaaatgtttaccatgagctaagcaaaactgagttagacatattgaagttatggattcttacaaagctgccaggagaaatggaaaaacaaaaatgaatgaatcaagagtgatttgttaatgtaagtgtaatgtctttgtgaaaagtgatttttactgccaaattataatgataattaaaatattaagaaataacactttcctgacttttttattattaaaatgcttatcactgtagacagtagctaatcttattaatgaaaaacaatagacaaacatctgtgcataatttttcagacacaattctgtaaatatttggaaaccttttaagtatttaaacttttaaatttttgaaataaagtattctaaactaatataaataaggacaatgaaaaaacatgaaaggacttagcataatgttattttatcttttctacaactttgtttaaattacctttccaaagatatttgtgtttatgtaattttccacggaataacattaatactctaggtttataaaccggtttcacattatttcatttgatcatcacaagagctttgtgaagtaagccgagaagttgttactggtatttaataatagcaatagaggagttaaagactttcccacagcttgcaggtcaagacaagaaattcaggtctcctaattctcagtggagctctatttctgttaacccaaattgctgctctgttttaggtctcaatttcatctgtaaaatgatactaatagtacttatcccattggatttttgttgagatttaaataaatagccaaaagccaatacataataaacactcaataaagattaaccataaggagagtcatgatctggttccaggaatacattgttagatgactgaaaaattgtattacttcaatgaaaatactataaataataacattttcatatattagttggttctcatgcatacataatctaattttatttgatcctcacaactgtttaagttttattaaatatacattatccctatttgtataaatagaatcatacaatacctgcctgctttcattcaacaaaattatcatgagatttttccatgttgtgtacatcaatagttcatctattttattgctcagtaatattccattgtgtggatgtatcactatttgtttacacattcaccactgatatataagttgcttccagtgtgaggctgttttaaataaagctgctatgaatattcatgtaag

SEQ ID NO: 7202 - protein, 199 aa, Homo sapiens; identical to SEQ ID NO: 7190

SEQ ID NO: 7203 - DNA, 726 bp, Homo sapiens
aaaatgaggccagacaggttcagcagcttggccaaggtctcttagctgttactgtgattctggacaaggattaagaatgtggatcaagcaggttttaaatcaagatttaacattccaacacataaaaattatttatccaacagctcctcccagatttaaaataaccaatgactgcccagaacaccttgaatcaattgatgtcatgtgtcaagtgcttactgatttgattgatgaagaagtaaaaagtggcatcaagaagaacaggatattaataggaggattctctatgggaggatgcatggcaatacatttagcatatagaaatcatcaagatgtggcaggagtatttgctctttctagttttctgaataaagcatctgctgtttaccaggctcttcagaagagtaatggtgtacttcctgaattatttcagtgtcatggtactgcagatgagttagttcttcattcttgggcagaagagacaaactcaatgttaaaatctctaggagtgaccacgaagtttcatagttttccaaatgtttaccatgagctaagcaaaactgagttagacatattgaagttatggattcttacaaagctgccaggagaaatggaaaaacaaaaatgaatgaatcaagagtgatttgttaatgtaagtgtaatgtctttgtgaaaagtgatttttactgccaaattataatgataattaaaatattaagaaataac

SEQ ID NO: 7204 - protein, 183 aa, Homo sapiens
MWIKQVLNQDLTFQHIKIIYPTAPPRFKITNDCPEHLESIDVMCQVLTDLIDEEVKSGIKKNRILIGGFSMGGCMAIHLAYRNHQDVAGVFALSSFLNKASAVYQALQKSNGVLPELFQCHGTADELVLHSWAEETNSMLKSLGVTTKFHSFPNVYHELSKTELDILKLWILTKLPGEMEKQK

SEQ ID NO: 7205 - DNA, 1764 bp, Homo sapiens
aaaatgaggccagacaggttcagcagcttggccaaggtctcttagctgttactgtgattctggacaaggattaagaatgtggatcaagcaggttttaaatcaagatttaacattccaacacataaaaattatttatccaacagctcctcccagatttaaaataaccaatgactgcccagaacaccttgaatcaattgatgtcatgtgtcaagtgcttactgatttgattgatgaagaagtaaaaagtggcatcaagaagaacaggatattaataggaggattctctatgggaggatgcatggcaatacatttagcatatagaaatcatcaagatgtggcaggagtatttgctctttctagttttctgaataaagcatctgctgtttaccaggctcttcagaagagtaatggtgtacttcctgaattatttcagtgtcatggtactgcagatgagttagttcttcattcttgggcagaagagacaaactcaatgttaaaatctctaggagtgaccacgaagtttcatagttttccaaatgtttaccatgagctaagcaaaactgagttagacatattgaagttatggattcttacaaagctgccaggagaaatggaaaaacaaaaatgaatgaatcaagagtgatttgttaatgtaagtgtaatgtctttgtgaaaagtgatttttactgccaaattataatgataattaaaatattaagaaataacactttcctgacttttttattattaaaatgcttatcactgtagacagtagctaatcttattaatgaaaaacaatagacaaacatctgtgcataatttttcagacacaattctgtaaatatttggaaaccttttaagtatttaaacttttaaatttttgaaataaagtattctaaactaatataaataaggacaatgaaaaaacatgaaaggacttagcataatgttattttatcttttctacaactttgtttaaattacctttccaaagatatttgtgtttatgtaattttccacggaataacattaatactctaggtttataaaccggtttcacattatttcatttgatcatcacaagagctttgtgaagtaagccgagaagttgttactggtatttaataatagcaatagaggagttaaagactttcccacagcttgcaggtcaagacaagaaattcaggtctcctaattctcagtggagctctatttctgttaacccaaattgctgctctgttttaggtctcaatttcatctgtaaaatgatactaatagtacttatcccattggatttttgttgagatttaaataaatagccaaaagccaatacataataaacactcaataaagattaaccataaggagagtcatgatctggttccaggaatacattgttagatgactgaaaaattgtattacttcaatgaaaatactataaataataacattttcatatattagttggttctcatgcatacataatctaattttatttgatcctcacaactgtttaagttttattaaatatacattatccctatttgtataaatagaatcatacaatacctgcctgctttcattcaacaaaattatcatgagatttttccatgttgtgtacatcaatagttcatctattttattgctcagtaatattccattgtgtggatgtatcactatttgtttacacattcaccactgatatataagttgcttccagtgtgaggctgttttaaataaagctgctatgaatattcatgtaag

SEQ ID NO: 7206 - protein, 183 aa, Homo sapiens; identical to SEQ ID NO: 7204

SEQ ID NO: 7207 - DNA, 676 bp, Homo sapiens
taaatttaacattcacttaaatatctattgctgtttcttttgggttcttccagaataattttttcttattctttaccttaatttttaagggtattcaagaagatctccatgtttataaaatctaagttaaccatttctccccttttcattctgatgtataagtttacagcccagaaataggttgctaaagctatgttttaatattacgtgaatgcacaaaagatggaggattctctatgggaggatgcatggcaatacatttagcatatagaaatcatcaagatgtggcaggagtatttgctctttctagttttctgaataaagcatctgctgtttaccaggctcttcagaagagtaatggtgtacttcctgaattatttcagtgtcatggtactgcagatgagttagttcttcattcttgggcagaagagacaaactcaatgttaaaatctctaggagtgaccacgaagtttcatagttttccaaatgtttaccatgagctaagcaaaactgagttagacatattgaagttatggattcttacaaagctgccaggagaaatggaaaaacaaaaatgaatgaatcaagagtgatttgttaatgtaagtgtaatgtctttgtgaaaagtgatttttactgccaaattataatgataattaaaatattaagaaataac

SEQ ID NO: 7208 - protein, 113 aa, Homo sapiens [sequence omitted]

SEQ ID NO: 7209 - DNA, 1714 bp, Homo sapiens
taaatttaacattcacttaaatatctattgctgtttcttttgggttcttccagaataattttttcttattctttaccttaatttttaagggtattcaagaagatctccatgtttataaaatctaagttaaccatttctccccttttcattctgatgtataagtttacagcccagaaataggttgctaaagctatgttttaatattacgtgaatgcacaaaagatggaggattctctatgggaggatgcatggcaatacatttagcatatagaaatcatcaagatgtggcaggagtatttgctctttctagttttctgaataaagcatctgctgtttaccaggctcttcagaagagtaatggtgtacttcctgaattatttcagtgtcatggtactgcagatgagttagttcttcattcttgggcagaagagacaaactcaatgttaaaatctctaggagtgaccacgaagtttcatagttttccaaatgtttaccatgagctaagcaaaactgagttagacatattgaagttatggattcttacaaagctgccaggagaaatggaaaaacaaaaatgaatgaatcaagagtgatttgttaatgtaagtgtaatgtctttgtgaaaagtgatttttactgccaaattataatgataattaaaatattaagaaataacactttcctgacttttttattattaaaatgcttatcactgtagacagtagctaatcttattaatgaaaaacaatagacaaacatctgtgcataatttttcagacacaattctgtaaatatttggaaaccttttaagtatttaaacttttaaatttttgaaataaagtattctaaactaatataaataaggacaatgaaaaaacatgaaaggacttagcataatgttattttatcttttctacaactttgtttaaattacctttccaaagatatttgtgtttatgtaattttccacggaataacattaatactctaggtttataaaccggtttcacattatttcatttgatcatcacaagagctttgtgaagtaagccgagaagttgttactggtatttaataatagcaatagaggagttaaagactttcccacagcttgcaggtcaagacaagaaattcaggtctcctaattctcagtggagctctatttctgttaacccaaattgctgctctgttttaggtctcaatttcatctgtaaaatgatactaatagtacttatcccattggatttttgttgagatttaaataaatagccaaaagccaatacataataaacactcaataaagattaaccataaggagagtcatgatctggttccaggaatacattgttagatgactgaaaaattgtattacttcaatgaaaatactataaataataacattttcatatattagttggttctcatgcatacataatctaattttatttgatcctcacaactgtttaagttttattaaatatacattatccctatttgtataaatagaatcatacaatacctgcctgctttcattcaacaaaattatcatgagatttttccatgttgtgtacatcaatagttcatctattttattgctcagtaatattccattgtgtggatgtatcactatttgtttacacattcaccactgatatataagttgcttccagtgtgaggctgttttaaataaagctgctatgaatattcatgtaag

SEQ ID NO: 7210 - protein, 113 aa, Homo sapiens [sequence omitted]

SEQ ID NO: 7211 - DNA, 1114 bp, Homo sapiens
gtgactggcatagaattggtacattaaagagacaataacagtttgactaatttttttttcaaactttggttttaaaaactacatataggcatacatgtttcatttttattatatcaccataaattagtttccaaaataatattgtaatccaaaaatgtgttaactagctcctcaaattttttttatcattcttaattcagaattcactaagcatctattatatagcaaacaccagatacataactccttatggagctcacagcttagcaagtaagacaaaaaggtgcaaattattaattgcgttgcagtgtgagggtttctgtacgtgtaaacaaaatataagtaaatattgagaatttaagtaatgcttgtaatatgactcattttgaattacgatagatattttacttggtgaacatgatatatttgtttaatcctggctccttgtagagcacagctctctttaccagtggtgacatagagggaacagggttatttatgttatcgcaggcctttgtctgtgaaacttagagtagacgaaatttctttttagcattctctttaaaggtctccagatattttaaaaatatggaaaattgttatatatcatatcctaaattattattttatgtattctacttttaagtatgtttttgtttttaggaggattctctatgggaggatgcatggcaatacatttagcatatagaaatcatcaagatgtggcaggagtatttgctctttctagttttctgaataaagcatctgctgtttaccaggctcttcagaagagtaatggtgtacttcctgaattatttcagtgtcatggtactgcagatgagttagttcttcattcttgggcagaagagacaaactcaatgttaaaatctctaggagtgaccacgaagtttcatagttttccaaatgtttaccatgagctaagcaaaactgagttagacatattgaagttatggattcttacaaagctgccaggagaaatggaaaaacaaaaatgaatgaatcaagagtgatttgttaatgtaagtgtaatgtctttgtgaaaagtgatttttactgccaaattataatgataattaaaatattaagaaataac

SEQ ID NO: 7212 - protein, 122 aa, Homo sapiens
MFLFLGGFSMGGCMAIHLAYRNHQDVAGVFALSSFLNKASAVYQALQKSNGVLPELFQCHGTADELVLHSWAEETNSMLKSLGVTTKFHSFPNVYHELSKTELDILKLWILTKLPGEMEKQK

SEQ ID NO: 7213 - DNA, 2152 bp, Homo sapiens
gtgactggcatagaattggtacattaaagagacaataacagtttgactaatttttttttcaaactttggttttaaaaactacatataggcatacatgtttcatttttattatatcaccataaattagtttccaaaataatattgtaatccaaaaatgtgttaactagctcctcaaattttttttatcattcttaattcagaattcactaagcatctattatatagcaaacaccagatacataactccttatggagctcacagcttagcaagtaagacaaaaaggtgcaaattattaattgcgttgcagtgtgagggtttctgtacgtgtaaacaaaatataagtaaatattgagaatttaagtaatgcttgtaatatgactcattttgaattacgatagatattttacttggtgaacatgatatatttgtttaatcctggctccttgtagagcacagctctctttaccagtggtgacatagagggaacagggttatttatgttatcgcaggcctttgtctgtgaaacttagagtagacgaaatttctttttagcattctctttaaaggtctccagatattttaaaaatatggaaaattgttatatatcatatcctaaattattattttatgtattctacttttaagtatgtttttgtttttaggaggattctctatgggaggatgcatggcaatacatttagcatatagaaatcatcaagatgtggcaggagtatttgctctttctagttttctgaataaagcatctgctgtttaccaggctcttcagaagagtaatggtgtacttcctgaattatttcagtgtcatggtactgcagatgagttagttcttcattcttgggcagaagagacaaactcaatgttaaaatctctaggagtgaccacgaagtttcatagttttccaaatgtttaccatgagctaagcaaaactgagttagacatattgaagttatggattcttacaaagctgccaggagaaatggaaaaacaaaaatgaatgaatcaagagtgatttgttaatgtaagtgtaatgtctttgtgaaaagtgatttttactgccaaattataatgataattaaaatattaagaaataacactttcctgacttttttattattaaaatgcttatcactgtagacagtagctaatcttattaatgaaaaacaatagacaaacatctgtgcataatttttcagacacaattctgtaaatatttggaaaccttttaagtatttaaacttttaaatttttgaaataaagtattctaaactaatataaataaggacaatgaaaaaacatgaaaggacttagcataatgttattttatcttttctacaactttgtttaaattacctttccaaagatatttgtgtttatgtaattttccacggaataacattaatactctaggtttataaaccggtttcacattatttcatttgatcatcacaagagctttgtgaagtaagccgagaagttgttactggtatttaataatagcaatagaggagttaaagactttcccacagcttgcaggtcaagacaagaaattcaggtctcctaattctcagtggagctctatttctgttaacccaaattgctgctctgttttaggtctcaatttcatctgtaaaatgatactaatagtacttatcccattggatttttgttgagatttaaataaatagccaaaagccaatacataataaacactcaataaagattaaccataaggagagtcatgatctggttccaggaatacattgttagatgactgaaaaattgtattacttcaatgaaaatactataaataataacattttcatatattagttggttctcatgcatacataatctaattttatttgatcctcacaactgtttaagttttattaaatatacattatccctatttgtataaatagaatcatacaatacctgcctgctttcattcaacaaaattatcatgagatttttccatgttgtgtacatcaatagttcatctattttattgctcagtaatattccattgtgtggatgtatcactatttgtttacacattcaccactgatatataagttgcttccagtgtgaggctgttttaaataaagctgctatgaatattcatgtaag

SEQ ID NO: 7214 - protein, 122 aa, Homo sapiens; identical to SEQ ID NO: 7212

SEQ ID NO: 7215 - DNA, 1117 bp, Homo sapiens
aactgacaagtgagaagatgagaggggggatgaatagatgctgacataatgatattatatggagaaaaagtcattttttaaagatcacaaaaggagaagcaggttccaggatgaaccacaaaaacagtaactcaacttctgtcctgggctctttatattaaatctcaccagaaacccattttacaggtgggaaaagcttggtccacctcagccttgggcccatgcttttatatctagtattaacattcattctggatgtgtagaagtctctgccctctttcagacaacagttactgctatggtttgaatgtatgtgtccctccaagatcctcatgttggaatttaaaccccaaggtgatggtattaagaggtgaagccttttggaaagtgattaagtcatgatggctctgccctcaagaatacattagtgctcttataacagaagttgaaggaacccccctagtgccttttgccttctccattccacaatgtgtggatataacattctgccatatgagaatttagcaaaaagacaccatcttgaagaagagacaaccttcgccagacaccaaatctgctggcactgtgctcttggacttccttatcaattaatgattctatggtattttgttatagcaatgggaacagactaagacagttaaagagcgacacacttgcattgagtgtaaaaggagggaaacttacagtccttttaagcagaaaccaagcaagttgctagacagctggctggtacaactggaagatgaggggggtggtgtgcatgatggttactaaggaaaaaccagcaacagagggacttctcctaaagtccatcatgccgaactttgatccatttgaagatggcagtgaaacacctcagaactttgttttgttttctttacaactacgcatgcctgctttcaagaagctttggccctctcagggagatttccctgagacaaacaatttcccatgggaaacaaaaaatgggccttgattagtattcagggtcttattttttagattgagtttacaaagctgaagaggttgatgccctgaagtgtgagaaactgacccctcaaaatcaaaataaattcttgcaagcagctgccacatt

SEQ ID NO: 7216 - protein, 77 aa, Homo sapiens
MRGVVCMMVTKEKPATEGLLLKSIMPNFDPFEDGSETPQNFVLFSLQLRMPAFKKLWPSQGDFPETNNFPWETKNGP

SEQ ID NO: 7217 - DNA, 1028 bp, Homo sapiens
gcaaaagattcttcaaaatcaaactgtgtccggaattggtgggttcttggtctcactgacttcaagaatgaagccacggaccctggcggtgagtgttacagctcttaaggtggcgtttctggagtctgtcccttctgatgttcagatgtgttcggagtttcttccttctggtgggttcgtggtctcgctggctcaggagtgaagctgcagatcttcacggttgctagtaacacaataataaagctgctttattttccagtgaagatgtatgtgatagggagtggaggaagaaaaaggccagaaaattccatagttagcaaatatacctttcttacttaaaattctttttccaatgtgagccttctaaagagttactgagaaattaggtgagctcacctcatttaatgcaatagatatgtttctgaaaaataagcaatacataggacattggccaattaagaattctgatgaagaagaattttcacatccgaaagagtaaaaatgaaaaacggtacaaatgtagtggcttttaaatttcaaaacaaattattttgataagataaatattcctctcataaagtgaaaatggaagagactgcttgctgggtgttcgtcaaaatggagttagatggtctgtcccagactcccctgttgttagttctgagaacagaagtaatggtgcttcttcaggactggctcatagaaacctgccgtgttcagcccccacaatcctctcccttctgctggctggaaacaaatgacaacgaagcctcacgtcttggagaaaccacactgctgaggaactcaagtcctagaagaaccatttgaagagacccatctcactaaagaaaatcacacaagcaagaagtaaacttcattgtatctatgtatttaattgtcataacagtctaccttaactgatacagcaaaaattcgctccttttctggacacccagtttcaaaatctcagtgtcattttttacttctctcttttcaggttgtttaatataataaaatttgtgtgtgtg

SEQ ID NO: 7218 - protein, 80 aa, Homo sapiens [sequence omitted]

SEQ ID NO: 7219 - DNA, 448 bp, Homo sapiens
ggcattcaaaggctgaagggccacctgacactccagaggctgctggaaatgcagggctgtttcatcctgggtattttccagagagaagtactgagaagcttaaagtatttgaatgggaggaggagaagcaaactacagctacttcagaggataacactaaacacctagtccactctgtatacactagaggtgctgttaattttcttgtggagaaggaactgtctttagaaaaatatctcaaaaagccactgaagtagaaagtttcagcatgctgaagatggaacttgagaagatagaaagttctgggtccttagtggcatgactgagtcgctggaccactgttggaaccaccctatgtcttagtttttaaatctctttactgtctaagacatttttagtggaagtatttatctctggcatccaataagacctttaaggatttgcagtt

SEQ ID NO: 7220 - protein, 39 aa, Homo sapiens
MQGCFILGIFQREVLRSLKYLNGRRRSKLQLLQRITLNT

SEQ ID NO: 7221 - DNA, 521 bp, Homo sapiens
atggtacttacaggagtaaggctcatgaagtggagagatgagaagactttcgggacagattgtgtggaggctgtcattctcctcgtgacattgctgtgggagaagaaggaggcattccatgttggcttcagtgaagaacttcagtattttccagagagaagtactgagaagcttaaagtatttgaatgggaggaggagaagcaaactacagctacttcagaggataacactaaacacctagtccactctgtatacactagaggtgctgttaattttcttgtggagaaggaactgtctttagaaaaatatctcaaaaagccactgaagtagaaagtttcagcatgctgaagatggaacttgagaagatagaaagttctgggtccttagtggcatgactgagtcgctggaccactgttggaaccaccctatgtcttagtttttaaatctctttactgtctaagacatttttagtggaagtatttatctctggcatccaataagacctttaaggatttgcagtt

SEQ ID NO: 7222 - protein, 109 aa, Homo sapiens
MVLTGVRLMKWRDEKTFGTDCVEAVILLVTLLWEKKEAFHVGFSEELQYFPERSTEKLKVFEWEEEKQTTATSEDNTKHLVHSVYTRGAVNFLVEKELSLEKYLKKPLK

SEQ ID NO: 7223 - DNA, 680 bp, Homo sapiens
gggcacatgggagcaccctcagctccctctccatgggataccctgtggggcacttcagagtccccaccagcaagaaggctctctctcaccagatgtgccccccgccaaccttggatgtctcagtctccagaactcagatgagccagctcccttgtgaagctgtaagaacatggtacttacaggagtaaggctcatgaagtggagagatgagaagactttcgggacagattgtgtggaggctgtcattctcctcgtgacattgctgtgggagaagaaggaggcattccatgttggcttcagtgaagaacttcagagaaggatggagcaaatgccccagatgaagcctacacgacatgagtcagagaactttggccaggatgtctggggaaaaagtttcctctttcttctctgggaactatctggagagggttgttttaacgctggatgtgaacagcgactcgtgtagccccagaagcctctgacagccgcgttggaatcataagttctcaaaatgaaggatttttttctttcctttttaggttgtggtctagaaagcatattgtgatttgtacaagaagcacattcccattttacaaaagtacaaaagcacattttggacttttaacaaattcaactgttttgtgttctgtgtgagtaaattttaggttgcccatcattga

SEQ ID NO: 7224 - protein, 98 aa, Homo sapiens
MVLTGVRLMKWRDEKTFGTDCVEAVILLVTLLWEKKEAFHVGFSEELQRRMEQMPQMKPTRHESENFGQDVWGKSFLFLLWELSGEGCFNAGCEQRLV

SEQ ID NO: 7225 - DNA, 723 bp, Homo sapiens
agagctctatgttaagctaaaggagaaacaccagggatttcaccctcttcagagtgctgtgaagtgggaaataagatcatcaactgaacataaggatgggtgaggcttaaggagagagaagcgctgaagtgggaaagtgaaggcactacggaaatgcaatttctgattagcgttaaggggccacctggggttcaacaacaagcagacttaagaacaaaagtgaagtggtggcaaagtgctggaccagatgttagaagtctccaatttgctctcgacaacaacaatccacaagtaaccctgagaaaagtcatctctgtttccccactggtaaataatgaacatctcccaaggttaattttcactggccctaaggggaggtggtggaggaccactgagtcaaaagtgatccaaaagctcataccaggagaagatttttcaattcagaacttgcaactgatgaccggtgtaaaagtttggtgaggcaaaaggatctaattatccagacgtatccacagagagaggaaccagatgaaatgcggaaagcacggttcaccttcaagagaaagaagtaggactctggggttttaagccgaggcatgaaatgtaccgattaatagcgtcattttgtaaccacaggtctcaggagttttgggaaggttagtatgagcttgtcagcattgcttattaataacagtgagattgctgctttgcacctgatctcag

SEQ ID NO: 7226 - protein, 108 aa, Homo sapiens
MQFLISVKGPPGVQQQADLRTKVKWWQSAGPDVRSLQFALDNNNPQVTLRKVISVSPLVNNEHLPRLIFTGPKGRWWRTTESKVIQKLIPGEDFSIQNLQLMTGVKVW

SEQ ID NO: 7227 - DNA, 4961 bp, Homo sapiens
ggacgacggacggcagcggccaagcaagaagaaagacgtggcagcaagcgggagtcggggatagtgtcatcggttcgggtcccactactttggagcttgtctcaaactccacatacagaaagccaccaaccttattccggtatcctacacccattccccaccctcattacactcccacccctggccctcagcatgggagtcaagagcaacagggacacttccgtactccttgtaggattggtgaaaccgtaatgaagaacacccctaaactcccataattggatttggggatattccctgcccaaaaaattcctggaaaattgactagtattaagtctatggaagatggattttttttcatgatcctttgactctcaagttcatctttaaatgaactcttttttttgttttgtttttgaggagataactaacccttgctgtctccagtctgacaaaggttatttgaatggacttaatctcccagtagttgggagatgttttaaaaacacatgctgtgtttgaattgtggctgagaggttttcttggcaatgtgaggaggaaaattttttctgcctcattattattaattcatggattgagtgttggttcgacctacaggcataatagattggaactcagtgaagacacagacgttcctgttgagagcaaccagctaatgattacagtttaaagacaatttctgtgatcaagttgtcatttggaagattaaacccatttcacgaggacttggagcctggtccttgctttgaggaagcagtggcttgtttcaagaagccacttctgatctaagaatctacccagcatgcctaatcaaggagaagactgctatttttttttctattctacatgtaccaaaggtgacagctgcccattccgtcactgtgaagctgcactaggcaatgaaactgtttgcacattatggcaagaagggcgctgttttcgacgggtgtgcaggtttcggcacatggagattgataaaaaacgcagtgaaattccttgttattgggaaaatcagccaacaggatgtcaaaaattaaactgcgttttccatcacaatagaggacgatatgttgatggccttttcctacctccgagcaaaagtgtgttgcccactgtgcctgagtcaccagaagaggaagtgaaggctagccaactttcagttcagcagaacaaattgtctgtccagtccaatacttcccctcagctgcggagcgttatgaaagtagaaagttccgaaaatgttcctagccccaagcatccaccagttgtaattaatgctgcagatgatgatgaagatgatgatgatcagttttctgaggaaggtgatgaaaccaaaacacctaccctgcaaccaactcctgaagttcacaatggattacgagtgacttctgtccggaaacctgcagtcaatataaagcaaggtgaatgtttgcattttggaataaaaactcttgaggaaattaagtcaaagaaaatgaaggaaaaatctgaggagcaaggtgagggttcttcaggagtttccagtcttttactccaccctgagcctgttccaggtcctgaaaaagaaaatgtcaggactgtggtgaggacagtaactctctccaccaaacaaggagaagaacccttggttagattgggccttactgagacactggggaaacgaaaattttcgacaggcggtgacagtgatcctccattaaagcgtagcctggcacagaggctagggaagaaagttgaagctccagaaactaacactgacgaaacaccaaagaaagctcaagtttccaagtctcttaaggagcgattaggcatgtcagctgatccaaataatgaggacgcaacagataaagttaataaagttggtgagatccatgtgaagacattagaagaaatgcttcttgaaagagccagtcagaaacatggggaatcgcaaactaaactcaagacagaaggaccttcaaaaactgatgattctacttcaggagcaagaagctcctccactatccgtatcaaaaccttctctgaggtcctggctgaagaagaacataggcagcaggaagcagagagacaaaaaagcaaaaaggatacaacttgcatcaagctaaagactgatagtgaaattaaaaaaacagtagttttgccacccattgttgccagcaaaggacaatcagaggagcctgcaggtaaaacaaagtccatgcaggaggtgcacatgaagacggtggaagaaattaaactggagaaggcactgagggtgcagcagagctctgagagcagcaccagctccccgtctcaacatgaggccactccaggggcaaggttgctgctgcgaatcaccaaaagaacatggaggaaagaagagaagaaacttcaggaaggaaatgaagttgattttctgagccgtgttagaatggaagctacagaggcttcagttgagaccacaggagttgacatcactaaaattcaagtcaagagatgtgagatcatgagagagacgcgcatgcagaaacagcaggagagggaaaaatcagtcttgacacctcttcagggagatgtagcctcttgcaatacccaagtggcagagaaaccagtgctcactgctgtgccaggaatcacatggcacctgaccaagcagcttcccacaaagtcatcccagaaggtggaggtagaaacctcagggattgcagactcattattgaatgtgaaatggtcagcacagaccttggaaaaaaggggtgaagctaaacccacagtgaacgtgaagcaatctgtggttaaagttgtgtcatcccccaaattggccccaaaacgtaaggcagtggagatgcaccctgctgtcactgccgctgtgaagccactcagctccagcagcgtcctacaggaacccccagccaaaaaggcagctgtggatgctgttgtcctgcttgactctgaggacaaatcagtcactgtgcctgaagcagaaaatcctagagacagtcttgtgctgcctccaacccagtcctcttcagattcctcacccccggaggtgtctggcccttcctcatcccaaatgagcatgaaaactcgccgactcagctctgcctcaacaggaaagcccccactctctgtggaggatgattttgagaaactaacatgggagatttcaggaggcaaattggaagctgagattgacctggatcctgggaaagatgaagatgaccttccgcttgagctatgagaaatgattgatagctgaaggtggtagtgaggacactttaaaaaaaaatcgccaaaaaactggacttagtttcatctattgtaacatttacctgagatgatcatttctttagtctagaatttgccccaaatcagaagtatacctctgaattatctgtatgtgtcctggattccttggggtcagatttttaaagttactttataaccattttgtccatttgatgccattgtttatcatcttttgagaaaaaagttctgtcatacccttctctccacaaaaaagagactgagggggagatcaagtgaaagggtgcaagcaaacttagtgactccttgaggtgtttgtcagttttggcttttttctcctttgttgtattctttatgtattgtcttaatgtacttaatattacctgagtttgaaatggatgaagacagctgctaccattaagggccaaattttatgctaccactaaacaaaaatacccactcagtctgtgttaaattgtatgtctttttaaaggtatttagagattcaactaagctttaaagagggctgagcaactcaggaagcctgtaatgtgggcataactctttggacctgatcttgatgcttctgctgctctgttggcctctgaagagcaatatctaatttattattactgtaattttttaaaaggctttaaagtgcctcaggggtcccctgaaactaattttctatttctgggattccctggattcattatatgagatggtgacatgattagaggaattcttttttagtatgaaaattgttccttttcttcttcagtacttgcctccttgctggcattgaattaacacagggacaaaatttggttaattttttatttctaattctcccaacaaacccctgttgcccagtatttatgtggtggcctttaaccacctgagggaaaaaatgagcttattcaagctgccaatatttatctatgggctgtagcagtacactgaattgtactgtgccagggatattgagatgctctgggggtgtattgtatacctgccagttttcttcatttctgaattgggttttctcttcttgatgttggtttccttcatatcacctcaaggtttagatttgtgaaggaataagcatgatggaaataatagtcttgaaaggagatatgttgtatataatcaggaggaagaggaaggcaggacttactcattttgatattttgctgtaggtggccagttttgtttctcatagggaaatctgacccacctgtcatgttggctcctaaggaactgctgttgtaagcggctcatcaagagttgaacttcaagtagccttgttgggaatatggaaaaggaagaaagccacaggactgcccattcagtcttgttaagattgggatgattctgcacaagcaaaaatgactcgaaatttatgtatcgacacacctctaccaatccatcttcagctgactgaatgttgtatgatagcccttctccaaagcaggggtagaatgttcaggtttcaccacggattttctacttatttcgcttttggaatcagcttacagattccaggtcccttttgtatatattctttattcttttgcttttttaaaaaataaacttgtattagtcaatgtttcgtgttccgcattatttgaaccatttgcccttacagaaagagaaatacttgtttgtgttttaaataaaactgatgtaggata

SEQ ID NO: 7228 - protein, 805 aa, Homo sapiens; identical to SEQ ID NO: 4346

SEQ ID NO: 7229 - DNA, 683 bp, Homo sapiens
ctggcgctgtggaggttccaatggccgccatgttgtctcagagggacacaccacaggcttctggaactctggctccattttgtgggtgcaagtttctggcttccgttttaaagagcaagagaacctatcagcgttgtcaattctaagaaagtgagtgccaagagcaggctgtacaagaagcatggcacaagaatctgcttctgaagagggcttcaggaagcttccactcatggtggaaaaggaaggagagcaggtatcacagcgcaagaaagaagaaattgttccactccataagttccctcctggaggatgtgtgagacaccaggctgcatgttagaaacggctgtgctccggaaggctaccagggtcatcgtgagggccttgcagatttcagaaatgaagtgacctgccttgagtcttccctcagcctcctcactccactgtagtctcaggagagtgaggacaacaaaactctcttctccccacattaccacttcagcgctgacctgtggcttgagaatctaatctgtgtgcaccgtggcaaagtcttggttttacaggtctcacctgacagctagtcctgatttttccatgatgtgtgggtaaaaagtgggttcttgaagggaaacctcaatgtagcttagctcttgagaaaacagtatgtgcatatgcttcttggatag

SEQ ID NO: 7230 - protein, 51 aa, Homo sapiens
MAQESASEEGFRKLPLMVEKEGEQVSQRKKEEIVPLHKFPPGGCVRHQAAC

SEQ ID NO: 7231 - DNA, 1960 bp, Homo sapiens
ctcaaacttccgcattccgaatagctgggactacaagtgtgcaccaccacccccagctaacttttttcttcttttggatagagacagggtctcactgtgttgtccagaccggtctctagctcctggccttaagcaatcctcctgcattagcttctcaaattgctggaatttcaggcatgagccaccgtgcctggcctgggctagtcctatattctctagagttctctttactttgtgctagtcaatctctcattatgctgttcacctgttataatgaataattctctgtattaaattttaccactttaaacttttgagtggtttatgcttcctgattggactctgactaatatgttaggaagggtcccaggagataaacccacacagatgggatttgggcagtgctgagctctttgccagtgggaaatgggatgctggtgatttccagtaggtgacctcacagtgactcaagctaccacttactgttgattgtgacgaaatgccagctgaggcacatgccttgggagctaagtggttgctgcacttgaccactgtgaagactggtgtgggaagaagggtcgtttctgatgcacttgagcaggggtccccaacccctgagccatggagccgcaaggagccacacagcaggaggtgagtggtgtcgagtgagggagtgaggaaagcttcgtctgtatttacagccactcccctttgctcacattcccgcctgagctccaccttctcagatcagcagcagcattagattctcatagaacgcaccctgttgtgaaccgtgcatgtgagggatctaggttgcgctgtccttaatgagagtctaatacctattgatctgtcacttcctcccatcacgctcaggtgggaccatccagttgcaggaaaacaagcttaacacgcccactgattctacattatgctcctacctcccggcagcctctccaggcccagaactttctccagtcagcctctacagaccaagctcatgactcacaatggcctatttaggcccataccctacctcacggcagtctccgcagatgagcctactgcctcacaacagcctccacaggcacagctccatcgttacaatggcctctttagacccagctcctgcctcccagccttctctccaggccctgaactttctcaagtcgacctcaccaggcccagctcatgcttctttgcagcctctccaggcccaactcctgcatcttggtggcccctccaggcccagcctgtgcctcccgtcggcctctacaatcccaacatctgcctcacagcagattcttcacgcccagcctctgcctcacagtggaccctccagacccagatggtgtctcactgtggcatcctcaggcgaagctcctgcctttcagcagcctctccaggcccagctcctcctgcctcccagtggcctctttcggcccagcccagctcatgcctcccggcggccttcccaagccccgcttttgacttttggtggcctctgcaggcctcgacaaggcccagcctcctgcctcccgaaggcctgcacaggcccagcctctgcctcacagcggactctccacgcccagctagctctcgcctcactgcggcctccccagtccaaagctcctgcctttcggccacttcggcaggtccagctactgcctgccagtggcctctttaggcccagctcattcctcacaacggcctttccaggccccgtttttcccttccggcagcctcttggcttctaatttgtttatcttttgtgtataaatcccaaaatatggaattttggaatatttccaccattatatattttggtcggtaatttatttggagtgagtttctgcaccatgcccgaattttttattttattttccttattatttggtgttaaacaggtttaatgacagtcatggcaactttttggcacaatgaaaaatatcgcccatga

SEQ ID NO: 7232 - protein, 251 aa, Homo sapiens
MLLPPGSLSRPRTFSSQPLQTKLMTHNGLFRPIPYLTAVSADEPTASQQPPQAQLHRYNGLFRPSSCLPAFSPGPELSQVDLTRPSSCFFAASPGPTPASWWPLQAQPVPPVGLYNPNICLTADSSRPASASQWTLQTQMVSHCGILRRSSCLSAASPGPAPPASQWPLSAQPSSCLPAAFPSPAFDFWWPLQASTRPSLLPPEGLHRPSLCLTADSPRPASSRLTAASPVQSSCLSATSAGPATACQWPL

SEQ ID NO: 7233 - DNA, 1254 bp, Homo sapiens
gttgaccactgcagcagtaaagatgactctgaagaatggcgtgggatggatcctttcaaatgcacttgagcagcagtctccaaccacagggccacagagctggagctggatctaccatgaaagacttctgaatccaggaagagagactgactgggcaacatgttattcaggtgggaccatccagttgcaggaaaacaagcttaacacgcccactgattctacattatgctcctacctcccggcagcctctccaggcccagaactttctccagtcagcctctacagaccaagctcatgactcacaatggcctatttaggcccataccctacctcacggcagtctccgcagatgagcctactgcctcacaacagcctccacaggcacagctccatcgttacaatggcctctttagacccagctcctgcctcccagccttctctccaggccctgaactttctcaagtcgacctcaccaggcccagctcatgcttctttgcagcctctccaggcccaactcctgcatcttggtggcccctccaggcccagcctgtgcctcccgtcggcctctacaatcccaacatctgcctcacagcagattcttcacgcccagcctctgcctcacagtggaccctccagacccagatggtgtctcactgtggcatcctcaggcgaagctcctgcctttcagcagcctctccaggcccagctcctcctgcctcccagtggcctctttcggcccagcccagctcatgcctcccggcggccttcccaagccccgcttttgacttttggtggcctctgcaggcctcgacaaggcccagcctcctgcctcccgaaggcctgcacaggcccagcctctgcctcacagcggactctccacgcccagctagctctcgcctcactgcggcctccccagtccaaagctcctgcctttcggccacttcggcaggtccagctactgcctgccagtggcctctttaggcccagctcattcctcacaacggcctttccaggccccgtttttcccttccggcagcctcttggcttctaatttgtttatcttttgtgtataaatcccaaaatatggaattttggaatatttccaccattatatattttggtcggtaatttatttggagtgagtttctgcaccatgcccgaattttttattttattttccttattatttggtgttaaacaggtttaatgacagtcatggcaactttttggcacaatgaaaaatatcgcccatga

SEQ ID NO: 7234 - protein, 251 aa, Homo sapiens; identical to SEQ ID NO: 7232

SEQ ID NO: 7235 - DNA, 942 bp, Homo sapiens
gagtctaatacctattgatctgtcacttcctcccatcacgctcaggtgggaccatccagttgcaggaaaacaagcttaacacgcccactgattctacattatggtgaattctataattattttattatatattacagtgtaataatggaaatgaagtgcctaataaatgtgaatgtgcttaaatcttttggcccagctcctacctcccggcagcctctccaggcccagaactttctccagtcagcctctacagaccaagctcatgactcacaatggcctatttaggcccataccctacctcacggcagtctccgcagatgagcctactgcctcacaacagcctccacaggcacagctccatcgttacaatggcctctttagacccagctcctgcctcccagccttctctccaggccctgaactttctcaagtcgacctcaccaggcccagctcatgcttctttgcagcctctccaggcccaactcctgcatcttggtggcccctccaggcccagcctctcctcctgcctcccagtggcctctttcggcccagcccagctcatgcctcccggcggccttcccaagccccgcttttgacttttggtggcctctgcaggcctcgacaaggcccagcctcctgcctcccgaaggcctgcacaggcccagcctctgcctcacagcggactctccacgcccagctagctctcgcctcactgcggcctccccagtccaaagctcctgcctttcggccacttcggcaggtccagctactgcctgccagtggcctctttaggcccagctcattcctcacaacggcctttccaggccccgtttttcccttccggcagcctcttggcttctaatttgtttatcttttgtgtataaatcccaaaatatggaattttggaatatttccaccattatatattttggtcggtaattt

SEQ ID NO: 7236 - protein, 229 aa, Homo sapiens
MCLNLLAQLLPPGSLSRPRTFSSQPLQTKLMTHNGLFRPIPYLTAVSADEPTASQQPPQAQLHRYNGLFRPSSCLPAFSPGPELSQVDLTRPSSCFFAASPGPTPASWWPLQAQPLLLPPSGLFRPSPAHASRRPSQAPLLTFGGLCRPRQGPASCLPKACTGPASASQRTLHAQLALASLRPPQSKAPAFRPLRQVQLLPASGLFRPSSFLTTAFPGPVFPFRQPLGF

SEQ ID NO: 7237 - DNA, 1837 bp, Homo sapiens
ctcaaacttccgcattccgaatagctgggactacaagtgtgcaccaccacccccagctaacttttttcttcttttggatagagacagggtctcactgtgttgtccagaccggtctctagctcctggccttaagcaatcctcctgcattagcttctcaaattgctggaatttcaggcatgagccaccgtgcctggcctgggctagtcctatattctctagagttctctttactttgtgctagtcaatctctcattatgctgttcacctgttataatgaataattctctgtattaaattttaccactttaaacttttgagtggtttatgcttcctgattggactctgactaatatgttaggaagggtcccaggagataaacccacacagatgggatttgggcagtgctgagctctttgccagtgggaaatgggatgctggtgatttccagtaggtgacctcacagtgactcaagctaccacttactgttgattgtgacgaaatgccagctgaggcacatgccttgggagctaagtggttgctgcacttgaccactgtgaagactggtgtgggaagaagggtcgtttctgatgcacttgagcaggggtccccaacccctgagccatggagccgcaaggagccacacagcaggaggtgagtggtgtcgagtgagggagtgaggaaagcttcgtctgtatttacagccactcccctttgctcacattcccgcctgagctccaccttctcagatcagcagcagcattagattctcatagaacgcaccctgttgtgaaccgtgcatgtgagggatctaggttgcgctgtccttaatgagagtctaatacctattgatctgtcacttcctcccatcacgctcaggtgggaccatccagttgcaggaaaacaagcttaacacgcccactgattctacattatgctcctacctcccggcagcctctccaggcccagaactttctccagtcagcctctacagaccaagctcatgactcacaatggcctatttaggcccataccctacctcacggcagtctccgcagatgagcctactgcctcacaacagcctccacaggcacagctccatcgttacaatggcctctttagacccagctcctgcctcccagccttctctccaggccctgaactttctcaagtcgacctcaccaggcccagctcatgcttctttgcagcctctccaggcccaactcctgcatcttggtggcccctccaggcccagcctgtgcctcccgtcggcctctacaatcccaacatctgcctcacagcagattcttcacgcccagcctctgcctcacagtggaccctccagacccagatggtgtctcactgtggcatcctcaggcgaagctcctgcctttcagcagcctctccaggcccagctcctcctgcctcccagtggcctctttcggcccagcccagctcatgcctcccggcggccttcccaagccccgcttttgacttttggtggcctctgcaggcctcgacaaggcccagcctcctgcctcccgaaggcctgcacaggcccagcctctgcctcacagcggactctccacgcccagctagctctcgcctcactgcggcctccccagtccaaagctcctgcctttcggccacttcggcaggtccagctactgcctgccagtggcctctttaggcccagctcattcctcacaacggcctttccaggccccgtttttcccttccggcagcctcttggcttctaatttgtttatcttttgtgtataaatcccaaaatatggaattttggaatatttccaccattatatattttggtcggtaattt

SEQ ID NO: 7238 - protein, 251 aa, Homo sapiens; identical to SEQ ID NO: 7232

SEQ ID NO: 7239 - DNA, 1131 bp, Homo sapiens
gttgaccactgcagcagtaaagatgactctgaagaatggcgtgggatggatcctttcaaatgcacttgagcagcagtctccaaccacagggccacagagctggagctggatctaccatgaaagacttctgaatccaggaagagagactgactgggcaacatgttattcaggtgggaccatccagttgcaggaaaacaagcttaacacgcccactgattctacattatgctcctacctcccggcagcctctccaggcccagaactttctccagtcagcctctacagaccaagctcatgactcacaatggcctatttaggcccataccctacctcacggcagtctccgcagatgagcctactgcctcacaacagcctccacaggcacagctccatcgttacaatggcctctttagacccagctcctgcctcccagccttctctccaggccctgaactttctcaagtcgacctcaccaggcccagctcatgcttctttgcagcctctccaggcccaactcctgcatcttggtggcccctccaggcccagcctgtgcctcccgtcggcctctacaatcccaacatctgcctcacagcagattcttcacgcccagcctctgcctcacagtggaccctccagacccagatggtgtctcactgtggcatcctcaggcgaagctcctgcctttcagcagcctctccaggcccagctcctcctgcctcccagtggcctctttcggcccagcccagctcatgcctcccggcggccttcccaagccccgcttttgacttttggtggcctctgcaggcctcgacaaggcccagcctcctgcctcccgaaggcctgcacaggcccagcctctgcctcacagcggactctccacgcccagctagctctcgcctcactgcggcctccccagtccaaagctcctgcctttcggccacttcggcaggtccagctactgcctgccagtggcctctttaggcccagctcattcctcacaacggcctttccaggccccgtttttcccttccggcagcctcttggcttctaatttgtttatcttttgtgtataaatcccaaaatatggaattttggaatatttccaccattatatattttggtcggtaattt

SEQ ID NO: 7240 - protein, 251 aa, Homo sapiens; identical to SEQ ID NO: 7232

SEQ ID NO: 7241 - DNA, 543 bp, Homo sapiens
cctgtggttggagactgctgctcaagtgcatttgaaaggatccatcccacgccattcttcagagtcatctttactgctgcagtggtcaacttgtagcacccccaagctcgcaggacatatgcttcaactggcatttcacaatcaacactatgtggcagcttgagtcattgtgagctcacttcctgtaatcccagctactcgggaggctgaggcaggagcattgcttgagcctggcaggtggaggctgcagtgagcagaggttgtgccactgtactccagcctgtagtcccagctactgggaaggctgacatggtaggattgcttgagcctgggagtttgaggctataatgagccatgataggaccactgaactccatcctgagtgacagggcaaggtcctgtttcttgtcctgtgcatctctttcattggctgttcctgagatggagccattacattgagccagtaattgaaaataaggtggccagatgcgctggctcatgcccgtaatcccagcactgtgggaggcagaggtgggtggaatc

SEQ ID NO: 7242 - protein, 34 aa, Homo sapiens
MIGPLNSILSDRARSCFLSCASLSLAVPEMEPLH

SEQ ID NO: 7243 - DNA, 332 bp, Homo sapiens
aatgacatcttatcaagatggataaaccctagtttcccagtgctggaatatagaaaatggatggacaagtaaatcccactcagcacccatagtccaggcatggggacctcaacacacctgagcaccagacatcacctttcattctggacctaccatgaaagacttctgaatccaggaagagaaactgactgggcaacatgttattcaggtacaaaaagacttggactgtaactcaaaaatgatcaaataatagtgcatgcatcaagtgcaatcggaagctcttctggagagggagagaagcttccagttaaggtgacattgaagccaagtcc

SEQ ID NO: 7244 - protein, 43 aa, Homo sapiens
MGTSTHLSTRHHLSFWTYHERLLNPGRETDWATCYSGTKRLGL

SEQ ID NO: 7245 - DNA, 810 bp, Homo sapiens
ggctgcgtcactggggcgctatggtgcctggagctgggcagttttctcgtcagagtggggactggtaagagcgacctccccgccaggtcctgtgtgttgccggctgaagaagggtagctgaaaaattcagacccagcacagtgtttatgttggtcaaaaatagaaaactatgtctggcgcggccgaggcgggaggacccttcaggccaagagcagcgtagcaacatggcgcaaccccatctctgtagtcctacctcagccccccagctacttgaacccaaaggttcaaggctccagtgagctatgatcccaccacagcattccagcctgcgagattgagatgatgattattccccaccttctaagagacaaagaccaacgagccaccacagccaccagtcccagaacccgccaatgctggggaacggaaaatgagggagttcaactctgagaaatggaatcatcgtatcgctgatctacgtaaacaaactgaagaattgtctgaaagaaaatatgacatgaacttatgaattcaacaggtgaagatttacaacttgataaatcaactttgtgagctcgagctgtaaaagccaaaggtctggtgatgatcccatacccttttttccagtctcatgttgaagatttttatgtagaaggccttcccaaaggaatttttttttttttttttttttgagatggagttttcactcttatcgcccaggctggggtgcaatggcgcaaccttgctggtcactgcaacctctgcctcctgggttcaagaaattctcctgccttagcctcccaagtcgct

SEQ ID NO: 7246 - protein, 36 aa, Homo sapiens
MMIIPHLLRDKDQRATTATSPRTRQCWGTENEGVQL

SEQ ID NO: 7247 - DNA, 886 bp, Homo sapiens
caggagcgcgcatgagcggacgctgcctacgggtggccgggcgggatgtaaccggctgctgagctggcagttctgtgtcgctaggcttctgcccggccgccgccgcacataagctgcgaggaggagctttacgacttcccggtcttcggggccgggcgcagcaagggccagactctgcgctagcaggcgctgcgcgccaaccggccggcacctgtcgcagaaggtgcaaccgatcgcactgtcgcgcagaagctcctcaatggccagcgccagctgcagccccggccgcccactcgcctcatctgagcctggctggcagcctgctatcaattacattgatagtaaatttgaggactacctaaatgcagaatcgcaagtgaacagatgtcagatgcctggtaacagggtgcagtgttgtttatacttcattgctccttcaggacatggctctgttcacggaaagggcctgggagctgcaacacctcaacagcaacgagcacacctgctacctagaacttggtttctaaaaaccatcctcctctaaaaggaaacagagctctttgaagaaatgagacagatctcattatgttgcccagggtgatccttgatctcctggcctcaagtgatcctccaaccttggtctcccaaagtgctgggattacagatgtgaactaccacacccagtcaacgtgcagaaggttttcagtttgatgtagtctgatgtagtctcatgtatttatccttgttgttgttgcctgagcttttggtgtgatatccaaaaatatcattgccaagatcaatatcaagaaactttccccctatgtttcttacagaaattttatggtttcagatttttcatctattttgagtatatttttgtgtatga

SEQ ID NO: 7248 - protein, 94 aa, Homo sapiens [sequence omitted]

SEQ ID NO: 7249 - DNA, 424 bp, Homo sapiens
aggagcgcgcatgagcggacgctgcctacgggtggccgggcgggatgtaaccggctgctgagctggcagttctgtgtcgctaggcttctgcccggccgccgccgcacataagctgcgaggaggagctttacgacttcccggtcttcggggccgggcgcagcaagggccagactctgcgctagcaggcgctgcgcgccaaccggccggcacctgtcgcagaaggtgcaaccgatcgcactgtcgcgcagaagctcctcaatggccagcgccagctgcagccccggccgcccactcgcctcatctgagcctgggcgaatctggattgggaaagttgatattaatcaactcattattcctcacagatttgtattctccagagtatccaggtccttctcagagaattaaaaagcctgtacaggtctac

SEQ ID NO: 7250 - protein, 48 aa, Homo sapiens
MASASCSPGRPLASSEPGRIWIGKVDINQLIIPHRFVFSRVSRSFSEN

SEQ ID NO: 7251 - DNA, 566 bp, Homo sapiens
aggagcgcgcatgagcggacgctgcctacgggtggccgggcgggatgtaaccggctgctgagctggcagttctgtgtcgctaggcttctgcccggccgccgccgcacataagctgcgaggaggagctttacgacttcccggtcttcggggccgggcgcagcaagggccagactctgcgctagcaggcgctgcgcgccaaccggccggcacctgtcgcagaaggtgcaaccgatcgcactgtcgcgcagaagctcctcaatggccagcgccagctgcagccccggccgcccactcgcctcatctgagcctgggcgaatctggattgggaaagttgatattaatcaactcattattcctcacagatttgtattctccagagtatccaggtccttctcagagaattaaaaagcctgtacaggtctacatattggtatttttaattgatgataagctggaataatattaatacacacaaagcacgtgttgtaactttcattatgcttccctagaggtaagatgcaaatttgcccttagccagtgtaagatggtaaatatgacttcataaa

SEQ ID NO: 7252 - protein, 48 aa, Homo sapiens; identical to SEQ ID NO: 7250

SEQ ID NO: 7253 - DNA, 813 bp, Homo sapiens
aggagcgcgcatgagcggacgctgcctacgggtggccgggcgggatgtaaccggctgctgagctggcagttctgtgtcgctaggcttctgcccggccgccgccgcacataagctgcgaggaggagctttacgacttcccggtcttcggggccgggcgcagcaagggccagactctgcgctagcaggcgctgcgcgccaaccggccggcacctgtcgcagaaggtgcaaccgatcgcactgtcgcgcagaagctcctcaatggccagcgccagctgcagccccggccgcccactcgcctcatctgagcctggctggcagcctgctatcaattacattgatagtaaatttgaggactacctaaatgcagaatcgcaagtgaacagatgtcagatgcctggtaacagggtgcagtgttgtttatacttcattgctccttcaggacatggctctgttcacggaaagggcctgggagctgcaacacctcaacagcaacgagcacacctgctacctagaacttggtttctaaaaaccatcctcctctaaaaggaaacagagctctttgaagaaatggtaatttcaaagctagagcacagaaagtataagatgagcccagaatatctttttgtacaagaaagtaaggcaatgctcaaagaatgatggagacatgcccaaaaaaagcagagaagccaacttgaaaagattccaacaggccaaatatgggacaatttgaacatcagaataaaatggtgacagtcacagaattataacccattgaagaaaggaattcatgacatcatattaatataaataata

SEQ ID NO: 7254 - protein, 94 aa, Homo sapiens [sequence omitted]

SEQ ID NO: 7255 - DNA, 754 bp, Homo sapiens
aagggccagactctgcgctagcaggcgctgcgcgccaaccggccggcacctgtcgcagaaggtgcaaccgatcgcactgtcgcgcagaagctcctcaatggccagcgccagctgcagccccggccgcccactcgcctcatctgagcctggctggcagcctgctatcaattacattgatagtaaatttgaggactacctaaatgcagaatcgcaagtgaacagatgtcagatgcctggtaacagggtgcagtgttgtttatacttcattgctccttcaggacatggagacagatctcattatgttgcccagggtgatccttgatctcctggcctcaagtgatcctccaaccttggtctcccaaagtgctgggattacagatgtgaactaccacacccagtcaacgtgcagaaggttttcagtttgatgtagtctgatgtagtctcatgtatttatccttgttgttgttgcctgagcttttggtgtgatatccaaaaatatcattgccaagatcaatatcaagaaactttccccctatgtttcttacagaaattttatggtttcagatttttcatctattttgagtatatttttgtgtatgatgtaagataagggtccagtctccccagtgttggatatccaattttcataacaccatttattgaagagattattctttctccactgtgttttcttgatgtccttgtcaaaaattagttgacttttatatgcttgggtttatttctgggctctatt

SEQ ID NO: 7256 - protein, 74 aa, Homo sapiens
MASASCSPGRPLASSEPGWQPAINYIDSKFEDYLNAESQVNRCQMPGNRVQCCLYFIAPSGHGDRSHYVAQGDP

SEQ ID NO: 7257 - DNA, 668 bp, Homo sapiens
ccagagtatccaggtccttctcagagaattaaaaagcctgtacaggtctacatattggtatttttaattgatgataagctggaataatattaatacacacaaagcacgtgttgtaactttcattatgcttccctagaggtggaacaatccaaagttttaatcagagaaggtggtgttcagttgctgcttacaatagttgataccccagtatttggagatgcagtggataacagtaattgctggcagcctgctatcaattacattgatagtaaatttgaggactacctaaatgcagaatcgcaagtgaacagatgtcagatgcctggtaacagggtgcagtgttgtttatacttcattgctccttcaggacatggagacagatctcattatgttgcccagggtgatccttgatctcctggcctcaagtgatcctccaaccttggtctcccaaagtgctgggattacagatgtgaactaccacacccagtcaacgtgcagaaggttttcagtttgatgtagtctgatgtagtctcatgtatttatccttgttgttgttgcctgagcttttggtgtgatatccaaaaatatcattgccaagatcaatatcaagaaactttccccctatgtttcttacagaaattttatggtttcagatttttcatctattt

SEQ ID NO: 7258 - protein, 47 aa, Homo sapiens
METDLIMLPRVILDLLASSDPPTLVSQSAGITDVNYHTQSTCRRFSV

SEQ ID NO: 7259 - DNA, 2669 bp, Homo sapiens
accctaccagaatacacttttttttattaactgtctggacctttgctgattacattgtccggaatgtggagtatcgcatttgagaagaggattggatcctagccataacataaatataagggtaattacatccatgctgagaaagatttaggaatgatagtaagttcatttgagtgagtggtttgggccaaacttgatagagaatagtccaggaagacatttactataaacagtagattaaatgttcttgcctggttaattacatttgaactctgttaatgactgaatcactcaaactgcttaattgtattattagatgcacatttaagttatgtattacatgtctttagtggtgatcagaattttatcagttcctctgtctttctttataccaagtatgactcataaacccagtattaatttgccaagagattggcatactatttgtatatatgcttttctttcaaataatctggattcccaatgcccacaatcattgatcctaaagaaaatgtgagagtaggtagataaactcaaacatccctaccatcacccctggtaggaaatcactggtgtaatgtatgatattaacatctgcaccaattactcttataggtggaacaatccaaagttttaatcagagaaggtggtgttcagttgctgcttacaatagttgataccccagtatttggagatgcagtggataacagtaattggtaaaaaggatttgtcctcacaactttccagtgtatttggggtactggggtggttaaactttctcttcttaacattttaaaactcttcttagcaaaggtcaccaaacttcaagtaacatgacaggtttgtataccaactttgccacttatttgacaaagtttaacttcaaagttaaacaaagaagtttaacttctttgaacccatttactttttgataaaatggagataatacctatcataaaattgttttgaagacatattccaaaataacgtagctagatagaagaattctcattattggaagaaatttaaaatgctttgctttaattttatccatttgtataaattctatcacaatcctaatttaaacctgatatttagaccttcagtttttccataagtcctaagtgaagaaaacaactatgaaattttagtctgaagtaattatcttagtattttataaataactttaattttgtttgaattcacattgtttttgaggtatttttctgtcaactcttaaaactcctaagttcatcatgaagtttttatattatttaagtaatctctcatttgaaatttgaaactgaatataatcgttttcatattatgaagtgtgttattaatacacttactagtgccaatagtatgctaataatttagctgtgtttcaacaataaatattttctttcatttggaaagttttgaaataatgaataaagatttattcaacacaatttatatttttgaatctttatatagaataacttgacatatcttccattggttaattcattttgcctatttgaaaatattgattattgtcctttaacagtcatcagttaattcatatgtagaattgcaacttaattgttttgtttatttgcattctatagctggcagcctgctatcaattacattgatagtaaatttgaggactacctaaatgcagaatcgcaagtgaacagatgtcagatgcctggtaacagggtgcagtgttgtttatacttcattgctccttcaggacatggctctgttcacggaaagggcctgggagctgcaacacctcaacagcaacgagcacacctgctacctagaacttggtttctaaaaaccatcctcctctaaaaggaaacagagctctttgaagaaatgagacagatctcattatgttgcccagggtgatccttgatctcctggcctcaagtgatcctccaaccttggtctcccaaagtgctgggattacagatgtgaactaccacacccagtcaacgtgcagaaggttttcagtttgatgtagtctgatgtagtctcatgtatttatccttgttgttgttgcctgagcttttggtgtgatatccaaaaatatcattgccaagatcaatatcaagaaactttccccctatgtttcttacagaaattttatggtttcagatttttcatctattttgagtatatttttgtgtatgatgtaagataagggtccagtctccccagtgttggatatccaattttcataacaccatttattgaagagattattctttctccactgtgttttcttgatgtccttgtcaaaaattagttgacttttatatgcttgggtttatttctgggctctattctgtttcattgctttacatctctgttttcatgccagtgccacagtgttttgattactatagctttgtaatataatttgaaatcagaatgtgtaatacctataactttgttttttgctctaaagatttatttatttatttatttatttttgccatttcaggtcttttgtggtttcatatgaatttcagaattgtttttcctatttctgtgaaaaatgccattgacattttgatagggattgtgttgaatctatatattgctttggatagtatggatgttttaacactattaattctcccaatccatgaacatgaaatatctttccattc

SEQ ID NO: 7260 - protein, 50 aa, Homo sapiens
MPGNRVQCCLYFIAPSGHGSVHGKGLGAATPQQQRAHLLPRTWFLKTILL

SEQ ID NO: 7261 - DNA, 334 bp, Homo sapiens
cccagggaggtggctttaatcttggttctccagtgtcaggaagagatccttcagtcatgggagaacctttcttggccgagttcgtagtcagagggagatgtgactacagaagaatggttggacacgtgcaacactgtgggctttacagaggaaggaaggggacatgagccaaggaactctggcagcctctagaagctaaaaaaggtaatcaggaagtctcctaggataaggttattatattcaagtcctgccaaaaaatgtaagaaaagaagctcctatttgagtggaccaaaaagaacaattatacctcctaaaaataaaatgaacctaagct

SEQ ID NO: 7262 - protein, 36 aa, Homo sapiens [sequence omitted]

SEQ ID NO: 7263 - DNA, 1351 bp, Homo sapiens
ggggtaaggaatcaagcccccaagatggcggcagcggcggaggagcggatggcagaggaaggaggcggcggccaaggcgacggcggttcctctttggcctccggctctacccagcgacagcctccaccgcccgcgccacagcacccgcagccggggtcccaggcgctcccagcccccgcgctggctccggaccagctgcctcaaaacaacacgcttgtggcgctgcccatcgtagccatcgagaacatcctcagctttatgtcctacgacgaaattagccagctccgcctggtttgtaaaagaatggacttggtctgccagagaatgttgaatcagggatttctgaaagtggagaggtaccataatctatgtcagaaacaagttaaagcacaactcccaaggagagagtcagaaaggagaaaccattcattagctcgtcatgcagacattcttgctgctgttgaaacaaggctgtcactattaaatatgactttcatgaaatatgtggattccaatctctgttgcttcatcccaggaaaggtgattgatgagatttatcgtgtgttgagatatgtcaattctaccagagcccctcaacgagctcatgaagtacttcaagaattaagggatatatcctctatggcaatggagtactttgatgaaaagattgttccaattttaaagaggaaattaccaggatcagatgtttctggaagactcatgggctctcctccagttccaggaccgtctgcagccctaacaacaatgcagctcttctccaagcaaaatccttcaagacaagaggttaccaaactccagcagcaggttaaaacaaatggtgctggcgtgactgttctcaggcgtgaaatttctgagcttcgcaccaaagtgcaagaacagcaaaaacagcttcaagaccaggaccagaaactgctagagcagacccagatcataggtgaacaaaatgcacggttggcagagctagaacgcaaactacgagaagtaatggaaagtgctgtaggaaattcctcagggtccgggcagaatgaggagtctcctcggaaacgaaaaaaggccacggaagccatagactctcttaggaaatctaaacgtcttcggaatagaaagtaaattggaatgtggttctagttccagaggaagacacagcttagtagcttaagcagttatgcatatcaggatactgtgagcaacatggtgtcccttaagcttctaggctttcagaacacaacttaaacttgaactcttatggttgggacattcttttcctgcttctcctgattgaactgatgcacagaatctttttactttgcaatagatttgtactaaccag

SEQ ID NO: 7264 - protein, 368 aa, Homo sapiens; identical to SEQ ID NO: 424

SEQ ID NO: 7265 - DNA, 2922 bp, Homo sapiens
ggggtaaggaatcaagcccccaagatggcggcagcggcggaggagcggatggcagaggaaggaggcggcggccaaggcgacggcggttcctctttggcctccggctctacccagcgacagcctccaccgcccgcgccacagcacccgcagccggggtcccaggcgctcccagcccccgcgctggctccggaccagctgcctcaaaacaacacgcttgtggcgctgcccatcgtagccatcgagaacatcctcagctttatgtcctacgacgaaattagccagctccgcctggtttgtaaaagaatggacttggtctgccagagaatgttgaatcagggatttctgaaagtggagaggtaccataatctatgtcagaaacaagttaaagcacaactcccaaggagagagtcagaaaggagaaaccattcattagctcgtcatgcagacattcttgctgctgttgaaacaaggctgtcactattaaatatgactttcatgaaatatgtggattccaatctctgttgcttcatcccaggaaaggtgattgatgagatttatcgtgtgttgagatatgtcaattctaccagagcccctcaacgagctcatgaagtacttcaagaattaagggatatatcctctatggcaatggagtactttgatgaaaagattgttccaattttaaagaggaaattaccaggatcagatgtttctggaagactcatgggctctcctccagttccaggaccgtctgcagccctaacaacaatgcagctcttctccaagcaaaatccttcaagacaagaggttaccaaactccagcagcaggttaaaacaaatggtgctggcgtgactgttctcaggcgtgaaatttctgagcttcgcaccaaagtgcaagaacagcaaaaacagcttcaagaccaggaccagaaactgctagagcagacccagatcataggtgaacaaaatgcacggttggcagagctagaacgcaaactacgagaagtaatggaaagtgctgtaggaaattcctcagggtccgggcagaatgaggagtctcctcggaaacgaaaaaaggccacggaagccatagactctcttaggaaatctaaacgtcttcggaatagaaagtaaattggaatgtggttctagttccagaggaagacacagcttagtagcttaagcagttatgcatatcaggatactgtgagcaacatggtgtcccttaagcttctaggctttcagaacacaacttaaacttgaactcttatggttgggacattcttttcctgcttctcctgattgaactgatgcacagaatctttttactttgcaatagatttgtactaaccagacctgttctatcatgttttgaggagttaacttttttctgtgcagataatgttgaaagtaagttaatttgtttctgcatatatgcacatacatacgtaaggatcttaaacccagtcttgacagactagaagttaagtttaatacagaaaatgtcctgttcacttgaaagaaaagacctactttttaaatggacactatcttggttcttttttttttaagtcatctttttgttataagtgacctttgtctggaatgtctgaaaagtagttaatgctttttggtattgaagtaatgggtaactaaaatggacttccatagtattgactgtagaaggagcctctacaatattgactatatatttttataaactactggcaaggaacttacccagctgttatacatgttttcagttctctttgggggccatgtcctacatttgcatggatggatgcatgcattgcctagtcaactcacttaaaaagctcttgcactggtattgatcttgaacctctatacttctccactttttagagcggcgtcttagtttatttaaacgcttaacatcttccaccgcaacagcttgcctctagagggggaattgttcatccatttgtcctccagttttataggaacaagagactattaaagcccattgctttatctgctctctgtagggttcaggtacactggctaaggcagaaccccaaatttcaaggctctttctatcaatattggacctctgggagctaatactcctctttgctcaccaccatgtgatcattgatcagatgtggtgagtgagtaggggactcgacttgcgggatgcagttttgccattgcagcaaagttcattgaggaaaattgtaccatgaaaaagcattttgattatttcatttctggaggatgaccttgagggaagctttttaatattagtttcaagctttccttaccctacaactttaaacaaaagctttaattttgtttgcactcctattttgagcttgtaactggaaaagcatgtcttgcactgttcaacctcctgagtggtcgctttaacaacctccaaattgtgtacagtggttattttccccagttgtatagttttgagacattcaattatcactgtcttagttgtattttaatttactaaattatgtagctatttgactgttaagttcttttaaacaactgtttccttgggcttcagttatttaaagtaaatttaggtgtaatatagaaaactgtccctttccaggtgggagcttaacacctgtataaaacctaaggttttggtaagtaccttagttgaataaaagcacaaggttatcaccttttttatccgtccaccgtgacatggttatgcatcctttagattaacctcaccaaatgaagctttttctatccatttttaatattgtccttacataatattgtccttagattttgatcaattctatgtctgactttgaaattccatttacaatgtagtatgttttcaatgaaaaaccataaagtaacatccaagtgtttcatggtttgttgggaaggtaattttaaaataaaacaatttcc

SEQ ID NO: 7266 - protein, 368 aa, Homo sapiens; identical to SEQ ID NO: 424

SEQ ID NO: 7267 - DNA, 5432 bp, Homo sapiens
ggggtaaggaatcaagcccccaagatggcggcagcggcggaggagcggatggcagaggaaggaggcggcggccaaggcgacggcggttcctctttggcctccggctctacccagcgacagcctccaccgcccgcgccacagcacccgcagccggggtcccaggcgctcccagcccccgcgctggctccggaccagctgcctcaaaacaacacgcttgtggcgctgcccatcgtagccatcgagaacatcctcagctttatgtcctacgacgaaattagccagctccgcctggtttgtaaaagaatggacttggtctgccagagaatgttgaatcagggatttctgaaagtggagaggtaccataatctatgtcagaaacaagttaaagcacaactcccaaggagagagtcagaaaggagaaaccattcattagctcgtcatgcagacattcttgctgctgttgaaacaaggctgtcactattaaatatgactttcatgaaatatgtggattccaatctctgttgcttcatcccaggaaaggtgattgatgagatttatcgtgtgttgagatatgtcaattctaccagagcccctcaacgagctcatgaagtacttcaagaattaagggatatatcctctatggcaatggagtactttgatgaaaagattgttccaattttaaagaggaaattaccaggatcagatgtttctggaagactcatgggctctcctccagttccaggaccgtctgcagccctaacaacaatgcagctcttctccaagcaaaatccttcaagacaagaggttaccaaactccagcagcaggttaaaacaaatggtgctggcgtgactgttctcaggcgtgaaatttctgagcttcgcaccaaagtgcaagaacagcaaaaacagcttcaagaccaggaccagaaactgctagagcagacccagatcataggtgaacaaaatgcacggttggcagagctagaacgcaaactacgagaagtaatggaaagtgctgtaggaaattcctcagggtccgggcagaatgaggagtctcctcggaaacgaaaaaaggccacggaagccatagactctcttaggaaatctaaacgtcttcggaatagaaagtaaattggaatgtggttctagttccagaggaagacacagcttagtagcttaagcagttatgcatatcaggatactgtgagcaacatggtgtcccttaagcttctaggctttcagaacacaacttaaacttgaactcttatggttgggacattcttttcctgcttctcctgattgaactgatgcacagaatctttttactttgcaatagatttgtactaaccagacctgttctatcatgttttgaggagttaacttttttctgtgcagataatgttgaaagtaagttaatttgtttctgcatatatgcacatacatacgtaaggatcttaaacccagtcttgacagactagaagttaagtttaatacagaaaatgtcctgttcacttgaaagaaaagacctactttttaaatggacactatcttggttcttttttttttaagtcatctttttgttataagtgacctttgtctggaatgtctgaaaagtagttaatgctttttggtattgaagtaatgggtaactaaaatggacttccatagtattgactgtagaaggagcctctacaatattgactatatatttttataaactactggcaaggaacttacccagctgttatacatgttttcagttctctttgggggccatgtcctacatttgcatggatggatgcatgcattgcctagtcaactcacttaaaaagctcttgcactggtattgatcttgaacctctatacttctccactttttagagcggcgtcttagtttatttaaacgcttaacatcttccaccgcaacagcttgcctctagagggggaattgttcatccatttgtcctccagttttataggaacaagagactattaaagcccattgctttatctgctctctgtagggttcaggtacactggctaaggcagaaccccaaatttcaaggctctttctatcaatattggacctctgggagctaatactcctctttgctcaccaccatgtgatcattgatcagatgtggtgagtgagtaggggactcgacttgcgggatgcagttttgccattgcagcaaagttcattgaggaaaattgtaccatgaaaaagcattttgattatttcatttctggaggatgaccttgagggaagctttttaatattagtttcaagctttccttaccctacaactttaaacaaaagctttaattttgtttgcactcctattttgagcttgtaactggaaaagcatgtcttgcactgttcaacctcctgagtggtcgctttaacaacctccaaattgtgtacagtggttattttccccagttgtatagttttgagacattcaattatcactgtcttagttgtattttaatttactaaattatgtagctatttgactgttaagttcttttaaacaactgtttccttgggcttcagttatttaaagtaaatttaggtgtaatatagaaaactgtccctttccaggtgggagcttaacacctgtataaaacctaaggttttggtaagtaccttagttgaataaaagcacaaggttatcaccttttttatccgtccaccgtgacatggttatgcatcctttagattaacctcaccaaatgaagctttttctatccatttttaatattgtccttacataatattgtccttagattttgatcaattctatgtctgactttgaaattccatttacaatgtagtatgttttcaatgaaaaaccataaagtaacatccaagtgtttcatggtttgttgggaaggtaattttaaaataaaacaatttccaaaaaacatttgtcagccaaggtcatccataaaagtccccgtctggaactcgttttctcagcacttctcatttttataatcatagtatttagccatattagcatatctttagaggaggcctggtggaatacccggggcctctactagtctgcttttccggtcataggaagacttttttttttacgtatcaaagcatgtgtttacagatttacagagtgtgatccgtatgcatcaaagggatacagccccagactgtttctttaatggtcattcatgaactattaaaaatttcctgaatttctttttaaactacatctagatagcctaaacatctatgtagtcttccattagttaacatgtgtatagggctttcataataagtagtcacactgttacaaggtaaattttctattacaaaatccaaatttctattgcatacacttataatcatctattcataaagctaattcattgtacttgttaatgcatgaatgttccatgcagtaggagaataaagcactacagttcggttgttcaaatcttaaatcttaggctatttagctaaaacatgttaggatattgccttcaccacttgttaggacagttatttgatagccattatgcttacctatggatagcataatggtatttaaggttcaacaaaccgcagattattatgatcagctagaactgacatatgttacaagaaaactgtaaattaacctcctgagagaaccattctgccctgcattttaagtcaggtatttaaatactgcgtgttgttaatattgcgttgtcttagtgcaacatttcttaaagtattcccgttatcttccttggctgtttttcagaggagacgtctccatgttaatgggtccttcccacatagaaatgtattctggtacagcgctgcacacatggatagcaatgtgaaaaggcatgcctaagagacagaaacggctgaccttaccccaccccagccggatcctctgcttatctcccacatgcacttggcttaactggttttcacagattctgaggttatagaacctgttgtttttcaaactcctgtacagagcctggaaataatggagcaaacgcaaatgtattgagagtcattatactttaaaatagttttaaagactattggggtaccatcaggtcaaaagccactgatttgggaagcaatttttttgcaaaacactttttttggagtactgaactttacaggggcttgccttaatctctatttagtagtttcaagatatatgcgcaattattctacgtgttaaaaatgttaaaatattctatgtagccccaaaggtgggtaaaacagtataagtaatgcctaaattaataagctaaaaggtgtcactacagctggatttttgagagaaaatggacataaaactaggctatgtgtaataaaaataatggcaccttaagattgcactattttatgcattattttatatgccatttcatagcctgcactttaatctccaaagaaacgatgtatgatgtcccacttgttccttattcttaataaactttttcctgagacagggcacttaattctattttactatactgaattagtttcttggaggtagattcatttcttgagttctctgtttccttagccataatattttctaggatccgggaactccctatattgtctatttccaacattatataattttaatttaatgtaatgtaaatctcatacttggtgatcagcacattcttatatcctgctctagcaatgagtacccatttgttacacttaccaaactctctaaaaacatatactgtgagtaagatttgaagccaggaataaaaggcagtctgaaagaaaacgtcctatacgatgcagttgtttggaaatggctgatttctgatatgaaacccaacttgatacactgtttggttctttgacttgggatctatctgaattgctttcactagtacacaaaaggttaagttaaaactactttaaacttgtatagcctgccatctgaggtgaattattttcaaaaaatactaaatctatgaactgagactagcaattagttggctgctccctaccatgattttacttttaatagcaatacagttatattggtgataaatatgacaggcttaagtactgctgtccttttgcatcttcctaagcatcttggttaaatttctgaagtttaaaaattagatccagatttcttctgttgtgtctgaagagaaccatgacatttagaagtatattggtaatctattaggtccattggcaaagtatattggtccatattcaaacctattccaaaaggttagaagtgtttaagattcctttattgtggtaccatgtctgtttacctatgcttatgagcaacaataaattactagtttaccttctggaattttaattgttataaccgaatcaattattggaaagtgaaaaacacctcccggtcacacaacagggtacgtaaataaatgtgttgttaccagtg

SEQ ID NO: 7268 - protein, 368 aa, Homo sapiens; identical to SEQ ID NO: 424

SEQ ID NO: 7269 - DNA, 1874 bp, Homo sapiens
cggcggccaaggcgacggcggttcctctttggcctccggctctacccagcgacagcctccaccgcccgcgccacagcacccgcagccggggtcccaggcgctcccagcccccgcgctggctccggaccagctgcctcaaaacaacacgcttgtggcgctgcccatcgtagccatcgagaacatcctcagctttatgtcctacgacgaaattagccagctccgcctggtttgtaaaagaatggacttggtctgccagagaatgttgaatcagggatttctgaaagtggagaggtaccataatctatgtcagaaacaagttaaagcacaactcccaaggagagagtcagaaaggagaaaccattcattagctcgtcatgcagacattcttgctgctgttgaaacaaggctgtcactattaaatatgactttcatgaaatatgtggattccaatctctgttgcttcatcccaggaaaggtaaaatagaattgcttgcctagaacagctggactgccctacataaacttattatacagttatgaatttctgattttagaaatgttagaattgtttctacttctctgagtttctactaatgaatttgtttgctttctgtacagttataaatatgtatcatttgtatgatctttatatttaaaattctaattatgaaatagtcgaaaccctaatattctttagagaagttttttaagagttcatactcaagaataaaatttgaggttttactggtggttatgatgccagagatacagcaatgaacaacatacatattgtccctgccttcaagactattataattttggggaggtagaaaaggagggacaagctggtttttgttttgtttgagaaatgtttcataacgacaactttataaactttctgatttgacaagaataaacaattgctatttaccaatattcccagaactaaataacagtcctttttaacacagaaataactatattgtggcatatttaccattactaagttaataaaaactccaacattcaacatactacttataccttcagtagtaccctactccttgaattaagtgtaaattgacatatgtctgtatctttttatatggaagtggtagagatataattaaaggtcattttgctacttggttgatgctggcaaaagtttcccttaacatggttggaaataattaatatctagtaaaatctgaatgttcgctttttgttatttccaaagataatttacattggcaatatttaatacgtactttgtccatttttagttttctttgacatttatttttggggggaatcccatttcttatgattgtatttgaaatattttggtatatctcactttctttgcattatatacattttctttaaaagatcttgttgcataccaacacattacctgctaatgctttttgtagggtgctataagaggatgaccagttagaaacttcagagtgattcttatgccagatttttctgaatctgacttaaaggccttaacttttaagtgttcctgagttctttgaacttagcttgtttcatatagcatcatagtttttattgaatatctcattgttagaaacatgaatatctaagaaacatctcacagttatcataacttcaaagagattcagtcagttgttaagtaacagagttgaatagtttgtgacagagttcatgtggcctacaaagattaaaatatttatgatccaggccggctgtagtggctcgcacctctaatcccagatacttgcaaggctgaggcagaagaatcgcttgaacccgggaggcggaggttgcactgagccaagatcacaccactgcactccagcctgggcaacagagcaagactctgtctc

SEQ ID NO: 7270 - protein, 96 aa, Homo sapiens
MSYDEISQLRLVCKRMDLVCQRMLNQGFLKVERYHNLCQKQVKAQLPRRESERRNHSLARHADILAAVETRLSLLNMTFMKYVDSNLCCFIPGKVK

SEQ ID NO: 7271 - DNA, 468 bp, Homo sapiens
gctgggattacaggcatgagccaccgtgcccggccccactgattttttcttgtatttttctcccaccatctcttcaggctattgattttattaatgagtgcataagtacaggtaagaaattataatctcttgggggcagttcgttcttccagttctcacaaagtaaagaggttcagtcagtaactctgtccactgtgtcgtcatcaagagaaaatatacataccttccttgagcacatgcctggccccaaatagaattttttttaaagattaaagtattcttttggaagaggtgggaagttgtatccatatttaggtgagggaaattaagatgagttcactgaaaacacaaacaggacaagagaagagccagaatggttgtgattcgttcattattcattttttaaatgattttttcgtccatcattaactttttgccacatttgctttatctgtttcacttttgtgc

SEQ ID NO: 7272 - protein, 32 aa, Homo sapiens
MSSLKTQTGQEKSQNGCDSFIIHFLNDFFVHH

SEQ ID NO: 7273 - DNA, 743 bp, Homo sapiens
atgaagctgataattggactcaactcaggaggaagttttcaggtgctgacaagtaaatgtatccctgcagttcagaacgcagttgctatcacaggcatgtgtgaactggcacaccagtccaaaaggctgaggcggcggcgggcgcgcgaggctgttgtgctcccggctctcctgtttcccctcctgagcgggtggaggaggcccaagcgatgctgggcgcgctcccccttcctttccctccggcgtcctctcccggccctctcgcgctgcactgtctctccgacgcaagattctcctggcccggatatggctcgtggacagcagaaaattcagtctcagcagaataatgccaaaaagcaagctggacaaaagaagaaacaaggacatgaccaaaaggctgctgccaaagctgccttaatatatacctgcactgtctgtaggtgaattcacgacacctttgactcttctactgtctcagaccttaggtaacatacctgcagctgcttttctaacaaactgttgatcagcaaaaataaaggggctacagaaacactcattttttatgctgttcccttttgggcttcatgcaaagacaattctgtgtaaatgtacagttgactctgatttggaaatatgaaaatcagtccatccttgttataaaaaaattttttacaattgtaattatattgatgttcatattgtgtaaaataactcatttaataaaatagtactttgatttacga

SEQ ID NO: 7274 - protein, 147 aa, Homo sapiens
MKLIIGLNSGGSFQVLTSKCIPAVQNAVAITGMCELAHQSKRLRRRRAREAVVLPALLFPLLSGWRRPKRCWARSPFLSLRRPLPALSRCTVSPTQDSPGPDMARGQQKIQSQQNNAKKQAGQKKKQGHDQKAAAKAALIYTCTVCR

SEQ ID NO: 7275 - DNA, 1440 bp, Homo sapiens
ggggggggcggggcctcgggactccgcccacgcctccgtctcctccgcgctccgccacagccggccgacaccacaccagccggggagccgccgccgccgccgccacctctgagcagccggctgggagcgagagccgacagctagtctgcaagccaccgctgtcgccatggggagccgcgtctcgcgggaagacttcgagtgggtctacaccgaccagccgcacgccgaccggcgccgggagatcctggcaaagtatccagagataaagtccttgatgaaacctgatcccaatttgatatggattataattatgatggttctcacccagttgggtgcattttacatagtaaaagacttggactggaaatgggtcatatttggggcctatgcgtttggcagttgcattaaccactcaatgactctggctattcatgagattgcccacaatgctgcctttggcaactgcaaagcaatgtggaatcgctggtttggaatgtttgctaatcttcctattgggattccatattcaatttcctttaagaggtatcacatggatcatcatcggtaccttggagctgatggcgtcgatgtagatattcctaccgattttgagggctggttcttctgtaccgctttcagaaagtttatatgggttattcttcagcctctcttttatgcctttcgacctctgttcatcaaccccaaaccaattacgtatctggaagttatcaataccgtggcacaggtcacttttgacattttaatttattactttttgggaattaaatccttagtctacatgttggcagcatctttacttggcctgggtttgcacccaatttctggacattttatagctgagcattacatgttcttaaagggtcatgaaacttactcatattatgggcctctgaatttacttaccttcaatgtgggttatcataatgaacatcatgatttccccaacattcctggaaaaagtcttccactggtgaggaaaatagcagctgaatactatgacaacctccctcactacaattcctggataaaagtactgtatgattttgtgatggatgatacaataagtccctactcaagaatgaagaggcaccaaaaaggagagatggtgctggagtaaatatcattagtgccaaagggattcttctccaaaactttagatgataaaatgccgggcgtggcggcacatgcctgtaatcccagctacatgggaggctgaggtgggagaattgcttgaacccaggaggcggaggcagaggctgcagtgacccaagattgtgccactgcactccaccctgggcaacagagcaagaccccatctcaaaaataaataaatatatataaaaaataaaaagctatttctagtttatttcactataaagttttgctttattaaaaagctaataaacagctattaatcac

SEQ ID NO: 7276 - protein, 323 aa, Homo sapiens; identical to SEQ ID NO: 426

SEQ ID NO: 7277 - DNA, 1824 bp, Homo sapiens
ggggggggcggggcctcgggactccgcccacgcctccgtctcctccgcgctccgccacagccggccgacaccacaccagccggggagccgccgccgccgccgccacctctgagcagccggctgggagcgagagccgacagctagtctgcaagccaccgctgtcgccatggggagccgcgtctcgcgggaagacttcgagtgggtctacaccgaccagccgcacgccgaccggcgccgggagatcctggcaaagtatccagagataaagtccttgatgaaacctgatcccaatttgatatggattataattatgatggttctcacccagttgggtgcattttacatagtaaaagacttggactggaaatgggtcatatttggggcctatgcgtttggcagttgcattaaccactcaatgactctggctattcatgagattgcccacaatgctgcctttggcaactgcaaagcaatgtggaatcgctggtttggaatgtttgctaatcttcctattgggattccatattcaatttcctttaagaggtatcacatggatcatcatcggtaccttggagctgatggcgtcgatgtagatattcctaccgattttgagggctggttcttctgtaccgctttcagaaagtttatatgggttattcttcagcctctcttttatgcctttcgacctctgttcatcaaccccaaaccaattacgtatctggaagttatcaataccgtggcacaggtcacttttgacattttaatttattactttttgggaattaaatccttagtctacatgttggcagcatctttacttggcctgggtttgcacccaatttctggacattttatagctgagcattacatgttcttaaagggtcatgaaacttactcatattatgggcctctgaatttacttaccttcaatgtgggttatcataatgaacatcatgatttccccaacattcctggaaaaagtcttccactggtgaggaaaatagcagctgaatactatgacaacctccctcactacaattcctggataaaagtactgtatgattttgtgatggatgatacaataagtccctactcaagaatgaagaggcaccaaaaaggagagatggtgctggagtaaatatcattagtgccaaagggattcttctccaaaactttagatgataaaatggaatttttgcattattaaacttgagaccagtgatgctcagaagctcccctggcacaatttcagagtaagagctcggtgataccaagaagtgaatctggcttttaaacagtcagcctgactctgtactgctcagtttcactcacaggaaacttgtgacttgtgtattatcgtcattgaggatgtttcactcatgtctgtcattttataagcatatcatttaaaaagcttctaaaaagctatttcgccaggcacggtggctcatgcctataatcccagcactttgggaggccaaggtgggtggatcacctgaggtcaggagttcgagaccagcctggccaacacggtgaaaccccatctctactaaaaatgcaaaaattagccgggcgtggcggcacatgcctgtaatcccagctacatgggaggctgaggtgggagaattgcttgaacccaggaggcggaggcagaggctgcagtgacccaagattgtgccactgcactccaccctgggcaacagagcaagaccccatctcaaaaataaataaatatatataaaaaataaaaagctatttctagtttatttcactataaagttttgctttattaaaaagctaataaacagctattaatcacagtgt

SEQ ID NO: 7278 - protein, 323 aa, Homo sapiens; identical to SEQ ID NO: 426

SEQ ID NO: 7279 - DNA, 2101 bp, Homo sapiens
ggggggggcggggcctcgggactccgcccacgcctccgtctcctccgcgctccgccacagccggccgacaccacaccagccggggagccgccgccgccgccgccacctctgagcagccggctgggagcgagagccgacagctagtctgcaagccaccgctgtcgccatggggagccgcgtctcgcgggaagacttcgagtgggtctacaccgaccagccgcacgccgaccggcgccgggagatcctggcaaagtatccagagataaagtccttgatgaaacctgatcccaatttgatatggattataattatgatggttctcacccagttgggtgcattttacatagtaaaagacttggactggaaatgggtcatatttggggcctatgcgtttggcagttgcattaaccactcaatgactctggctattcatgagattgcccacaatgctgcctttggcaactgcaaagcaatgtggaatcgctggtttggaatgtttgctaatcttcctattgggattccatattcaatttcctttaagaggtatcacatggatcatcatcggtaccttggagctgatggcgtcgatgtagatattcctaccgattttgagggctggttcttctgtaccgctttcagaaagtttatatgggttattcttcagcctctcttttatgcctttcgacctctgttcatcaaccccaaaccaattacgtatctggaagttatcaataccgtggcacaggtcacttttgacattttaatttattactttttgggaattaaatccttagtctacatgttggcagcatctttacttggcctgggtttgcacccaatttctggacattttatagctgagcattacatgttcttaaagggtcatgaaacttactcatattatgggcctctgaatttacttaccttcaatgtgggttatcataatgaacatcatgatttccccaacattcctggaaaaagtcttccactggtgaggaaaatagcagctgaatactatgacaacctccctcactacaattcctggataaaagtactgtatgattttgtgatggatgatacaataagtccctactcaagaatgaagaggcaccaaaaaggagagatggtgctggagtaaatatcattagtgccaaagggattcttctccaaaactttagatgataaaatggaatttttgcattattaaacttgagaccagtgatgctcagaagctcccctggcacaatttcagagtaagagctcggtgataccaagaagtgaatctggcttttaaacagtcagcctgactctgtactgctcagtttcactcacaggaaacttgtgacttgtgtattatcgtcattgaggatgtttcactcatgtctgtcattttataagcatatcatttaaaaagcttctaaaaagctatttcgccaggcacggtggctcatgcctataatcccagcactttgggaggccaaggtgggtggatcacctgaggtcaggagttcgagaccagcctggccaacacggtgaaaccccatctctactaaaaatgcaaaaattagccgggcgtggcggcacatgcctgtaatcccagctacatgggaggctgaggtgggagaattgcttgaacccaggaggcggaggcagaggctgcagtgacccaagattgtgccactgcactccaccctgggcaacagagcaagaccccatctcaaaaataaataaatatatataaaaaataaaaagctatttctagtttatttcactataaagttttgctttattaaaaagctaataaacagctattaatcacagtgtattagtatttgttacatttttgtatttcactatctttatactatataatatggtaacttgggtaccgggggaactttaaaatttcatctcaaaaataatttttaaaaagcctgaggtatgatatagcataaaagattgagatgaaaatatatttccctgtaagctgaattactcatttaaaaattttaacttctatatgggacccgaattagacactgctgaatcctgtacagccttactcataaataaagtacttactgaatttccaccattcaaa

SEQ ID NO: 7280 - protein, 323 aa, Homo sapiens; identical to SEQ ID NO: 426

SEQ ID NO: 7281 - DNA, 1722 bp, Homo sapiens
ggggggggcggggcctcgggactccgcccacgcctccgtctcctccgcgctccgccacagccggccgacaccacaccagccggggagccgccgccgccgccgccacctctgagcagccggctgggagcgagagccgacagctagtctgcaagccaccgctgtcgccatggggagccgcgtctcgcgggaagacttcgagtgggtctacaccgaccagccgcacgccgaccggcgccgggagatcctggcaaagtatccagagataaagtccttgatgaaacctgatcccaatttgatatggattataattatgatggttctcacccagttgggtgcattttacatagtaaaagacttggactggaaatgggtcatatttggggcctatgcgtttggcagttgcattaaccactcaatgactctggctattcatgagattgcccacaatgctgcctttggcaactgcaaagcaatgtggaatcgctggtttggaatgtttgctaatcttcctattgggattccatattcaatttcctttaagaggtatcacatggatcatcatcggtaccttggagctgatggcgtcgatgtagatattcctaccgattttgagggctggttcttctgtaccgctttcagaaagtttatatgggttattcttcagcctctcttttatgcctttcgacctctgttcatcaaccccaaaccaattacgtatctggaagttatcaataccgtggcacaggtcacttttgacattttaatttattactttttgggaattaaatccttagtctacatgttggcagcatctttacttggcctgggtttgcacccaatttctggacattttatagctgagcattacatgttcttaaagggtcatgaaacttactcatattatgggcctctgaatttacttaccttcaatgtgggttatcataatgaacatcatgatttccccaacattcctggaaaaagtcttccactggtgaggaaaatagcagctgaatactatgacaacctccctcactacaattcctggataaaagtactgtatgattttgtgatggatgatacaataagtccctactcaagaatgaagaggcaccaaaaaggagagatggtgctggagtaaatatcattagtgccaaagggattcttctccaaaactttagatgataaaatgccgggcgtggcggcacatgcctgtaatcccagctacatgggaggctgaggtgggagaattgcttgaacccaggaggcggaggcagaggctgcagtgacccaagattgtgccactgcactccaccctgggcaacagagcaagaccccatctcaaaaataaataaatatatataaaaaataaaaagctatttctagtttatttcactataaagttttgctttattaaaaagctaataaacagctattaatcacagtgtattagtatttgttacatttttgtatttcactatctttatactatataatatggtaacttgggtaccgggggaactttaaaatttcatctcaaaaataatttttaaaaagcctgaggtatgatatagcataaaagattgagatgaaaatatatttccctgtaagctgaattactcatttaaaaattttaacttctatatgggacccgaattagacactgctgaatcctgtacagccttactcataaataaagtacttactgaatttccaccattcaaa

SEQ ID NO: 7282 - protein, 323 aa, Homo sapiens; identical to SEQ ID NO: 426

SEQ ID NO: 7283 - DNA, 985 bp, Homo sapiens
ccgccgccacctctgagcagccggctgggagcgagagccgacagctagtctgcaagccaccgctgtcgccatggggagccgcgtctcgcgggaagacttcgagtgggtctacaccgaccagccgcacgccgaccggcgccgggagatcctgggtgaggaaaatagcagctgaatactatgacaacctccctcactacaattcctggataaaagtactgtatgattttgtgatggatgatacaataagtccctactcaagaatgaagaggcaccaaaaaggagagatggtgctggagtaaatatcattagtgccaaagggattcttctccaaaactttagatgataaaatggaatttttgcattattaaacttgagaccagtgatgctcagaagctcccctggcacaatttcagagtaagagctcggtgataccaagaagtgaatctggcttttaaacagtcagcctgactctgtactgctcagtttcactcacaggaaacttgtgacttgtgtattatcgtcattgaggatgtttcactcatgtctgtcattttataagcatatcatttaaaaagcttctaaaaagctatttcgccaggcacggtggctcatgcctataatcccagcactttgggaggccaaggtgggtggatcacctgaggtcaggagttcgagaccagcctggccaacacggtgaaaccccatctctactaaaaatgcaaaaattagccgggcgtggcggcacatgcctgtaatcccagctacatgggaggctgaggtgggagaattgcttgaacccaggaggcggaggcagaggctgcagtgacccaagattgtgccactgcactccaccctgggcaacagagcaagaccccatctcaaaaataaataaatatatataaaaaataaaaagctatttctagtttatttcactataaagttttgctttattaaaaagctaataaacagctattaatcacagtgt

SEQ ID NO: 7284 - protein, 33 aa, Homo sapiens
MGSRVSREDFEWVYTDQPHADRRREILGEENSS

SEQ ID NO: 7285 - DNA, 1262 bp, Homo sapiens
ccgccgccacctctgagcagccggctgggagcgagagccgacagctagtctgcaagccaccgctgtcgccatggggagccgcgtctcgcgggaagacttcgagtgggtctacaccgaccagccgcacgccgaccggcgccgggagatcctgggtgaggaaaatagcagctgaatactatgacaacctccctcactacaattcctggataaaagtactgtatgattttgtgatggatgatacaataagtccctactcaagaatgaagaggcaccaaaaaggagagatggtgctggagtaaatatcattagtgccaaagggattcttctccaaaactttagatgataaaatggaatttttgcattattaaacttgagaccagtgatgctcagaagctcccctggcacaatttcagagtaagagctcggtgataccaagaagtgaatctggcttttaaacagtcagcctgactctgtactgctcagtttcactcacaggaaacttgtgacttgtgtattatcgtcattgaggatgtttcactcatgtctgtcattttataagcatatcatttaaaaagcttctaaaaagctatttcgccaggcacggtggctcatgcctataatcccagcactttgggaggccaaggtgggtggatcacctgaggtcaggagttcgagaccagcctggccaacacggtgaaaccccatctctactaaaaatgcaaaaattagccgggcgtggcggcacatgcctgtaatcccagctacatgggaggctgaggtgggagaattgcttgaacccaggaggcggaggcagaggctgcagtgacccaagattgtgccactgcactccaccctgggcaacagagcaagaccccatctcaaaaataaataaatatatataaaaaataaaaagctatttctagtttatttcactataaagttttgctttattaaaaagctaataaacagctattaatcacagtgtattagtatttgttacatttttgtatttcactatctttatactatataatatggtaacttgggtaccgggggaactttaaaatttcatctcaaaaataatttttaaaaagcctgaggtatgatatagcataaaagattgagatgaaaatatatttccctgtaagctgaattactcatttaaaaattttaacttctatatgggacccgaattagacactgctgaatcctgtacagccttactcataaataaagtacttactgaatttccaccattcaaa

SEQ ID NO: 7286 - protein, 33 aa, Homo sapiens; identical to SEQ ID NO: 7284

SEQ ID NO: 7287 - DNA, 534 bp, Homo sapiens
cctagtgcaagcctgccaaaagcatctgtagaatgaataaatgaatacataaatgcattttttgcatggatttaaacattaatgtttcatatttgaattttagattcaagagttggaaaaaaacagagacctagccaaaatgctggcatacaggaaatggttaatgaggcagtagagtatgtatgtagtaataggaacatgtgtttttcattctcattactgtttcaggacgaggctcataatgtaagccaaatggaatatggttaaggcttttgggtctggagtccacagagtctgcatttcaggttcagtttctgcagtttactaagtgtgaccttcggccagttacttaatctctctaagccttttctgtcatctacaaaatgaagatattaatagtactgcttatagcatataaatgttgagacttaaatacaataaattgtggttcatacctgtaatcccagcactttgggaggccgaggtgggaggattgcttgaccctgggaggcggaggttgcagtgagctgagat

SEQ ID NO: 7288 - protein, 35 aa, Homo sapiens
MLRLKYNKLWFIPVIPALWEAEVGGLLDPGRRRLQ

SEQ ID NO: 7289 - DNA, 437 bp, Homo sapiens
ttcgggagctgcagaacttcagtgtccatcagtcagaggcaatgcccctgacccagacgcctctagttgagagatagacagagctggatttatagcaccacagacctgacctggaatgagacttgcaagtatgtcagggagctgcacgctaacctaggaagaggctggccagatggaatcttgctctgttgcccaggctagaatgcagtggcgtgatcttggctcaccaaaaattctgcctcctgggttcaagtgcctccacacccagctaattttgtatttttagtagagacgagatttcaccatgttggccaggctagtcttgaactcctgacattgtgatccacccacctcagcctcccaaagtgctaagattacaggtgtgagccaccatgcccggcctacctggagcattattaaaaccttaaacctttaaa

SEQ ID NO: 7290 - protein, 37 aa, Homo sapiens
MESCSVAQARMQWRDLGSPKILPPGFKCLHTQLILYF

SEQ ID NO: 7291 - DNA, 787 bp, Homo sapiens
gttttctgagactgcatccactttgatagtttctactgagtccaaattagaacatcccagctggtgggctgtctcccaggaagccctcggagaggagcggtgcatagggggcacctggacacagcccacctcccccgagtagcgtcaggtaggcttgtctatctacatcctttcgccctttctcaggaaactatcagatgatgtgctcccccagatgaagaagtagtgccaggaaaaaggagacacgggatacagggatcctgaagccggcggaggacaagggagctcctgggaggacagctgtgctccggcctagcaatagcgagcagctggtccagactgccgccgtgactcagaagatagacatgcggagggttatgatcacagagcaacgatggtccttgtacatgaagataaaaatgctcaggtgtgcccaggttgaagaagatgaaaggccctgcctcccagagcgcccggggacactggtgatctcttccaggtctgtttccacccactgcagctgtgatggaatcttgctctgttgcccaggctagaatgcagtggcgtgatcttggctcaccaaaaattctgcctcctgggttcaagtgcctccacacccagctaattttgtatttttagtagagacgagatttcaccatgttggccaggctagtcttgaactcctgacattgtgatccacccacctcagcctcccaaagtgctaagattacaggtgtgagccaccatgcccggcctacctggagcattattaaaaccttaaaccttt

SEQ ID NO: 7292 - protein, 62 aa, Homo sapiens
MRRVMITEQRWSLYMKIKMLRCAQVEEDERPCLPERPGTLVISSRSVSTHCSCDGILLCCPG

SEQ ID NO: 7293 - DNA, 1322 bp, Homo sapiens
gaacaaaggggatggatttcagaaacgtttctaaatcataaatgactgaaccagaagaactgaagctgatgtcagatttctcgcttgggtgatgaggaacaaggcaggaagagcagcaatgaggatagaggtggaagggcagctcaggaatttccctggagttttcccatcttgagacttcggtcttggaagacagaatggctgtgacataatgtggactttttacttccacctctaggaaagcgttctttggaacacctttgctgagtctctctctcctccgctcaagggattccgctgacacattgcattcttgggagaaccttccaattccaattatggactagctgctcctaccctgtgctcttcgcttggtgactattcttatcccttttcagcccttctcacactgttttgtgactgtctctttatctgtattaagttggatatgaatttggctcctttcacacagaccaaaatataaatagcttaagcaatataaagatcacacacacaagtgaggcaaatgaccatctgagggttgaggaaactctgctgcaagggttgcccacgatcctggtttcttgtgttttattactttgtcattccctaggatgttgtctccatttacaaggccaaaacaggttcatcatcagctcatcactctctagtcccgggaagggcagcatggagttaaaatgacagaggaagaaggcattttcacacaaggctggccagatgggaagaatcttcagcttcagcttcagcttggcctcattcatttgaaaataaaatgtttacatgaggccgcgcctgtgtccagctgaaagtgggtccttcagagcgtgtgggggattctctgccggcttgatgggctagctcctctaagccggctgctggagacatcaccggctgagggactcctgcaaacgttcatacatgatttgatcctgaaaggagggagaacacagaatacagagaccgtcactgcttgttttgggctgaatggtgccccccaaaattcacatgctgcagtccgcacccgcaggacctcagaatgtgattgtaactggagagagggtctttatagaggagactggattaaaatgaggtcatacaggtagactcttatccaatatgactgctctccttacaaaaagaggggattagggcacaggagggaagagcatgtgcgcagagggaaaagcacatgcaggcgctgggagaagacagccatcagtgaggacaaaggctccagaagaaccaatcctgcccaacactctccagaactgtgagaaaataaattttccactttttaagcc

SEQ ID NO: 7294 - protein, 42 aa, Homo sapiens
MTEEEGIFTQGWPDGKNLQLQLQLGLIHLKIKCLHEAAPVSS

SEQ ID NO: 7295 - DNA, 639 bp, Homo sapiens
tgagccatcgcacccggcatggtctttaaagctccaatgaaaaatcatttttctctcttacttagaatggtaccaaaccaccactggatgcagatgtaaatttggaagcaattgctggtgaccttcgctgtgattgctatacgggcgcagatctctctgctttggtacgagaagcttctatctgtgccctgagacaggaaatggcaagacagaagagtggaaatgaaaaaggtgaactcaaggttagtcataagcattttgaagaagctttcaagaaagtaagatcatctatatcaaaaaaggatcaaatcatgtatgaacgtttgcaggagtccctcagccggtgatgtctccagcagccggcttagaggagctagcccatcaagccggcagagaatcccccacacgctctgaaggacccactttcagctggacacaggcgcggcctcatgtaaacattttattttcaaatgaatgaggccaagctgaagctgaagctgaagattcttcccatctggccagccttgtgtgaaaatgccttcttcctctttaagaaaaaggacaatttttaaactgctgaaataaaatgactgttacatttttcaaataaaacttttactttgaactattttgactata

SEQ ID NO: 7296 - protein, 48 aa, Homo sapiens
MARQKSGNEKGELKVSHKHFEEAFKKVRSSISKKDQIMYERLQESLSR

SEQ ID NO: 7297 - DNA, 2511 bp, Homo sapiens
gcccagacctgcagggttcgtggataataaactcaagcagcgagtcatccagtatagactatggtcgaagaaaaagaaatgcttttaggattcaggtagaaaaagtatttagcataattagtagtgagaaggaacttaagaatttaacagaattagaagatgaacatttggcaaaaagggcaagacaaggtgaagaggataatgagtatactgaaagctattctgatgatgattcaagtatggaagactacccagatccacaggattcaaaagattcttctcttttggagagtgatatgaaacggaaaggcaagctaaagaataaaggaagcaaaaggaagaaagaagatcttcaggaagtagatggagaaattgaagctgtcctgcaaaagaaagctaaagccagggggttagaattccagatctccaacgtgaagtttgaagatgtgggaggcaatgatatgacattaaaagaggtctgcaagatgctcatacacatgcgtcacccggaggtgtaccaccacctgggcgtcgtgccccctcgtggagttctccttcatggaccaccaggctgtgggaagacattacttgcacatgcaattgctggggaacttgacctgccaattttgaaagtggctgctccagagattgtgtctggagtatccggagagtctgagcagaagctgagagaactatttgagcaagctgtgtcaaatgcaccatgtatcattttcattgatgaaattgatgctattacccccaaaagagaagtggcttcaaaagatatggaacgaagaattgtagcccaactcctaacctgcatggatgatctgaataatgtggctgctacagcccgggtcctagttattggagctactaatcgaccagactcgttagaccctgctttgagacgtgcgggaaggttcgaccgagaaatatgcctaggtatcccagatgaagcatccagggaaagaatacttcaaacattgtgcagaaaactgaggcttcctcaagcttttgatttctgtcacttagcacacctaactccaggctttgttggtgctgatctcatggcactgtgccgagaggcagcaatgtgtgcagtcaatagagtcttaatgaagctacaggaacagcagaagaaaaatcctgaaatggaagatttgccatctaaaggagtccaggaggaaaggctgggaactgagcccacttctgaaacacaggatgaattacaaaggctgctggggttgctaagagaccaagatcccctctcagaggagcagatgcaaggactgtgcattgaactgaatgatttcattgttgctctatcctcagtccaaccctctgccaaaagggaaggctttgtcactgtccctaatgtgacatgggcagatattggtgccctggaagacattagagaggagctcaccatggcaatattggcaccagtacgcaacccagaccagttcaaagctcttggattggtgactccagctggggtcctccttgctggtcctcctggctgtgggaagactctgctggcgaaggctgttgcaaatgagtccggactaaattttatatctgtcaagggccccgaattactaaacatgtatgttggtgagagtgaacgtgctgtgcgacaagtttttcaacgagccaagaactcagcaccctgtgtgatattctttgatgaagtggatgctttatgtcctcgaagatcagaccgagagacaggggcaagtgtccgagtggtgaatcagctacttacagagatggatggtctggaagcacgccagcaggtttttattatggcagccactaacaggccagatataattgaccctgcaatcctgcgcccgggccgcctggacaaaacactgtttgtgggtttaccgccccctgcagatcgccttgccatcttaaaaactatcacaaaaaatggtaccaaaccaccactggatgcagatgtaaatttggaagcaattgctggtgaccttcgctgtgattgctatacgggcgcagatctctctgctttggtacgagaagcttctatctgtgccctgagacaggaaatggcaagacagaagagtggaaatgaaaaaggtgaactcaaggttagtcataagcattttgaagaagctttcaagaaagtaagatcatctatatcaaaaaaggatcaaatcatgtatgaacgtttgcaggagtccctcagccggtgatgtctccagcagccggcttagaggagctagcccatcaagccggcagagaatcccccacacgctctgaaggacccactttcagctggacacaggcgcggcctcatgtaaacattttattttcaaatgaatgaggccaagctgaagctgaagctgaagattcttcccatctggccagccttgtgtgaaaatgccttcttcctctttaagaaaaaggacaatttttaaactgctgaaataaaatgactgttacatttttcaaataaaacttttactttgaactattttgactata

SEQ ID NO: 7298 - protein, 659 aa, Homo sapiens
MEDYPDPQDSKDSSLLESDMKRKGKLKNKGSKRKKEDLQEVDGEIEAVLQKKAKARGLEFQISNVKFEDVGGNDMTLKEVCKMLIHMRHPEVYHHLGVVPPRGVLLHGPPGCGKTLLAHAIAGELDLPILKVAAPEIVSGVSGESEQKLRELFEQAVSNAPCIIFIDEIDAITPKREVASKDMERRIVAQLLTCMDDLNNVAATARVLVIGATNRPDSLDPALRRAGRFDREICLGIPDEASRERILQTLCRKLRLPQAFDFCHLAHLTPGFVGADLMALCREAAMCAVNRVLMKLQEQQKKNPEMEDLPSKGVQEERLGTEPTSETQDELQRLLGLLRDQDPLSEEQMQGLCIELNDFIVALSSVQPSAKREGFVTVPNVTWADIGALEDIREELTMAILAPVRNPDQFKALGLVTPAGVLLAGPPGCGKTLLAKAVANESGLNFISVKGPELLNMYVGESERAVRQVFQRAKNSAPCVIFFDEVDALCPRRSDRETGASVRVVNQLLTEMDGLEARQQVFIMAATNRPDIIDPAILRPGRLDKTLFVGLPPPADRLAILKTITKNGTKPPLDADVNLEAIAGDLRCDCYTGADLSALVREASICALRQEMARQKSGNEKGELKVSHKHFEEAFKKVRSSISKKDQIMYERLQESLSR

SEQ ID NO: 7299 - DNA, 2832 bp, Homo sapiens
ctaggagctggcggtccgagctgtggcttggaagaccgacgcgatgaagcccagacctgcagggttcgtggataataaactcaagcagcgagtcatccagtatagactatggtcgaagaaaaagaaatgcttttaggattcaggtagaaaaagtatttagcataattagtagtgagaaggaacttaagaatttaacagaattagaagatgaacatttggcaaaaagggcaagacaaggtgaagaggataatgagtatactgaaagctattctgatgatgattcaagtatggaagactacccagatccacagtcagcaaatcacatgaacagttccctgctgtctttatatcggaaaggaaatcctgattctgtttcaaatactcctgagatggagcaaagagaaaccacctcttcaacaccacggataagttccaaaacaggctccattcccttgaagacccctgccaaagattctgaaggaggatggtttattgacaaaaccccaagtgtaaagaaagacagttttttcttggacctgtcatgtgagaaaagtaatcctaagaagccaataactgagatacaggattcaaaagattcttctcttttggagagtgatatgaaacggaaaggcaagctaaagaataaaggaagcaaaaggaagaaagaagatcttcaggaagtagatggagaaattgaagctgtcctgcaaaagaaagctaaagccagggggttagaattccagatctccaacgtgaagtttgaagatgtgggaggcaatgatatgacattaaaagaggtctgcaagatgctcatacacatgcgtcacccggaggtgtaccaccacctgggcgtcgtgccccctcgtggagttctccttcatggaccaccaggctgtgggaagacattacttgcacatgcaattgctggggaacttgacctgccaattttgaaagtggctgctccagagattgtgtctggagtatccggagagtctgagcagaagctgagagaactatttgagcaagctgtgtcaaatgcaccatgtatcattttcattgatgaaattgatgctattacccccaaaagagaagtggcttcaaaagatatggaacgaagaattgtagcccaactcctaacctgcatggatgatctgaataatgtggctgctacagcccgggtcctagttattggagctactaatcgaccagactcgttagaccctgctttgagacgtgcgggaaggttcgaccgagaaatatgcctaggtatcccagatgaagcatccagggaaagaatacttcaaacattgtgcagaaaactgaggcttcctcaagcttttgatttctgtcacttagcacacctaactccaggctttgttggtgctgatctcatggcactgtgccgagaggcagcaatgtgtgcagtcaatagagtcttaatgaagctacaggaacagcagaagaaaaatcctgaaatggaagatttgccatctaaaggagtccaggaggaaaggctgggaactgagcccacttctgaaacacaggatgaattacaaaggctgctggggttgctaagagaccaagatcccctctcagaggagcagatgcaaggactgtgcattgaactgaatgatttcattgttgctctatcctcagtccaaccctctgccaaaagggaaggctttgtcactgtccctaatgtgacatgggcagatattggtgccctggaagacattagagaggagctcaccatggcaatattggcaccagtacgcaacccagaccagttcaaagctcttggattggtgactccagctggggtcctccttgctggtcctcctggctgtgggaagactctgctggcgaaggctgttgcaaatgagtccggactaaattttatatctgtcaagggccccgaattactaaacatgtatgttggtgagagtgaacgtgctgtgcgacaagtttttcaacgagccaagaactcagcaccctgtgtgatattctttgatgaagtggatgctttatgtcctcgaagatcagaccgagagacaggggcaagtgtccgagtggtgaatcagctacttacagagatggatggtctggaagcacgccagcaggtttttattatggcagccactaacaggccagatataattgaccctgcaatcctgcgcccgggccgcctggacaaaacactgtttgtgggtttaccgccccctgcagatcgccttgccatcttaaaaactatcacaaaaaatggtaccaaaccaccactggatgcagatgtaaatttggaagcaattgctggtgaccttcgctgtgattgctatacgggcgcagatctctctgctttggtacgagaagcttctatctgtgccctgagacaggaaatggcaagacagaagagtggaaatgaaaaaggtgaactcaaggttagtcataagcattttgaagaagctttcaagaaagtaagatcatctatatcaaaaaaggatcaaatcatgtatgaacgtttgcaggagtccctcagccggtgatgtctccagcagccggcttagaggagctagcccatcaagccggcagagaatcccccacacgctctgaaggacccactttcagctggacacaggcgcggcctcatgtaaacattttattttcaaatgaatgaggccaagctgaagctgaagctgaagattcttcccatctggccagccttgtgtgaaaatgccttcttcctctttaagaaaaaggacaatttttaaactgctgaaataaaatgactgttacatttttcaaataaaacttttactttgaactattttgactata

SEQ ID NO: 7300 - protein, 750 aa, Homo sapiens; identical to SEQ ID NO: 432

SEQ ID NO: 7301 - DNA, 2918 bp, Homo sapiens
gcccccggttgactaggagctggcggtccgagctgtggcttggaagaccgacgcgatgaagcccagacctgcagggttcgtggataataaactcaagcagcgagtcatccagtaccttaccagtaacaaatgtggcaaatatgtggacattggagtcttagcgtctgatttacaaagagtgtacagtatagactatggtcgaagaaaaagaaatgcttttaggattcaggtagaaaaagtatttagcataattagtagtgagaaggaacttaagaatttaacagaattagaagatgaacatttggcaaaaagggcaagacaaggtgaagaggataatgagtatactgaaagctattctgatgatgattcaagtatggaagactacccagatccacagtcagcaaatcacatgaacagttccctgctgtctttatatcggaaaggaaatcctgattctgtttcaaatactcctgagatggagcaaagagaaaccacctcttcaacaccacggataagttccaaaacaggctccattcccttgaagacccctgccaaagattctgaaggaggatggtttattgacaaaaccccaagtgtaaagaaagacagttttttcttggacctgtcatgtgagaaaagtaatcctaagaagccaataactgagatacaggattcaaaagattcttctcttttggagagtgatatgaaacggaaaggcaagctaaagaataaaggaagcaaaaggaagaaagaagatcttcaggaagtagatggagaaattgaagctgtcctgcaaaagaaagctaaagccagggggttagaattccagatctccaacgtgaagtttgaagatgtgggaggcaatgatatgacattaaaagaggtctgcaagatgctcatacacatgcgtcacccggaggtgtaccaccacctgggcgtcgtgccccctcgtggagttctccttcatggaccaccaggctgtgggaagacattacttgcacatgcaattgctggggaacttgacctgccaattttgaaagtggctgctccagagattgtgtctggagtatccggagagtctgagcagaagctgagagaactatttgagcaagctgtgtcaaatgcaccatgtatcattttcattgatgaaattgatgctattacccccaaaagagaagtggcttcaaaagatatggaacgaagaattgtagcccaactcctaacctgcatggatgatctgaataatgtggctgctacagcccgggtcctagttattggagctactaatcgaccagactcgttagaccctgctttgagacgtgcgggaaggttcgaccgagaaatatgcctaggtatcccagatgaagcatccagggaaagaatacttcaaacattgtgcagaaaactgaggcttcctcaagcttttgatttctgtcacttagcacacctaactccaggctttgttggtgctgatctcatggcactgtgccgagaggcagcaatgtgtgcagtcaatagagtcttaatgaagctacaggaacagcagaagaaaaatcctgaaatggaagatttgccatctaaaggagtccaggaggaaaggctgggaactgagcccacttctgaaacacaggatgaattacaaaggctgctggggttgctaagagaccaagatcccctctcagaggagcagatgcaaggactgtgcattgaactgaatgatttcattgttgctctatcctcagtccaaccctctgccaaaagggaaggctttgtcactgtccctaatgtgacatgggcagatattggtgccctggaagacattagagaggagctcaccatggcaatattggcaccagtacgcaacccagaccagttcaaagctcttggattggtgactccagctggggtcctccttgctggtcctcctggctgtgggaagactctgctggcgaaggctgttgcaaatgagtccggactaaattttatatctgtcaagggccccgaattactaaacatgtatgttggtgagagtgaacgtgctgtgcgacaagtttttcaacgagccaagaactcagcaccctgtgtgatattctttgatgaagtggatgctttatgtcctcgaagatcagaccgagagacaggggcaagtgtccgagtggtgaatcagctacttacagagatggatggtctggaagcacgccagcaggtttttattatggcagccactaacaggccagatataattgaccctgcaatcctgcgcccgggccgcctggacaaaacactgtttgtgggtttaccgccccctgcagatcgccttgccatcttaaaaactatcacaaaaaatggtaccaaaccaccactggatgcagatgtaaatttggaagcaattgctggtgaccttcgctgtgattgctatacgggcgcagatctctctgctttggtacgagaagcttctatctgtgccctgagacaggaaatggcaagacagaagagtggaaatgaaaaaggtgaactcaaggttagtcataagcattttgaagaagctttcaagaaagtaagatcatctatatcaaaaaaggatcaaatcatgtatgaacgtttgcaggagtccctcagccggtgatgtctccagcagccggcttagaggagctagcccatcaagccggcagagaatcccccacacgctctgaaggacccactttcagctggacacaggcgcggcctcatgtaaacattttattttcaaatgaatgaggccaagctgaagctgaagctgaagattcttcccatctggccagccttgtgtgaaaatgccttcttcctctttaagaaaaaggacaatttttaaactgctgaaataaaatgactgttacatttttcaaataaaacttttactttgaactattttgactata

SEQ ID NO: 7302 - protein, 856 aa, Homo sapiens; identical to SEQ ID NO: 430

SEQ ID NO: 7303 - DNA, 564 bp, Homo sapiens
gggcgcagatctctctgctttggtacgagaagcttctatctgtgccctgagacaggaaatggcaagacagaagagtggaaatgaaaaaggcaaatggatccattcgctgtcttcatcatgagtctgggctgcttatcaattctggaaaaacgtattcttttgctaaggtgaactcaaggttagtcataagcattttgaagaagctttcaagaaagtaagatcatctatatcaaaaaaggatcaaatcatgtatgaacgtttgcaggagtccctcagccggtgatgtctccagcagccggcttagaggagctagcccatcaagccggcagagaatcccccacacgctctgaaggacccactttcagctggacacaggcgcggcctcatgtaaacattttattttcaaatgaatgaggccaagctgaagctgaagctgaagattcttcccatctggccagccttgtgtgaaaatgccttcttcctctttaagaaaaaggacaatttttaaactgctgaaataaaatgactgttacatttttcaaataaaacttttactttgaacta

SEQ ID NO: 7304 - protein, 45 aa, Homo sapiens
MKKANGSIRCLHHESGLLINSGKTYSFAKVNSRLVISILKKLSRK

SEQ ID NO: 7305 - DNA, 583 bp, Homo sapiens
taggggcgcagatctctctgctttggtacgagaagcttctatctgtgccctgagacaggaaatggcaagacagaagagtggaaatgaaaaagtagagacggggtttcaccatgttagccaggatggtctcgatctcctgacttcgtgatccgcctgcctcggcctcccaaagtgctgggattacaggtgaactcaaggttagtcataagcattttgaagaagctttcaagaaagtaagatcatctatatcaaaaaaggatcaaatcatgtatgaacgtttgcaggagtccctcagccggtgatgtctccagcagccggcttagaggagctagcccatcaagccggcagagaatcccccacacgctctgaaggacccactttcagctggacacaggcgcggcctcatgtaaacattttattttcaaatgaatgaggccaagctgaagctgaagctgaagattcttcccatctggccagccttgtgtgaaaatgccttcttcctctttaagaaaaaggacaatttttaaactgctgaaataaaatgactgttacatttttcaaataaaacttttactttgaacta

SEQ ID NO: 7306 - protein, 43 aa, Homo sapiens [sequence omitted]

SEQ ID NO: 7307 - DNA, 425 bp, Homo sapiens
cacactgagtcacagtccttagagatttcagtacggagtaccagaaacagttgttattaggagtgctattgtataacaatttgaagcttagtgaagcataacataaacaataaatatataacctttttgaagcagatagcaactgctatttttatttatttttatttttatttttttcgagacggagttttgctcttgtctcccaggctggagtgcaatggtgcatctcggctcactgcaacttccgcctcctgggttcaagcgattctcctccctcagcctcttgggaggcagaggcaggagaattgcttgaacctgggagatggaggttgcagtgagccaagatcacaccattgtactccattctgggcaacaagagtgaaacttcatctcaaaaaacaaaacaaacaaacaaacaaaaaagc

SEQ ID NO: 7308 - protein, 31 aa, Homo sapiens
MVHLGSLQLPPPGFKRFSSLSLLGGRGRRIA

SEQ ID NO: 7309 - DNA, 725 bp, Homo sapiens
gactaggagctggcggtccgagctgtggcttggaagaccgacgcgatgaagcccagacctgcagggttcgtggataataaactcaagcagcgagtcatccagtaccttaccagtaacaaatgtggcaaatatgtggacattggagtcttagcgtctgatttacaaagagtgtacagtatagactatggtcgaagaaaaagaaatgcttttaggattcaggtagaaaaagtatttagcataattagtagtgagaaggaacttaagaatttaacagaattagaagatgaacatttggcaaaaagggcaagacaaggtgaagaggataatgagtatactgaaagctattctgatgatgattcaagtatggaagactacccagatccacagtcagcaaatcacatgaacagttccctgctgtctttatatcggaaaggaaatcctgattctgtttcaaatactcctgagatggagcaaagagaaaccacctcttcaacaccacggataagttccaaaacaggctccattcccttgaagacccctgccaaagattctgaaggaggatggtttattgacaaaaccccaagtgtaaagaaagacagttttttcttggacctgtcatgtgagaaaagtaatcctaagaagccaataactgagatacaggattcaaaagattcttctcttttggagagtgatatgaaacggaaaggcaagctaaagaataaagg

SEQ ID NO: 7310 - protein, 225 aa, Homo sapiens
MKPRPAGFVDNKLKQRVIQYLTSNKCGKYVDIGVLASDLQRVYSIDYGRRKRNAFRIQVEKVFSIISSEKELKNLTELEDEHLAKRARQGEEDNEYTESYSDDDSSMEDYPDPQSANHMNSSLLSLYRKGNPDSVSNTPEMEQRETTSSTPRISSKTGSIPLKTPAKDSEGGWFIDKTPSVKKDSFFLDLSCEKSNPKKPITEIQDSKDSSLLESDMKRKGKLKN

SEQ ID NO: 7311 - DNA, 664 bp, Homo sapiens
gcaagggcctatcaggggtgggtcggggcatccgagcgggtttgacggaaggagcggcggcgacggaggaggaggatggaggcggtggtgttcgtcttctctctcctcgattgttgcgcgctcatcttcctctcggtctacttcataattacattgtctgatttagaatgtgattacattaatgctagatcatgttgctcaaaattaaacaagtgggtaattccagaattgattggccataccattgtcactgtattactgctcatgtcattgcactggttcatcttccttctcaacttacctgttgccacttggaatatatatcgatacattatggtgccgagtggtaacatgggagtgtttgatccaacagaaatacacaatcgagggcagctgaagtcacacatgaaagaagccatgatcaagcttggtttccacttgctctgcttcttcatgtatctttatagtatgatcttagctttgataaatgactgaagctggagaagccgtggttgaagtcagcctacactacagtgcacagttgaggagccagagacttcttaaatcatccttagaaccgtgaccatagcagtatatattttcctcttggaacaaaaaactatttttgctgtatttttaccatataaagtatttaaaaaacatg

SEQ ID NO: 7312 - protein, 139 aa, Homo sapiens; identical to SEQ ID NO: 434

SEQ ID NO: 7313 - DNA, 701 bp, Homo sapiens
ctatcaggggtgggtcggggcatccgagcgggtttgacggaaggagcggcggcgacggaggaggaggatggaggcggtggtgttcgtcttctctctcctcgattgttgcgcgctcatcttcctctcggtctacttcataattacattgtctgatttagaatgtgattacattaatgctagatcatgttgctcaaaattaaacaagtgggtaattccagaattgattggccataccattgtcactgtattactgctcatgtcattgcactggttcatcttccttctcaacttacctgttgccacttggaatatatatcgtggtagcaactgcccttgctaatcaccgtaacctcggctgagaaagaagaggaagcgaaatccaagatgcagctcagttcatcaaagcctagcaggtcccctcagctgccttttcatgcctgccacagactacagtaggacaaaacctgacctggtctttgaagttaagagctaagaaagcttcctatagtagtatctcccatggcacttaccacattctatctggtattacagttatttgtatgcaattaatcactcttagattgtatgttcctggagggcagaatatgcccattcatatttgtatcttcttccttctgctcttggcacctaacacagtgccttgcacacaaacaataaatgattgttgagtgaataagtaa

SEQ ID NO: 7314 - protein, 90 aa, Homo sapiens
MEAVVFVFSLLDCCALIFLSVYFIITLSDLECDYINARSCCSKLNKWVIPELIGHTIVTVLLLMSLHWFIFLLNLPVATWNIYRGSNCPC

SEQ ID NO: 7315 - DNA, 502 bp, Homo sapiens
gtcggggcatccgagcgggtttgacggaaggagcggcggcgacggaggaggaggatggaggcggtggtgttcgtcttctctctcctcgattgttgcgcgctcatcttcctctcggtctacttcataattacattgtctgatttagaatgtgattacattaatgctagatcatgttgctcaaaattaaacaagtgggtaattccagaattgattggccataccattgtcactgtattactgctcatgtcattgcactggttcatcttccttctcaacttacctgttgccacttggaatatatatcgtatgatcttagctttgataaatgactgaagctggagaagccgtggttgaagtcagcctacactacagtgcacagttgaggagccagagacttcttaaatcatccttagaaccgtgaccatagcagtatatattttcctcttggaacaaaaaactatttttgctgtatttttaccatataaagtatttaaaaaacatg

SEQ ID NO: 7316 - protein, 92 aa, Homo sapiens
MEAVVFVFSLLDCCALIFLSVYFIITLSDLECDYINARSCCSKLNKWVIPELIGHTIVTVLLLMSLHWFIFLLNLPVATWNIYRMILALIND

SEQ ID NO: 7317 - DNA, 1525 bp, Homo sapiens
ccgagcgggtttgacggaaggagcggcggcgacggaggaggaggatggaggcggtggtgttcgtcttctctctcctcgattgttgcgcgctcatcttcctctcggtctacttcataattacattgtctgatttagaatgtgattacattaatgctagatcatgttgctcaaaattaaacaagtgggtaattccagaattgattggccataccattgtcactgtattactgctcatgtcattgcactggttcatcttccttctcaacttacctgttgccacttggaatatatatcgatacattatggtgccgagtggtaacatgggagtgtttgatccaacagaaatacacaatcgagggcagctgaagtcacacatgaaagaagccatgatcaagcttggtttccacttgctctgcttcttcatgtatctttatagtatgatcttagctttgataaatgactgaagctggagaagccgtggttgaagtcagcctacactacagtgcacagttgaggagccagagacttcttaaatcatccttagaaccgtgaccatagcagtatatattttcctcttggaacaaaaaactatttttgctgtatttttaccatataaagtatttaaaaaacatgaattgagtttctgtagatttctagttctcaactttagcctgaacgccaacacttgaaggtgtttttcatcctctgtatgttgaaggtggttatttgtatgtaggaacaggactgccatcccagctttgcatgccaaagaaataaagaacacactttaaagggcaaactgaagagatgagcgagcaaaggtgcccttcaggtctactgaaaagttagagtacaaaacaacactgttgatctggacaaaagaagaaaaattaccctttttgcttgtgttgtgacaacttcatttaatatggtttaaagatttatgagactgtcagctaaaagtcttttcacaagaatgtcaacagagaatggcatctcaaaatatatatatttctttgcacaatttgtgaaaccttataagccattttccccaggtacaatgtagttcctgctgatagaaaggaaatattttgtcaagagctttcatttaaaagctactacctccacaatcacccccaaacccagaaaatccccactggctcttgccagtctggttttcgtattgcagttattccaattgtatttgatctccctgataacgtattttcatgggtttgggtagaagatgctaatcagattagaagcaggaatagttatttgctgtctgtgaaattgagccttttggtgcgccacgtggtgccagatcaacacttctatccctctgcactgaccacgttgtgaactgggagaccaaatgcaagccatttcatggacatagcaatatacaaccaaactctgttccttggagttatattgtaaactcttgcaggtgggagagcagttcacctccttagctctgtttgccagctcttacagggtaaaataaacctggcaatttatcctc

SEQ ID NO: 7318 - protein, 139 aa, Homo sapiens; identical to SEQ ID NO: 434

SEQ ID NO: 7319 - DNA, 2124 bp, Homo sapiens
ccgagcgggtttgacggaaggagcggcggcgacggaggaggaggatggaggcggtggtgttcgtcttctctctcctcgattgttgcgcgctcatcttcctctcggtctacttcataattacattgtctgatttagaatgtgattacattaatgctagatcatgttgctcaaaattaaacaagtgggtaattccagaattgattggccataccattgtcactgtattactgctcatgtcattgcactggttcatcttccttctcaacttacctgttgccacttggaatatatatcgatacattatggtgccgagtggtaacatgggagtgtttgatccaacagaaatacacaatcgagggcagctgaagtcacacatgaaagaagccatgatcaagcttggtttccacttgctctgcttcttcatgtatctttatagtatgatcttagctttgataaatgactgaagctggagaagccgtggttgaagtcagcctacactacagtgcacagttgaggagccagagacttcttaaatcatccttagaaccgtgaccatagcagtatatattttcctcttggaacaaaaaactatttttgctgtatttttaccatataaagtatttaaaaaacatgaattgagtttctgtagatttctagttctcaactttagcctgaacgccaacacttgaaggtgtttttcatcctctgtatgttgaaggtggttatttgtatgtaggaacaggactgccatcccagctttgcatgccaaagaaataaagaacacactttaaagggcaaactgaagagatgagcgagcaaaggtgcccttcaggtctactgaaaagttagagtacaaaacaacactgttgatctggacaaaagaagaaaaattaccctttttgcttgtgttgtgacaacttcatttaatatggtttaaagatttatgagactgtcagctaaaagtcttttcacaagaatgtcaacagagaatggcatctcaaaatatatatatttctttgcacaatttgtgaaaccttataagccattttccccaggtacaatgtagttcctgctgatagaaaggaaatattttgtcaagagctttcatttaaaagctactacctccacaatcacccccaaacccagaaaatccccactggctcttgccagtctggttttcgtattgcagttattccaattgtatttgatctccctgataacgtattttcatgggtttgggtagaagatgctaatcagattagaagcaggaatagttatttgctgtctgtgaaattgagccttttggtgcgccacgtggtgccagatcaacacttctatccctctgcactgaccacgttgtgaactgggagaccaaatgcaagccatttcatggacatagcaatatacaaccaaactctgttccttggagttatattgtaaactcttgcaggtgggagagcagttcacctccttagctctgtttgccagctcttacagggtaaaataaacctggcaatttatcctcagtcctagtttgtggtttaatgttgctatcttaagcactggcatttgggcaaaacatgactgtgttctgtgggagaatccaaaggcattattcactctagttgagatagaattgggtggctaaacagggtgtgtggtacccaaaagattaaatgttacatgtccttttagtccttgaccaggtctagccttggcagaagcaagggagccactaagccaaactccctgtgcagacagaccatgtttcaaggctggaagtagtgccctggcaacacacaaaaggaacggtgaaatggtaggcaaagtgaacttggctctgctggcctctttggggtcacagaaattgctccttgtggtaatcttatatttctgtcaggcacagggccaagaagctgtgtaacagacattactttgcttgcatctctttttcataccttttccctctgaggcagcttttgcttagaaaacagtcccttcactctgcctttcctcctaacttcctgtgcctcttcatgttctgctcaagctttttaaagcaacgaagctgttggagaacttaaatccttgcaactgagagataagctacttaaaggcggtaga

SEQ ID NO: 7320 - protein, 139 aa, Homo sapiens; identical to SEQ ID NO: 434

SEQ ID NO: 7321 - DNA, 819 bp, Homo sapiens
ccgagcgggtttgacggaaggagcggcggcgacggaggaggaggatggaggcggtggtgttcgtcttctctctcctcgattgttgcgcgctcatcttcctctcggtctacttcataattacattgtctgatttagaatgtgattacattaatgctagatcatgttgctcaaaattaaacaagtgggtaattccagaattgattggccataccattgtcactgtattactgctcatgtcattgcactggttcatcttccttctcaacttacctgttgccacttggaatatatatcgatacattatggtgccgagtggtaacatgggagtgtttgatccaacagaaatacacaatcgagggcagctgaagtcacacatgaaagaagccatgatcaagcttggtttccacttgctctgcttcttcatgtatctttatagtggtagcaactgcccttgctaatcaccgtaacctcggctgagaaagaagaggaagcgaaatccaagatgcagctcagttcatcaaagcctagcaggtcccctcagctgccttttcatgcctgccacagactacagtaggacaaaacctgacctggtctttgaagttaagagctaagaaagcttcctatagtagtatctcccatggcacttaccacattctatctggtattacagttatttgtatgcaattaatcactcttagattgtatgttcctggagggcagaatatgcccattcatatttgtatcttcttccttctgctcttggcacctaacacagtgccttgcacacaaacaataaatgattgttgagtgaataagtaa

SEQ ID NO: 7322 - protein, 137 aa, Homo sapiens
MEAVVFVFSLLDCCALIFLSVYFIITLSDLECDYINARSCCSKLNKWVIPELIGHTIVTVLLLMSLHWFIFLLNLPVATWNIYRYIMVPSGNMGVFDPTEIHNRGQLKSHMKEAMIKLGFHLLCFFMYLYSGSNCPC

SEQ ID NO: 7323 - DNA, 905 bp, Homo sapiens
gggtttgacggaaggagcggcggcgacggaggaggaggatggaggcggtggtgttcgtcttctctctcctcgattgttgcgcgctcatcttcctctcggtctacttcgccagttgcagtggctgacacctgtccccagtactttgggaggccgaggagggagaatcacttgagcccagcggttcgagaccagctctggtaacatagggagacttcctctctacaaaaataaaacaagaggaaaaaaaaaagaaacatgtttcaggtctgtgtctgtgtaatacaaagatgactgcagcctacagtaagaaatccagagactgaaggctatagctttagggatctgatatggatcgcagagtattagtataacatcagctgacattttattgagtgcctactttgcatgtggcttacatgttatttcatctaattctctacaacaacttcgtgagtgggtaattccagaattgattggccataccattgtcactgtattactgctcatgtcattgcactggttcatcttccttctcaacttacctgttgccacttggaatatatatcgatacattatggtgccgagtggtaacatgggagtgtttgatccaacagaaatacacaatcgagggcagctgaagtcacacatgaaagaagccatgatcaagcttggtttccacttgctctgcttcttcatgtatctttatagtatgatcttagctttgataaatgactgaagctggagaagccgtggttgaagtcagcctacactacagtgcacagttgaggagccagagacttcttaaatcatccttagaaccgtgaccatagcagtatatattttcctcttggaacaaaaaactatttttgctgtatttttaccatataaagtatttaaaaaacatg

SEQ ID NO: 7324 - protein, 76 aa, Homo sapiens
MSLHWFIFLLNLPVATWNIYRYIMVPSGNMGVFDPTEIHNRGQLKSHMKEAMIKLGFHLLCFFMYLYSMILALIND

SEQ ID NO: 7325 - DNA, 1797 bp, Homo sapiens
gggtttgacggaaggagcggcggcgacggaggaggaggatggaggcggtggtgttcgtcttctctctcctcgattgttgcgcgctcatcttcctctcggtctacttcgccagttgcagtggctgacacctgtccccagtactttgggaggccgaggagggagaatcacttgagcccagcggttcgagaccagctctggtaacatagggagacttcctctctacaaaaataaaacaagaggaaaaaaaaaagaaacatgtttcaggtctgtgtctgtgtaatacaaagatgactgcagcctacagtaagaaatccagagactgaaggctatagctttagggatctgatatggatcgcagagtattagtataacatcagctgacattttattgagtgcctactttgcatgtggcttacatgttatttcatctaattctctacaacaacttcgtgagtgggtaattccagaattgattggccataccattgtcactgtattactgctcatgtcattgcactggttcatcttccttctcaacttacctgttgccacttggaatatatatcgatacattatggtgccgagtggtaacatgggagtgtttgatccaacagaaatacacaatcgagggcagctgaagtcacacatgaaagaagccatgatcaagcttggtttccacttgctctgcttcttcatgtatctttatagtatgatcttagctttgataaatgactgaagctggagaagccgtggttgaagtcagcctacactacagtgcacagttgaggagccagagacttcttaaatcatccttagaaccgtgaccatagcagtatatattttcctcttggaacaaaaaactatttttgctgtatttttaccatataaagtatttaaaaaacatgaattgagtttctgtagatttctagttctcaactttagcctgaacgccaacacttgaaggtgtttttcatcctctgtatgttgaaggtggttatttgtatgtaggaacaggactgccatcccagctttgcatgccaaagaaataaagaacacactttaaagggcaaactgaagagatgagcgagcaaaggtgcccttcaggtctactgaaaagttagagtacaaaacaacactgttgatctggacaaaagaagaaaaattaccctttttgcttgtgttgtgacaacttcatttaatatggtttaaagatttatgagactgtcagctaaaagtcttttcacaagaatgtcaacagagaatggcatctcaaaatatatatatttctttgcacaatttgtgaaaccttataagccattttccccaggtacaatgtagttcctgctgatagaaaggaaatattttgtcaagagctttcatttaaaagctactacctccacaatcacccccaaacccagaaaatccccactggctcttgccagtctggttttcgtattgcagttattccaattgtatttgatctccctgataacgtattttcatgggtttgggtagaagatgctaatcagattagaagcaggaatagttatttgctgtctgtgaaattgagccttttggtgcgccacgtggtgccagatcaacacttctatccctctgcactgaccacgttgtgaactgggagaccaaatgcaagccatttcatggacatagcaatatacaaccaaactctgttccttggagttatattgtaaactcttgcaggtgggagagcagttcacctccttagctctgtttgccagctcttacagggtaaaataaacctggcaatttatcctc

SEQ ID NO: 7326 - protein, 76 aa, Homo sapiens; identical to SEQ ID NO: 7324

SEQ ID NO: 7327 - DNA, 2396 bp, Homo sapiens
gggtttgacggaaggagcggcggcgacggaggaggaggatggaggcggtggtgttcgtcttctctctcctcgattgttgcgcgctcatcttcctctcggtctacttcgccagttgcagtggctgacacctgtccccagtactttgggaggccgaggagggagaatcacttgagcccagcggttcgagaccagctctggtaacatagggagacttcctctctacaaaaataaaacaagaggaaaaaaaaaagaaacatgtttcaggtctgtgtctgtgtaatacaaagatgactgcagcctacagtaagaaatccagagactgaaggctatagctttagggatctgatatggatcgcagagtattagtataacatcagctgacattttattgagtgcctactttgcatgtggcttacatgttatttcatctaattctctacaacaacttcgtgagtgggtaattccagaattgattggccataccattgtcactgtattactgctcatgtcattgcactggttcatcttccttctcaacttacctgttgccacttggaatatatatcgatacattatggtgccgagtggtaacatgggagtgtttgatccaacagaaatacacaatcgagggcagctgaagtcacacatgaaagaagccatgatcaagcttggtttccacttgctctgcttcttcatgtatctttatagtatgatcttagctttgataaatgactgaagctggagaagccgtggttgaagtcagcctacactacagtgcacagttgaggagccagagacttcttaaatcatccttagaaccgtgaccatagcagtatatattttcctcttggaacaaaaaactatttttgctgtatttttaccatataaagtatttaaaaaacatgaattgagtttctgtagatttctagttctcaactttagcctgaacgccaacacttgaaggtgtttttcatcctctgtatgttgaaggtggttatttgtatgtaggaacaggactgccatcccagctttgcatgccaaagaaataaagaacacactttaaagggcaaactgaagagatgagcgagcaaaggtgcccttcaggtctactgaaaagttagagtacaaaacaacactgttgatctggacaaaagaagaaaaattaccctttttgcttgtgttgtgacaacttcatttaatatggtttaaagatttatgagactgtcagctaaaagtcttttcacaagaatgtcaacagagaatggcatctcaaaatatatatatttctttgcacaatttgtgaaaccttataagccattttccccaggtacaatgtagttcctgctgatagaaaggaaatattttgtcaagagctttcatttaaaagctactacctccacaatcacccccaaacccagaaaatccccactggctcttgccagtctggttttcgtattgcagttattccaattgtatttgatctccctgataacgtattttcatgggtttgggtagaagatgctaatcagattagaagcaggaatagttatttgctgtctgtgaaattgagccttttggtgcgccacgtggtgccagatcaacacttctatccctctgcactgaccacgttgtgaactgggagaccaaatgcaagccatttcatggacatagcaatatacaaccaaactctgttccttggagttatattgtaaactcttgcaggtgggagagcagttcacctccttagctctgtttgccagctcttacagggtaaaataaacctggcaatttatcctcagtcctagtttgtggtttaatgttgctatcttaagcactggcatttgggcaaaacatgactgtgttctgtgggagaatccaaaggcattattcactctagttgagatagaattgggtggctaaacagggtgtgtggtacccaaaagattaaatgttacatgtccttttagtccttgaccaggtctagccttggcagaagcaagggagccactaagccaaactccctgtgcagacagaccatgtttcaaggctggaagtagtgccctggcaacacacaaaaggaacggtgaaatggtaggcaaagtgaacttggctctgctggcctctttggggtcacagaaattgctccttgtggtaatcttatatttctgtcaggcacagggccaagaagctgtgtaacagacattactttgcttgcatctctttttcataccttttccctctgaggcagcttttgcttagaaaacagtcccttcactctgcctttcctcctaacttcctgtgcctcttcatgttctgctcaagctttttaaagcaacgaagctgttggagaacttaaatccttgcaactgagagataagctacttaaaggcggtaga

SEQ ID NO: 7328 - protein, 76 aa, Homo sapiens; identical to SEQ ID NO: 7324

SEQ ID NO: 7329 - DNA, 1524 bp, Homo sapiens
ggtttgacggaaggagcggcggcgacggaggaggaggatggaggcggtggtgttcgtcttctctctcctcgattgttgcgcgctcatcttcctctcggtctacttcgtatccttgcctgaggcaggcgaacgccttgccgggggacacggctgagggtgggccagttgggcacccgggcagtgggtaattccagaattgattggccataccattgtcactgtattactgctcatgtcattgcactggttcatcttccttctcaacttacctgttgccacttggaatatatatcgatacattatggtgccgagtggtaacatgggagtgtttgatccaacagaaatacacaatcgagggcagctgaagtcacacatgaaagaagccatgatcaagcttggtttccacttgctctgcttcttcatgtatctttatagtatgatcttagctttgataaatgactgaagctggagaagccgtggttgaagtcagcctacactacagtgcacagttgaggagccagagacttcttaaatcatccttagaaccgtgaccatagcagtatatattttcctcttggaacaaaaaactatttttgctgtatttttaccatataaagtatttaaaaaacatgaattgagtttctgtagatttctagttctcaactttagcctgaacgccaacacttgaaggtgtttttcatcctctgtatgttgaaggtggttatttgtatgtaggaacaggactgccatcccagctttgcatgccaaagaaataaagaacacactttaaagggcaaactgaagagatgagcgagcaaaggtgcccttcaggtctactgaaaagttagagtacaaaacaacactgttgatctggacaaaagaagaaaaattaccctttttgcttgtgttgtgacaacttcatttaatatggtttaaagatttatgagactgtcagctaaaagtcttttcacaagaatgtcaacagagaatggcatctcaaaatatatatatttctttgcacaatttgtgaaaccttataagccattttccccaggtacaatgtagttcctgctgatagaaaggaaatattttgtcaagagctttcatttaaaagctactacctccacaatcacccccaaacccagaaaatccccactggctcttgccagtctggttttcgtattgcagttattccaattgtatttgatctccctgataacgtattttcatgggtttgggtagaagatgctaatcagattagaagcaggaatagttatttgctgtctgtgaaattgagccttttggtgcgccacgtggtgccagatcaacacttctatccctctgcactgaccacgttgtgaactgggagaccaaatgcaagccatttcatggacatagcaatatacaaccaaactctgttccttggagttatattgtaaactcttgcaggtgggagagcagttcacctccttagctctgtttgccagctcttacagggtaaaataaacctggcaatttatcctc

SEQ ID NO: 7330 - protein, 76 aa, Homo sapiens; identical to SEQ ID NO: 7324

SEQ ID NO: 7331 - DNA, 567 bp, Homo sapiens
acggaaggagcggcggcgacggaggaggaggatggaggcggtggtgttcgtcttctctctcctcgattgttgcgcgctcatcttcctctcggtctacttcataattacattgtctgatttagaatgtgattacattaatgctagatcatgttgctcaaatactgctcatgtcattgcactggttcatcttccttctcaacttacctgttgccacttggaatatatatcgatacattatggtgccgagtggtaacatgggagtgtttgatccaacagaaatacacaatcgagggcagctgaagtcacacatgaaagaagccatgatcaagcttggtttccacttgctctgcttcttcatgtatctttatagtatgatcttagctttgataaatgactgaagctggagaagccgtggttgaagtcagcctacactacagtgcacagttgaggagccagagacttcttaaatcatccttagaaccgtgaccatagcagtatatattttcctcttggaacaaaaaactatttttgctgtatttttaccatataaagtatttaaaaaacatg

SEQ ID NO: 7332 - protein, 86 aa, Homo sapiens
MLDHVAQILLMSLHWFIFLLNLPVATWNIYRYIMVPSGNMGVFDPTEIHNRGQLKSHMKEAMIKLGFHLLCFFMYLYSMILALIND

SEQ ID NO: 7333 - DNA, 1459 bp, Homo sapiens
acggaaggagcggcggcgacggaggaggaggatggaggcggtggtgttcgtcttctctctcctcgattgttgcgcgctcatcttcctctcggtctacttcataattacattgtctgatttagaatgtgattacattaatgctagatcatgttgctcaaatactgctcatgtcattgcactggttcatcttccttctcaacttacctgttgccacttggaatatatatcgatacattatggtgccgagtggtaacatgggagtgtttgatccaacagaaatacacaatcgagggcagctgaagtcacacatgaaagaagccatgatcaagcttggtttccacttgctctgcttcttcatgtatctttatagtatgatcttagctttgataaatgactgaagctggagaagccgtggttgaagtcagcctacactacagtgcacagttgaggagccagagacttcttaaatcatccttagaaccgtgaccatagcagtatatattttcctcttggaacaaaaaactatttttgctgtatttttaccatataaagtatttaaaaaacatgaattgagtttctgtagatttctagttctcaactttagcctgaacgccaacacttgaaggtgtttttcatcctctgtatgttgaaggtggttatttgtatgtaggaacaggactgccatcccagctttgcatgccaaagaaataaagaacacactttaaagggcaaactgaagagatgagcgagcaaaggtgcccttcaggtctactgaaaagttagagtacaaaacaacactgttgatctggacaaaagaagaaaaattaccctttttgcttgtgttgtgacaacttcatttaatatggtttaaagatttatgagactgtcagctaaaagtcttttcacaagaatgtcaacagagaatggcatctcaaaatatatatatttctttgcacaatttgtgaaaccttataagccattttccccaggtacaatgtagttcctgctgatagaaaggaaatattttgtcaagagctttcatttaaaagctactacctccacaatcacccccaaacccagaaaatccccactggctcttgccagtctggttttcgtattgcagttattccaattgtatttgatctccctgataacgtattttcatgggtttgggtagaagatgctaatcagattagaagcaggaatagttatttgctgtctgtgaaattgagccttttggtgcgccacgtggtgccagatcaacacttctatccctctgcactgaccacgttgtgaactgggagaccaaatgcaagccatttcatggacatagcaatatacaaccaaactctgttccttggagttatattgtaaactcttgcaggtgggagagcagttcacctccttagctctgtttgccagctcttacagggtaaaataaacctggcaatttatcctc

SEQ ID NO: 7334 - protein, 86 aa, Homo sapiens; identical to SEQ ID NO: 7332

SEQ ID NO: 7335 - DNA, 2058 bp, Homo sapiens
acggaaggagcggcggcgacggaggaggaggatggaggcggtggtgttcgtcttctctctcctcgattgttgcgcgctcatcttcctctcggtctacttcataattacattgtctgatttagaatgtgattacattaatgctagatcatgttgctcaaatactgctcatgtcattgcactggttcatcttccttctcaacttacctgttgccacttggaatatatatcgatacattatggtgccgagtggtaacatgggagtgtttgatccaacagaaatacacaatcgagggcagctgaagtcacacatgaaagaagccatgatcaagcttggtttccacttgctctgcttcttcatgtatctttatagtatgatcttagctttgataaatgactgaagctggagaagccgtggttgaagtcagcctacactacagtgcacagttgaggagccagagacttcttaaatcatccttagaaccgtgaccatagcagtatatattttcctcttggaacaaaaaactatttttgctgtatttttaccatataaagtatttaaaaaacatgaattgagtttctgtagatttctagttctcaactttagcctgaacgccaacacttgaaggtgtttttcatcctctgtatgttgaaggtggttatttgtatgtaggaacaggactgccatcccagctttgcatgccaaagaaataaagaacacactttaaagggcaaactgaagagatgagcgagcaaaggtgcccttcaggtctactgaaaagttagagtacaaaacaacactgttgatctggacaaaagaagaaaaattaccctttttgcttgtgttgtgacaacttcatttaatatggtttaaagatttatgagactgtcagctaaaagtcttttcacaagaatgtcaacagagaatggcatctcaaaatatatatatttctttgcacaatttgtgaaaccttataagccattttccccaggtacaatgtagttcctgctgatagaaaggaaatattttgtcaagagctttcatttaaaagctactacctccacaatcacccccaaacccagaaaatccccactggctcttgccagtctggttttcgtattgcagttattccaattgtatttgatctccctgataacgtattttcatgggtttgggtagaagatgctaatcagattagaagcaggaatagttatttgctgtctgtgaaattgagccttttggtgcgccacgtggtgccagatcaacacttctatccctctgcactgaccacgttgtgaactgggagaccaaatgcaagccatttcatggacatagcaatatacaaccaaactctgttccttggagttatattgtaaactcttgcaggtgggagagcagttcacctccttagctctgtttgccagctcttacagggtaaaataaacctggcaatttatcctcagtcctagtttgtggtttaatgttgctatcttaagcactggcatttgggcaaaacatgactgtgttctgtgggagaatccaaaggcattattcactctagttgagatagaattgggtggctaaacagggtgtgtggtacccaaaagattaaatgttacatgtccttttagtccttgaccaggtctagccttggcagaagcaagggagccactaagccaaactccctgtgcagacagaccatgtttcaaggctggaagtagtgccctggcaacacacaaaaggaacggtgaaatggtaggcaaagtgaacttggctctgctggcctctttggggtcacagaaattgctccttgtggtaatcttatatttctgtcaggcacagggccaagaagctgtgtaacagacattactttgcttgcatctctttttcataccttttccctctgaggcagcttttgcttagaaaacagtcccttcactctgcctttcctcctaacttcctgtgcctcttcatgttctgctcaagctttttaaagcaacgaagctgttggagaacttaaatccttgcaactgagagataagctacttaaaggcggtaga

SEQ ID NO: 7336 - protein, 86 aa, Homo sapiens; identical to SEQ ID NO: 7332

SEQ ID NO: 7337 - DNA, 1464 bp, Homo sapiens
cggaaggagcggcggcgacggaggaggaggatggaggcggtggtgttcgtcttctctctcctcgattgttgcgcgctcatcttcctctcggtctacttcataattacattgtctgatttagaatgtgattacattaatgctagatcatgttgctcaaaattaaacaagtgggtaattccagaattgattggccataccattgtcactgtattactgctcatgtcattgcactggttcatcttccttctcaacttacctgttgccacttggaatatatatcgaaatacacaatcgagggcagctgaagtcacacatgaaagaagccatgatcaagcttggtttccacttgctctgcttcttcatgtatctttatagtatgatcttagctttgataaatgactgaagctggagaagccgtggttgaagtcagcctacactacagtgcacagttgaggagccagagacttcttaaatcatccttagaaccgtgaccatagcagtatatattttcctcttggaacaaaaaactatttttgctgtatttttaccatataaagtatttaaaaaacatgaattgagtttctgtagatttctagttctcaactttagcctgaacgccaacacttgaaggtgtttttcatcctctgtatgttgaaggtggttatttgtatgtaggaacaggactgccatcccagctttgcatgccaaagaaataaagaacacactttaaagggcaaactgaagagatgagcgagcaaaggtgcccttcaggtctactgaaaagttagagtacaaaacaacactgttgatctggacaaaagaagaaaaattaccctttttgcttgtgttgtgacaacttcatttaatatggtttaaagatttatgagactgtcagctaaaagtcttttcacaagaatgtcaacagagaatggcatctcaaaatatatatatttctttgcacaatttgtgaaaccttataagccattttccccaggtacaatgtagttcctgctgatagaaaggaaatattttgtcaagagctttcatttaaaagctactacctccacaatcacccccaaacccagaaaatccccactggctcttgccagtctggttttcgtattgcagttattccaattgtatttgatctccctgataacgtattttcatgggtttgggtagaagatgctaatcagattagaagcaggaatagttatttgctgtctgtgaaattgagccttttggtgcgccacgtggtgccagatcaacacttctatccctctgcactgaccacgttgtgaactgggagaccaaatgcaagccatttcatggacatagcaatatacaaccaaactctgttccttggagttatattgtaaactcttgcaggtgggagagcagttcacctccttagctctgtttgccagctcttacagggtaaaataaacctggcaatttatcctc

SEQ ID NO: 7338 - protein, 114 aa, Homo sapiens
MEAVVFVFSLLDCCALIFLSVYFIITLSDLECDYINARSCCSKLNKWVIPELIGHTIVTVLLLMSLHWFIFLLNLPVATWNIYRNTQSRAAEVTHERSHDQAWFPLALLLHVSL

SEQ ID NO: 7339 - DNA, 2063 bp, Homo sapiens
cggaaggagcggcggcgacggaggaggaggatggaggcggtggtgttcgtcttctctctcctcgattgttgcgcgctcatcttcctctcggtctacttcataattacattgtctgatttagaatgtgattacattaatgctagatcatgttgctcaaaattaaacaagtgggtaattccagaattgattggccataccattgtcactgtattactgctcatgtcattgcactggttcatcttccttctcaacttacctgttgccacttggaatatatatcgaaatacacaatcgagggcagctgaagtcacacatgaaagaagccatgatcaagcttggtttccacttgctctgcttcttcatgtatctttatagtatgatcttagctttgataaatgactgaagctggagaagccgtggttgaagtcagcctacactacagtgcacagttgaggagccagagacttcttaaatcatccttagaaccgtgaccatagcagtatatattttcctcttggaacaaaaaactatttttgctgtatttttaccatataaagtatttaaaaaacatgaattgagtttctgtagatttctagttctcaactttagcctgaacgccaacacttgaaggtgtttttcatcctctgtatgttgaaggtggttatttgtatgtaggaacaggactgccatcccagctttgcatgccaaagaaataaagaacacactttaaagggcaaactgaagagatgagcgagcaaaggtgcccttcaggtctactgaaaagttagagtacaaaacaacactgttgatctggacaaaagaagaaaaattaccctttttgcttgtgttgtgacaacttcatttaatatggtttaaagatttatgagactgtcagctaaaagtcttttcacaagaatgtcaacagagaatggcatctcaaaatatatatatttctttgcacaatttgtgaaaccttataagccattttccccaggtacaatgtagttcctgctgatagaaaggaaatattttgtcaagagctttcatttaaaagctactacctccacaatcacccccaaacccagaaaatccccactggctcttgccagtctggttttcgtattgcagttattccaattgtatttgatctccctgataacgtattttcatgggtttgggtagaagatgctaatcagattagaagcaggaatagttatttgctgtctgtgaaattgagccttttggtgcgccacgtggtgccagatcaacacttctatccctctgcactgaccacgttgtgaactgggagaccaaatgcaagccatttcatggacatagcaatatacaaccaaactctgttccttggagttatattgtaaactcttgcaggtgggagagcagttcacctccttagctctgtttgccagctcttacagggtaaaataaacctggcaatttatcctcagtcctagtttgtggtttaatgttgctatcttaagcactggcatttgggcaaaacatgactgtgttctgtgggagaatccaaaggcattattcactctagttgagatagaattgggtggctaaacagggtgtgtggtacccaaaagattaaatgttacatgtccttttagtccttgaccaggtctagccttggcagaagcaagggagccactaagccaaactccctgtgcagacagaccatgtttcaaggctggaagtagtgccctggcaacacacaaaaggaacggtgaaatggtaggcaaagtgaacttggctctgctggcctctttggggtcacagaaattgctccttgtggtaatcttatatttctgtcaggcacagggccaagaagctgtgtaacagacattactttgcttgcatctctttttcataccttttccctctgaggcagcttttgcttagaaaacagtcccttcactctgcctttcctcctaacttcctgtgcctcttcatgttctgctcaagctttttaaagcaacgaagctgttggagaacttaaatccttgcaactgagagataagctacttaaaggcggtaga

SEQ ID NO: 7340 - protein, 114 aa, Homo sapiens; identical to SEQ ID NO: 7338

SEQ ID NO: 7341 - DNA, 1347 bp, Homo sapiens
gaggaggatggaggcggtggtgttcgtcttctctctcctcgattgttgcgcgctcatcttcctctcggtctacttcataattacattgtctgatttagaatgtgattacattaatgctagatcatgttgctcaaaattaaacaagtgggtaattccagaattgattggccataccattgtcactgtattactgctcatgtcattgcactggttcatcttccttctcaacttacctgttgccacttggaatatatatcgtatgatcttagctttgataaatgactgaagctggagaagccgtggttgaagtcagcctacactacagtgcacagttgaggagccagagacttcttaaatcatccttagaaccgtgaccatagcagtatatattttcctcttggaacaaaaaactatttttgctgtatttttaccatataaagtatttaaaaaacatgaattgagtttctgtagatttctagttctcaactttagcctgaacgccaacacttgaaggtgtttttcatcctctgtatgttgaaggtggttatttgtatgtaggaacaggactgccatcccagctttgcatgccaaagaaataaagaacacactttaaagggcaaactgaagagatgagcgagcaaaggtgcccttcaggtctactgaaaagttagagtacaaaacaacactgttgatctggacaaaagaagaaaaattaccctttttgcttgtgttgtgacaacttcatttaatatggtttaaagatttatgagactgtcagctaaaagtcttttcacaagaatgtcaacagagaatggcatctcaaaatatatatatttctttgcacaatttgtgaaaccttataagccattttccccaggtacaatgtagttcctgctgatagaaaggaaatattttgtcaagagctttcatttaaaagctactacctccacaatcacccccaaacccagaaaatccccactggctcttgccagtctggttttcgtattgcagttattccaattgtatttgatctccctgataacgtattttcatgggtttgggtagaagatgctaatcagattagaagcaggaatagttatttgctgtctgtgaaattgagccttttggtgcgccacgtggtgccagatcaacacttctatccctctgcactgaccacgttgtgaactgggagaccaaatgcaagccatttcatggacatagcaatatacaaccaaactctgttccttggagttatattgtaaactcttgcaggtgggagagcagttcacctccttagctctgtttgccagctcttacagggtaaaataaacctggcaatttatcctc

SEQ ID NO: 7342 - protein, 92 aa, Homo sapiens; identical to SEQ ID NO: 7316

SEQ ID NO: 7343 - DNA, 1946 bp, Homo sapiens
gaggaggatggaggcggtggtgttcgtcttctctctcctcgattgttgcgcgctcatcttcctctcggtctacttcataattacattgtctgatttagaatgtgattacattaatgctagatcatgttgctcaaaattaaacaagtgggtaattccagaattgattggccataccattgtcactgtattactgctcatgtcattgcactggttcatcttccttctcaacttacctgttgccacttggaatatatatcgtatgatcttagctttgataaatgactgaagctggagaagccgtggttgaagtcagcctacactacagtgcacagttgaggagccagagacttcttaaatcatccttagaaccgtgaccatagcagtatatattttcctcttggaacaaaaaactatttttgctgtatttttaccatataaagtatttaaaaaacatgaattgagtttctgtagatttctagttctcaactttagcctgaacgccaacacttgaaggtgtttttcatcctctgtatgttgaaggtggttatttgtatgtaggaacaggactgccatcccagctttgcatgccaaagaaataaagaacacactttaaagggcaaactgaagagatgagcgagcaaaggtgcccttcaggtctactgaaaagttagagtacaaaacaacactgttgatctggacaaaagaagaaaaattaccctttttgcttgtgttgtgacaacttcatttaatatggtttaaagatttatgagactgtcagctaaaagtcttttcacaagaatgtcaacagagaatggcatctcaaaatatatatatttctttgcacaatttgtgaaaccttataagccattttccccaggtacaatgtagttcctgctgatagaaaggaaatattttgtcaagagctttcatttaaaagctactacctccacaatcacccccaaacccagaaaatccccactggctcttgccagtctggttttcgtattgcagttattccaattgtatttgatctccctgataacgtattttcatgggtttgggtagaagatgctaatcagattagaagcaggaatagttatttgctgtctgtgaaattgagccttttggtgcgccacgtggtgccagatcaacacttctatccctctgcactgaccacgttgtgaactgggagaccaaatgcaagccatttcatggacatagcaatatacaaccaaactctgttccttggagttatattgtaaactcttgcaggtgggagagcagttcacctccttagctctgtttgccagctcttacagggtaaaataaacctggcaatttatcctcagtcctagtttgtggtttaatgttgctatcttaagcactggcatttgggcaaaacatgactgtgttctgtgggagaatccaaaggcattattcactctagttgagatagaattgggtggctaaacagggtgtgtggtacccaaaagattaaatgttacatgtccttttagtccttgaccaggtctagccttggcagaagcaagggagccactaagccaaactccctgtgcagacagaccatgtttcaaggctggaagtagtgccctggcaacacacaaaaggaacggtgaaatggtaggcaaagtgaacttggctctgctggcctctttggggtcacagaaattgctccttgtggtaatcttatatttctgtcaggcacagggccaagaagctgtgtaacagacattactttgcttgcatctctttttcataccttttccctctgaggcagcttttgcttagaaaacagtcccttcactctgcctttcctcctaacttcctgtgcctcttcatgttctgctcaagctttttaaagcaacgaagctgttggagaacttaaatccttgcaactgagagataagctacttaaaggcggtaga

SEQ ID NO: 7344 - protein, 92 aa, Homo sapiens; identical to SEQ ID NO: 7316

SEQ ID NO: 7345 - DNA, 351 bp, Homo sapiens
gtcattgcactggttcatcttccttctcaacttacctgttgccacttggaatatatatcgaaatacacaatcgagggcagctgaagtcacacatgaaagaagccatgatcaagcttggtttccacttgctctgcttcttcatgtatctttatagtatgatcttagctttgataaatgactgaagctggagaagccgtggttgaagtcagcctacactacagtgcacagttgaggagccagagacttcttaaatcatccttagaaccgtgaccatagcagtatatattttcctcttggaacaaaaaactatttttgctgtatttttaccatataaagtatttaaaaaacatg

SEQ ID NO: 7346 - protein, 31 aa, Homo sapiens [sequence omitted]

SEQ ID NO: 7347 - DNA, 300 bp, Homo sapiens
ctggtcttgaactcctgacctcagggcagctgaagtcacacatgaaagaagccatgatcaagcttggtttccacttgctctgcttcttcatgtatctttatagtatgatcttagctttgataaatgactgaagctggagaagccgtggttgaagtcagcctacactacagtgcacagttgaggagccagagacttcttaaatcatccttagaaccgtgaccatagcagtatatattttcctcttggaacaaaaaactatttttgctgtatttttaccatataaagtatttaaaaaacatg

SEQ ID NO: 7348 - protein, 31 aa, Homo sapiens [sequence omitted]

SEQ ID NO: 7349 - DNA, 1192 bp, Homo sapiens
ctggtcttgaactcctgacctcagggcagctgaagtcacacatgaaagaagccatgatcaagcttggtttccacttgctctgcttcttcatgtatctttatagtatgatcttagctttgataaatgactgaagctggagaagccgtggttgaagtcagcctacactacagtgcacagttgaggagccagagacttcttaaatcatccttagaaccgtgaccatagcagtatatattttcctcttggaacaaaaaactatttttgctgtatttttaccatataaagtatttaaaaaacatgaattgagtttctgtagatttctagttctcaactttagcctgaacgccaacacttgaaggtgtttttcatcctctgtatgttgaaggtggttatttgtatgtaggaacaggactgccatcccagctttgcatgccaaagaaataaagaacacactttaaagggcaaactgaagagatgagcgagcaaaggtgcccttcaggtctactgaaaagttagagtacaaaacaacactgttgatctggacaaaagaagaaaaattaccctttttgcttgtgttgtgacaacttcatttaatatggtttaaagatttatgagactgtcagctaaaagtcttttcacaagaatgtcaacagagaatggcatctcaaaatatatatatttctttgcacaatttgtgaaaccttataagccattttccccaggtacaatgtagttcctgctgatagaaaggaaatattttgtcaagagctttcatttaaaagctactacctccacaatcacccccaaacccagaaaatccccactggctcttgccagtctggttttcgtattgcagttattccaattgtatttgatctccctgataacgtattttcatgggtttgggtagaagatgctaatcagattagaagcaggaatagttatttgctgtctgtgaaattgagccttttggtgcgccacgtggtgccagatcaacacttctatccctctgcactgaccacgttgtgaactgggagaccaaatgcaagccatttcatggacatagcaatatacaaccaaactctgttccttggagttatattgtaaactcttgcaggtgggagagcagttcacctccttagctctgtttgccagctcttacagggtaaaataaacctggcaatttatcctc

SEQ ID NO: 7350 - protein, 40 aa, Homo sapiens
MRLSAKSLFTRMSTENGISKYIYFFAQFVKPYKPFSPGTM

SEQ ID NO: 7351 - DNA, 1791 bp, Homo sapiens
ctggtcttgaactcctgacctcagggcagctgaagtcacacatgaaagaagccatgatcaagcttggtttccacttgctctgcttcttcatgtatctttatagtatgatcttagctttgataaatgactgaagctggagaagccgtggttgaagtcagcctacactacagtgcacagttgaggagccagagacttcttaaatcatccttagaaccgtgaccatagcagtatatattttcctcttggaacaaaaaactatttttgctgtatttttaccatataaagtatttaaaaaacatgaattgagtttctgtagatttctagttctcaactttagcctgaacgccaacacttgaaggtgtttttcatcctctgtatgttgaaggtggttatttgtatgtaggaacaggactgccatcccagctttgcatgccaaagaaataaagaacacactttaaagggcaaactgaagagatgagcgagcaaaggtgcccttcaggtctactgaaaagttagagtacaaaacaacactgttgatctggacaaaagaagaaaaattaccctttttgcttgtgttgtgacaacttcatttaatatggtttaaagatttatgagactgtcagctaaaagtcttttcacaagaatgtcaacagagaatggcatctcaaaatatatatatttctttgcacaatttgtgaaaccttataagccattttccccaggtacaatgtagttcctgctgatagaaaggaaatattttgtcaagagctttcatttaaaagctactacctccacaatcacccccaaacccagaaaatccccactggctcttgccagtctggttttcgtattgcagttattccaattgtatttgatctccctgataacgtattttcatgggtttgggtagaagatgctaatcagattagaagcaggaatagttatttgctgtctgtgaaattgagccttttggtgcgccacgtggtgccagatcaacacttctatccctctgcactgaccacgttgtgaactgggagaccaaatgcaagccatttcatggacatagcaatatacaaccaaactctgttccttggagttatattgtaaactcttgcaggtgggagagcagttcacctccttagctctgtttgccagctcttacagggtaaaataaacctggcaatttatcctcagtcctagtttgtggtttaatgttgctatcttaagcactggcatttgggcaaaacatgactgtgttctgtgggagaatccaaaggcattattcactctagttgagatagaattgggtggctaaacagggtgtgtggtacccaaaagattaaatgttacatgtccttttagtccttgaccaggtctagccttggcagaagcaagggagccactaagccaaactccctgtgcagacagaccatgtttcaaggctggaagtagtgccctggcaacacacaaaaggaacggtgaaatggtaggcaaagtgaacttggctctgctggcctctttggggtcacagaaattgctccttgtggtaatcttatatttctgtcaggcacagggccaagaagctgtgtaacagacattactttgcttgcatctctttttcataccttttccctctgaggcagcttttgcttagaaaacagtcccttcactctgcctttcctcctaacttcctgtgcctcttcatgttctgctcaagctttttaaagcaacgaagctgttggagaacttaaatccttgcaactgagagataagctacttaaaggcggtaga

SEQ ID NO: 7352 - protein, 40 aa, Homo sapiens; identical to SEQ ID NO: 7350

SEQ ID NO: 7353 - DNA, 467 bp, Homo sapiens
tcgagggcagctgaagtcacacatgaaagaagccatgatcaagcttggtttccacttgctctgcttcttcatgtatctttatagtggtagcaactgcccttgctaatcaccgtaacctcggctgagaaagaagaggaagcgaaatccaagatgcagctcagttcatcaaagcctagcaggtcccctcagctgccttttcatgcctgccacagactacagtaggacaaaacctgacctggtctttgaagttaagagctaagaaagcttcctatagtagtatctcccatggcacttaccacattctatctggtattacagttatttgtatgcaattaatcactcttagattgtatgttcctggagggcagaatatgcccattcatatttgtatcttcttccttctgctcttggcacctaacacagtgccttgcacacaaacaataaatgattgttgagtgaataagtaa

SEQ ID NO: 7354 - protein, 42 aa, Homo sapiens
MQLITLRLYVPGGQNMPIHICIFFLLLLAPNTVPCTQTINDC

SEQ ID NO: 7355 - DNA, 1936 bp, Homo sapiens
agtcactcttttttagtgaaaaagtttggacatgaaagatcctaatatattctttcctttgggtatgaatgattgtcttttactcaaatgattgttcctttgtgaaccttagggacgcaagtctggacaaaccaggctctgtaggaacattcctgagaaaacattagtgacattcatttcttctttccacagtatgatcttagctttgataaatgactgaagctggagaagccgtggttgaagtcagcctacactacagtgcacagttgaggagccagagacttcttaaatcatccttagaaccgtgaccatagcagtatatattttcctcttggaacaaaaaactatttttgctgtatttttaccatataaagtatttaaaaaacatgaattgagtttctgtagatttctagttctcaactttagcctgaacgccaacacttgaaggtgtttttcatcctctgtatgttgaaggtggttatttgtatgtaggaacaggactgccatcccagctttgcatgccaaagaaataaagaacacactttaaagggcaaactgaagagatgagcgagcaaaggtgcccttcaggtctactgaaaagttagagtacaaaacaacactgttgattcctggactcaagcagtcctcctgcctcagcttcccaagtagttgggagtaggtgcacaccaccatgcccagcgaattttttgtagagacagaggtcttgctatgttgcctaggctggtatcaaaattactggcctcaagcgattctcctgcctcggcctcccagatgttgggattactggtgtgagccaccacgcccagctcaaaaacaatttttttaggggcacttctacaaatcatgaaagggggataaaagcactgactttaaaaagccatgtttaagatgctataaatgttctccccttttcattgattggagagttgtagaggaccttagagatcattttgtctaactccctcatcccaaagataaactgaggcctagagatcgttcagggtgttgtaactgggaacatctgaatgctgaggcctagagatcgttcagggtgttgtaactgggaacatctgaatgctgaggcctagagatcgttcagggtgttgtaactgggaacatctgaatgctgaggcctagagatcgttcagggtgttgtaactgggaacatctgaatgctgaggcctagagatcgttcagggtgttgtaactgggaacatctgaatgctgaggcctagagatcgttcagggtgttgtaactgggaacatctgaatgctgaggcctagagatcgttcagggtgttgtaactgggaacatctgaatgctgaggcctagagatcgttcagggtgttgtaactgggaacatctgaatgctgaggcttagtccagtgttctctctcccttaccactcctcttccccttccctctataatggcagtacccagggcccggtccatagactactatcgagtgctcctatgtgcatcttagtacgtatcattttcccttgcctttttccttctatcctttcagtggtagcaactgcccttgctaatcaccgtaacctcggctgagaaagaagaggaagcgaaatccaagatgcagctcagttcatcaaagcctagcaggtcccctcagctgccttttcatgcctgccacagactacagtaggacaaaacctgacctggtctttgaagttaagagctaagaaagcttcctatagtagtatctcccatggcacttaccacattctatctggtattacagttatttgtatgcaattaatcactcttagattgtatgttcctggagggcagaatatgcccattcatatttgtatcttcttccttctgctcttggcacctaacacagtgccttgcacacaaacaataaatgattgttgagtgaataagtaaa

SEQ ID NO: 7356 - protein, 67 aa, Homo sapiens
MLRLSPVFSLPYHSSSPSLYNGSTQGPVHRLLSSAPMCILVRIIFPCLFPSILSVVATALANHRNLG

SEQ ID NO: 7357 - DNA, 1366 bp, Homo sapiens
gaaaagttagagtacaaaacaacactgttgatctggacaaaagaagaaaaattaccctttttgcttgtgttgtgacaacttcatttaatatggtttaaagatttatgagactgtcagctaaaagtcttttcacaagaatgtcaacagagaatggcatctcaaaatatatatatttctttgcacaatttgtgaaaccttataagccattttccccaggtacaatgtagttcctgctgatagaaaggaaatattttgtcaagagctttcatttaaaagctactacctccacaatcacccccaaacccagaaaatccccactggctcttgccagtctggttttcgtattgcagttattccaattgtatttgatctccctgataacgtattttcatgggtttgggtagaagatgctaatcagattagaagcaggaatagttatttgctgtctgtgaaattgagccttttggtgcgccacgtggtgccagatcaacacttctatccctctgcactgaccacgttgtgaactgggagaccaaatgcaagccatttcatggacatagcaatatacaaccaaactctgttccttggagttatattgtaaactcttgcaggtgggagagcagttcacctccttagctctgtttgccagctcttacagggtaaaataaacctggcaatttatcctcagtcctagtttgtggtttaatgttgctatcttaagcactggcatttgggcaaaacatgactgtgttctgtgggagaatccaaaggcattattcactctagttgagatagaattgggtggctaaacagggtgtgtggtacccaaaagattaaatgttacatgtccttttagtccttgaccaggtctagccttggcagaagcaagggagccactaagccaaactccctgtgcagacagaccatgtttcaaggctggaagtagtgccctggcaacacacaaaaggaacggtgaaatgtggtagcaactgcccttgctaatcaccgtaacctcggctgagaaagaagaggaagcgaaatccaagatgcagctcagttcatcaaagcctagcaggtcccctcagctgccttttcatgcctgccacagactacagtaggacaaaacctgacctggtctttgaagttaagagctaagaaagcttcctatagtagtatctcccatggcacttaccacattctatctggtattacagttatttgtatgcaattaatcactcttagattgtatgttcctggagggcagaatatgcccattcatatttgtatcttcttccttctgctcttggcacctaacacagtgccttgcacacaaacaataaatgattgttgagtgaataagtaaacc

SEQ ID NO: 7358 - protein, 42 aa, Homo sapiens; identical to SEQ ID NO: 7354

SEQ ID NO: 7359 - DNA, 329 bp, Homo sapiens
atagagggaaggggaagaggagtggtaagggagagagaacactggactaagcctcagcattcagatgttcccagttacaacaccctgaacgatctctaggcctcagcattcagatgttcccagttacaacaccctgaacgatctctaggcctcagcattcagatgttcccagttacaacaccctgaacgatctctaggcctcagcattcagatgttcccagttacaacaccctgaacgatctctaggcctcagtttatctttgggatgagggagttagacaaaatgatctctaaggtcctctacaactctccaatcaatgaaaagggga

SEQ ID NO: 7360 - protein, 32 aa, Homo sapiens
IEGRGRGVVREREHWTKPQHSDVPSYNTLNDL

SEQ ID NO: 7361 - DNA, 6750 bp, Homo sapiens
gctgctgcccctcccgccgccgctgctgtcccccaccgaagtagcggccacagcctggtcagcggcagcatcatgcaggccaatggggcaggaggaggaggaggaggtggcggcggcggcggtggaggaggagggggcggcgggggccagggacagaccccggaactcgcctgcttgtcggcccagaacggggagtcgtccccctcgtcgtcgtcgtccgcgggggacctggcccacgccaatgggctcctgccttccgccccctccgccgccagcaacaatagcaacagcctgaatgtcaataacggggttcccggcggggcggccgccgcatcctcagccaccgtcgcagctgcctccgccaccaccgccgcctcctcttccttggccaccccagaactgggcagcagcctcaagaagaagaagcggctctcccagtcagatgaggatgtcattaggctaataggacagcacttgaatggcttagggctcaaccagactgttgatctcctcatgcaagagtcaggatgtcgtttagaacatccttctgctaccaaattccgaaatcatgtcatggaaggagactgggataaggcagaaaatgacctgaatgaactaaagcctttagtgcattctcctcatgctattgtggtaagaggcgcacttgaaatctctcaaacgttgttgggaataattgtgaggatgaagtttttgctgctgcagcagaagtacctagaatacctggaggatggcaaggtcctggaggcacttcaagttctacgctgtgaattgacgccgctgaaatacaatacagagcgcattcatgttcttagtgggtatctgatgtgtagccatgcagaagacctacgtgcaaaagcagaatgggaaggcaaagggacagcttcccgatctaaactattggataaacttcagacctatttaccaccatcagtgatgcttcccccacggcgtttacagactctcctgcggcaggcggtggaactacaaagggatcggtgcctatatcacaataccaaacttgataataatctagattctgtgtctctgcttatagaccatgtttgtagtaggaggcagttcccatgttatacgcagcagatacttacggagcattgtaatgaagtgtggttctgtaaattctctaatgatggcactaaactagcaacaggatcaaaagatacaacagttatcatatggcaagttgatccggatacacacctgctaaaactgcttaaaacattagaaggacatgcttatggcgtttcttatattgcatggagtccagatgacaactatcttgttgcttgtggcccagatgactgctctgagctttggctttggaatgtacaaacaggagaactaaggacaaaaatgagccagtctcatgaagacagtttgacaagtgtggcttggaatccagatgggaagcgctttgtgactggaggtcagcgtgggcagttctatcagtgtgacttagatggtaatctccttgactcctgggaaggggtaagagtgcaatgcctttggtgcttgagtgatggaaagactgttctggcatcagatacacaccagcgaattcggggctataacttcgaggaccttacagataggaacatagtacaagaagatcatcctattatgtcttttactatttcaaaaaatggccgattagctttgttaaatgtagcaactcagggagttcatttatgggacttgcaagacagagttttagtaagaaagtatcaaggtgttacacaagggttttatacaattcattcatgttttggaggccataatgaagacttcatcgctagtggcagtgaagatcacaaggtttacatctggcacaaacgtagtgaactgccaattgcggagctgacagggcacacacgtacagtaaactgtgtgagctggaacccacagattccatccatgatggccagcgcctcagatgatggcactgttagaatatggggaccagcaccttttatagaccaccagaatattgaagaggaatgcagtagcatggatagttgatggtgaatttggagcagacgacttctgtttaacttaaaattagtcgtattttaatggcttgggatttggtgcaaacaaacatgattgatagctggacagacatgctcgtcatgaaaaaagaaccatttctgaagcccgattggggccaaacatttacaccttgcttcatagtaaccagttgagatgaagcacgtcgttagaacgttgttggacaccatgttgaattattcccccatcggttgtgaagaactgtgctacattcaggcttacccattgaactcagtatatatatttttttccttcctgtcttttgtctggcaggataccattcttgttgctcttctgtgtaatgaagtttaaatgcttgtttggaaaactttatttaacagtttagaaggcttgatagaaagagtgcattagtctgaagagtatacattggataggaaagaatttccttcttttgtttctccaaatctttccgccttatttagcttgagatctttgcagcttggttcatggattctagccttgcccgttgcgcagtatatactgatccagatgataaaccagtgaactatgtcaaaagcactctcaatattacatttgacaaaaagttttgtacttttcacatagcttgttgccccgtaaaagggttaacagcacaattttttaaaaataaattaagaagtatttataggattaaagtgacttcatttgtatacatttggaatctaaaccagcttaaaaacagtttcctcaatgacttagatacacagtataactgatgctcttctggaataccacatgagacatggtcagaaacagtgcttggaaggacattacacaagaaattcagagtaatgctttgaagatttccccccttttgttttattcctgaaggaacatcagtacccgatcttgaagaaattcaagattcaaaaagaattttaaatacaccaacatgagacatcagtagtcagttggttttcagtaaagcttgttccaagttgttctcaacttaggaagtaattttggtgtgatctagcaaaagagtaggaatcagcgatacaaccactttggaagtttatagtataattgaaattattagaagaattcagcaggttacagacatacttaaactgggattaaaacctcatagtcatttttcttaattgcccttaatattttgacatatagggatacataaatttaaagaatattttttctcagttttttcagatattgccatactgaacctcattctaaactggtgctgtggatagtctttccctctcccctcctgttttagtttaaggaaaggtttccttcatggaaaagcacttttaattttgagaatttcacatttaaaataagccaaaagcctgatgttcacattgtgcttttaaactccgtaacagctgaatacaacataacatagtctcccttgaaattccctccctttttcagtagaggataaatagggtgactccagctgttggaatgagaatggggatacccccaaaataagattctggtgaagaaaaagtcttgtactaagttcccctttaggtgtagccaagtctataatataattatgatcatgaatagactccagaatccacaaagagaagagggcttggatgtcaaaaattcttccattgtggggtaggtggtcggggatgggagaaagggaaaagtcagggaaggggagaagaaagaaaaacacatttggccttaaaatagcatgcattctcccagaagcccatagtaaagaaaatgacagatcgtggtcagcagactcttatcaaattggtatgtaaaagatttcttcaagctccattttgcagagaccaccacttagagaatcaaaaaattcctgttttgatacttctaagttaaaatatatgttacagtttatctggtacttcatttttcttaactaaaattactttttactttaagcttgaataaaaatcttcattggtaactgtatgtaattaagtggcaacttctctttacctcagtatagttaaaaaccattcatattttaagtgattcatgtataccctgaagccgttaatacaccccagtctctatggtaacatcactaaatgtgggcatagaaactccacagctgtttacaaatttggttacagtgtgctacggtgcatttgtaacactcagatttgtgcccattcaggggcaatttggcactcagattctactctacttcacctaaccacccctagatctgagttttcagagtgcttctgaagtacagtttaaaaacactttttaaaaagtggagtaaaagtgaggcacattttacaagaacataactcctattaaaacggagtaacaactatgcaaaggtttctatagcagctaggtgagtttgttttccgggtctgtcttaactggcagcttcctgtacatactggtacttatttgctgtaaacgtctgtttcatacatttgccatgcagtgactgtgctcgaaaggtgaaatcaatggtaaagaagcctaggattttatggtatgagaaactgatcgcaggattttctgatccatagctattaattgaaaacttctgatagtgctgtaggctctatagtaggcttaagagtgagtcttatactatgaagccagccacaagatactaacaaatgtataaattgaaaagtaccaatactttttgcacatagatcaaaatagagtggagaatttgggctccaaaaatcaggttagtaggctcatttccatgtgcttaaaaatgtttttgttgttatgcattgattaagggctagagcaaatataaaattaaatgtctttttcctccaaataattggttattaatggtaaaatgttggacttggggattactgagattagtatgtgggtagtaaagaattggagtgggagttagtggggagggatgacaaagcttcagctttggtttttgtatttttttagtcttcataacagctacatttctgttgctcttattggccagataaatgtgttatattaaaccaggtaagtattttaaacagagaacattttatttgcatatatccctacaaattggcccattttattgggtggggggataaaaaagggattccctaactttaaataatcagaatatcctgcaattgaaaggagaaaaaaatccaattttgtcagtattttcttagtctgaaaaaaacagcagtagtaatctggtgaatgttattattaggagtgttctgcctctacagtggcatattccatgacattaatagaaaacccttctttcccacccctccccatcttgacattttcttttttaggatgttggttcctgcaaacaagaactgaccctatcacctctgcctcacagtgggtaaatatatcatacatctcttgaaagggaaaatatccatgtcagtttctttcacagtagaagaatggctgcttttgaatggggaggaaagaagacatttttcttaatatcctttttgtcccatctctaaaatgtataaatattttgatttggttttactttaatttctcattcataatttcgcaactgtccttttgggttgccctccaacacattacttccatttcagaaaccatatctgatttaatataaactgctaacttaagaagaggtgaatttgcatttacacttagacactttctaaaaacagggtgaacttaattgaaatttttcagtgttgttaagctattgttatagtagctgccctatagttacaaaaataaaaactataaaaacccatcccctatctacttaatccagatagcctggatttaacaaaaccaatagtataaaaatgtgtgtgtgtgttctgtgtgtgtgtgagagagagagtacttgattcattaaaaagtcctggaaacagctgttctaggatcttgtcatttttactgaaagtctcgtgcacatgtgaagtgccctctgagtttaaggtttggttaatactggtatatttttataagattgaaattgtgtccccatctttaacttaaacattttcattatcagggtcaatgtgctagaactgaattgtaacatttttaggcacagatggaaaaaaatgttattggctccttgaaaatgtgtgtgtgtggcgaggggaatagatccacaaaagcatgtatgtacttacaaaccaagctgtagagatcaagaaaagaacttaagtgttgatctcaagatttctaaattgtcaagatttacatggcattgtggtggaactagttaacacttagagcttttggtatgtaataactatttgctatggactgattaaatgtttcaaaagattgtgttcttcaattttggtgggttttgatttttgtttttttaactgcctctcagattatatttacttagtttaaatttctttgctttattcattaaagtataaaaacttcaggtctctgatatttattttcacttgtttactaattatttacaaaacaccctttgttgacttttattttataaatgtgtaatgtattaaacgtctttaaatttttgttcaactgaaactacattaactttgatttgctttactgggatttttttttaaagacactttttccatgtcagtgcgcagcacttaaccagtcgtttgtattccctttctttcaatccaataaacagaatgaatacctaaataa

SEQ ID NO: 7362 - protein, 661 aa, Homo sapiens
MQANGAGGGGGGGGGGGGGGGGGGGQGQTPELACLSAQNGESSPSSSSSAGDLAHANGLLPSAPSAASNNSNSLNVNNGVPGGAAAASSATVAAASATTAASSSLATPELGSSLKKKKRLSQSDEDVIRLIGQHLNGLGLNQTVDLLMQESGCRLEHPSATKFRNHVMEGDWDKAENDLNELKPLVHSPHAIVVRGALEISQTLLGIIVRMKFLLLQQKYLEYLEDGKVLEALQVLRCELTPLKYNTERIHVLSGYLMCSHAEDLRAKAEWEGKGTASRSKLLDKLQTYLPPSVMLPPRRLQTLLRQAVELQRDRCLYHNTKLDNNLDSVSLLIDHVCSRRQFPCYTQQILTEHCNEVWFCKFSNDGTKLATGSKDTTVIIWQVDPDTHLLKLLKTLEGHAYGVSYIAWSPDDNYLVACGPDDCSELWLWNVQTGELRTKMSQSHEDSLTSVAWNPDGKRFVTGGQRGQFYQCDLDGNLLDSWEGVRVQCLWCLSDGKTVLASDTHQRIRGYNFEDLTDRNIVQEDHPIMSFTISKNGRLALLNVATQGVHLWDLQDRVLVRKYQGVTQGFYTIHSCFGGHNEDFIASGSEDHKVYIWHKRSELPIAELTGHTRTVNCVSWNPQIPSMMASASDDGTVRIWGPAPFIDHQNIEEECSSMDS

SEQ ID NO: 7363 - DNA, 6501 bp, Homo sapiens
gctgctgcccctcccgccgccgctgctgtcccccaccgaagtagcggccacagcctggtcagcggcagcatcatgcaggccaatggggcaggaggaggaggaggaggtggcggcggcggcggtggaggaggagggggcggcgggggccagggacagaccccggaactcgcctgcttgtcggcccagaacggggagtcgtccccctcgtcgtcgtcgtccgcgggggacctggcccacgccaatgggctcctgccttccgccccctccgccgccagcaacaatagcaacagcctgaatgtcaataacggggttcccggcggggcggccgccgcatcctcagccaccgtcgcagctgcctccgccaccaccgccgcctcctcttccttggccaccccagaactgggcagcagcctcaagaagaagaagcggctctcccagtcagatgaggatgtcattaggctaataggacagcacttgaatggcttagggctcaaccagactgttgatctcctcatgcaagagtcaggatgtcgtttagaacatccttctgctaccaaattccgaaatcatgtcatggaaggagactgggataaggcagaaaatgacctgaatgaactaaagcctttagtgcattctcctcatgctattgtggtaagaggcgcacttgaaatctctcaaacgttgttgggaataattgtgaggatgaagtttttgctgctgcagcagaagtacctagaatacctggaggatggcaaggtcctggaggcacttcaagttctacgctgtgaattgacgccgctgaaatacaatacagagcgcattcatgttcttagtgggtatctgatgtgtagccatgcagaagacctacgtgcaaaagcagaatgggaaggcaaagggacagcttcccgatctaaactattggataaacttcagacctatttaccaccatcagtgatgcttcccccacggcgtttacagactctcctgcggcaggcggtggaactacaaagggatcggtgcctatatcacaataccaaacttgataataatctagattctgtgtctctgcttatagaccatgtttgtagtaggaggcagttcccatgttatacgcagcagatacttacggagcattgtaatgaagtgtggttctgtaaattctctaatgatggcactaaactagcaacaggatcaaaagatacaacagttatcatatggcaagttgatccggatacacacctgctaaaactgcttaaaacattagaaggacatgcttatggcgtttcttatattgcatggagtccagatgacaactatcttgttgcttgtggcccagatgactgctctgagctttggctttggaatgtacaaacaggagaactaaggacaaaaatgagccagtctcatgaagacagtttgacaagtgtggcttggaatccagatgggaagcgctttgtgactggaggtcagcgtgggcagttctatcagtgtgacttagatggtaatctccttgactcctgggaaggggtaagagtgcaatgcctttggtgcttgagtgatggaaagactgttctggcatcagatacacaccagcgaattcggggctataacttcgaggaccttacagataggaacatagtacaagaagatcatcctattatgtcttttactatttcaaaaaatggccgattagctttgttaaatgtagcaactcagggagttcatttatgggacttgcaagacagagttttagtaagaaagtatcaaggtgttacacaagggttttatacaattcattcatgttttggaggccataatgaagacttcatcgctagtggcagtgaagatcacaaggtttacatctggcacaaacgtagtgaactgccaattgcggagctgacagggcacacacgtacagtaaactgtgtgagctggaacccacagattccatccatgatggccagcgcctcagatgatggcactgttagaatatggggaccagcaccttttatagaccaccagaatattgaagaggaatgcagtagcatggatagttgatggtgaatttggagcagacgacttctgtttaacttaaaattagtcgtattttaatggcttgggatttggtgcaaacaaacatgattgatagctggacagacatgctcgtcatgaaaaaagaaccatttctgaagcccgattggggccaaacatttacaccttgcttcatagtaaccagttgagatgaagcacgtcgttagaacgttgttggacaccatgttgaattattcccccatcggttgtgaagaactgtgctacattcaggcttacccattgaactcagtatatatatttttttccttcctgtcttttgtctggcaggataccattcttgttgctcttctgtgtaatgaagtttaaatgcttgtttggaaaactttatttaacagtttagaaggcttgatagaaagagtgcattagtctgaagagtatacattggataggaaagaatttccttcttttgtttctccaaatctttccgccttatttagcttgagatctttgcagcttggttcatggattctagccttgcccgttgcgcagtatatactgatccagatgataaaccagtgaactatgtcaaaagcactctcaatattacatttgacaaaaagttttgtacttttcacatagcttgttgccccgtaaaagggttaacagcacaattttttaaaaataaattaagaagtatttataggattaaagtgacttcatttgtatacatttggaatctaaaccagcttaaaaacagtttcctcaatgacttagatacacagtataactgatgctcttctggaataccacatgagacatggtcagaaacagtgcttggaaggacattacacaagaaattcagagtaatgctttgaagatttccccccttttgttttattcctgaaggaacatcagtacccgatcttgaagaaattcaagattcaaaaagaattttaaatacaccaacatgagacatcagtagtcagttggttttcagtaaagcttgttccaagttgttctcaacttaggaagtaattttggtgtgatctagcaaaagagtaggaatcagcgatacaaccactttggaagtttatagtataattgaaattattagaagaattcagcaggttacagacatacttaaactgggattaaaacctcatagtcatttttcttaattgcccttaatattttgacatatagggatacataaatttaaagaatattttttctcagttttttcagatattgccatactgaacctcattctaaactggtgctgtggatagtctttccctctcccctcctgttttagtttaaggaaaggtttccttcatggaaaagcacttttaattttgagaatttcacatttaaaataagccaaaagcctgatgttcacattgtgcttttaaactccgtaacagctgaatacaacataacatagtctcccttgaaattccctccctttttcagtagaggataaatagggtgactccagctgttggaatgagaatggggatacccccaaaataagattctggtgaagaaaaagtcttgtactaagttcccctttaggtgtagccaagtctataatataattatgatcatgaatagactccagaatccacaaagagaagagggcttggatgtcaaaaattcttccattgtggggtaggtggtcggggatgggagaaagggaaaagtcagggaaggggagaagaaagaaaaacacatttggccttaaaatagcatgcattctcccagaagcccatagtaaagaaaatgacagatcgtggtcagcagactcttatcaaattggtatgtaaaagatttcttcaagctccattttgcagagaccaccacttagagaatcaaaaaattcctgttttgatacttctaagttaaaatatatgttacagtttatctggtacttcatttttcttaactaaaattactttttactttaagcttgaataaaaatcttcattggtaactgtatgtaattaagtggcaacttctctttacctcagtatagttaaaaaccattcatattttaagtgattcatgtataccctgaagccgttaatacaccccagtctctatggtaacatcactaaatgtgggcatagaaactccacagctgtttacaaatttggttacagtgtgctacggtgcatttgtaacactcagatttgtgcccattcaggggcaatttggcactcagattctactctacttcacctaaccacccctagatctgagttttcagagtgcttctgaagtacagtttaaaaacactttttaaaaagtggagtaaaagtgaggcacattttacaagaacataactcctattaaaacggagtaacaactatgcaaaggtttctatagcagctaggtgagtttgttttccgggtctgtcttaactggcagcttcctgtacatactggtacttatttgctgtaaacgtctgtttcatacatttgccatgcagtgactgtgctcgaaaggtgaaatcaatggtaaagaagcctaggattttatggtatgagaaactgatcgcaggattttctgatccatagctattaattgaaaacttctgatagtgctgtaggctctatagtaggcttaagagtgagtcttatactatgaagccagccacaagatactaacaaatgtataaattgaaaagtaccaatactttttgcacatagatcaaaatagagtggagaatttgggctccaaaaatcaggttagtaggctcatttccatgtgcttaaaaatgtttttgttgttatgcattgattaagggctagagcaaatataaaattaaatgtctttttcctccaaataattggttattaatggtaaaatgttggacttggggattactgagattagtatgtgggtagtaaagaattggagtgggagttagtggggagggatgacaaagcttcagctttggtttttgtatttttttagtcttcataacagctacatttctgttgctcttattggccagataaatgtgttatattaaaccaggtaagtattttaaacagagaacattttatttgcatatatccctacaaattggcccattttattgggtggggggataaaaaagggattccctaactttaaataatcagaatatcctgcaattgaaaggagaaaaaaatccaattttgtcagtattttcttagtctgaaaaaaacagcagtagtaatctggtgaatgttattattaggagtgttctgcctctacagtggcatattccatgacattaatagaaaacccttctttcccacccctccccatcttgacattttcttttttaggatgttggttcctgcaaacaagaactgaccctatcacctctgcctcacagtgggtaaatatatcatacatctcttgaaagggaaaatatccatgtcagtttctttcacagtagaagaatggctgcttttgaatggggaggaaagaagacatttttcttaatatcctttttgtcccatctctaaaatgtataaatattttgatttggttttactttaatttctcattcataatttcgcaactgtccttttgggttgccctccaacacattacttccatttcagaaaccatatctgatttaatataaactgctaacttaagaagaggtgaatttgcatttacacttagacactttctaaaaacagggtgaacttaattgaaatttttcagtgttgttaagctattgttatagtagctgccctatagttacaaaaataaaaactataaaaacccatcccctatctacttaatccagatagcctggatttaacaaaaccaatagtataaaaatgtgtgtgtgtgttctgtgtgtgtgtgagagagagagtacttgattcattaaaaagtcctggaaacagctgttctaggatcttgtcatttttactgaaagtctcgtgcacatgtgaagtgccctctgagtttaaggtttggttaatactggtatatttttataagattgaaattgtgtccccatctttaacttaaacattttcattatcagggtcaatgtgctagaactgaattgtaacatttttaggcacagatggaaaaaaatgttattggctccttgaaaatgtgtgtgtgtggcgaggggaatagatccacaaaagcatgtatgtacttacaaaccaagctgtagagatcaagaaaagaacttaagtgttgatctcaagatttctaaattgtcaagatttacatggcattgtggtggaactagttaacacttagagcttttggtatgtaataactatttgctatggactgattaaatgtttcaaaagattgtgttcttcaattttggtgggttttgatttttgtttttttaactgcctctcagattatatttacttagtttaaatttctttgctttattcattaaagtataaaaacttc

SEQ ID NO: 7364 - protein, 661 aa, Homo sapiens; identical to SEQ ID NO: 7362

SEQ ID NO: 7365 - DNA, 6401 bp, Homo sapiens
gctgctgcccctcccgccgccgctgctgtcccccaccgaagtagcggccacagcctggtcagcggcagcatcatgcaggccaatggggcaggaggaggaggaggaggtggcggcggcggcggtggaggaggagggggcggcgggggccagggacagaccccggaactcgcctgcttgtcggcccagaacggggagtcgtccccctcgtcgtcgtcgtccgcgggggacctggcccacgccaatgggctcctgccttccgccccctccgccgccagcaacaatagcaacagcctgaatgtcaataacggggttcccggcggggcggccgccgcatcctcagccaccgtcgcagctgcctccgccaccaccgccgcctcctcttccttggccaccccagaactgggcagcagcctcaagaagaagaagcggctctcccagtcagatgaggatgtcattaggctaataggacagcacttgaatggcttagggctcaaccagactgttgatctcctcatgcaagagtcaggatgtcgtttagaacatccttctgctaccaaattccgaaatcatgtcatggaaggagactgggataaggcagaaaatgacctgaatgaactaaagcctttagtgcattctcctcatgctattgtggtaagaggcgcacttgaaatctctcaaacgttgttgggaataattgtgaggatgaagtttttgctgctgcagcagaagtacctagaatacctggaggatggcaaggtcctggaggcacttcaagttctacgctgtgaattgacgccgctgaaatacaatacagagcgcattcatgttcttagtgggtatctgatgtgtagccatgcagaagacctacgtgcaaaagcagaatgggaaggcaaagggacagcttcccgatctaaactattggataaacttcagacctatttaccaccatcagtgatgcttcccccacggcgtttacagactctcctgcggcaggcggtggaactacaaagggatcggtgcctatatcacaataccaaacttgataataatctagattctgtgtctctgcttatagaccatgtttgtagtaggaggcagttcccatgttatacgcagcagatacttacggagcattgtaatgaagtgtggttctgtaaattctctaatgatggcactaaactagcaacaggatcaaaagatacaacagttatcatatggcaagttgatccggatacacacctgctaaaactgcttaaaacattagaaggacatgcttatggcgtttcttatattgcatggagtccagatgacaactatcttgttgcttgtggcccagatgactgctctgagctttggctttggaatgtacaaacaggagaactaaggacaaaaatgagccagtctcatgaagacagtttgacaagtgtggcttggaatccagatgggaagcgctttgtgactggaggtcagcgtgggcagttctatcagtgtgacttagatggtaatctccttgactcctgggaaggggtaagagtgcaatgcctttggtgcttgagtgatggaaagactgttctggcatcagatacacaccagcgaattcggggctataacttcgaggaccttacagataggaacatagtacaagaagatcatcctattatgtcttttactatttcaaaaaatggccgattagctttgttaaatgtagcaactcagggagttcatttatgggacttgcaagacagagttttagtaagaaagtatcaaggtgttacacaagggttttatacaattcattcatgttttggaggccataatgaagacttcatcgctagtggcagtgaagatcacaaggtttacatctggcacaaacgtagtgaactgccaattgcggagctgacagggcacacacgtacagtaaactgtgtgagctggaacccacagattccatccatgatggccagcgcctcagatgatggcactgttagaatatggggaccagcaccttttatagaccaccagaatattgaagaggaatgcagtagcatggatagttgatggtgaatttggagcagacgacttctgtttaacttaaaattagtcgtattttaatggcttgggatttggtgcaaacaaacatgattgatagctggacagacatgctcgtcatgaaaaaagaaccatttctgaagcccgattggggccaaacatttacaccttgcttcatagtaaccagttgagatgaagcacgtcgttagaacgttgttggacaccatgttgaattattcccccatcggttgtgaagaactgtgctacattcaggcttacccattgaactcagtatatatatttttttccttcctgtcttttgtctggcaggataccattcttgttgctcttctgtgtaatgaagtttaaatgcttgtttggaaaactttatttaacagtttagaaggcttgatagaaagagtgcattagtctgaagagtatacattggataggaaagaatttccttcttttgtttctccaaatctttccgccttatttagcttgagatctttgcagcttggttcatggattctagccttgcccgttgcgcagtatatactgatccagatgataaaccagtgaactatgtcaaaagcactctcaatattacatttgacaaaaagttttgtacttttcacatagcttgttgccccgtaaaagggttaacagcacaattttttaaaaataaattaagaagtatttataggattaaagtgacttcatttgtatacatttggaatctaaaccagcttaaaaacagtttcctcaatgacttagatacacagtataactgatgctcttctggaataccacatgagacatggtcagaaacagtgcttggaaggacattacacaagaaattcagagtaatgctttgaagatttccccccttttgttttattcctgaaggaacatcagtacccgatcttgaagaaattcaagattcaaaaagaattttaaatacaccaacatgagacatcagtagtcagttggttttcagtaaagcttgttccaagttgttctcaacttaggaagtaattttggtgtgatctagcaaaagagtaggaatcagcgatacaaccactttggaagtttatagtataattgaaattattagaagaattcagcaggttacagacatacttaaactgggattaaaacctcatagtcatttttcttaattgcccttaatattttgacatatagggatacataaatttaaagaatattttttctcagttttttcagatattgccatactgaacctcattctaaactggtgctgtggatagtctttccctctcccctcctgttttagtttaaggaaaggtttccttcatggaaaagcacttttaattttgagaatttcacatttaaaataagccaaaagcctgatgttcacattgtgcttttaaactccgtaacagctgaatacaacataacatagtctcccttgaaattccctccctttttcagtagaggataaatagggtgactccagctgttggaatgagaatggggatacccccaaaataagattctggtgaagaaaaagtcttgtactaagttcccctttaggtgtagccaagtctataatataattatgatcatgaatagactccagaatccacaaagagaagagggcttggatgtcaaaaattcttccattgtggggtaggtggtcggggatgggagaaagggaaaagtcagggaaggggagaagaaagaaaaacacatttggccttaaaatagcatgcattctcccagaagcccatagtaaagaaaatgacagatcgtggtcagcagactcttatcaaattggtatgtaaaagatttcttcaagctccattttgcagagaccaccacttagagaatcaaaaaattcctgttttgatacttctaagttaaaatatatgttacagtttatctggtacttcatttttcttaactaaaattactttttactttaagcttgaataaaaatcttcattggtaactgtatgtaattaagtggcaacttctctttacctcagtatagttaaaaaccattcatattttaagtgattcatgtataccctgaagccgttaatacaccccagtctctatggtaacatcactaaatgtgggcatagaaactccacagctgtttacaaatttggttacagtgtgctacggtgcatttgtaacactcagatttgtgcccattcaggggcaatttggcactcagattctactctacttcacctaaccacccctagatctgagttttcagagtgcttctgaagtacagtttaaaaacactttttaaaaagtggagtaaaagtgaggcacattttacaagaacataactcctattaaaacggagtaacaactatgcaaaggtttctatagcagctaggtgagtttgttttccgggtctgtcttaactggcagcttcctgtacatactggtacttatttgctgtaaacgtctgtttcatacatttgccatgcagtgactgtgctcgaaaggtgaaatcaatggtaaagaagcctaggattttatggtatgagaaactgatcgcaggattttctgatccatagctattaattgaaaacttctgatagtgctgtaggctctatagtaggcttaagagtgagtcttatactatgaagccagccacaagatactaacaaatgtataaattgaaaagtaccaatactttttgcacatagatcaaaatagagtggagaatttgggctccaaaaatcaggttagtaggctcatttccatgtgcttaaaaatgtttttgttgttatgcattgattaagggctagagcaaatataaaattaaatgtctttttcctccaaataattggttattaatggtaaaatgttggacttggggattactgagattagtatgtgggtagtaaagaattggagtgggagttagtggggagggatgacaaagcttcagctttggtttttgtatttttttagtcttcataacagctacatttctgttgctcttattggccagataaatgtgttatattaaaccaggtaagtattttaaacagagaacattttatttgcatatatccctacaaattggcccattttattgggtggggggataaaaaagggattccctaactttaaataatcagaatatcctgcaattgaaaggagaaaaaaatccaattttgtcagtattttcttagtctgaaaaaaacagcagtagtaatctggtgaatgttattattaggagtgttctgcctctacagtggcatattccatgacattaatagaaaacccttctttcccacccctccccatcttgacattttcttttttaggatgttggttcctgcaaacaagaactgaccctatcacctctgcctcacagtgggtaaatatatcatacatctcttgaaagggaaaatatccatgtcagtttctttcacagtagaagaatggctgcttttgaatggggaggaaagaagacatttttcttaatatcctttttgtcccatctctaaaatgtataaatattttgatttggttttactttaatttctcattcataatttcgcaactgtccttttgggttgccctccaacacattacttccatttcagaaaccatatctgatttaatataaactgctaacttaagaagaggtgaatttgcatttacacttagacactttctaaaaacagggtgaacttaattgaaatttttcagtgttgttaagctattgttatagtagctgccctatagttacaaaaataaaaactataaaaacccatcccctatctacttaatccagatagcctggatttaacaaaaccaatagtataaaaatgtgtgtgtgtgttctgtgtgtgtgtgagagagagagtacttgattcattaaaaagtcctggaaacagctgttctaggatcttgtcatttttactgaaagtctcgtgcacatgtgaagtgccctctgagtttaaggtttggttaatactggtatatttttataagattgaaattgtgtccccatctttaacttaaacattttcattatcagggtcaatgtgctagaactgaattgtaacatttttaggcacagatggaaaaaaatgttattggctccttgaaaatgtgtgtgtgtggcgaggggaatagatccacaaaagcatgtatgtacttacaaaccaagctgtagagatcaagaaaagaacttaagtgttgatctcaagatttctaaattgtcaagatttacatggcattgtggtggaactagttaacacttagagcttttggtatgtaataactatttgctatggactgattaaatgtttcaaaagattgtgttcttc

SEQ ID NO: 7366 - protein, 661 aa, Homo sapiens; identical to SEQ ID NO: 7362

SEQ ID NO: 7367 - DNA, 4523 bp, Homo sapiens
gccaccgtcgcagctgcctccgccaccaccgccgcctcctcttccttggccaccccagaactgggcagcagcctcaagaagaagaagcggctctcccagtcagatgaggatgtcattaggctaataggacagcacttgaatggcttagggctcaagcagaaaatgacctgaatgaactaaagcctttagtgcattctcctcatgctattgtggtaagaggcgcacttgaaatctctcaaacgttgttgggaataattgtggcacaaacattttctgaaacttccatcaacttttttcccctgactgctgctttctgtcatgtcagaggatgaagtttttgctgctgcagcagaagtacctagaatacctggaggatggcaaggtcctggaggcacttcaagttctacgctgtgaattgacgccgctgaaatacaatacagagcgcattcatgttcttagtgggtatctgatgtgtagccatgcagaagacctacgtgcaaaagcagaatgggaaggcaaagggacagcttcccgatctaaactattggataaacttcagacctatttaccaccatcagtgatgcttcccccacggcgtttacagactctcctgcggcaggcggtggaactacaaagggatcggtgcctatatcacaataccaaacttgataataatctagattctgtgtctctgcttatagaccatgtttgtagtaggaggcagttcccatgttatacgcagcagatacttacggagcattgtaatgaagtgtggttctgtaaattctctaatgatggcactaaactagcaacaggatcaaaagatacaacagttatcatatggcaagttgatccggatacacacctgctaaaactgcttaaaacattagaaggacatgcttatggcgtttcttatattgcatggagtccagatgacaactatcttgttgcttgtggcccagatgactgctctgagctttggctttggaatgtacaaacaggagaactaaggacaaaaatgagccagtctcatgaagacagtttgacaagtgtggcttggaatccagatgggaagcgctttgtgactggaggtcagcgtgggcagttctatcagtgtgacttagatggtaatctccttgactcctgggaaggggtaagagtgcaatgcctttggtgcttgagtgatggaaagactgttctggcatcagatacacaccagcgaattcggggctataacttcgaggaccttacagataggaacatagtacaagaagatcatcctattatgtcttttactatttcaaaaaatggccgattagctttgttaaatgtagcaactcagggagttcatttatgggacttgcaagacagagttttagtaagaaagtatcaaggtgttacacaagggttttatacaattcattcatgttttggaggccataatgaagacttcatcgctagtggcagtgaagatcacaaggtttacatctggcacaaacgtagtgaactgccaattgcggagctgacagggcacacacgtacagtaaactgtgtgagctggaacccacagattccatccatgatggccagcgcctcagatgatggcactgttagaatatggggaccagcaccttttatagaccaccagaatattgaagaggaatgcagtagcatggatagttgatggtgaatttggagcagacgacttctgtttaacttaaaattagtcgtattttaatggcttgggatttggtgcaaacaaacatgattgatagctggacagacatgctcgtcatgaaaaaagaaccatttctgaagcccgattggggccaaacatttacaccttgcttcatagtaaccagttgagatgaagcacgtcgttagaacgttgttggacaccatgttgaattattcccccatcggttgtgaagaactgtgctacattcaggcttacccattgaactcagtatatatatttttttccttcctgtcttttgtctggcaggataccattcttgttgctcttctgtgtaatgaagtttaaatgcttgtttggaaaactttatttaacagtttagaaggcttgatagaaagagtgcattagtctgaagagtatacattggataggaaagaatttccttcttttgtttctccaaatctttccgccttatttagcttgagatctttgcagcttggttcatggattctagccttgcccgttgcgcagtatatactgatccagatgataaaccagtgaactatgtcaaaagcactctcaatattacatttgacaaaaagttttgtacttttcacatagcttgttgccccgtaaaagggttaacagcacaattttttaaaaataaattaagaagtatttataggattaaagtgacttcatttgtatacatttggaatctaaaccagcttaaaaacagtttcctcaatgacttagatacacagtataactgatgctcttctggaataccacatgagacatggtcagaaacagtgcttggaaggacattacacaagaaattcagagtaatgctttgaagatttccccccttttgttttattcctgaaggaacatcagtacccgatcttgaagaaattcaagattcaaaaagaattttaaatacaccaacatgagacatcagtagtcagttggttttcagtaaagcttgttccaagttgttctcaacttaggaagtaattttggtgtgatctagcaaaagagtaggaatcagcgatacaaccactttggaagtttatagtataattgaaattattagaagaattcagcaggttacagacatacttaaactgggattaaaacctcatagtcatttttcttaattgcccttaatattttgacatatagggatacataaatttaaagaatattttttctcagttttttcagatattgccatactgaacctcattctaaactggtgctgtggatagtctttccctctcccctcctgttttagtttaaggaaaggtttccttcatggaaaagcacttttaattttgagaatttcacatttaaaataagccaaaagcctgatgttcacattgtgcttttaaactccgtaacagctgaatacaacataacatagtctcccttgaaattccctccctttttcagtagaggataaatagggtgactccagctgttggaatgagaatggggatacccccaaaataagattctggtgaagaaaaagtcttgtactaagttcccctttaggtgtagccaagtctataatataattatgatcatgaatagactccagaatccacaaagagaagagggcttggatgtcaaaaattcttccattgtggggtaggtggtcggggatgggagaaagggaaaagtcagggaaggggagaagaaagaaaaacacatttggccttaaaatagcatgcattctcccagaagcccatagtaaagaaaatgacagatcgtggtcagcagactcttatcaaattggtatgtaaaagatttcttcaagctccattttgcagagaccaccacttagagaatcaaaaaattcctgttttgatacttctaagttaaaatatatgttacagtttatctggtacttcatttttcttaactaaaattactttttactttaagcttgaataaaaatcttcattggtaactgtatgtaattaagtggcaacttctctttacctcagtatagttaaaaaccattcatattttaagtgattcatgtataccctgaagccgttaatacaccccagtctctatggtaacatcactaaatgtgggcatagaaactccacagctgtttacaaatttggttacagtgtgctacggtgcatttgtaacactcagatttgtgcccattcaggggcaatttggcactcagattctactctacttcacctaaccacccctagatctgagttttcagagtgcttctgaagtacagtttaaaaacactttttaaaaagtggagtaaaagtgaggcacattttacaagaacataactcctattaaaacggagtaacaactatgcaaaggtttctatagcagctaggtgagtttgttttccgggtctgtcttaactggcagcttcctgtacatactggtacttatttgctgtaaacgtctgtttcatacatttgccatgcagtgactgtgctcgaaaggtgaaatcaatggtaaagaagcctaggattttatggtatgagaaactgatcgcaggattttctgatccatagctattaattgaaaacttctgatagtgctgtaggctctatagtaggcttaagagtgagtcttatactatgaagccagccacaagatactaacaaatgtataaattgaaaagtaccaatactttttgcacatagatcaaaatagagtggagaatttgggctccaaaaatcaggttagtaggctcatttccatgtgcttaaaaatgtttttgttgttatgcattgattaagggctagagcaaatataaaattaaatgtctttttcctcc

SEQ ID NO: 7368 - protein, 451 aa, Homo sapiens
MKFLLLQQKYLEYLEDGKVLEALQVLRCELTPLKYNTERIHVLSGYLMCSHAEDLRAKAEWEGKGTASRSKLLDKLQTYLPPSVMLPPRRLQTLLRQAVELQRDRCLYHNTKLDNNLDSVSLLIDHVCSRRQFPCYTQQILTEHCNEVWFCKFSNDGTKLATGSKDTTVIIWQVDPDTHLLKLLKTLEGHAYGVSYIAWSPDDNYLVACGPDDCSELWLWNVQTGELRTKMSQSHEDSLTSVAWNPDGKRFVTGGQRGQFYQCDLDGNLLDSWEGVRVQCLWCLSDGKTVLASDTHQRIRGYNFEDLTDRNIVQEDHPIMSFTISKNGRLALLNVATQGVHLWDLQDRVLVRKYQGVTQGFYTIHSCFGGHNEDFIASGSEDHKVYIWHKRSELPIAELTGHTRTVNCVSWNPQIPSMMASASDDGTVRIWGPAPFIDHQNIEEECSSMDS

SEQ ID NO: 7369 - DNA, 4897 bp, Homo sapiens
gctgctgcccctcccgccgccgctgctgtcccccaccgaagtagcggccacagcctggtcagcggcagcatcatgcaggccaatggggcaggaggaggaggaggaggtggcggcggcggcggtggaggaggagggggcggcgggggccagggacagaccccggaactcgcctgcttgtcggcccagaacggggagtcgtccccctcgtcgtcgtcgtccgcgggggacctggcccacgccaatgggctcctgccttccgccccctccgccgccagcaacaatagcaacagcctgaatgtcaataacggggttcccggcggggcggccgccgcatcctcagccaccgtcgcagctgcctccgccaccaccgccgcctcctcttccttggccaccccagaactgggcagcagcctcaagaagaagaagcggctctcccagtcagatgaggatgtcattaggctaataggacagcacttgaatggcttagggctcaaccagactgttgatctcctcatgcaagagtcaggatgtcgtttagaacatccttctgctaccaaattccgaaatcatgtcatggaaggagactgggataaggcagaaaatgacctgaatgaactaaagcctttagtgcattctcctcatgctattgtggtaagaggcgcacttgaaatctctcaaacgttgttgggaataattgtgaggatgaagtttttgctgctgcagcagaagtacctagaatacctggaggatggcaaggtcctggaggcacttcaagttctacgctgtgaattgacgccgctgaaatacaatacagagcgcattcatgttcttagtgggtatctgatgtgtagccatgcagaagacctacgtgcaaaagcagaatgggaaggcaaagggacagcttcccgatctaaactattggataaacttcagacctatttaccaccatcagtgatgcttcccccacggcgtttacagactctcctgcggcaggcggtggaactacaaagggatcggtgcctatatcacaataccaaacttgataataatctagattctgtgtctctgcttatagaccatgtttgtagtaggaggcagttcccatgttatacgcagcagatacttacggagcattgtaatgaagtgtggttctgtaaattctctaatgatggcactaaactagcaacaggatcaaaagatacaacagttatcatatggcaagttgatccggatacacacctgctaaaactgcttaaaacattagaaggacatgcttatggcgtttcttatattgcatggagtccagatgacaactatcttgttgcttgtggcccagatgactgctctgagctttggctttggaatgtacaaacaggagaactaaggacaaaaatgagccagtctcatgaagacagtttgacaagtgtggcttggaatccagatgggaagcgctttgtgactggaggtcagcgtgggcagttctatcagtgtgacttagatggtaatctccttgactcctgggaaggggtaagagtgcaatgcctttggtgcttgagtgatggaaagactgttctggcatcagatacacaccagcgaattcggggctataacttcgaggaccttacagataggaacatagtacaagaagatcatcctattatgtcttttactatttcaaaaaatggccgattagctttgttaaatgtagcaactcagggagttcatttatgggacttgcaagacagagttttagtaagaaagtatcaaggtgttacacaagggttttatacaattcattcatgttttggaggccataatgaagacttcatcgctagtggcagtgaagatcacaaggtttacatctggcacaaacgtagtgaactgccaattgcggagctgacagggcacacacgtacagtaaactgtgtgagctggaacccacagattccatccatgatggccagcgcctcagatgatggcactgttagaatatggggaccagcaccttttatagaccaccagaatattgaagaggaatgcagtagcatggatagttgatggtgaatttggagcagacgacttctgtttaacttaaaattagtcgtattttaatggcttgggatttggtgcaaacaaacatgattgatagctggacagacatgctcgtcatgaaaaaagaaccatttctgaagcccgattggggccaaacatttacaccttgcttcatagtaaccagttgagatgaagcacgtcgttagaacgttgttggacaccatgttgaattattcccccatcggttgtgaagaactgtgctacattcaggcttacccattgaactcagtatatatatttttttccttcctgtcttttgtctggcaggataccattcttgttgctcttctgtgtaatgaagtttaaatgcttgtttggaaaactttatttaacagtttagaaggcttgatagaaagagtgcattagtctgaagagtatacattggataggaaagaatttccttcttttgtttctccaaatctttccgccttatttagcttgagatctttgcagcttggttcatggattctagccttgcccgttgcgcagtatatactgatccagatgataaaccagtgaactatgtcaaaagcactctcaatattacatttgacaaaaagttttgtacttttcacatagcttgttgccccgtaaaagggttaacagcacaattttttaaaaataaattaagaagtatttataggattaaagtgacttcatttgtatacatttggaatctaaaccagcttaaaaacagtttcctcaatgacttagatacacagtataactgatgctcttctggaataccacatgagacatggtcagaaacagtgcttggaaggacattacacaagaaattcagagtaatgctttgaagatttccccccttttgttttattcctgaaggaacatcagtacccgatcttgaagaaattcaagattcaaaaagaattttaaatacaccaacatgagacatcagtagtcagttggttttcagtaaagcttgttccaagttgttctcaacttaggaagtaattttggtgtgatctagcaaaagagtaggaatcagcgatacaaccactttggaagtttatagtataattgaaattattagaagaattcagcaggttacagacatacttaaactgggattaaaacctcatagtcatttttcttaattgcccttaatattttgacatatagggatacataaatttaaagaatattttttctcagttttttcagatattgccatactgaacctcattctaaactggtgctgtggatagtctttccctctcccctcctgttttagtttaaggaaaggtttccttcatggaaaagcacttttaattttgagaatttcacatttaaaataagccaaaagcctgatgttcacattgtgcttttaaactccgtaacagctgaatacaacataacatagtctcccttgaaattccctccctttttcagtagaggataaatagggtgactccagctgttggaatgagaatggggatacccccaaaataagattctggtgaagaaaaagtcttgtactaagttcccctttaggtgtagccaagtctataatataattatgatcatgaatagactccagaatccacaaagagaagagggcttggatgtcaaaaattcttccattgtggggtaggtggtcggggatgggagaaagggaaaagtcagggaaggggagaagaaagaaaaacacatttggccttaaaatagcatgcattctcccagaagcccatagtaaagaaaatgacagatcgtggtcagcagactcttatcaaattggtatgtaaaagatttcttcaagctccattttgcagagaccaccacttagagaatcaaaaaattcctgttttgatacttctaagttaaaatatatgttacagtttatctggtacttcatttttcttaactaaaattactttttactttaagcttgaataaaaatcttcattggtaactgtatgtaattaagtggcaacttctctttacctcagtatagttaaaaaccattcatattttaagtgattcatgtataccctgaagccgttaatacaccccagtctctatggtaacatcactaaatgtgggcatagaaactccacagctgtttacaaatttggttacagtgtgctacggtgcatttgtaacactcagatttgtgcccattcaggggcaatttggcactcagattctactctacttcacctaaccacccctagatctgagttttcagagtgcttctgaagtacagtttaaaaacactttttaaaaagtggagtaaaagtgaggcacattttacaagaacataactcctattaaaacggagtaacaactatgcaaaggtttctatagcagctaggtgagtttgttttccgggtctgtcttaactggcagcttcctgtacatactggtacttatttgctgtaaacgtctgtttcatacatttgccatgcagtgactgtgctcgaaaggtgaaatcaatggtaaagaagcctaggattttatggtatgagaaactgatcgcaggattttctgatccatagctattaattgaaaacttctgatagtgctgtaggctctatagtaggcttaagagtgagtcttatactatgaagccagccacaagatactaacaaatgtataaattgaaaagtaccaatactttttgcacatagatcaaaatagagtggagaatttgggctccaaaaatcaggttagtaggctcatttccatgtgcttaaaaatgtttttgttgttatgcattgattaagggctagagcaaatataaaattaaatgtctttttcctcc

SEQ ID NO: 7370 - protein, 661 aa, Homo sapiens; identical to SEQ ID NO: 7362

SEQ ID NO: 7371 - DNA, 4849 bp, Homo sapiens
gctgctgcccctcccgccgccgctgctgtcccccaccgaagtagcggccacagcctggtcagcggcagcatcatgcaggccaatggggcaggaggaggaggaggaggtggcggcggcggcggtggaggaggagggggcggcgggggccagggacagaccccggaactcgcctgcttgtcggcccagaacggggagtcgtccccctcgtcgtcgtcgtccgcgggggacctggcccacgccaatgggctcctgccttccgccccctccgccgccagcaacaatagcaacagcctgaatgtcaataacggggttcccggcggggcggccgccgcatcctcagccaccgtcgcagctgcctccgccaccaccgccgcctcctcttccttggccaccccagaactgggcagcagcctcaagaagaagaagcggctctcccagtcagatgaggatgtcattaggctaataggacagcacttgaatggcttagggctcaaccagactgttgatctcctcatgcaagagtcaggatgtcgtttagaacatccttctgctaccaaattccgaaatcatgtcatggaaggagactgggataaggcagaaaatgacctgaatgaactaaagcctttagtgcattctcctcatgctattgtgaggatgaagtttttgctgctgcagcagaagtacctagaatacctggaggatggcaaggtcctggaggcacttcaagttctacgctgtgaattgacgccgctgaaatacaatacagagcgcattcatgttcttagtgggtatctgatgtgtagccatgcagaagacctacgtgcaaaagcagaatgggaaggcaaagggacagcttcccgatctaaactattggataaacttcagacctatttaccaccatcagtgatgcttcccccacggcgtttacagactctcctgcggcaggcggtggaactacaaagggatcggtgcctatatcacaataccaaacttgataataatctagattctgtgtctctgcttatagaccatgtttgtagtaggaggcagttcccatgttatacgcagcagatacttacggagcattgtaatgaagtgtggttctgtaaattctctaatgatggcactaaactagcaacaggatcaaaagatacaacagttatcatatggcaagttgatccggatacacacctgctaaaactgcttaaaacattagaaggacatgcttatggcgtttcttatattgcatggagtccagatgacaactatcttgttgcttgtggcccagatgactgctctgagctttggctttggaatgtacaaacaggagaactaaggacaaaaatgagccagtctcatgaagacagtttgacaagtgtggcttggaatccagatgggaagcgctttgtgactggaggtcagcgtgggcagttctatcagtgtgacttagatggtaatctccttgactcctgggaaggggtaagagtgcaatgcctttggtgcttgagtgatggaaagactgttctggcatcagatacacaccagcgaattcggggctataacttcgaggaccttacagataggaacatagtacaagaagatcatcctattatgtcttttactatttcaaaaaatggccgattagctttgttaaatgtagcaactcagggagttcatttatgggacttgcaagacagagttttagtaagaaagtatcaaggtgttacacaagggttttatacaattcattcatgttttggaggccataatgaagacttcatcgctagtggcagtgaagatcacaaggtttacatctggcacaaacgtagtgaactgccaattgcggagctgacagggcacacacgtacagtaaactgtgtgagctggaacccacagattccatccatgatggccagcgcctcagatgatggcactgttagaatatggggaccagcaccttttatagaccaccagaatattgaagaggaatgcagtagcatggatagttgatggtgaatttggagcagacgacttctgtttaacttaaaattagtcgtattttaatggcttgggatttggtgcaaacaaacatgattgatagctggacagacatgctcgtcatgaaaaaagaaccatttctgaagcccgattggggccaaacatttacaccttgcttcatagtaaccagttgagatgaagcacgtcgttagaacgttgttggacaccatgttgaattattcccccatcggttgtgaagaactgtgctacattcaggcttacccattgaactcagtatatatatttttttccttcctgtcttttgtctggcaggataccattcttgttgctcttctgtgtaatgaagtttaaatgcttgtttggaaaactttatttaacagtttagaaggcttgatagaaagagtgcattagtctgaagagtatacattggataggaaagaatttccttcttttgtttctccaaatctttccgccttatttagcttgagatctttgcagcttggttcatggattctagccttgcccgttgcgcagtatatactgatccagatgataaaccagtgaactatgtcaaaagcactctcaatattacatttgacaaaaagttttgtacttttcacatagcttgttgccccgtaaaagggttaacagcacaattttttaaaaataaattaagaagtatttataggattaaagtgacttcatttgtatacatttggaatctaaaccagcttaaaaacagtttcctcaatgacttagatacacagtataactgatgctcttctggaataccacatgagacatggtcagaaacagtgcttggaaggacattacacaagaaattcagagtaatgctttgaagatttccccccttttgttttattcctgaaggaacatcagtacccgatcttgaagaaattcaagattcaaaaagaattttaaatacaccaacatgagacatcagtagtcagttggttttcagtaaagcttgttccaagttgttctcaacttaggaagtaattttggtgtgatctagcaaaagagtaggaatcagcgatacaaccactttggaagtttatagtataattgaaattattagaagaattcagcaggttacagacatacttaaactgggattaaaacctcatagtcatttttcttaattgcccttaatattttgacatatagggatacataaatttaaagaatattttttctcagttttttcagatattgccatactgaacctcattctaaactggtgctgtggatagtctttccctctcccctcctgttttagtttaaggaaaggtttccttcatggaaaagcacttttaattttgagaatttcacatttaaaataagccaaaagcctgatgttcacattgtgcttttaaactccgtaacagctgaatacaacataacatagtctcccttgaaattccctccctttttcagtagaggataaatagggtgactccagctgttggaatgagaatggggatacccccaaaataagattctggtgaagaaaaagtcttgtactaagttcccctttaggtgtagccaagtctataatataattatgatcatgaatagactccagaatccacaaagagaagagggcttggatgtcaaaaattcttccattgtggggtaggtggtcggggatgggagaaagggaaaagtcagggaaggggagaagaaagaaaaacacatttggccttaaaatagcatgcattctcccagaagcccatagtaaagaaaatgacagatcgtggtcagcagactcttatcaaattggtatgtaaaagatttcttcaagctccattttgcagagaccaccacttagagaatcaaaaaattcctgttttgatacttctaagttaaaatatatgttacagtttatctggtacttcatttttcttaactaaaattactttttactttaagcttgaataaaaatcttcattggtaactgtatgtaattaagtggcaacttctctttacctcagtatagttaaaaaccattcatattttaagtgattcatgtataccctgaagccgttaatacaccccagtctctatggtaacatcactaaatgtgggcatagaaactccacagctgtttacaaatttggttacagtgtgctacggtgcatttgtaacactcagatttgtgcccattcaggggcaatttggcactcagattctactctacttcacctaaccacccctagatctgagttttcagagtgcttctgaagtacagtttaaaaacactttttaaaaagtggagtaaaagtgaggcacattttacaagaacataactcctattaaaacggagtaacaactatgcaaaggtttctatagcagctaggtgagtttgttttccgggtctgtcttaactggcagcttcctgtacatactggtacttatttgctgtaaacgtctgtttcatacatttgccatgcagtgactgtgctcgaaaggtgaaatcaatggtaaagaagcctaggattttatggtatgagaaactgatcgcaggattttctgatccatagctattaattgaaaacttctgatagtgctgtaggctctatagtaggcttaagagtgagtcttatactatgaagccagccacaagatactaacaaatgtataaattgaaaagtaccaatactttttgcacatagatcaaaatagagtggagaatttgggctccaaaaatcaggttagtaggctcatttccatgtgcttaaaaatgtttttgttgttatgcattgattaagggctagagcaaatataaaattaaatgtctttttcctcc

SEQ ID NO: 7372 - protein, 645 aa, Homo sapiens
MQANGAGGGGGGGGGGGGGGGGGGGQGQTPELACLSAQNGESSPSSSSSAGDLAHANGLLPSAPSAASNNSNSLNVNNGVPGGAAAASSATVAAASATTAASSSLATPELGSSLKKKKRLSQSDEDVIRLIGQHLNGLGLNQTVDLLMQESGCRLEHPSATKFRNHVMEGDWDKAENDLNELKPLVHSPHAIVRMKFLLLQQKYLEYLEDGKVLEALQVLRCELTPLKYNTERIHVLSGYLMCSHAEDLRAKAEWEGKGTASRSKLLDKLQTYLPPSVMLPPRRLQTLLRQAVELQRDRCLYHNTKLDNNLDSVSLLIDHVCSRRQFPCYTQQILTEHCNEVWFCKFSNDGTKLATGSKDTTVIIWQVDPDTHLLKLLKTLEGHAYGVSYIAWSPDDNYLVACGPDDCSELWLWNVQTGELRTKMSQSHEDSLTSVAWNPDGKRFVTGGQRGQFYQCDLDGNLLDSWEGVRVQCLWCLSDGKTVLASDTHQRIRGYNFEDLTDRNIVQEDHPIMSFTISKNGRLALLNVATQGVHLWDLQDRVLVRKYQGVTQGFYTIHSCFGGHNEDFIASGSEDHKVYIWHKRSELPIAELTGHTRTVNCVSWNPQIPSMMASASDDGTVRIWGPAPFIDHQNIEEECSSMDS

SEQ ID NO: 7373 - DNA, 4962 bp, Homo sapiens
gctgctgcccctcccgccgccgctgctgtcccccaccgaagtagcggccacagcctggtcagcggcagcatcatgcaggccaatggggcaggaggaggaggaggaggtggcggcggcggcggtggaggaggagggggcggcgggggccagggacagaccccggaactcgcctgcttgtcggcccagaacggggagtcgtccccctcgtcgtcgtcgtccgcgggggacctggcccacgccaatgggctcctgccttccgccccctccgccgccagcaacaatagcaacagcctgaatgtcaataacggggttcccggcggggcggccgccgcatcctcagccaccgtcgcagctgcctccgccaccaccgccgcctcctcttccttggccaccccagaactgggcagcagcctcaagaagaagaagcggctctcccagtcagatgaggatgtcattaggctaataggacagcacttgaatggcttagggctcaaccagactgttgatctcctcatgcaagagtcaggatgtcgtttagaacatccttctgctaccaaattccgaaatcatgtcatggaaggagactgggataaggcagaaaatgacctgaatgaactaaagcctttagtgcattctcctcatgctattgtggtaagaggcgcacttgaaatctctcaaacgttgttgggaataattgtggcacaaacattttctgaaacttccatcaacttttttcccctgactgctgctttctgtcatgtcagaggatgaagtttttgctgctgcagcagaagtacctagaatacctggaggatggcaaggtcctggaggcacttcaagttctacgctgtgaattgacgccgctgaaatacaatacagagcgcattcatgttcttagtgggtatctgatgtgtagccatgcagaagacctacgtgcaaaagcagaatgggaaggcaaagggacagcttcccgatctaaactattggataaacttcagacctatttaccaccatcagtgatgcttcccccacggcgtttacagactctcctgcggcaggcggtggaactacaaagggatcggtgcctatatcacaataccaaacttgataataatctagattctgtgtctctgcttatagaccatgtttgtagtaggaggcagttcccatgttatacgcagcagatacttacggagcattgtaatgaagtgtggttctgtaaattctctaatgatggcactaaactagcaacaggatcaaaagatacaacagttatcatatggcaagttgatccggatacacacctgctaaaactgcttaaaacattagaaggacatgcttatggcgtttcttatattgcatggagtccagatgacaactatcttgttgcttgtggcccagatgactgctctgagctttggctttggaatgtacaaacaggagaactaaggacaaaaatgagccagtctcatgaagacagtttgacaagtgtggcttggaatccagatgggaagcgctttgtgactggaggtcagcgtgggcagttctatcagtgtgacttagatggtaatctccttgactcctgggaaggggtaagagtgcaatgcctttggtgcttgagtgatggaaagactgttctggcatcagatacacaccagcgaattcggggctataacttcgaggaccttacagataggaacatagtacaagaagatcatcctattatgtcttttactatttcaaaaaatggccgattagctttgttaaatgtagcaactcagggagttcatttatgggacttgcaagacagagttttagtaagaaagtatcaaggtgttacacaagggttttatacaattcattcatgttttggaggccataatgaagacttcatcgctagtggcagtgaagatcacaaggtttacatctggcacaaacgtagtgaactgccaattgcggagctgacagggcacacacgtacagtaaactgtgtgagctggaacccacagattccatccatgatggccagcgcctcagatgatggcactgttagaatatggggaccagcaccttttatagaccaccagaatattgaagaggaatgcagtagcatggatagttgatggtgaatttggagcagacgacttctgtttaacttaaaattagtcgtattttaatggcttgggatttggtgcaaacaaacatgattgatagctggacagacatgctcgtcatgaaaaaagaaccatttctgaagcccgattggggccaaacatttacaccttgcttcatagtaaccagttgagatgaagcacgtcgttagaacgttgttggacaccatgttgaattattcccccatcggttgtgaagaactgtgctacattcaggcttacccattgaactcagtatatatatttttttccttcctgtcttttgtctggcaggataccattcttgttgctcttctgtgtaatgaagtttaaatgcttgtttggaaaactttatttaacagtttagaaggcttgatagaaagagtgcattagtctgaagagtatacattggataggaaagaatttccttcttttgtttctccaaatctttccgccttatttagcttgagatctttgcagcttggttcatggattctagccttgcccgttgcgcagtatatactgatccagatgataaaccagtgaactatgtcaaaagcactctcaatattacatttgacaaaaagttttgtacttttcacatagcttgttgccccgtaaaagggttaacagcacaattttttaaaaataaattaagaagtatttataggattaaagtgacttcatttgtatacatttggaatctaaaccagcttaaaaacagtttcctcaatgacttagatacacagtataactgatgctcttctggaataccacatgagacatggtcagaaacagtgcttggaaggacattacacaagaaattcagagtaatgctttgaagatttccccccttttgttttattcctgaaggaacatcagtacccgatcttgaagaaattcaagattcaaaaagaattttaaatacaccaacatgagacatcagtagtcagttggttttcagtaaagcttgttccaagttgttctcaacttaggaagtaattttggtgtgatctagcaaaagagtaggaatcagcgatacaaccactttggaagtttatagtataattgaaattattagaagaattcagcaggttacagacatacttaaactgggattaaaacctcatagtcatttttcttaattgcccttaatattttgacatatagggatacataaatttaaagaatattttttctcagttttttcagatattgccatactgaacctcattctaaactggtgctgtggatagtctttccctctcccctcctgttttagtttaaggaaaggtttccttcatggaaaagcacttttaattttgagaatttcacatttaaaataagccaaaagcctgatgttcacattgtgcttttaaactccgtaacagctgaatacaacataacatagtctcccttgaaattccctccctttttcagtagaggataaatagggtgactccagctgttggaatgagaatggggatacccccaaaataagattctggtgaagaaaaagtcttgtactaagttcccctttaggtgtagccaagtctataatataattatgatcatgaatagactccagaatccacaaagagaagagggcttggatgtcaaaaattcttccattgtggggtaggtggtcggggatgggagaaagggaaaagtcagggaaggggagaagaaagaaaaacacatttggccttaaaatagcatgcattctcccagaagcccatagtaaagaaaatgacagatcgtggtcagcagactcttatcaaattggtatgtaaaagatttcttcaagctccattttgcagagaccaccacttagagaatcaaaaaattcctgttttgatacttctaagttaaaatatatgttacagtttatctggtacttcatttttcttaactaaaattactttttactttaagcttgaataaaaatcttcattggtaactgtatgtaattaagtggcaacttctctttacctcagtatagttaaaaaccattcatattttaagtgattcatgtataccctgaagccgttaatacaccccagtctctatggtaacatcactaaatgtgggcatagaaactccacagctgtttacaaatttggttacagtgtgctacggtgcatttgtaacactcagatttgtgcccattcaggggcaatttggcactcagattctactctacttcacctaaccacccctagatctgagttttcagagtgcttctgaagtacagtttaaaaacactttttaaaaagtggagtaaaagtgaggcacattttacaagaacataactcctattaaaacggagtaacaactatgcaaaggtttctatagcagctaggtgagtttgttttccgggtctgtcttaactggcagcttcctgtacatactggtacttatttgctgtaaacgtctgtttcatacatttgccatgcagtgactgtgctcgaaaggtgaaatcaatggtaaagaagcctaggattttatggtatgagaaactgatcgcaggattttctgatccatagctattaattgaaaacttctgatagtgctgtaggctctatagtaggcttaagagtgagtcttatactatgaagccagccacaagatactaacaaatgtataaattgaaaagtaccaatactttttgcacatagatcaaaatagagtggagaatttgggctccaaaaatcaggttagtaggctcatttccatgtgcttaaaaatgtttttgttgttatgcattgattaagggctagagcaaatataaaattaaatgtctttttcctcc

SEQ ID NO: 7374 - protein, 451 aa, Homo sapiens; identical to SEQ ID NO: 7368

SEQ ID NO: 7375 - DNA, 4791 bp, Homo sapiens
gagtggaagtcaggaaaggctcccctgaggaggtttgaaatgagctgagtcttgaaagactgactggcatcagacaggtgaagaaaagacgggagagtgtagtcaaagactctcaaggagaaatgagccagtacatttggcggacagtagacaggtccctgaagaggagcaataagagatgaagccaaaaagaaagactgaaagcaacctgtggaaaactacttcagagaaagactttaaatttctgagaaaatctttatacatattgagtatagatgctatcaaccacatacatgaaaataattgtttggggataatgcacaccatttgccaatgattaagattcagcccagtctttgttgctgcatttctacattcacataaattgccagactgttgatctcctcatgcaagagtcaggatgtcgtttagaacatccttctgctaccaaattccgaaatcatgtcatggaaggagactgggataaggcagaaaatgacctgaatgaactaaagcctttagtgcattctcctcatgctattgtggtaagaggcgcacttgaaatctctcaaacgttgttgggaataattgtgaggatgaagtttttgctgctgcagcagaagtacctagaatacctggaggatggcaaggtcctggaggcacttcaagttctacgctgtgaattgacgccgctgaaatacaatacagagcgcattcatgttcttagtgggtatctgatgtgtagccatgcagaagacctacgtgcaaaagcagaatgggaaggcaaagggacagcttcccgatctaaactattggataaacttcagacctatttaccaccatcagtgatgcttcccccacggcgtttacagactctcctgcggcaggcggtggaactacaaagggatcggtgcctatatcacaataccaaacttgataataatctagattctgtgtctctgcttatagaccatgtttgtagtaggaggcagttcccatgttatacgcagcagatacttacggagcattgtaatgaagtgtggttctgtaaattctctaatgatggcactaaactagcaacaggatcaaaagatacaacagttatcatatggcaagttgatccggatacacacctgctaaaactgcttaaaacattagaaggacatgcttatggcgtttcttatattgcatggagtccagatgacaactatcttgttgcttgtggcccagatgactgctctgagctttggctttggaatgtacaaacaggagaactaaggacaaaaatgagccagtctcatgaagacagtttgacaagtgtggcttggaatccagatgggaagcgctttgtgactggaggtcagcgtgggcagttctatcagtgtgacttagatggtaatctccttgactcctgggaaggggtaagagtgcaatgcctttggtgcttgagtgatggaaagactgttctggcatcagatacacaccagcgaattcggggctataacttcgaggaccttacagataggaacatagtacaagaagatcatcctattatgtcttttactatttcaaaaaatggccgattagctttgttaaatgtagcaactcagggagttcatttatgggacttgcaagacagagttttagtaagaaagtatcaaggtgttacacaagggttttatacaattcattcatgttttggaggccataatgaagacttcatcgctagtggcagtgaagatcacaaggtttacatctggcacaaacgtagtgaactgccaattgcggagctgacagggcacacacgtacagtaaactgtgtgagctggaacccacagattccatccatgatggccagcgcctcagatgatggcactgttagaatatggggaccagcaccttttatagaccaccagaatattgaagaggaatgcagtagcatggatagttgatggtgaatttggagcagacgacttctgtttaacttaaaattagtcgtattttaatggcttgggatttggtgcaaacaaacatgattgatagctggacagacatgctcgtcatgaaaaaagaaccatttctgaagcccgattggggccaaacatttacaccttgcttcatagtaaccagttgagatgaagcacgtcgttagaacgttgttggacaccatgttgaattattcccccatcggttgtgaagaactgtgctacattcaggcttacccattgaactcagtatatatatttttttccttcctgtcttttgtctggcaggataccattcttgttgctcttctgtgtaatgaagtttaaatgcttgtttggaaaactttatttaacagtttagaaggcttgatagaaagagtgcattagtctgaagagtatacattggataggaaagaatttccttcttttgtttctccaaatctttccgccttatttagcttgagatctttgcagcttggttcatggattctagccttgcccgttgcgcagtatatactgatccagatgataaaccagtgaactatgtcaaaagcactctcaatattacatttgacaaaaagttttgtacttttcacatagcttgttgccccgtaaaagggttaacagcacaattttttaaaaataaattaagaagtatttataggattaaagtgacttcatttgtatacatttggaatctaaaccagcttaaaaacagtttcctcaatgacttagatacacagtataactgatgctcttctggaataccacatgagacatggtcagaaacagtgcttggaaggacattacacaagaaattcagagtaatgctttgaagatttccccccttttgttttattcctgaaggaacatcagtacccgatcttgaagaaattcaagattcaaaaagaattttaaatacaccaacatgagacatcagtagtcagttggttttcagtaaagcttgttccaagttgttctcaacttaggaagtaattttggtgtgatctagcaaaagagtaggaatcagcgatacaaccactttggaagtttatagtataattgaaattattagaagaattcagcaggttacagacatacttaaactgggattaaaacctcatagtcatttttcttaattgcccttaatattttgacatatagggatacataaatttaaagaatattttttctcagttttttcagatattgccatactgaacctcattctaaactggtgctgtggatagtctttccctctcccctcctgttttagtttaaggaaaggtttccttcatggaaaagcacttttaattttgagaatttcacatttaaaataagccaaaagcctgatgttcacattgtgcttttaaactccgtaacagctgaatacaacataacatagtctcccttgaaattccctccctttttcagtagaggataaatagggtgactccagctgttggaatgagaatggggatacccccaaaataagattctggtgaagaaaaagtcttgtactaagttcccctttaggtgtagccaagtctataatataattatgatcatgaatagactccagaatccacaaagagaagagggcttggatgtcaaaaattcttccattgtggggtaggtggtcggggatgggagaaagggaaaagtcagggaaggggagaagaaagaaaaacacatttggccttaaaatagcatgcattctcccagaagcccatagtaaagaaaatgacagatcgtggtcagcagactcttatcaaattggtatgtaaaagatttcttcaagctccattttgcagagaccaccacttagagaatcaaaaaattcctgttttgatacttctaagttaaaatatatgttacagtttatctggtacttcatttttcttaactaaaattactttttactttaagcttgaataaaaatcttcattggtaactgtatgtaattaagtggcaacttctctttacctcagtatagttaaaaaccattcatattttaagtgattcatgtataccctgaagccgttaatacaccccagtctctatggtaacatcactaaatgtgggcatagaaactccacagctgtttacaaatttggttacagtgtgctacggtgcatttgtaacactcagatttgtgcccattcaggggcaatttggcactcagattctactctacttcacctaaccacccctagatctgagttttcagagtgcttctgaagtacagtttaaaaacactttttaaaaagtggagtaaaagtgaggcacattttacaagaacataactcctattaaaacggagtaacaactatgcaaaggtttctatagcagctaggtgagtttgttttccgggtctgtcttaactggcagcttcctgtacatactggtacttatttgctgtaaacgtctgtttcatacatttgccatgcagtgactgtgctcgaaaggtgaaatcaatggtaaagaagcctaggattttatggtatgagaaactgatcgcaggattttctgatccatagctattaattgaaaacttctgatagtgctgtaggctctatagtaggcttaagagtgagtcttatactatgaagccagccacaagatactaacaaatgtataaattgaaaagtaccaatactttttgcacatagatcaaaatagagtggagaatttgggctccaaaaatcaggttagtaggctcatttccatgtgcttaaaaatgtttttgttgttatgcattgattaagggctagagcaaatataaaattaaatgtctttttcctcc

SEQ ID NO: 7376 - protein, 514 aa, Homo sapiens; identical to SEQ ID NO: 436

SEQ ID NO: 7377 - DNA, 4053 bp, Homo sapiens
gctgctgcccctcccgccgccgctgctgtcccccaccgaagtagcggccacagcctggtcagcggcagcatcatgcaggccaatggggcaggaggaggaggaggaggtggcggcggcggcggtggaggaggagggggcggcgggggccagggacagaccccggaactcgcctgcttgtcggcccagaacggggagtcgtccccctcgtcgtcgtcgtccgcgggggacctggcccacgccaatgggctcctgccttccgccccctccgccgccagcaacaatagcaacagcctgaatgtcaataacggggttcccggcggggcggccgccgcatcctcagccaccgtcgcagctgcctccgccaccaccgccgcctcctcttccttggccaccccagaactgggcagcagcctcaagaagaagaagcggctctcccagtcagatgaggatgtcattaggctaataggacagcacttgaatggcttagggctcaaccagactgttgatctcctcatgcaagagtcaggatgtcgtttagaacatccttctgctaccaaattccgaaatcatgtcatggaaggagactgggataaggcagaaaatgacctgaatgaactaaagcctttagtgcattctcctcatgctattgtggtaagaggcgcacttgaaatctctcaaacgttgttgggaataattgtgaggatgaagtttttgctgctgcagcagaagtacctagaatacctggaggatggcaaggtcctggaggcacttcaagttctacgctgtgaattgacgccgctgaaatacaatacagagcgcattcatgttcttagtgggtatctgatgtgtagccatgcagaagacctacgtgcaaaagcagaatgggaaggcaaagggacagcttcccgatctaaactattggataaacttcagacctatttaccaccatcagtgatgcttcccccacggcgtttacagactctcctgcggcaggcggtggaactacaaagggatcggtgcctatatcacaataccaaacttgataataatctagattctgtgtctctgcttatagaccatgtttgtagtaggaggcagttcccatgttatacgcagcagatacttacggagcattgtaatgaagtgtggttctgtaaattctctaatgatggcactaaactagcaacaggatcaaaagatacaacagttatcatatggcaagttgatccggatacacacctgctaaaactgcttaaaacattagaaggacatgcttatggcgtttcttatattgcatggagtccagatgacaactatcttgttgcttgtggcccagatgactgctctgagctttggctttggaatgtacaaacaggagaactaaggacaaaaatgagccagtctcatgaagacagtttgacaagtgtggcttggaatccagatgggaagcgctttgtgactggaggtcagcgtgggcagttctatcagtgtgacttagatggtaatctccttgactcctgggaaggggtaagagtgcaatgcctttggtgcttgagtgatggaaagactgttctggcatcagatacacaccagcgaattcggggctataacttcgaggaccttacagataggaacatagtacaagaagatcatcctattatgtcttttactatttcaaaaaatggccgattagctttgttaaatgtagcaactcagggagttcatttatgggacttgcaagacagagttttagtaagaaagtatcaaggtgttacacaagggttttatacaattcattcatgttttggaggccataatgaagacttcatcgctagtggcagtgaagatcacaaggtttacatctggcacaaacgtagtgaactgccaattgcggagctgacagggcacacacgtacagtaaactgtgtgagctggaacccacagattccatccatgatggccagcgcctcagatgatggcactgttagaatatggggaccagcaccttttatagaccaccagaatattgaagaggaatgcagtagcatggatagttgatggtgaatttggagcagacgacttctgtttaacttaaaattagtcgtattttaatggcttgggatttggtgcaaacaaacatgattgatagctggacagacatgctcgtcatgaaaaaagaaccatttctgaagcccgattggggccaaacatttacaccttgcttcatagtaaccagttgagatgaagcacgtcgttagaacgttgttggacaccatgttgaattattcccccatcggttgtgaagaactgtgctacattcaggcttacccattgaactcagtatatatatttttttccttcctgtcttttgtctggcaggataccattcttgttgctcttctgtgtaatgaagtttaaatgcttgtttggaaaactttatttaacagtttagaaggcttgatagaaagagtgcattagtctgaagagtatacattggataggaaagaatttccttcttttgtttctccaaatctttccgccttatttagcttgagatctttgcagcttggttcatggattctagccttgcccgttgcgcagtatatactgatccagatgataaaccagtgaactatgtcaaaagcactctcaatattacatttgacaaaaagttttgtacttttcacatagcttgttgccccgtaaaagggttaacagcacaattttttaaaaataaattaagaagtatttataggattaaagtgacttcatttgtatacatttggaatctaaaccagcttaaaaacagtttcctcaatgacttagatacacagtataactgatgctcttctggaataccacatgagacatggtcagaaacagtgcttggaaggacattacacaagaaattcagagtaatgctttgaagatttccccccttttgttttattcctgaaggaacatcagtacccgatcttgaagaaattcaagattcaaaaagaattttaaatacaccaacatgagacatcagtagtcagttggttttcagtaaagcttgttccaagttgttctcaacttaggaagtaattttggtgtgatctagcaaaagagtaggaatcagcgatacaaccactttggaagtttatagtataattgaaattattagaagaattcagcaggttacagacatacttaaactgggattaaaacctcatagtcatttttcttaattgcccttaatattttgacatatagggatacataaatttaaagaatattttttctcagttttttcagatattgccatactgaacctcattctaaactggtgctgtggatagtctttccctctcccctcctgttttagtttaaggaaaggtttccttcatggaaaagcacttttaattttgagaatttcacatttaaaataagccaaaagcctgatgttcacattgtgcttttaaactccgtaacagctgaatacaacataacatagtctcccttgaaattccctccctttttcagtagaggataaatagggtgactccagctgttggaatgagaatggggatacccccaaaataagattctggtgaagaaaaagtcttgtactaagttcccctttaggtgtagccaagtctataatataattatgatcatgaatagactccagaatccacaaagagaagagggcttggatgtcaaaaattcttccattgtggggtaggtggtcggggatgggagaaagggaaaagtcagggaaggggagaagaaagaaaaacacatttggccttaaaatagcatgcattctcccagaagcccatagtaaagaaaatgacagatcgtggtcagcagactcttatcaaattggtatgtaaaagatttcttcaagctccattttgcagagaccaccacttagagaatcaaaaaattcctgttttgatacttctaagttaaaatatatgttacagtttatctggtacttcatttttcttaactaaaattactttttactttaagcttgaataaaaatcttcattggtaactgtatgt

SEQ ID NO: 7378 - protein, 661 aa, Homo sapiens; identical to SEQ ID NO: 7362

SEQ ID NO: 7379 - DNA, 2965 bp, Homo sapiens
gctgctgcccctcccgccgccgctgctgtcccccaccgaagtagcggccacagcctggtcagcggcagcatcatgcaggccaatggggcaggaggaggaggaggaggtggcggcggcggcggtggaggaggagggggcggcgggggccagggacagaccccggaactcgcctgcttgtcggcccagaacggggagtcgtccccctcgtcgtcgtcgtccgcgggggacctggcccacgccaatgggctcctgccttccgccccctccgccgccagcaacaatagcaacagcctgaatgtcaataacggggttcccggcggggcggccgccgcatcctcagccaccgtcgcagctgcctccgccaccaccgccgcctcctcttccttggccaccccagaactgggcagcagcctcaagaagaagaagcggctctcccagtcagatgaggatgtcattaggctaataggacagcacttgaatggcttagggctcaaccagactgttgatctcctcatgcaagagtcaggatgtcgtttagaacatccttctgctaccaaattccgaaatcatgtcatggaaggagactgggataaggcagaaaatgacctgaatgaactaaagcctttagtgcattctcctcatgctattgtggcacaaacattttctgaaacttccatcaacttttttcccctgactgctgctttctgtcatgtcagaggatgaagtttttgctgctgcagcagaagtacctagaatacctggaggatggcaaggtcctggaggcacttcaagttctacgctgtgaattgacgccgctgaaatacaatacagagcgcattcatgttcttagtgggtatctgatgtgtagccatgcagaagacctacgtgcaaaagcagaatgggaaggcaaagggacagcttcccgatctaaactattggataaacttcagacctatttaccaccatcagtgatgcttcccccacggcgtttacagactctcctgcggcaggcggtggaactacaaagggatcggtgcctatatcacaataccaaacttgataataatctagattctgtgtctctgcttatagaccatgtttgtagtagactggtgaattgacaaaatgtaattctaaattattgattgggaaaagaagcaaggaagaccgtgtttcaagatacacttaaaggaggcagttcccatgttatacgcagcagatacttacggagcattgtaatgaagtgtggttctgtaaattctctaatgatggcactaaactagcaacaggatcaaaagatacaacagttatcatatggcaagttgatccggatacacacctgctaaaactgcttaaaacattagaaggacatgcttatggcgtttcttatattgcatggagtccagatgacaactatcttgttgcttgtggcccagatgactgctctgagctttggctttggaatgtacaagaaaactatccccatgtaccttttattattacaccaagggcagctattatctctcagatcctgtttctaatccatgaacaaaatggaatcaagactagattaaatgacaggagaactaaggacaaaaatgagccagtctcatgaagacagtttgacaagtgtggcttggaatccagatgggaagcgctttgtgactggaggtcagcgtgggcagttctatcagtgtgacttagatggtaatctccttgactcctgggaaggggtaagagtgcaatgcctttggtgcttgagtgatggaaagactgttctggcatcagatacacaccagcgaattcggggctataacttcgaggaccttacagataggaacatagtacaagaagatcatcctattatgtcttttactatttcaaaaaatggccgattagctttgttaaatgtagcaactcagggagttcatttatgggacttgcaagacagagttttagtaagaaagtatcaaggtgttacacaagggttttatacaattcattcatgttttggaggccataatgaagacttcatcgctagtggcagtgaagatcacaaggtttacatctggcacaaacgtagtgaactgccaattgcggagctgacagggcacacacgtacagtaaactgtgtgagctggaacccacagattccatccatgatggccagcgcctcagatgatggcactgttagaatatggggaccagcaccttttatagaccaccagaatattgaagaggaatgcagtagcatggatagttgatggtgaatttggagcagacgacttctgtttaacttaaaattagtcgtattttaatggcttgggatttggtgcaaacaaacatgattgatagctggacagacatgctcgtcatgaaaaaagaaccatttctgaagcccgattggggccaaacatttacaccttgcttcatagtaaccagttgagatgaagcacgtcgttagaacgttgttggacaccatgttgaattattcccccatcggttgtgaagaactgtgctacattcaggcttacccattgaactcagtatatatatttttttccttcctgtcttttgtctggcaggataccattcttgttgctcttctgtgtaatgaagtttaaatgcttgtttggaaaactttatttaacagtttagaaggcttgatagaaagagtgcattagtctgaagagtatacattggataggaaagaatttccttcttttgtttctccaaatctttccgccttatttagcttgagatctttgcagcttggttcatggattctagccttgcccgttgcgcagtatatactgatccagatgataaaccagtgaactatgtcaaaagcactctcaatattacatttgacaaaaagttttgtacttttcacatagcttgttgccccgtaaaagggttaacagcacaattttttaaaaataaattaagaagtatttataggatt

SEQ ID NO: 7380 - protein, 229 aa, Homo sapiens
MTGELRTKMSQSHEDSLTSVAWNPDGKRFVTGGQRGQFYQCDLDGNLLDSWEGVRVQCLWCLSDGKTVLASDTHQRIRGYNFEDLTDRNIVQEDHPIMSFTISKNGRLALLNVATQGVHLWDLQDRVLVRKYQGVTQGFYTIHSCFGGHNEDFIASGSEDHKVYIWHKRSELPIAELTGHTRTVNCVSWNPQIPSMMASASDDGTVRIWGPAPFIDHQNIEEECSSMDS

SEQ ID NO: 7381 - DNA, 2118 bp, Homo sapiens
tgaggtgtgctgctgtgctgggttaacagcttccttccctttctgtgtagcagtcttgaaatgttctgtttaaatcagtaggcttaatgtgttctgggtatttatctccttgtattttaaatatatgtagttgcaaatagcaccaggaattagatttctgtacacccctaatctagccttgtgagcttcgctagttaatgtgtgctcactttccctccatttgttacgtgagagaatgcgtctgctgatcactgaagtgtcccttttagcttctgattcattgggttctgttgggcatctttaaatccaccttaacctgaggaatgtatgtgggcaaccaggccctgcatttttttatattctgaattttgcatgcttgcctgacttagtatttctgaattgatgttttttttaatggtataactatcttgattttcactgaaattatatggttctgtcactactctgtaaattaatccgaaacttttaaggtaactgggatgatctgcttgtaaaaatgcttgttgccttttgctttatcttcagtgtacctccttaatcctgcttcaacttgattatcttgtgaaacgatgagagtaagttgcaaccttgtgactgaaaacttgaaaagagtggagcaggtgggacctcttattctcaaatagtgacatattctccgtagtcacagtttcagaactgagtaaggatccttggtacttggtggcatctgttgaactgaggagcatttctcattgtaaagattgcctttgttctgtctaaaagtctggagaaatcccaaagacttttcctatgtactaggcattttattttgattgacttacaaactcttcttaatcattatcaatctcggtttttttgtggtgcagtggaaggagaaataggtctagtttctgcctctgattagccgcacagccttgaacaaatcacatttcatctttgaacttacctctactgttagactaggcgactcacatttgaggacttttctcgggtatcttgagggtttgtgatcctgaacccttaaacagtgcttttttgttacacaggagggcttttttggggggatgaccagtacagacatgccagttagttttactagtgggatcccaaatccaaagcagtgtagtggtgattggtcagtgactaaccaggcagagcttaagtttggggagggtagaaacgccgtttccttgggaactggagtgcagtatgagctgggtgtcacttggctctgaacatactggctttgctgtaatgcttgaaaaggcgttggtatcttcattttacagttcattaacccaagtacgttttcttatttaaatgacaactttggtgctttaaaatgaggtaccactttttaaagctagctgtgtcgagttaaagaaaaaatcagcagttttttctcccagaaatgtaattgccaaacactattcatccccatcttaagttttacaaggtgatgtaatcagcttgttgtagtgatgctggccaaatggtgctcagcaggtgagaacaaaaaaaccccagatctcagtgaactaatacacagcttgagcgtttccatgtgctaatgttgcacacttactaaaaaactttggaaatggaaaataatgtattagtgcaacagttgatgtgcttctttgggcaaagatatagttttgttccacaatttgtacttaaaagcgaaagaacattgaaaacatagacttactggctgtagcaatgctggcctgttaactgataactagaacttaggttcacgtttatgtaaagtgtgtaaaacctagtagagcttgcatagtcggcactcagtaaatgtttggttccttttgccccttggtaagtttattttaccatcctcccacctgccattctgactttattaaatcaacatgtggaccagagtgttaatgagatgttattgcagaagagattgagaaaattggtatatcatgcagataacatacaaaatctttttgtaacgtaaaaaatgcagttttattattgcttgtgcctcaactgtttaagtgaatattaaagggcttggagaaaactttggcttggcgtatgtttggagaagtgaactctgctgaattt

SEQ ID NO: 7382 - protein, 56 aa, Homo sapiens [sequence omitted]

SEQ ID NO: 7383 - DNA, 3401 bp, Homo sapiens
cctctgctcaggctctgccgcggacgacctcgaggcccttagttgactgggaccggaagtggcgtgtgctcggcctttctgtgttcctggcccgcggccgtcgggtgtgagctgcgccgaccgctctgagggttcgtggcccaccgctccttcgcggtccctgccgccaccgtccacgctcagcgttgtagagaagatggtgggtcggaacagcgccatcgccgccggtgtatgcggggcccttttcattgggtactgcatctacttcgaccgcaaaagacgaagtgaccccaacttcaagaacaggcttcgagaacgaagaaagaaacagaagcttgccaaggagagagctgggctttccaagttacctgaccttaaagatgctgaagctgttcagaagttcttccttgaagaaatacagcttggtgaagagttactagctcaaggtgaatatgagaagggcgtagaccatctgacaaatgcaattgctgtgtgtggacagccacagcagttactgcaggtcttacagcaaactcttccaccaccagtgttccagatgcttctgactaagctcccaacaattagtcagagaattgtaagtgctcagagcttggctgaagatgatgtggaatgagaaacaaatgtcaacataataaaatctcagttaaaaatattttaaaaattcttggtagttgagcagctctgggggaataagggcaaatatgcttgttatgaactacactgaaatctaccaaagttaatgtttactttgtgtagatccatttgtctattttatttatttttcccagtgaaaagtgtattttgatagagaacttttcattctataaatacactatgagttactaaaatatcatggattttgtttattcctgaaacatagttacatagttaaactgtacatatgacatggcttatgttaaaaatacccagtgctcagttttgaaagataggcaaaaaaaaaaaagtataggagaaactgaagaatgtacacttttttagagggcacattttgctgtaaatctggaaatttgatagacttgactgtgtttgtgaaaactgagcattaaaggttttgattgatcctttctttccatttaatctctgagacgtaaatatgtgaggtgtgctgctgtgctgggttaacagcttccttccctttctgtgtagcagtcttgaaatgttctgtttaaatcagtaggcttaatgtgttctgggtatttatctccttgtattttaaatatatgtagttgcaaatagcaccaggaattagatttctgtacacccctaatctagccttgtgagcttcgctagttaatgtgtgctcactttccctccatttgttacgtgagagaatgcgtctgctgatcactgaagtgtcccttttagcttctgattcattgggttctgttgggcatctttaaatccaccttaacctgaggaatgtatgtgggcaaccaggccctgcatttttttatattctgaattttgcatgcttgcctgacttagtatttctgaattgatgttttttttaatggtataactatcttgattttcactgaaattatatggttctgtcactactctgtaaattaatccgaaacttttaaggtaactgggatgatctgcttgtaaaaatgcttgttgccttttgctttatcttcagtgtacctccttaatcctgcttcaacttgattatcttgtgaaacgatgagagtaagttgcaaccttgtgactgaaaacttgaaaagagtggagcaggtgggacctcttattctcaaatagtgacatattctccgtagtcacagtttcagaactgagtaaggatccttggtacttggtggcatctgttgaactgaggagcatttctcattgtaaagattgcctttgttctgtctaaaagtctggagaaatcccaaagacttttcctatgtactaggcattttattttgattgacttacaaactcttcttaatcattatcaatctcggtttttttgtggtgcagtggaaggagaaataggtctagtttctgcctctgattagccgcacagccttgaacaaatcacatttcatctttgaacttacctctactgttagactaggcgactcacatttgaggacttttctcgggtatcttgagggtttgtgatcctgaacccttaaacagtgcttttttgttacacaggagggcttttttggggggatgaccagtacagacatgccagttagttttactagtgggatcccaaatccaaagcagtgtagtggtgattggtcagtgactaaccaggcagctaagaagtcttaggcagcagcccagacatgtatagaggggcagttagagggagaacaggggtgggaaagggagcaaggggcagatagctcagcaaggaaagaatgggctcagaaaaaggagggctggctggaggagtgaggggcagcttaagtttggggagggtagaaacgccgtttccttgggaactggagtgcagtatgagctgggtgtcacttggctctgaacatactggctttgctgtaatgcttgaaaaggcgttggtatcttcattttacagttcattaacccaagtacgttttcttatttaaatgacaactttggtgctttaaaatgaggtaccactttttaaagctagctgtgtcgagttaaagaaaaaatcagcagttttttctcccagaaatgtaattgccaaacactattcatccccatcttaagttttacaaggtgatgtaatcagcttgttgtagtgatgctggccaaatggtgctcagcaggtgagaacaaaaaaaccccagatctcagtgaactaatacacagcttgagcgtttccatgtgctaatgttgcacacttactaaaaaactttggaaatggaaaataatgtattagtgcaacagttgatgtgcttctttgggcaaagatatagttttgttccacaatttgtacttaaaagcgaaagaacattgaaaacatagacttactggctgtagcaatgctggcctgttaactgataactagaacttaggttcacgtttatgtaaagtgtgtaaaacctagtagagcttgcatagtcggcactcagtaaatgtttggttccttttgccccttggtaagtttattttaccatcctcccacctgccattctgactttattaaatcaacatgtggaccagagtgttaatgagatgttattgcagaagagattgagaaaattggtatatcatgcagataacatacaaaatctttttgtaacgtaaaaaatgcagttttattattgcttgtgcctcaactgtttaagtgaatattaaagggcttggagaaaactttggcttggcgtatgtttggagaagtgaactctgctgaattt

SEQ ID NO: 7384 - protein, 145 aa, Homo sapiens; identical to SEQ ID NO: 438

SEQ ID NO: 7385 - DNA, 2079 bp, Homo sapiens
tgaggtgtgctgctgtgctgggttaacagcttccttccctttctgtgtagcagtcttgaaatgttctgtttaaatcagtaggcttaatgtgttctgggtatttatctccttgtattttaaatatatgtagttgcaaatagcaccaggaattagatttctgtacacccctaatctagccttgtgagcttcgctagttaatgtgtgctcactttccctccatttgttacgtgagagaatgcgtctgctgatcactgaagtgtcccttttagcttctgattcattgggttctgttgggcatctttaaatccaccttaacctgaggaatgtatgtgggcaaccaggccctgcatttttttatattctgaattttgcatgcttgcctgacttagtatttctgaattgatgttttttttaatggtataactatcttgattttcactgaaattatatggttctgtcactactctgtaaattaatccgaaacttttaaggtaactgggatgatctgcttgtaaaaatgcttgttgccttttgctttatcttcagtgtacctccttaatcctgcttcaacttgattatcttgtgaaacgatgagagtaagttgcaaccttgtgactgaaaacttgaaaagagtggagcaggtgggacctcttattctcaaatagtgacatattctccgtagtcacagtttcagaactgagtaaggatccttggtacttggtggcatctgttgaactgaggagcatttctcattgtaaagattgcctttgttctgtctaaaagtctggagaaatcccaaagacttttcctatgtactaggcattttattttgattgacttacaaactcttcttaatcattatcaatctcggtttttttgtggtgcagtggaaggagaaataggtctagtttctgcctctgattagccgcacagccttgaacaaatcacatttcatctttgaacttacctctactgttagactaggcgactcacatttgaggacttttctcgggtatcttgagggtttgtgatcctgaacccttaaacagtgcttttttgttacacaggagggcttttttggggggatgaccagtacagacatgccagttagttttactagtgggatcccaaatccaaagcagtgtagtggtgattggtcagtgactaaccaggcagagcttaagtttggggagggtagaaacgccgtttccttgggaactggagtgcagtatgagctgggtgtcacttggctctgaacatactggctttgctgtaatgcttgaaaaggcgttggtatcttcattttacagttcattaacccaagtacgttttcttatttaaatgacaactttggtgctttaaaatgaggtaccactttttaaagctagctgtgtcgagttaaagaaaaaatcagcagttttttctcccagaaatgtaattgccaaacactattcatccccatcttaagttttacaaggtgatgtaatcagcttgttgtagtgatgctggccaaatggtgctcagcaggtgagaacaaaaaaaccccagatctcagtgaactaatacacagcttgagcgtttccatgtgctaatgttgcacacttactaaaaaactttggaaatggaaaataatgtattagtgcaacagttgatgtgcttctttgggcaaagatatagttttgttccacaatttgtacttaaaagcgaaagaacattgaaaacatagacttactggctgtagcaatgctggcctgttaactgataactagaacttaggttcacgtttatgtaaagtgtgtaaaacctagtagagcttgcatagtcggcactcagtaaatgtttggttccttttgccccttggtaagtttattttaccatcctcccacctgccattctgactttattaaatcaacatgtggaccagagtgttaatgagatgttattgcagaagagattgagaaaattggtatatcatgcagataacatacaaaatctttttgtaacgtaaaaaatgcagttttattattgcttgtgcctcaactgtttaagtgaatattaaagggcttggagaaaactttg

SEQ ID NO: 7386 - protein, 56 aa, Homo sapiens [sequence omitted]

SEQ ID NO: 7387 - DNA, 3362 bp, Homo sapiens
cctctgctcaggctctgccgcggacgacctcgaggcccttagttgactgggaccggaagtggcgtgtgctcggcctttctgtgttcctggcccgcggccgtcgggtgtgagctgcgccgaccgctctgagggttcgtggcccaccgctccttcgcggtccctgccgccaccgtccacgctcagcgttgtagagaagatggtgggtcggaacagcgccatcgccgccggtgtatgcggggcccttttcattgggtactgcatctacttcgaccgcaaaagacgaagtgaccccaacttcaagaacaggcttcgagaacgaagaaagaaacagaagcttgccaaggagagagctgggctttccaagttacctgaccttaaagatgctgaagctgttcagaagttcttccttgaagaaatacagcttggtgaagagttactagctcaaggtgaatatgagaagggcgtagaccatctgacaaatgcaattgctgtgtgtggacagccacagcagttactgcaggtcttacagcaaactcttccaccaccagtgttccagatgcttctgactaagctcccaacaattagtcagagaattgtaagtgctcagagcttggctgaagatgatgtggaatgagaaacaaatgtcaacataataaaatctcagttaaaaatattttaaaaattcttggtagttgagcagctctgggggaataagggcaaatatgcttgttatgaactacactgaaatctaccaaagttaatgtttactttgtgtagatccatttgtctattttatttatttttcccagtgaaaagtgtattttgatagagaacttttcattctataaatacactatgagttactaaaatatcatggattttgtttattcctgaaacatagttacatagttaaactgtacatatgacatggcttatgttaaaaatacccagtgctcagttttgaaagataggcaaaaaaaaaaaagtataggagaaactgaagaatgtacacttttttagagggcacattttgctgtaaatctggaaatttgatagacttgactgtgtttgtgaaaactgagcattaaaggttttgattgatcctttctttccatttaatctctgagacgtaaatatgtgaggtgtgctgctgtgctgggttaacagcttccttccctttctgtgtagcagtcttgaaatgttctgtttaaatcagtaggcttaatgtgttctgggtatttatctccttgtattttaaatatatgtagttgcaaatagcaccaggaattagatttctgtacacccctaatctagccttgtgagcttcgctagttaatgtgtgctcactttccctccatttgttacgtgagagaatgcgtctgctgatcactgaagtgtcccttttagcttctgattcattgggttctgttgggcatctttaaatccaccttaacctgaggaatgtatgtgggcaaccaggccctgcatttttttatattctgaattttgcatgcttgcctgacttagtatttctgaattgatgttttttttaatggtataactatcttgattttcactgaaattatatggttctgtcactactctgtaaattaatccgaaacttttaaggtaactgggatgatctgcttgtaaaaatgcttgttgccttttgctttatcttcagtgtacctccttaatcctgcttcaacttgattatcttgtgaaacgatgagagtaagttgcaaccttgtgactgaaaacttgaaaagagtggagcaggtgggacctcttattctcaaatagtgacatattctccgtagtcacagtttcagaactgagtaaggatccttggtacttggtggcatctgttgaactgaggagcatttctcattgtaaagattgcctttgttctgtctaaaagtctggagaaatcccaaagacttttcctatgtactaggcattttattttgattgacttacaaactcttcttaatcattatcaatctcggtttttttgtggtgcagtggaaggagaaataggtctagtttctgcctctgattagccgcacagccttgaacaaatcacatttcatctttgaacttacctctactgttagactaggcgactcacatttgaggacttttctcgggtatcttgagggtttgtgatcctgaacccttaaacagtgcttttttgttacacaggagggcttttttggggggatgaccagtacagacatgccagttagttttactagtgggatcccaaatccaaagcagtgtagtggtgattggtcagtgactaaccaggcagctaagaagtcttaggcagcagcccagacatgtatagaggggcagttagagggagaacaggggtgggaaagggagcaaggggcagatagctcagcaaggaaagaatgggctcagaaaaaggagggctggctggaggagtgaggggcagcttaagtttggggagggtagaaacgccgtttccttgggaactggagtgcagtatgagctgggtgtcacttggctctgaacatactggctttgctgtaatgcttgaaaaggcgttggtatcttcattttacagttcattaacccaagtacgttttcttatttaaatgacaactttggtgctttaaaatgaggtaccactttttaaagctagctgtgtcgagttaaagaaaaaatcagcagttttttctcccagaaatgtaattgccaaacactattcatccccatcttaagttttacaaggtgatgtaatcagcttgttgtagtgatgctggccaaatggtgctcagcaggtgagaacaaaaaaaccccagatctcagtgaactaatacacagcttgagcgtttccatgtgctaatgttgcacacttactaaaaaactttggaaatggaaaataatgtattagtgcaacagttgatgtgcttctttgggcaaagatatagttttgttccacaatttgtacttaaaagcgaaagaacattgaaaacatagacttactggctgtagcaatgctggcctgttaactgataactagaacttaggttcacgtttatgtaaagtgtgtaaaacctagtagagcttgcatagtcggcactcagtaaatgtttggttccttttgccccttggtaagtttattttaccatcctcccacctgccattctgactttattaaatcaacatgtggaccagagtgttaatgagatgttattgcagaagagattgagaaaattggtatatcatgcagataacatacaaaatctttttgtaacgtaaaaaatgcagttttattattgcttgtgcctcaactgtttaagtgaatattaaagggcttggagaaaactttg

SEQ ID NO: 7388 - protein, 145 aa, Homo sapiens; identical to SEQ ID NO: 438

SEQ ID NO: 7389 - DNA, 1244 bp, Homo sapiens
atccttggtacttggtggcatctgttgaactgaggagcatttctcattgtaaagattgcctttgttctgtctaaaagtctggagaaatcccaaagacttttcctatgtactaggcattttattttgattgacttacaaactcttcttaatcattatcaatctcggtttttttgtggtgcagtggaaggagaaataggtctagtttctgcctctgattagccgcacagccttgaacaaatcacatttcatctttgaacttacctctactgttagactaggcgactcacatttgaggacttttctcgggtatcttgagggtttgtgatcctgaacccttaaacagtgcttttttgttacacaggagggcttttttggggggatgaccagtacagacatgccagttagttttactagtgggatcccaaatccaaagcagtgtagtggtgattggtcagtgactaaccaggcagctaagaagtcttaggcagcagcccagacatgtatagaggggcagttagagggagaacaggggtgggaaagggagcaaggggcagatagctcagcaaggaaagaatgggctcagaaaaaggagggctggctggaggagtgaggggcagcttaagtttggggagggtagaaacgccgtttccttgggaactggagtgcagtatgagctgggtgtcacttggctctgaacatactggctttgctgtaatgcttgaaaaggcgttggtatcttcattttacagttcattaacccaagtacgttttcttatttaaatgacaactttggtgctttaaaatgaggtaccactttttaaagctagctgtgtcgagttaaagaaaaaatcagcagttttttctcccagaaatgtaattgccaaacactattcatccccatcttaagttttacaaggtgatgtaatcagcttgttgtagtgatgctggccaaatggtgctcagcaggtgagaacaaaaaaaccccagatctcagtgaactaatacacagcttgagcgtttccatgtgctaatgttgcacacttactaaaaaactttggaaatggaaaataatgtattagtgcaacacatgtggaccagagtgttaatgagatgttattgcagaagagattgagaaaattggtatatcatgcagataacatacaaaatctttttgtaacgtaaaaaatgcagttttattattgcttgtgcctcaactgtttaagtgaatattaaagggcttggag

SEQ ID NO: 7390 - protein, 68 aa, Homo sapiens [sequence omitted]

SEQ ID NO: 7391 - DNA, 1113 bp, Homo sapiens
cctctgctcaggctctgccgcggacgacctcgaggcccttagttgactgggaccggaagtggcgtgtgctcggcctttctgtgttcctggcccgcggccgtcgggtgtgagctgcgccgaccgctctgagggttcgtggcccaccgctccttcgcggtccctgccgccaccgtccacgctcagcgttgtagagaagatggtgggtcggaacagcgccatcgccgccggtgtatgcggggcccttttcattgggtactgcatctacttcgaccgcaaaagacgaagtgaccccaacttcaagaacaggcttcgagaacgaagaaagaaacagaagcttgccaaggagagagctgggctttccaagttacctgaccttaaagatgctgaagctgttcagaagttcttccttgaagaaatacagcttggtgaagagttactagctcaaggtgaatatgagaagggcgtagaccatctgacaaatgcaattgctgtgtgtggacagccacagcagttactgcaggtcttacagcaaactcttccaccaccagtgttccagatgcttctgactaagctcccaacaattagtcagagaattgtaagtgctcagagcttggctgaagatgatgtggaatgagaaacaaatgtcaacataataaaatctcagttaaaaatattttaaaaattcttggtagttgagcagctctgggggaataagggcaaatatgcttgttatgaactacactgaaatctaccaaagttaatgtttactttgtgtagatccatttgtctattttatttatttttcccagtgaaaagtgtattttgatagagaacttttcattctataaatacactatgagttactaaaatatcatggattttgtttattcctgaaacatagttacatagttaaactgtacatatgacatggcttatgttaaaaatacccagtgctcagttttgaaagataggcaaaaaaaaaaaagtataggagaaactgaagaatgtacacttttttagagggcacattttgctgtaaatctggaaatttgatagacttgactgtgtttgtgaaaactgagcattaaaggttttgattgatcctttctttcc

SEQ ID NO: 7392 - protein, 145 aa, Homo sapiens; identical to SEQ ID NO: 438

SEQ ID NO: 7393 - DNA, 865 bp, Homo sapiens
cctctgctcaggctctgccgcggacgacctcgaggcccttagttgactgggaccggaagtggcgtgtgctcggcctttctgtgttcctggcccgcggccgtcgggtgtgagctgcgccgaccgctctgagggttcgtggcccaccgctccttcgcggtccctgccgccaccgtccacgctcagcgttgtagagaagatggtgggtcggaacagcgccatcgccgccggtgtatgcggggcccttttcattgggtactgcatctacttcgaccgcaaaagacgaagtgaccccaacttcaagaacaggcttcgagaacgaagaaagaaacagaagcttgccaaggagagagctgggctttccaagttacctgaccttaaagatgctgaagctgttcagaagttcttccttgaagaaatacagcttggtgaagagttactagctcaaggtgaatatgagaagggcgtagaccatctgacaaatgcaattgctgtgtgtggacagccacagcagttactgcaggtcttacagcaaactcttccaccaccagtgttccagatgcttctgactaagctcccaacaattagtcagagaattgtaagtgctcagagcttggctgaagatgatgtggaatgagaaacaaatgtcaacataataaaatctcagttaaaaatattttaaaaattcttggtagttgagcagctctgggggaataagggcaaatatgcttgttatgaactacactgaaatctaccaaagttaatgtttactttgtgtagatccatttgtctattttatttatttttcccagtgaaaagtgtattttgatagagaacttttcattctataaatacactatgagttact

SEQ ID NO: 7394 - protein, 145 aa, Homo sapiens; identical to SEQ ID NO: 438

SEQ ID NO: 7395 - DNA, 677 bp, Homo sapiens
cctctgctcaggctctgccgcggacgacctcgaggcccttagttgactgggaccggaagtggcgtgtgctcggcctttctgtgttcctggcccgcggccgtcgggtgtgagctgcgccgaccgctctgagggttcgtggcccaccgctccttcgcggtccctgccgccaccgtccacgctcagcgttgtagagaagatggtgggtcggaacagcgccatcgccgccggtgtatgcggggcccttttcattgggtactgcatctacttcgaccgcaaaagacgaagtgaccccaacttcaagaacaggcttcgagaacgaagaaagaaacagaagcttgccaaggagagagctgggctttccaagttacctgaccttaaagatgctgaagctgttcagaagttcttccttgaagaaatacagcttggtgaagagttactagctcaaggtgaatatgagaagggcgtagaccatctgacaaatgcaattgctgtgtgtggacagccacagcagttactgcaggtcttacagcaaactcttccaccaccagtgttccagatgcttctgactaagctcccaacaattagtcagagaattgtaagtgctcagagcttggctgaagatgatgtggaatgagaaacaaatgtcaacataataaaatctcagttaaaaatatttt

SEQ ID NO: 7396 - protein, 145 aa, Homo sapiens; identical to SEQ ID NO: 438

SEQ ID NO: 7397 - DNA, 940 bp, Homo sapiens
gagacagagtctcactctgttgctcaggctggagtgctttggcacgatctcagctcactgcagcctctgcctcccaggctctagcgatcctcccatctcagcttcctgagtagctaggactacagaatacagattctgttcatcttgctctgaaattaaataattctgaactcatggggagaaaactcagagtcatgcgttctgttaataaagaaaaatttaaacaacaaaattcaaatccacgattgaagaatgtcagtaaacctaagcagggacttaattttacttccaaaactgcagaaggacatcctaaaagcttatttattggagaaaaagctgttctccttaaaacgaagaagaaaggacagaagaaaagtggacgccctaagaaacagagaaaacagaaataacaaccaggaactgctttttcttttcctgctgagtactgctaataaaagtgctattatctgctgatagcatcgtctgctattcatgtgttgagttttatacttctttatggatggtgtatgtgaaatgtggagacttccacattctcagtttattcacattgtgatactacctttgaaggtttttttgtttttgttttgttttttgagatggagtttggctgttgtctcccaggctggagtgcagtggcgtgatcttggctcactgcaacctctgccttctgggttcaagcgcttctcctgcctcagcctcccaagtagctgggattacaggcgcctgccaccacgcctggctaattttttgtatttttagtagagacggggtttcaccatgttggccaggctggtctcgaactcctgacctcaggtgatccacctgccttggcctctcaaagtgctgggattacaggcgtgagtcactgcacccaagcctcctttctcttttgcctattaaacctctgctcttaacctta

SEQ ID NO: 7398 - protein, 87 aa, Homo sapiens
MDGVCEMWRLPHSQFIHIVILPLKVFLFLFCFLRWSLAVVSQAGVQWRDLGSLQPLPSGFKRFSCLSLPSSWDYRRLPPRLANFLYF

SEQ ID NO: 7399 - DNA, 1015 bp, Homo sapiens
ggtctagtgagtgatttttattaactgtctttttgtttcagagagacaagagatcggtttttgtggggaatctcccttataaagttgaagaatctgccattgagaagcactttctggactgtggaagtatcatggccgtgaggattgtgagagacaaaatgacaggcatcggcaaagggtttggctatgtgctctttgagaatacagattctgttcatcttgctctgaaattaaataattctgaactcatggggagaaaactcagagtcatgcgttctgttaataaagaaaaatttaaacaacaaaattcaaatccacgattgaagaatgtcagtaaacctaagcagggacttaattttacttccaaaactgcagaaggacatcctaaaagcttatttattggagaaaaagctgttctccttaaaacgaagaagaaaggacagaagaaaagtggacgccctaagaaacagagaaaacagaaataacaaccaggaactgctttttcttttcctgctgagtactgctaataaaagtgctattatctgctgatagcatcgtctgctattcatgtgttgagttttatacttctttatggatggtgtatgtgaaatgtggagacttccacattctcagtttattcacattgtgatactacctttgaaggtttttttgtttttgttttgttttttgagatggagtttggctgttgtctcccaggctggagtgcagtggcgtgatcttggctcactgcaacctctgccttctgggttcaagcgcttctcctgcctcagcctcccaagtagctgggattacaggcgcctgccaccacgcctggctaattttttgtatttttagtagagacggggtttcaccatgttggccaggctggtctcgaactcctgacctcaggtgatccacctgccttggcctctcaaagtgctgggattacaggcgtgagtcactgcacccaagcctcctttctcttttgcctattaaacctctgctcttaacctta

SEQ ID NO: 7400 - protein, 117 aa, Homo sapiens [sequence omitted]

SEQ ID NO: 7401 - DNA, 433 bp, Homo sapiens
ttgaagactcttgatgagaattgcctggtagcttttttagaaagattgtcacagcgtttgttgccattgttactgtattgtagttacctttctgcttgtctgctccctttcttctattacttgataagcttctaaagtcctttaacaaacatctcatggatattcagggttgttagcattaatggctctatattggaacagaagtataacagaattttggatctaaatggaaccctagagggtgtctagtccaacatctcgtaatggagcgttccctgccctctggtcagctaatacaatggggctttgacagaaagatggctatacgaaggaggtttattcgtttaaaatattgcatatgggattacaggcgtgagtcactgcacccaagcctcctttctcttttgcctattaaacctctgctcttaacctt

SEQ ID NO: 7402 - protein, 55 aa, Homo sapiens
MERSLPSGQLIQWGFDRKMAIRRRFIRLKYCIWDYRRESLHPSLLSLLPIKPLLL

SEQ ID NO: 7403 - DNA, 488 bp, Homo sapiens
gagacagagtctcactctgttgctcaggctggagtgctttggcacgatctcagctcactgcagcctctgcctcccaggctctagcgatcctcccatctcagcttcctgagtagctaggactacagaatacagattctgttcatcttgctctgaaattaaataattctgaactcatggggagaaaactcagagtcatgcgttctgttaataaagaaaaatttaaacaacaaaattcaaatccacgattgaagaatgtcagtaaacctaagcagggacttaattttacttccaaaactgcagaaggacatcctaaaagcttatttattggagaaaaagctgttctccttaaaacgaagaagaaaggacagaagaaaagtggacgccctaagaaacagagaaaacagaaataacaaccaggaactgctttttcttttcctgctgagtactgctaataaaagtgctattatctgctgatagcatcgtctgct

SEQ ID NO: 7404 - protein, 78 aa, Homo sapiens [sequence omitted]

SEQ ID NO: 7405 - DNA, 563 bp, Homo sapiens
ggtctagtgagtgatttttattaactgtctttttgtttcagagagacaagagatcggtttttgtggggaatctcccttataaagttgaagaatctgccattgagaagcactttctggactgtggaagtatcatggccgtgaggattgtgagagacaaaatgacaggcatcggcaaagggtttggctatgtgctctttgagaatacagattctgttcatcttgctctgaaattaaataattctgaactcatggggagaaaactcagagtcatgcgttctgttaataaagaaaaatttaaacaacaaaattcaaatccacgattgaagaatgtcagtaaacctaagcagggacttaattttacttccaaaactgcagaaggacatcctaaaagcttatttattggagaaaaagctgttctccttaaaacgaagaagaaaggacagaagaaaagtggacgccctaagaaacagagaaaacagaaataacaaccaggaactgctttttcttttcctgctgagtactgctaataaaagtgctattatctgctgatagcatcgtctgct

SEQ ID NO: 7406 - protein, 117 aa, Homo sapiens [sequence omitted]

SEQ ID NO: 7407 - DNA, 5527 bp, Homo sapiens
gcagccgctggacccgccgcccttcttccccatctctcccccgggcctgctggttttgggggggagaaggagagaggggactctggacgtgccagggtcagatctcgcctccgaggaaggtgcagctgaacctggtgttttagaggataccttggtcccagagtcatcatgaaggctggagtgcagtggtgcaatctcagcttactgcaatctccgtctcctgagttcaagcagttctgcctcagcctcctgagtagctgtgactacaggcccttgatgagcctccctatttgacagtgggcactgatgtgagtgctaaatacagaggagccttttgtgaagccaagatcaagacagcaaaaagacttgtcaaagtcaaggtgacatttagacatgattcttcaacagtggaagttcaggatgaccacataaagggcccactaaaggtaggagctattgtggaagtgaagaatcttgatggtgcatatcaggaagctgttatcaataaactaacagatgcgagttggtacactgtagtttttgatgacggagatgagaagacactgagacgatcttcactgtgcctgaaaggagagaggcattttgctgaaagtgaaacattagaccagctcccactcaccaaccctgagcattttggcactccagtcataggaaagaaaacaaatagaggaagaagatctaatcatataccagaggaagagtcttcatcatcctccagtgatgaagatgaggatgataggaaacagattgatgagctactaggcaaagttgtatgtgtagattacattagtttggataaaaagaaagcactgtggtttcctgcattggtggtttgtcctgattgtagtgatgagattgctgtaaaaaaggacaatattcttgttcgatctttcaaagatggaaaatttacttcagttccaagaaaagatgtccatgaaattactagtgacactgcaccaaagcctgatgctgttttaaagcaagcctttgaacaggcacttgaatttcacaaaagtagaactattcctgctaactggaagactgaattgaaagaagatagctctagcagtgaagcagaggaagaagaggaggaggaagatgatgaaaaagaaaaggaggataatagcagtgaagaagaagaagaaatagaaccatttccagaagaaagggagaactttcttcagcaattgtacaaatttatggaagatagaggtacacctattaacaaacgacctgtacttggatatcgaaatttgaatctctttaagttattcagacttgtacacaaacttggaggatttgataatattgaaagtggagctgtttggaaacaagtctaccaagatcttggaatccctgtcttaaattcagctgcaggatacaatgttaaatgtgcttataaaaaatacttatatggttttgaggagtactgtagatcagccaacattgaatttcagatggcattgccagagaaagttgttaacaagcaatgtaaggagtgtgaaaatgtaaaagaaataaaagttaaggaggaaaatgaaacagagatcaaagaaataaagatggaggaggagaggaatataataccaagagaagaaaagcctattgaggatgaaattgaaagaaaagaaaatattaagccctctctgggaagtaaaaagaatttattagaatctatacctacacattctgatcaggaaaaagaagttaacattaaaaaaccagaagacaatgaaaatctggatgacaaagatgatgacacaactagggtagatgaatccctcaacataaaggtagaagctgaggaagaaaaagcaaaatctggatacgatgaatggattaaagcagataaaatagtaagacctgctgataaaaatgtgccaaagataaaacatcggaagaaaataaagaataaattagacaaagaaaaagacaaagatgaaaaatactctccaaaaaactgtaaacttcggcgcttgtccaaaccaccatttcagacaaatccatctcctgaaatggtatccaaactggatctcactgatgccaaaaactctgatactgctcatattaagtccatagaaattacttcgatccttaatggacttcaagcttctgaaagttctgctgaagacagtgagcaggaagatgagagaggtgctcaagacatggataataatggcaaagaggaatctaagattgatcatttgaccaacaacagaaatgatcttatttcaaaggaggaacagaacagttcatctttgctagaagaaaacaaagttcatgcagatttggtaatatccaaaccagtgtcaaaatctccagaaagattaaggaaagatatagaagtattatccgaagatactgattatgaagaagatgaagtcacaaaaaagagaaaggatgtcaagaaggacacaacagataaatcttcaaaaccacaaataaaacgtggtaaaagaaggtattgcaatacagaagagtgtctaaaaactggatcacctggcaaaaaggaagagaaggccaagaacaaagaatcactttgcatggaaaacagtagcaacagctcttcagatgaagatgaagaagaaacaaaagcaaagatgacaccaactaagaaatacaatggtttggaggaaaaaagaaaatctctacggacaactggtttctattcaggattttcagaagtggcagaaaaaaggattaaacttttaaataactctgatgaaagacttcaaaacagcagggccaaagatcgaaaagatgtctggtcaagtattcagggacagtggcctaaaaaaacgctgaaagagcttttttcagactctgatactgaggctgcagcttccccaccgcatcctgccccagaggagggggtggcagaggagtcactgcagactgtggctgaagaggagagttgttcacccagtgtagaactagaaaaaccacctccagtcaatgtcgatagtaaacccattgaagaaaaaacagtagaggtcaatgacagaaaagcagaatttccaagtagtggcagtaattcagtgctaaatacccctcctactacacctgaatcgccttcatcagtcactgtaacagaaggcagccggcagcagtcttctgtaacagtatcagaaccactggctccaaaccaagaagaggttcgaagtatcaagagtgaaactgatagcacaattgaggtggatagtgttgctggggagctccaagacctccagtctgaagggaatagctcgccagcaggttttgatgccagtgtgagctcaagcagtagtaatcagccagaaccagaacatcctgaaaaagcctgtacaggtcagaaaagagtgaaagatgctcagggaggaggaagttcatcaaaaaagcagaaaagaagccataaagcaacagtggtaaacaacaaaaagaagggaaaaggcacaaatagtagtgatagtgaagaactttcagctggtgaaagtataactaagagtcagccagtcaaatcagtttccactggaatgaagtctcatagtaccaaatctcccgcaaggacgcagtctccaggaaaatgtggaaagaatggtgataaggatcctgatctcaaggaacccagtaatcgattacccaaagtttacaaatggagttttcagatgtcggacctggaaaatatgacaagtgccgaacgcatcacaattcttcaagaaaaacttcaagaaatcagaaaacattatctgtcattaaaatctgaagtagcttccattgatcggaggagaaagcgtttaaagaagaaagagagagaaagtgctgctacatcctcatcctcctcttcaccttcatccagttccataacagctgctgttatgttaactttagctgaaccgtcaatgtccagcgcatcacaaaatggaatgcttcaaccactcccagaagacgtccttcactcccaaaatgaggcttttctgaaacggcgaggaccaccaaccgacggcgacaaacctgctccctcacccagcgcctcccttcgccgccgcccggcggccgactgccggaggggagggggcgtggccagagagcggaagtgcccggaacccggaagtgcgagctggcgcgcagctgcagtctgggagtctttggagtaagaatggccttggaagggatgagcaaacggaagagaaagagaagtgtccaggagggagagaatcctgacgacggcgttcgcgggagtccgccggaagactacaggcttggacaggtcgccagtagcttatttcgcggcgaacaccattccagaggtggcaccggtcggctggcgtccctcttcagttctctggagccccagattcaacccgtgtacgtgcctgtgcctaaacaaaccatcaaaaaaacgaaacggaatgaggaggaagaaagtacatcccagattgaaagaccactttcgcaagaacctgccaaaaaagtgaaagcgaagaagaaacacactaacgcagaaaaaaagttggcagacagggaaagcgctctagcgagtgctgatttagaagaagaaattcaccagaaacaagggcagaaaaggaaaaattctcaacctggtgttaaagtagcagatagaaaaatacttgatgacacagaagacacagttgtcagtcaaagaaagaaaattcaaatcaaccaagaagaagagagattaaagaatgagagaactgtgtttgttgggaatttgcctgttacatgtaataagaagaagctgaagtcgttttttaaagagtatggacaaatagaatctgtacgatttcgttctctgattccagcagagggaacgctatccaaaaagttggcagcaataaaacgtaaaattcatcctgatcagaaaaatattaatgcctatgttgtgtttaaggaggagagtgctgccacgcaagcattgaaaagaaatggggcccagattgcagatggatttcgtattagagttgatctcgcatctgagacctcatctagagacaagagatcggtttttgtggggaatctcccttataaagttgaagaatctgccattgagaagcactttctggactgtggaagtatcatggccgtgaggattgtgagagacaaaatgacaggcatcggcaaagggtttggctatgtgctctttgagaatacagattctgttcatcttgctctgaaattaaataattctgaactcatggggagaaaactcagagtcatgcgttctgttaataaagaaaaatttaaacaacaaaattcaaatccacgattgaagaatgtcagtaaacctaagcagggacttaattttacttccaaaactgcagaaggacatcctaaaagcttatttattggagaaaaagctgttctccttaaaacgaagaagaaaggacagaagaaaagtggacgccctaagaaacagagaaaacagaaataacaaccaggaactgctttttcttttcctgctgagtactgctaataaaagtgctattatctgctgatagcatcgtctgct

SEQ ID NO: 7408 - protein, 977 aa, Homo sapiens
MEDRGTPINKRPVLGYRNLNLFKLFRLVHKLGGFDNIESGAVWKQVYQDLGIPVLNSAAGYNVKCAYKKYLYGFEEYCRSANIEFQMALPEKVVNKQCKECENVKEIKVKEENETEIKEIKMEEERNIIPREEKPIEDEIERKENIKPSLGSKKNLLESIPTHSDQEKEVNIKKPEDNENLDDKDDDTTRVDESLNIKVEAEEEKAKSGYDEWIKADKIVRPADKNVPKIKHRKKIKNKLDKEKDKDEKYSPKNCKLRRLSKPPFQTNPSPEMVSKLDLTDAKNSDTAHIKSIEITSILNGLQASESSAEDSEQEDERGAQDMDNNGKEESKIDHLTNNRNDLISKEEQNSSSLLEENKVHADLVISKPVSKSPERLRKDIEVLSEDTDYEEDEVTKKRKDVKKDTTDKSSKPQIKRGKRRYCNTEECLKTGSPGKKEEKAKNKESLCMENSSNSSSDEDEEETKAKMTPTKKYNGLEEKRKSLRTTGFYSGFSEVAEKRIKLLNNSDERLQNSRAKDRKDVWSSIQGQWPKKTLKELFSDSDTEAAASPPHPAPEEGVAEESLQTVAEEESCSPSVELEKPPPVNVDSKPIEEKTVEVNDRKAEFPSSGSNSVLNTPPTTPESPSSVTVTEGSRQQSSVTVSEPLAPNQEEVRSIKSETDSTIEVDSVAGELQDLQSEGNSSPAGFDASVSSSSSNQPEPEHPEKACTGQKRVKDAQGGGSSSKKQKRSHKATVVNNKKKGKGTNSSDSEELSAGESITKSQPVKSVSTGMKSHSTKSPARTQSPGKCGKNGDKDPDLKEPSNRLPKVYKWSFQMSDLENMTSAERITILQEKLQEIRKHYLSLKSEVASIDRRRKRLKKKERESAATSSSSSSPSSSSITAAVMLTLAEPSMSSASQNGMLQPLPEDVLHSQNEAFLKRRGPPTDGDKPAPSPSASLRRRPAADCRRGGGVARERKCPEPGSASWRAAAVWESLE

SEQ ID NO: 7409 - DNA, 5785 bp, Homo sapiens
gcagccgctggacccgccgcccttcttccccatctctcccccgggcctgctggttttgggggggagaaggagagaggggactctggacgtgccagggtcagatctcgcctccgaggaaggtgcagctgaacctggtgttttagaggataccttggtcccagagtcatcatgaaggctggagtgcagtggtgcaatctcagcttactgcaatctccgtctcctgagttcaagcagttctgcctcagcctcctgagtagctgtgactacaggcccttgatgagcctccctatttgacagtgggcactgatgtgagtgctaaatacagaggagccttttgtgaagccaagatcaagacagcaaaaagacttgtcaaagtcaaggtgacatttagacatgattcttcaacagtggaagttcaggatgaccacataaagggcccactaaaggtaggagctattgtggaagtgaagaatcttgatggtgcatatcaggaagctgttatcaataaactaacagatgcgagttggtacactgtagtttttgatgacggagatgagaagacactgagacgatcttcactgtgcctgaaaggagagaggcattttgctgaaagtgaaacattagaccagctcccactcaccaaccctgagcattttggcactccagtcataggaaagaaaacaaatagaggaagaagatctaatcatataccagaggaagagtcttcatcatcctccagtgatgaagatgaggatgataggaaacagattgatgagctactaggcaaagttgtatgtgtagattacattagtttggataaaaagaaagcactgtggtttcctgcattggtggtttgtcctgattgtagtgatgagattgctgtaaaaaaggacaatattcttgttcgatctttcaaagatggaaaatttacttcagttccaagaaaagatgtccatgaaattactagtgacactgcaccaaagcctgatgctgttttaaagcaagcctttgaacaggcacttgaatttcacaaaagtagaactattcctgctaactggaagactgaattgaaagaagatagctctagcagtgaagcagaggaagaagaggaggaggaagatgatgaaaaagaaaaggaggataatagcagtgaagaagaagaagaaatagaaccatttccagaagaaagggagaactttcttcagcaattgtacaaatttatggaagatagaggtacacctattaacaaacgacctgtacttggatatcgaaatttgaatctctttaagttattcagacttgtacacaaacttggaggatttgataatattgaaagtggagctgtttggaaacaagtctaccaagatcttggaatccctgtcttaaattcagctgcaggatacaatgttaaatgtgcttataaaaaatacttatatggttttgaggagtactgtagatcagccaacattgaatttcagatggcattgccagagaaagttgttaacaagcaatgtaaggagtgtgaaaatgtaaaagaaataaaagttaaggaggaaaatgaaacagagatcaaagaaataaagatggaggaggagaggaatataataccaagagaagaaaagcctattgaggatgaaattgaaagaaaagaaaatattaagccctctctgggaagtaaaaagaatttattagaatctatacctacacattctgatcaggaaaaagaagttaacattaaaaaaccagaagacaatgaaaatctggatgacaaagatgatgacacaactagggtagatgaatccctcaacataaaggtagaagctgaggaagaaaaagcaaaatctggagatgaaacgaataaagaagaagatgaagatgatgaagaagcagaagaggaggaggaggaggaagaagaagaagaggatgaagatgatgatgacaacaatgaggaagaggagtttgagtgctatccaccaggcatgaaagtccaagtgcggtatggacgagggaaaaatcaaaaaatgtatgaagctagtattaaagattctgatgtcgaaggtggagaggtcctttacttggtgcattactgcggatggaatgtgagatacgatgaatggattaaagcagataaaatagtaagacctgctgataaaaatgtgccaaagataaaacatcggaagaaaataaagaataaattagacaaagaaaaagacaaagatgaaaaatactctccaaaaaactgtaaacttcggcgcttgtccaaaccaccatttcagacaaatccatctcctgaaatggtatccaaactggatctcactgatgccaaaaactctgatactgctcatattaagtccatagaaattacttcgatccttaatggacttcaagcttctgaaagttctgctgaagacagtgagcaggaagatgagagaggtgctcaagacatggataataatggcaaagaggaatctaagattgatcatttgaccaacaacagaaatgatcttatttcaaaggaggaacagaacagttcatctttgctagaagaaaacaaagttcatgcagatttggtaatatccaaaccagtgtcaaaatctccagaaagattaaggaaagatatagaagtattatccgaagatactgattatgaagaagatgaagtcacaaaaaagagaaaggatgtcaagaaggacacaacagataaatcttcaaaaccacaaataaaacgtggtaaaagaaggtattgcaatacagaagagtgtctaaaaactggatcacctggcaaaaaggaagagaaggccaagaacaaagaatcactttgcatggaaaacagtagcaacagctcttcagatgaagatgaagaagaaacaaaagcaaagatgacaccaactaagaaatacaatggtttggaggaaaaaagaaaatctctacggacaactggtttctattcaggattttcagaagtggcagaaaaaaggattaaacttttaaataactctgatgaaagacttcaaaacagcagggccaaagatcgaaaagatgtctggtcaagtattcagggacagtggcctaaaaaaacgctgaaagagcttttttcagactctgatactgaggctgcagcttccccaccgcatcctgccccagaggagggggtggcagaggagtcactgcagactgtggctgaagaggagagttgttcacccagtgtagaactagaaaaaccacctccagtcaatgtcgatagtaaacccattgaagaaaaaacagtagaggtcaatgacagaaaagcagaatttccaagtagtggcagtaattcagtgctaaatacccctcctactacacctgaatcgccttcatcagtcactgtaacagaaggcagccggcagcagtcttctgtaacagtatcagaaccactggctccaaaccaagaagaggttcgaagtatcaagagtgaaactgatagcacaattgaggtggatagtgttgctggggagctccaagacctccagtctgaagggaatagctcgccagcaggttttgatgccagtgtgagctcaagcagtagtaatcagccagaaccagaacatcctgaaaaagcctgtacaggtcagaaaagagtgaaagatgctcagggaggaggaagttcatcaaaaaagcagaaaagaagccataaagcaacagtggtaaacaacaaaaagaagggaaaaggcacaaatagtagtgatagtgaagaactttcagctggtgaaagtataactaagagtcagccagtcaaatcagtttccactggaatgaagtctcatagtaccaaatctcccgcaaggacgcagtctccaggaaaatgtggaaagaatggtgataaggatcctgatctcaaggaacccagtaatcgattacccaaagtttacaaatggagttttcagatgtcggacctggaaaatatgacaagtgccgaacgcatcacaattcttcaagaaaaacttcaagaaatcagaaaacattatctgtcattaaaatctgaagtagcttccattgatcggaggagaaagcgtttaaagaagaaagagagagaaagtgctgctacatcctcatcctcctcttcaccttcatccagttccataacagctgctgttatgttaactttagctgaaccgtcaatgtccagcgcatcacaaaatggaatgcttcaaccactcccagaagacgtccttcactcccaaaatgaggcttttctgaaacggcgaggaccaccaaccgacggcgacaaacctgctccctcacccagcgcctcccttcgccgccgcccggcggccgactgccggaggggagggggcgtggccagagagcggaagtgcccggaacccggaagtgcgagctggcgcgcagctgcagtctgggagtctttggagtaagaatggccttggaagggatgagcaaacggaagagaaagagaagtgtccaggagggagagaatcctgacgacggcgttcgcgggagtccgccggaagactacaggcttggacaggtcgccagtagcttatttcgcggcgaacaccattccagaggtggcaccggtcggctggcgtccctcttcagttctctggagccccagattcaacccgtgtacgtgcctgtgcctaaacaaaccatcaaaaaaacgaaacggaatgaggaggaagaaagtacatcccagattgaaagaccactttcgcaagaacctgccaaaaaagtgaaagcgaagaagaaacacactaacgcagaaaaaaagttggcagacagggaaagcgctctagcgagtgctgatttagaagaagaaattcaccagaaacaagggcagaaaaggaaaaattctcaacctggtgttaaagtagcagatagaaaaatacttgatgacacagaagacacagttgtcagtcaaagaaagaaaattcaaatcaaccaagaagaagagagattaaagaatgagagaactgtgtttgttgggaatttgcctgttacatgtaataagaagaagctgaagtcgttttttaaagagtatggacaaatagaatctgtacgatttcgttctctgattccagcagagggaacgctatccaaaaagttggcagcaataaaacgtaaaattcatcctgatcagaaaaatattaatgcctatgttgtgtttaaggaggagagtgctgccacgcaagcattgaaaagaaatggggcccagattgcagatggatttcgtattagagttgatctcgcatctgagacctcatctagagacaagagatcggtttttgtggggaatctcccttataaagttgaagaatctgccattgagaagcactttctggactgtggaagtatcatggccgtgaggattgtgagagacaaaatgacaggcatcggcaaagggtttggctatgtgctctttgagaatacagattctgttcatcttgctctgaaattaaataattctgaactcatggggagaaaactcagagtcatgcgttctgttaataaagaaaaatttaaacaacaaaattcaaatccacgattgaagaatgtcagtaaacctaagcagggacttaattttacttccaaaactgcagaaggacatcctaaaagcttatttattggagaaaaagctgttctccttaaaacgaagaagaaaggacagaagaaaagtggacgccctaagaaacagagaaaacagaaataacaaccaggaactgctttttcttttcctgctgagtactgctaataaaagtgctattatctgctgatagcatcgtctgct

SEQ ID NO: 7410 - protein, 1063 aa, Homo sapiens
MEDRGTPINKRPVLGYRNLNLFKLFRLVHKLGGFDNIESGAVWKQVYQDLGIPVLNSAAGYNVKCAYKKYLYGFEEYCRSANIEFQMALPEKVVNKQCKECENVKEIKVKEENETEIKEIKMEEERNIIPREEKPIEDEIERKENIKPSLGSKKNLLESIPTHSDQEKEVNIKKPEDNENLDDKDDDTTRVDESLNIKVEAEEEKAKSGDETNKEEDEDDEEAEEEEEEEEEEEDEDDDDNNEEEEFECYPPGMKVQVRYGRGKNQKMYEASIKDSDVEGGEVLYLVHYCGWNVRYDEWIKADKIVRPADKNVPKIKHRKKIKNKLDKEKDKDEKYSPKNCKLRRLSKPPFQTNPSPEMVSKLDLTDAKNSDTAHIKSIEITSILNGLQASESSAEDSEQEDERGAQDMDNNGKEESKIDHLTNNRNDLISKEEQNSSSLLEENKVHADLVISKPVSKSPERLRKDIEVLSEDTDYEEDEVTKKRKDVKKDTTDKSSKPQIKRGKRRYCNTEECLKTGSPGKKEEKAKNKESLCMENSSNSSSDEDEEETKAKMTPTKKYNGLEEKRKSLRTTGFYSGFSEVAEKRIKLLNNSDERLQNSRAKDRKDVWSSIQGQWPKKTLKELFSDSDTEAAASPPHPAPEEGVAEESLQTVAEEESCSPSVELEKPPPVNVDSKPIEEKTVEVNDRKAEFPSSGSNSVLNTPPTTPESPSSVTVTEGSRQQSSVTVSEPLAPNQEEVRSIKSETDSTIEVDSVAGELQDLQSEGNSSPAGFDASVSSSSSNQPEPEHPEKACTGQKRVKDAQGGGSSSKKQKRSHKATVVNNKKKGKGTNSSDSEELSAGESITKSQPVKSVSTGMKSHSTKSPARTQSPGKCGKNGDKDPDLKEPSNRLPKVYKWSFQMSDLENMTSAERITILQEKLQEIRKHYLSLKSEVASIDRRRKRLKKKERESAATSSSSSSPSSSSITAAVMLTLAEPSMSSASQNGMLQPLPEDVLHSQNEAFLKRRGPPTDGDKPAPSPSASLRRRPAADCRRGGGVARERKCPEPGSASWRAAAVWESLE

SEQ ID NO: 7411 - DNA, 4636 bp, Homo sapiens
gcggagggagactcttgagcttcatcttgccgccgccacggccaccgcctggacctttgcccggagggagctgcagagggtccatcgccgccgtcctctggagggcagcgcgattgggggcccggacctccagtccgggggggatttttcgtcgtccccctccccccaaccagggagcccgagcggccgccaaacaaaggtaccagtcgccgccgcgggaggaggaagatgatgaaaaagaaaaggaggataatagcagtgaagaagaagaagaaatagaaccatttccagaagaaagggagaactttcttcagcaattgtacaaatttatggaagatagaggtacacctattaacaaacgacctgtacttggatatcgaaatttgaatctctttaagttattcagacttgtacacaaacttggaggatttgataatattgaaagtggagctgtttggaaacaagtctaccaagatcttggaatccctgtcttaaattcagctgcaggatacaatgttaaatgtgcttataaaaaatacttatatggttttgaggagtactgtagatcagccaacattgaatttcagatggcattgccagagaaagttgttaacaagcaatgtaaggagtgtgaaaatgtaaaagaaataaaagttaaggaggaaaatgaaacagagatcaaagaaataaagatggaggaggagaggaatataataccaagagaagaaaagcctattgaggatgaaattgaaagaaaagaaaatattaagccctctctgggaagtaaaaagaatttattagaatctatacctacacattctgatcaggaaaaagaagttaacattaaaaaaccagaagacaatgaaaatctggatgacaaagatgatgacacaactagggtagatgaatccctcaacataaaggtagaagctgaggaagaaaaagcaaaatctggatacgatgaatggattaaagcagataaaatagtaagacctgctgataaaaatgtgccaaagataaaacatcggaagaaaataaagaataaattagacaaagaaaaagacaaagatgaaaaatactctccaaaaaactgtaaacttcggcgcttgtccaaaccaccatttcagacaaatccatctcctgaaatggtatccaaactggatctcactgatgccaaaaactctgatactgctcatattaagtccatagaaattacttcgatccttaatggacttcaagcttctgaaagttctgctgaagacagtgagcaggaagatgagagaggtgctcaagacatggataataatggcaaagaggaatctaagattgatcatttgaccaacaacagaaatgatcttatttcaaaggaggaacagaacagttcatctttgctagaagaaaacaaagttcatgcagatttggtaatatccaaaccagtgtcaaaatctccagaaagattaaggaaagatatagaagtattatccgaagatactgattatgaagaagatgaagtcacaaaaaagagaaaggatgtcaagaaggacacaacagataaatcttcaaaaccacaaataaaacgtggtaaaagaaggtattgcaatacagaagagtgtctaaaaactggatcacctggcaaaaaggaagagaaggccaagaacaaagaatcactttgcatggaaaacagtagcaacagctcttcagatgaagatgaagaagaaacaaaagcaaagatgacaccaactaagaaatacaatggtttggaggaaaaaagaaaatctctacggacaactggtttctattcaggattttcagaagtggcagaaaaaaggattaaacttttaaataactctgatgaaagacttcaaaacagcagggccaaagatcgaaaagatgtctggtcaagtattcagggacagtggcctaaaaaaacgctgaaagagcttttttcagactctgatactgaggctgcagcttccccaccgcatcctgccccagaggagggggtggcagaggagtcactgcagactgtggctgaagaggagagttgttcacccagtgtagaactagaaaaaccacctccagtcaatgtcgatagtaaacccattgaagaaaaaacagtagaggtcaatgacagaaaagcagaatttccaagtagtggcagtaattcagtgctaaatacccctcctactacacctgaatcgccttcatcagtcactgtaacagaaggcagccggcagcagtcttctgtaacagtatcagaaccactggctccaaaccaagaagaggttcgaagtatcaagagtgaaactgatagcacaattgaggtggatagtgttgctggggagctccaagacctccagtctgaagggaatagctcgccagcaggttttgatgccagtgtgagctcaagcagtagtaatcagccagaaccagaacatcctgaaaaagcctgtacaggtcagaaaagagtgaaagatgctcagggaggaggaagttcatcaaaaaagcagaaaagaagccataaagcaacagtggtaaacaacaaaaagaagggaaaaggcacaaatagtagtgatagtgaagaactttcagctggtgaaagtataactaagagtcagccagtcaaatcagtttccactggaatgaagtctcatagtaccaaatctcccgcaaggacgcagtctccaggaaaatgtggaaagaatggtgataaggatcctgatctcaaggaacccagtaatcgattacccaaagtttacaaatggagttttcagatgtcggacctggaaaatatgacaagtgccgaacgcatcacaattcttcaagaaaaacttcaagaaatcagaaaacattatctgtcattaaaatctgaagtagcttccattgatcggaggagaaagcgtttaaagaagaaagagagagaaagtgctgctacatcctcatcctcctcttcaccttcatccagttccataacagctgctgttatgttaactttagctgaaccgtcaatgtccagcgcatcacaaaatggaatgcttcaaccactcccagaagacgtccttcactcccaaaatgaggcttttctgaaacggcgaggaccaccaaccgacggcgacaaacctgctccctcacccagcgcctcccttcgccgccgcccggcggccgactgccggaggggagggggcgtggccagagagcggaagtgcccggaacccggaagtgcgagctggcgcgcagctgcagtctgggagtctttggagtaagaatggccttggaagggatgagcaaacggaagagaaagagaagtgtccaggagggagagaatcctgacgacggcgttcgcgggagtccgccggaagactacaggcttggacaggtcgccagtagcttatttcgcggcgaacaccattccagaggtggcaccggtcggctggcgtccctcttcagttctctggagccccagattcaacccgtgtacgtgcctgtgcctaaacaaaccatcaaaaaaacgaaacggaatgaggaggaagaaagtacatcccagattgaaagaccactttcgcaagaacctgccaaaaaagtgaaagcgaagaagaaacacactaacgcagaaaaaaagttggcagacagggaaagcgctctagcgagtgctgatttagaagaagaaattcaccagaaacaagggcagaaaaggaaaaattctcaacctggtgttaaagtagcagatagaaaaatacttgatgacacagaagacacagttgtcagtcaaagaaagaaaattcaaatcaaccaagaagaagagagattaaagaatgagagaactgtgtttgttgggaatttgcctgttacatgtaataagaagaagctgaagtcgttttttaaagagtatggacaaatagaatctgtacgatttcgttctctgattccagcagagggaacgctatccaaaaagttggcagcaataaaacgtaaaattcatcctgatcagaaaaatattaatgcctatgttgtgtttaaggaggagagtgctgccacgcaagcattgaaaagaaatggggcccagattgcagatggatttcgtattagagttgatctcgcatctgagacctcatctagagacaagagatcggtttttgtggggaatctcccttataaagttgaagaatctgccattgagaagcactttctggactgtggaagtatcatggccgtgaggattgtgagagacaaaatgacaggcatcggcaaagggtttggctatgtgctctttgagaatacagattctgttcatcttgctctgaaattaaataattctgaactcatggggagaaaactcagagtcatgcgttctgttaataaagaaaaatttaaacaacaaaattcaaatccacgattgaagaatgtcagtaaacctaagcagggacttaattttacttccaaaactgcagaaggacatcctaaaagcttatttattggagaaaaagctgttctccttaaaacgaagaagaaaggacagaagaaaagtggacgccctaagaaacagagaaaacagaaataacaaccaggaactgctttttcttttcctgctgagtactgctaataaaagtgctattatctgctgatagcatcgtctgct

SEQ ID NO: 7412 - protein, 977 aa, Homo sapiens; identical to SEQ ID NO: 7408

SEQ ID NO: 7413 - DNA, 4894 bp, Homo sapiens
gcggagggagactcttgagcttcatcttgccgccgccacggccaccgcctggacctttgcccggagggagctgcagagggtccatcgccgccgtcctctggagggcagcgcgattgggggcccggacctccagtccgggggggatttttcgtcgtccccctccccccaaccagggagcccgagcggccgccaaacaaaggtaccagtcgccgccgcgggaggaggaagatgatgaaaaagaaaaggaggataatagcagtgaagaagaagaagaaatagaaccatttccagaagaaagggagaactttcttcagcaattgtacaaatttatggaagatagaggtacacctattaacaaacgacctgtacttggatatcgaaatttgaatctctttaagttattcagacttgtacacaaacttggaggatttgataatattgaaagtggagctgtttggaaacaagtctaccaagatcttggaatccctgtcttaaattcagctgcaggatacaatgttaaatgtgcttataaaaaatacttatatggttttgaggagtactgtagatcagccaacattgaatttcagatggcattgccagagaaagttgttaacaagcaatgtaaggagtgtgaaaatgtaaaagaaataaaagttaaggaggaaaatgaaacagagatcaaagaaataaagatggaggaggagaggaatataataccaagagaagaaaagcctattgaggatgaaattgaaagaaaagaaaatattaagccctctctgggaagtaaaaagaatttattagaatctatacctacacattctgatcaggaaaaagaagttaacattaaaaaaccagaagacaatgaaaatctggatgacaaagatgatgacacaactagggtagatgaatccctcaacataaaggtagaagctgaggaagaaaaagcaaaatctggagatgaaacgaataaagaagaagatgaagatgatgaagaagcagaagaggaggaggaggaggaagaagaagaagaggatgaagatgatgatgacaacaatgaggaagaggagtttgagtgctatccaccaggcatgaaagtccaagtgcggtatggacgagggaaaaatcaaaaaatgtatgaagctagtattaaagattctgatgtcgaaggtggagaggtcctttacttggtgcattactgcggatggaatgtgagatacgatgaatggattaaagcagataaaatagtaagacctgctgataaaaatgtgccaaagataaaacatcggaagaaaataaagaataaattagacaaagaaaaagacaaagatgaaaaatactctccaaaaaactgtaaacttcggcgcttgtccaaaccaccatttcagacaaatccatctcctgaaatggtatccaaactggatctcactgatgccaaaaactctgatactgctcatattaagtccatagaaattacttcgatccttaatggacttcaagcttctgaaagttctgctgaagacagtgagcaggaagatgagagaggtgctcaagacatggataataatggcaaagaggaatctaagattgatcatttgaccaacaacagaaatgatcttatttcaaaggaggaacagaacagttcatctttgctagaagaaaacaaagttcatgcagatttggtaatatccaaaccagtgtcaaaatctccagaaagattaaggaaagatatagaagtattatccgaagatactgattatgaagaagatgaagtcacaaaaaagagaaaggatgtcaagaaggacacaacagataaatcttcaaaaccacaaataaaacgtggtaaaagaaggtattgcaatacagaagagtgtctaaaaactggatcacctggcaaaaaggaagagaaggccaagaacaaagaatcactttgcatggaaaacagtagcaacagctcttcagatgaagatgaagaagaaacaaaagcaaagatgacaccaactaagaaatacaatggtttggaggaaaaaagaaaatctctacggacaactggtttctattcaggattttcagaagtggcagaaaaaaggattaaacttttaaataactctgatgaaagacttcaaaacagcagggccaaagatcgaaaagatgtctggtcaagtattcagggacagtggcctaaaaaaacgctgaaagagcttttttcagactctgatactgaggctgcagcttccccaccgcatcctgccccagaggagggggtggcagaggagtcactgcagactgtggctgaagaggagagttgttcacccagtgtagaactagaaaaaccacctccagtcaatgtcgatagtaaacccattgaagaaaaaacagtagaggtcaatgacagaaaagcagaatttccaagtagtggcagtaattcagtgctaaatacccctcctactacacctgaatcgccttcatcagtcactgtaacagaaggcagccggcagcagtcttctgtaacagtatcagaaccactggctccaaaccaagaagaggttcgaagtatcaagagtgaaactgatagcacaattgaggtggatagtgttgctggggagctccaagacctccagtctgaagggaatagctcgccagcaggttttgatgccagtgtgagctcaagcagtagtaatcagccagaaccagaacatcctgaaaaagcctgtacaggtcagaaaagagtgaaagatgctcagggaggaggaagttcatcaaaaaagcagaaaagaagccataaagcaacagtggtaaacaacaaaaagaagggaaaaggcacaaatagtagtgatagtgaagaactttcagctggtgaaagtataactaagagtcagccagtcaaatcagtttccactggaatgaagtctcatagtaccaaatctcccgcaaggacgcagtctccaggaaaatgtggaaagaatggtgataaggatcctgatctcaaggaacccagtaatcgattacccaaagtttacaaatggagttttcagatgtcggacctggaaaatatgacaagtgccgaacgcatcacaattcttcaagaaaaacttcaagaaatcagaaaacattatctgtcattaaaatctgaagtagcttccattgatcggaggagaaagcgtttaaagaagaaagagagagaaagtgctgctacatcctcatcctcctcttcaccttcatccagttccataacagctgctgttatgttaactttagctgaaccgtcaatgtccagcgcatcacaaaatggaatgcttcaaccactcccagaagacgtccttcactcccaaaatgaggcttttctgaaacggcgaggaccaccaaccgacggcgacaaacctgctccctcacccagcgcctcccttcgccgccgcccggcggccgactgccggaggggagggggcgtggccagagagcggaagtgcccggaacccggaagtgcgagctggcgcgcagctgcagtctgggagtctttggagtaagaatggccttggaagggatgagcaaacggaagagaaagagaagtgtccaggagggagagaatcctgacgacggcgttcgcgggagtccgccggaagactacaggcttggacaggtcgccagtagcttatttcgcggcgaacaccattccagaggtggcaccggtcggctggcgtccctcttcagttctctggagccccagattcaacccgtgtacgtgcctgtgcctaaacaaaccatcaaaaaaacgaaacggaatgaggaggaagaaagtacatcccagattgaaagaccactttcgcaagaacctgccaaaaaagtgaaagcgaagaagaaacacactaacgcagaaaaaaagttggcagacagggaaagcgctctagcgagtgctgatttagaagaagaaattcaccagaaacaagggcagaaaaggaaaaattctcaacctggtgttaaagtagcagatagaaaaatacttgatgacacagaagacacagttgtcagtcaaagaaagaaaattcaaatcaaccaagaagaagagagattaaagaatgagagaactgtgtttgttgggaatttgcctgttacatgtaataagaagaagctgaagtcgttttttaaagagtatggacaaatagaatctgtacgatttcgttctctgattccagcagagggaacgctatccaaaaagttggcagcaataaaacgtaaaattcatcctgatcagaaaaatattaatgcctatgttgtgtttaaggaggagagtgctgccacgcaagcattgaaaagaaatggggcccagattgcagatggatttcgtattagagttgatctcgcatctgagacctcatctagagacaagagatcggtttttgtggggaatctcccttataaagttgaagaatctgccattgagaagcactttctggactgtggaagtatcatggccgtgaggattgtgagagacaaaatgacaggcatcggcaaagggtttggctatgtgctctttgagaatacagattctgttcatcttgctctgaaattaaataattctgaactcatggggagaaaactcagagtcatgcgttctgttaataaagaaaaatttaaacaacaaaattcaaatccacgattgaagaatgtcagtaaacctaagcagggacttaattttacttccaaaactgcagaaggacatcctaaaagcttatttattggagaaaaagctgttctccttaaaacgaagaagaaaggacagaagaaaagtggacgccctaagaaacagagaaaacagaaataacaaccaggaactgctttttcttttcctgctgagtactgctaataaaagtgctattatctgctgatagcatcgtctgct

SEQ ID NO: 7414 - protein, 1063 aa, Homo sapiens; identical to SEQ ID NO: 7410

SEQ ID NO: 7415 - DNA, 5982 bp, Homo sapiens
gtttgcccgtcagtcgagtccggagtgaggagctcggtcgccgaagcggagggagactcttgagcttcatcttgccgccgccacggccaccgcctggacctttgcccggagggagctgcagagggtccatcgccgccgtcctctggagggcagcgcgattgggggcccggacctccagtccgggggggatttttcgtcgtccccctccccccaaccagggagcccgagcggccgccaaacaaaggtaccagtcgccgccgcgggaggaggaggagccggagcctctgcctcagcagccgctggacccgccgcccttcttccccatctctcccccgggcctgctggttttgggggggagaaggagagaggggactctggacgtgccagggtcagatctcgcctccgaggaaggtgcagctgaacctggtgttttagaggataccttggtcccagagtcatcatgaaggcccttgatgagcctccctatttgacagtgggcactgatgtgagtgctaaatacagaggagccttttgtgaagccaagatcaagacagcaaaaagacttgtcaaagtcaaggtgacatttagacatgattcttcaacagtggaagttcaggatgaccacataaagggcccactaaaggtaggagctattgtggaagtgaagaatcttgatggtgcatatcaggaagctgttatcaataaactaacagatgcgagttggtacactgtagtttttgatgacggagatgagaagacactgagacgatcttcactgtgcctgaaaggagagaggcattttgctgaaagtgaaacattagaccagctcccactcaccaaccctgagcattttggcactccagtcataggaaagaaaacaaatagaggaagaagatctaatcatataccagaggaagagtcttcatcatcctccagtgatgaagatgaggatgataggaaacagattgatgagctactaggcaaagttgtatgtgtagattacattagtttggataaaaagaaagcactgtggtttcctgcattggtggtttgtcctgattgtagtgatgagattgctgtaaaaaaggacaatattcttgttcgatctttcaaagatggaaaatttacttcagttccaagaaaagatgtccatgaaattactagtgacactgcaccaaagcctgatgctgttttaaagcaagcctttgaacaggcacttgaatttcacaaaagtagaactattcctgctaactggaagactgaattgaaagaagatagctctagcagtgaagcagaggaagaagaggaggaggaagatgatgaaaaagaaaaggaggataatagcagtgaagaagaagaagaaatagaaccatttccagaagaaagggagaactttcttcagcaattgtacaaatttatggaagatagaggtacacctattaacaaacgacctgtacttggatatcgaaatttgaatctctttaagttattcagacttgtacacaaacttggaggatttgataatattgaaagtggagctgtttggaaacaagtctaccaagatcttggaatccctgtcttaaattcagctgcaggatacaatgttaaatgtgcttataaaaaatacttatatggttttgaggagtactgtagatcagccaacattgaatttcagatggcattgccagagaaagttgttaacaagcaatgtaaggagtgtgaaaatgtaaaagaaataaaagttaaggaggaaaatgaaacagagatcaaagaaataaagatggaggaggagaggaatataataccaagagaagaaaagcctattgaggatgaaattgaaagaaaagaaaatattaagccctctctgggaagtaaaaagaatttattagaatctatacctacacattctgatcaggaaaaagaagttaacattaaaaaaccagaagacaatgaaaatctggatgacaaagatgatgacacaactagggtagatgaatccctcaacataaaggtagaagctgaggaagaaaaagcaaaatctggagatgaaacgaataaagaagaagatgaagatgatgaagaagcagaagaggaggaggaggaggaagaagaagaagaggatgaagatgatgatgacaacaatgaggaagaggagtttgagtgctatccaccaggcatgaaagtccaagtgcggtatggacgagggaaaaatcaaaaaatgtatgaagctagtattaaagattctgatgtcgaaggtggagaggtcctttacttggtgcattactgcggatggaatgtgagatacgatgaatggattaaagcagataaaatagtaagacctgctgataaaaatgtgccaaagataaaacatcggaagaaaataaagaataaattagacaaagaaaaagacaaagatgaaaaatactctccaaaaaactgtaaacttcggcgcttgtccaaaccaccatttcagacaaatccatctcctgaaatggtatccaaactggatctcactgatgccaaaaactctgatactgctcatattaagtccatagaaattacttcgatccttaatggacttcaagcttctgaaagttctgctgaagacagtgagcaggaagatgagagaggtgctcaagacatggataataatggcaaagaggaatctaagattgatcatttgaccaacaacagaaatgatcttatttcaaaggaggaacagaacagttcatctttgctagaagaaaacaaagttcatgcagatttggtaatatccaaaccagtgtcaaaatctccagaaagattaaggaaagatatagaagtattatccgaagatactgattatgaagaagatgaagtcacaaaaaagagaaaggatgtcaagaaggacacaacagataaatcttcaaaaccacaaataaaacgtggtaaaagaaggtattgcaatacagaagagtgtctaaaaactggatcacctggcaaaaaggaagagaaggccaagaacaaagaatcactttgcatggaaaacagtagcaacagctcttcagatgaagatgaagaagaaacaaaagcaaagatgacaccaactaagaaatacaatggtttggaggaaaaaagaaaatctctacggacaactggtttctattcaggattttcagaagtggcagaaaaaaggattaaacttttaaataactctgatgaaagacttcaaaacagcagggccaaagatcgaaaagatgtctggtcaagtattcagggacagtggcctaaaaaaacgctgaaagagcttttttcagactctgatactgaggctgcagcttccccaccgcatcctgccccagaggagggggtggcagaggagtcactgcagactgtggctgaagaggagagttgttcacccagtgtagaactagaaaaaccacctccagtcaatgtcgatagtaaacccattgaagaaaaaacagtagaggtcaatgacagaaaagcagaatttccaagtagtggcagtaattcagtgctaaatacccctcctactacacctgaatcgccttcatcagtcactgtaacagaaggcagccggcagcagtcttctgtaacagtatcagaaccactggctccaaaccaagaagaggttcgaagtatcaagagtgaaactgatagcacaattgaggtggatagtgttgctggggagctccaagacctccagtctgaagggaatagctcgccagcaggttttgatgccagtgtgagctcaagcagtagtaatcagccagaaccagaacatcctgaaaaagcctgtacaggtcagaaaagagtgaaagatgctcagggaggaggaagttcatcaaaaaagcagaaaagaagccataaagcaacagtggtaaacaacaaaaagaagggaaaaggcacaaatagtagtgatagtgaagaactttcagctggtgaaagtataactaagagtcagccagtcaaatcagtttccactggaatgaagtctcatagtaccaaatctcccgcaaggacgcagtctccaggaaaatgtggaaagaatggtgataaggatcctgatctcaaggaacccagtaatcgattacccaaagtttacaaatggagttttcagatgtcggacctggaaaatatgacaagtgccgaacgcatcacaattcttcaagaaaaacttcaagaaatcagaaaacattatctgtcattaaaatctgaagtagcttccattgatcggaggagaaagcgtttaaagaagaaagagagagaaagtgctgctacatcctcatcctcctcttcaccttcatccagttccataacagctgctgttatgttaactttagctgaaccgtcaatgtccagcgcatcacaaaatggaatgcttcaaccactcccagaagacgtccttcactcccaaaatgaggcttttctgaaacggcgaggaccaccaaccgacggcgacaaacctgctccctcacccagcgcctcccttcgccgccgcccggcggccgactgccggaggggagggggcgtggccagagagcggaagtgcccggaacccggaagtgcgagctggcgcgcagctgcagtctgggagtctttggagtaagaatggccttggaagggatgagcaaacggaagagaaagagaagtgtccaggagggagagaatcctgacgacggcgttcgcgggagtccgccggaagactacaggcttggacaggtcgccagtagcttatttcgcggcgaacaccattccagaggtggcaccggtcggctggcgtccctcttcagttctctggagccccagattcaacccgtgtacgtgcctgtgcctaaacaaaccatcaaaaaaacgaaacggaatgaggaggaagaaagtacatcccagattgaaagaccactttcgcaagaacctgccaaaaaagtgaaagcgaagaagaaacacactaacgcagaaaaaaagttggcagacagggaaagcgctctagcgagtgctgatttagaagaagaaattcaccagaaacaagggcagaaaaggaaaaattctcaacctggtgttaaagtagcagatagaaaaatacttgatgacacagaagacacagttgtcagtcaaagaaagaaaattcaaatcaaccaagaagaagagagattaaagaatgagagaactgtgtttgttgggaatttgcctgttacatgtaataagaagaagctgaagtcgttttttaaagagtatggacaaatagaatctgtacgatttcgttctctgattccagcagagggaacgctatccaaaaagttggcagcaataaaacgtaaaattcatcctgatcagaaaaatattaatgcctatgttgtgtttaaggaggagagtgctgccacgcaagcattgaaaagaaatggggcccagattgcagatggatttcgtattagagttgatctcgcatctgagacctcatctagagacaagagatcggtttttgtggggaatctcccttataaagttgaagaatctgccattgagaagcactttctggactgtggaagtatcatggccgtgaggattgtgagagacaaaatgacaggcatcggcaaagggtttggctatgtgctctttgagaatacagattctgttcatcttgctctgaaattaaataattctgaactcatggggagaaaactcagagtcatgcgttctgttaataaagaaaaatttaaacaacaaaattcaaatccacgattgaagaatgtcagtaaacctaagcagggacttaattttacttccaaaactgcagaaggacatcctaaaagcttatttattggagaaaaagctgttctccttaaaacgaagaagaaaggacagaagaaaagtggacgccctaagaaacagagaaaacagaaataacaaccaggaactgctttttcttttcctgctgagtactgctaataaaagtgctattatctgctgatagcatcgtctgct

SEQ ID NO: 7416 - protein, 1382 aa, Homo sapiens
MKALDEPPYLTVGTDVSAKYRGAFCEAKIKTAKRLVKVKVTFRHDSSTVEVQDDHIKGPLKVGAIVEVKNLDGAYQEAVINKLTDASWYTVVFDDGDEKTLRRSSLCLKGERHFAESETLDQLPLTNPEHFGTPVIGKKTNRGRRSNHIPEEESSSSSSDEDEDDRKQIDELLGKVVCVDYISLDKKKALWFPALVVCPDCSDEIAVKKDNILVRSFKDGKFTSVPRKDVHEITSDTAPKPDAVLKQAFEQALEFHKSRTIPANWKTELKEDSSSSEAEEEEEEEDDEKEKEDNSSEEEEEIEPFPEERENFLQQLYKFMEDRGTPINKRPVLGYRNLNLFKLFRLVHKLGGFDNIESGAVWKQVYQDLGIPVLNSAAGYNVKCAYKKYLYGFEEYCRSANIEFQMALPEKVVNKQCKECENVKEIKVKEENETEIKEIKMEEERNIIPREEKPIEDEIERKENIKPSLGSKKNLLESIPTHSDQEKEVNIKKPEDNENLDDKDDDTTRVDESLNIKVEAEEEKAKSGDETNKEEDEDDEEAEEEEEEEEEEEDEDDDDNNEEEEFECYPPGMKVQVRYGRGKNQKMYEASIKDSDVEGGEVLYLVHYCGWNVRYDEWIKADKIVRPADKNVPKIKHRKKIKNKLDKEKDKDEKYSPKNCKLRRLSKPPFQTNPSPEMVSKLDLTDAKNSDTAHIKSIEITSILNGLQASESSAEDSEQEDERGAQDMDNNGKEESKIDHLTNNRNDLISKEEQNSSSLLEENKVHADLVISKPVSKSPERLRKDIEVLSEDTDYEEDEVTKKRKDVKKDTTDKSSKPQIKRGKRRYCNTEECLKTGSPGKKEEKAKNKESLCMENSSNSSSDEDEEETKAKMTPTKKYNGLEEKRKSLRTTGFYSGFSEVAEKRIKLLNNSDERLQNSRAKDRKDVWSSIQGQWPKKTLKELFSDSDTEAAASPPHPAPEEGVAEESLQTVAEEESCSPSVELEKPPPVNVDSKPIEEKTVEVNDRKAEFPSSGSNSVLNTPPTTPESPSSVTVTEGSRQQSSVTVSEPLAPNQEEVRSIKSETDSTIEVDSVAGELQDLQSEGNSSPAGFDASVSSSSSNQPEPEHPEKACTGQKRVKDAQGGGSSSKKQKRSHKATVVNNKKKGKGTNSSDSEELSAGESITKSQPVKSVSTGMKSHSTKSPARTQSPGKCGKNGDKDPDLKEPSNRLPKVYKWSFQMSDLENMTSAERITILQEKLQEIRKHYLSLKSEVASIDRRRKRLKKKERESAATSSSSSSPSSSSITAAVMLTLAEPSMSSASQNGMLQPLPEDVLHSQNEAFLKRRGPPTDGDKPAPSPSASLRRRPAADCRRGGGVARERKCPEPGSASWRAAAVWESLE

SEQ ID NO: 7417 - DNA, 5724 bp, Homo sapiens
gtttgcccgtcagtcgagtccggagtgaggagctcggtcgccgaagcggagggagactcttgagcttcatcttgccgccgccacggccaccgcctggacctttgcccggagggagctgcagagggtccatcgccgccgtcctctggagggcagcgcgattgggggcccggacctccagtccgggggggatttttcgtcgtccccctccccccaaccagggagcccgagcggccgccaaacaaaggtaccagtcgccgccgcgggaggaggaggagccggagcctctgcctcagcagccgctggacccgccgcccttcttccccatctctcccccgggcctgctggttttgggggggagaaggagagaggggactctggacgtgccagggtcagatctcgcctccgaggaaggtgcagctgaacctggtgttttagaggataccttggtcccagagtcatcatgaaggcccttgatgagcctccctatttgacagtgggcactgatgtgagtgctaaatacagaggagccttttgtgaagccaagatcaagacagcaaaaagacttgtcaaagtcaaggtgacatttagacatgattcttcaacagtggaagttcaggatgaccacataaagggcccactaaaggtaggagctattgtggaagtgaagaatcttgatggtgcatatcaggaagctgttatcaataaactaacagatgcgagttggtacactgtagtttttgatgacggagatgagaagacactgagacgatcttcactgtgcctgaaaggagagaggcattttgctgaaagtgaaacattagaccagctcccactcaccaaccctgagcattttggcactccagtcataggaaagaaaacaaatagaggaagaagatctaatcatataccagaggaagagtcttcatcatcctccagtgatgaagatgaggatgataggaaacagattgatgagctactaggcaaagttgtatgtgtagattacattagtttggataaaaagaaagcactgtggtttcctgcattggtggtttgtcctgattgtagtgatgagattgctgtaaaaaaggacaatattcttgttcgatctttcaaagatggaaaatttacttcagttccaagaaaagatgtccatgaaattactagtgacactgcaccaaagcctgatgctgttttaaagcaagcctttgaacaggcacttgaatttcacaaaagtagaactattcctgctaactggaagactgaattgaaagaagatagctctagcagtgaagcagaggaagaagaggaggaggaagatgatgaaaaagaaaaggaggataatagcagtgaagaagaagaagaaatagaaccatttccagaagaaagggagaactttcttcagcaattgtacaaatttatggaagatagaggtacacctattaacaaacgacctgtacttggatatcgaaatttgaatctctttaagttattcagacttgtacacaaacttggaggatttgataatattgaaagtggagctgtttggaaacaagtctaccaagatcttggaatccctgtcttaaattcagctgcaggatacaatgttaaatgtgcttataaaaaatacttatatggttttgaggagtactgtagatcagccaacattgaatttcagatggcattgccagagaaagttgttaacaagcaatgtaaggagtgtgaaaatgtaaaagaaataaaagttaaggaggaaaatgaaacagagatcaaagaaataaagatggaggaggagaggaatataataccaagagaagaaaagcctattgaggatgaaattgaaagaaaagaaaatattaagccctctctgggaagtaaaaagaatttattagaatctatacctacacattctgatcaggaaaaagaagttaacattaaaaaaccagaagacaatgaaaatctggatgacaaagatgatgacacaactagggtagatgaatccctcaacataaaggtagaagctgaggaagaaaaagcaaaatctggatacgatgaatggattaaagcagataaaatagtaagacctgctgataaaaatgtgccaaagataaaacatcggaagaaaataaagaataaattagacaaagaaaaagacaaagatgaaaaatactctccaaaaaactgtaaacttcggcgcttgtccaaaccaccatttcagacaaatccatctcctgaaatggtatccaaactggatctcactgatgccaaaaactctgatactgctcatattaagtccatagaaattacttcgatccttaatggacttcaagcttctgaaagttctgctgaagacagtgagcaggaagatgagagaggtgctcaagacatggataataatggcaaagaggaatctaagattgatcatttgaccaacaacagaaatgatcttatttcaaaggaggaacagaacagttcatctttgctagaagaaaacaaagttcatgcagatttggtaatatccaaaccagtgtcaaaatctccagaaagattaaggaaagatatagaagtattatccgaagatactgattatgaagaagatgaagtcacaaaaaagagaaaggatgtcaagaaggacacaacagataaatcttcaaaaccacaaataaaacgtggtaaaagaaggtattgcaatacagaagagtgtctaaaaactggatcacctggcaaaaaggaagagaaggccaagaacaaagaatcactttgcatggaaaacagtagcaacagctcttcagatgaagatgaagaagaaacaaaagcaaagatgacaccaactaagaaatacaatggtttggaggaaaaaagaaaatctctacggacaactggtttctattcaggattttcagaagtggcagaaaaaaggattaaacttttaaataactctgatgaaagacttcaaaacagcagggccaaagatcgaaaagatgtctggtcaagtattcagggacagtggcctaaaaaaacgctgaaagagcttttttcagactctgatactgaggctgcagcttccccaccgcatcctgccccagaggagggggtggcagaggagtcactgcagactgtggctgaagaggagagttgttcacccagtgtagaactagaaaaaccacctccagtcaatgtcgatagtaaacccattgaagaaaaaacagtagaggtcaatgacagaaaagcagaatttccaagtagtggcagtaattcagtgctaaatacccctcctactacacctgaatcgccttcatcagtcactgtaacagaaggcagccggcagcagtcttctgtaacagtatcagaaccactggctccaaaccaagaagaggttcgaagtatcaagagtgaaactgatagcacaattgaggtggatagtgttgctggggagctccaagacctccagtctgaagggaatagctcgccagcaggttttgatgccagtgtgagctcaagcagtagtaatcagccagaaccagaacatcctgaaaaagcctgtacaggtcagaaaagagtgaaagatgctcagggaggaggaagttcatcaaaaaagcagaaaagaagccataaagcaacagtggtaaacaacaaaaagaagggaaaaggcacaaatagtagtgatagtgaagaactttcagctggtgaaagtataactaagagtcagccagtcaaatcagtttccactggaatgaagtctcatagtaccaaatctcccgcaaggacgcagtctccaggaaaatgtggaaagaatggtgataaggatcctgatctcaaggaacccagtaatcgattacccaaagtttacaaatggagttttcagatgtcggacctggaaaatatgacaagtgccgaacgcatcacaattcttcaagaaaaacttcaagaaatcagaaaacattatctgtcattaaaatctgaagtagcttccattgatcggaggagaaagcgtttaaagaagaaagagagagaaagtgctgctacatcctcatcctcctcttcaccttcatccagttccataacagctgctgttatgttaactttagctgaaccgtcaatgtccagcgcatcacaaaatggaatgcttcaaccactcccagaagacgtccttcactcccaaaatgaggcttttctgaaacggcgaggaccaccaaccgacggcgacaaacctgctccctcacccagcgcctcccttcgccgccgcccggcggccgactgccggaggggagggggcgtggccagagagcggaagtgcccggaacccggaagtgcgagctggcgcgcagctgcagtctgggagtctttggagtaagaatggccttggaagggatgagcaaacggaagagaaagagaagtgtccaggagggagagaatcctgacgacggcgttcgcgggagtccgccggaagactacaggcttggacaggtcgccagtagcttatttcgcggcgaacaccattccagaggtggcaccggtcggctggcgtccctcttcagttctctggagccccagattcaacccgtgtacgtgcctgtgcctaaacaaaccatcaaaaaaacgaaacggaatgaggaggaagaaagtacatcccagattgaaagaccactttcgcaagaacctgccaaaaaagtgaaagcgaagaagaaacacactaacgcagaaaaaaagttggcagacagggaaagcgctctagcgagtgctgatttagaagaagaaattcaccagaaacaagggcagaaaaggaaaaattctcaacctggtgttaaagtagcagatagaaaaatacttgatgacacagaagacacagttgtcagtcaaagaaagaaaattcaaatcaaccaagaagaagagagattaaagaatgagagaactgtgtttgttgggaatttgcctgttacatgtaataagaagaagctgaagtcgttttttaaagagtatggacaaatagaatctgtacgatttcgttctctgattccagcagagggaacgctatccaaaaagttggcagcaataaaacgtaaaattcatcctgatcagaaaaatattaatgcctatgttgtgtttaaggaggagagtgctgccacgcaagcattgaaaagaaatggggcccagattgcagatggatttcgtattagagttgatctcgcatctgagacctcatctagagacaagagatcggtttttgtggggaatctcccttataaagttgaagaatctgccattgagaagcactttctggactgtggaagtatcatggccgtgaggattgtgagagacaaaatgacaggcatcggcaaagggtttggctatgtgctctttgagaatacagattctgttcatcttgctctgaaattaaataattctgaactcatggggagaaaactcagagtcatgcgttctgttaataaagaaaaatttaaacaacaaaattcaaatccacgattgaagaatgtcagtaaacctaagcagggacttaattttacttccaaaactgcagaaggacatcctaaaagcttatttattggagaaaaagctgttctccttaaaacgaagaagaaaggacagaagaaaagtggacgccctaagaaacagagaaaacagaaataacaaccaggaactgctttttcttttcctgctgagtactgctaataaaagtgctattatctgctgatagcatcgtctgct

SEQ ID NO: 7418 - protein, 1296 aa, Homo sapiens
MKALDEPPYLTVGTDVSAKYRGAFCEAKIKTAKRLVKVKVTFRHDSSTVEVQDDHIKGPLKVGAIVEVKNLDGAYQEAVINKLTDASWYTVVFDDGDEKTLRRSSLCLKGERHFAESETLDQLPLTNPEHFGTPVIGKKTNRGRRSNHIPEEESSSSSSDEDEDDRKQIDELLGKVVCVDYISLDKKKALWFPALVVCPDCSDEIAVKKDNILVRSFKDGKFTSVPRKDVHEITSDTAPKPDAVLKQAFEQALEFHKSRTIPANWKTELKEDSSSSEAEEEEEEEDDEKEKEDNSSEEEEEIEPFPEERENFLQQLYKFMEDRGTPINKRPVLGYRNLNLFKLFRLVHKLGGFDNIESGAVWKQVYQDLGIPVLNSAAGYNVKCAYKKYLYGFEEYCRSANIEFQMALPEKVVNKQCKECENVKEIKVKEENETEIKEIKMEEERNIIPREEKPIEDEIERKENIKPSLGSKKNLLESIPTHSDQEKEVNIKKPEDNENLDDKDDDTTRVDESLNIKVEAEEEKAKSGYDEWIKADKIVRPADKNVPKIKHRKKIKNKLDKEKDKDEKYSPKNCKLRRLSKPPFQTNPSPEMVSKLDLTDAKNSDTAHIKSIEITSILNGLQASESSAEDSEQEDERGAQDMDNNGKEESKIDHLTNNRNDLISKEEQNSSSLLEENKVHADLVISKPVSKSPERLRKDIEVLSEDTDYEEDEVTKKRKDVKKDTTDKSSKPQIKRGKRRYCNTEECLKTGSPGKKEEKAKNKESLCMENSSNSSSDEDEEETKAKMTPTKKYNGLEEKRKSLRTTGFYSGFSEVAEKRIKLLNNSDERLQNSRAKDRKDVWSSIQGQWPKKTLKELFSDSDTEAAASPPHPAPEEGVAEESLQTVAEEESCSPSVELEKPPPVNVDSKPIEEKTVEVNDRKAEFPSSGSNSVLNTPPTTPESPSSVTVTEGSRQQSSVTVSEPLAPNQEEVRSIKSETDSTIEVDSVAGELQDLQSEGNSSPAGFDASVSSSSSNQPEPEHPEKACTGQKRVKDAQGGGSSSKKQKRSHKATVVNNKKKGKGTNSSDSEELSAGESITKSQPVKSVSTGMKSHSTKSPARTQSPGKCGKNGDKDPDLKEPSNRLPKVYKWSFQMSDLENMTSAERITILQEKLQEIRKHYLSLKSEVASIDRRRKRLKKKERESAATSSSSSSPSSSSITAAVMLTLAEPSMSSASQNGMLQPLPEDVLHSQNEAFLKRRGPPTDGDKPAPSPSASLRRRPAADCRRGGGVARERKCPEPGSASWRAAAVWESLE

SEQ ID NO: 7419 - DNA, 1107 bp, Homo sapiens
ggcttcaaccactcccagaagacgtccttcactcccaaaatgaggcttttctgaaacggcgaggaccaccaaccgacggcgacaaacctgctccctcacccagcgcctcccttcgccgccgcccggcggccgactgccggaggggagggggcgtggccagagagcggaagtgcccggaacccggaagtgcgagctggcgcgcagctgcagtctgggagtctttggagtaagaatggccttggaagggatgagcaaacggaagagaaagagaagtgtccaggagggagagaatcctgacgacggcgttcgcgggagtccgccggaagactacaggcttggacaggtcgccagtagcttatttcgcggcgaacaccattccagaggtggcaccggtcggctggcgtccctcttcagttctctggagccccagattcaacccgtgtacgtgcctgtgcctaaacaaaccatcaaaaaaacgaaacggaatgaggaggaagaaagtacatcccagattgaaagaccactttcgcaagaacctgccaaaaaagtgaaagcgaagaagaaacacactaacgcagaaaaaaagttggcagacagggaaagcgctctagcgagtgctgatttagaagaagaaattcaccagaaacaagggcagaaaaggaaaaattctcaacctggtgttaaagtagcagatagaaaaatacttgatgacacagaagacacagttgtcagtcaaagaaagaaaattcaaatcaaccaagaagaagagagattaaagaatgagagaactgtgtttgttgggaatttgcctgttacatgtaataagaagaagctgaagtcgttttttaaagagtatggacaaatagaatctgtacgatttcgttctctggtatgtttcattcccccgtaaaattacataatattaaaatttattgcatttaaatcagatgaacttattgctgttagtgagatggtgaagcactttaaccttttgaatcaataggttcaaatttaacccaagaaaagagttgctcttactatctactgctgactcttgaactttttaaataatgtattgagtttacttaataaaatgatactcttgct

SEQ ID NO: 7420 - protein, 225 aa, Homo sapiens
MALEGMSKRKRKRSVQEGENPDDGVRGSPPEDYRLGQVASSLFRGEHHSRGGTGRLASLFSSLEPQIQPVYVPVPKQTIKKTKRNEEEESTSQIERPLSQEPAKKVKAKKKHTNAEKKLADRESALASADLEEEIHQKQGQKRKNSQPGVKVADRKILDDTEDTVVSQRKKIQINQEEERLKNERTVFVGNLPVTCNKKKLKSFFKEYGQIESVRFRSLVCFIPP

SEQ ID NO: 7421 - DNA, 741 bp, Homo sapiens
ggaacccggaagtgcgagctggcgcgcagctgcagtctgggagtctttggagtaagaatggccttggaagggatgagcaaacggaagagaaagagaagtgtccaggagggagagaatcctgacgacggcgttcgcgggagtccgccggaagactacaggcttggacaggtcgccagtagcttatttcgcggcgaacaccattccagaggtggcaccggtcggctggcgtccctcttcagttctctggagccccagattcaacccgtgtacgtgcctgtgcctaaacaaaccatcaaaaaaacgaaacggaatgaggaggaagaaagtacatcccagattgaaagaccactttcgcaagaacctgccaaaaaagtgaaagcgaagaagaaacacactaacgcagaaaaaaagttggcagacaggttggtaaaattctcttatttgatgttaaagaaattagatggtaaattaacattcctatacttggaatattcgtcagttttatttcatatttctactttctttcaaaacttttattatggaaaatccagtacatatagaaaagttgaaaaggctaagaaaccccgtgtactcagcatcagcaattactaatatttggctaacctttttgtatttttaccccactcatataccccctcattatttgtttttgtttgttttgagatggagtcttgatgccacgcccaggctgcagtagagtgcagtgatctcagctcactg

SEQ ID NO: 7422 - protein, 184 aa, Homo sapiens
MALEGMSKRKRKRSVQEGENPDDGVRGSPPEDYRLGQVASSLFRGEHHSRGGTGRLASLFSSLEPQIQPVYVPVPKQTIKKTKRNEEEESTSQIERPLSQEPAKKVKAKKKHTNAEKKLADRLVKFSYLMLKKLDGKLTFLYLEYSSVLFHISTFFQNFYYGKSSTYRKVEKAKKPRVLSISNY

SEQ ID NO: 7423 - DNA, 476 bp, Homo sapiens
ggaacccggaagtgcgagctggcgcgcagctgcagtctgggagtctttggagtaagaatggccttggaagggatgagcaaacggaagagaaagagaagtgtccaggagggagagaatcctgacgacggcgttcgcgggagtccgccggaagactacaggcttggacaggtcgccagtagcttatttcgcggcgaacaccattccagaggtggcaccggtcggctggcgtccctcttcagttctctggagccccagattcaacccgtgtacgtgcctgtgcctaaacaaaccatcaaaaaaacgaaacggaatgaggaggaagaaagtacatcccagattgaaagaccactttcgcaagaacctgccaaaaaagtgaaagcgaagaagaaacacactaacgcagaaaaaaagttggcagacagatggagtcttgatgccacgcccaggctgcagtagagtgcagtgatctcagctca

SEQ ID NO: 7424 - protein, 132 aa, Homo sapiens
MALEGMSKRKRKRSVQEGENPDDGVRGSPPEDYRLGQVASSLFRGEHHSRGGTGRLASLFSSLEPQIQPVYVPVPKQTIKKTKRNEEEESTSQIERPLSQEPAKKVKAKKKHTNAEKKLADRWSLDATPRLQ

SEQ ID NO: 7425 - DNA, 6034 bp, Homo sapiens
agcgatgtttgcccgtcagtcgagtccggagtgaggagctcggtcgccgaagcggagggagactcttgagcttcatcttgccgccgccacggccaccgcctggacctttgcccggagggagctgcagagggtccatcgccgccgtcctctggagggcagcgcgattgggggcccggacctccagtccgggggggatttttcgtcgtccccctccccccaaccagggagcccgagcggccgccaaacaaaggtaccagtcgccgccgcgggaggaggaggagccggagcctctgcctcagcagccgctggacccgccgcccttcttccccatctctcccccgggcctgctggttttgggggggagaaggagagaggggactctggacgtgccagggtcagatctcgcctccgaggaaggtgcagctgaacctggtgttttagaggataccttggtcccagagtcatcatgaaggcccttgatgagcctccctatttgacagtgggcactgatgtgagtgctaaatacagaggagccttttgtgaagccaagatcaagacagcaaaaagacttgtcaaagtcaaggtgacatttagacatgattcttcaacagtggaagttcaggatgaccacataaagggcccactaaaggtaggagctattgtggaagtgaagaatcttgatggtgcatatcaggaagctgttatcaataaactaacagatgcgagttggtacactgtagtttttgatgacggagatgagaagacactgagacgatcttcactgtgcctgaaaggagagaggcattttgctgaaagtgaaacattagaccagctcccactcaccaaccctgagcattttggcactccagtcataggaaagaaaacaaatagaggaagaagatctaatcatataccagaggaagagtcttcatcatcctccagtgatgaagatgaggatgataggaaacagattgatgagctactaggcaaagttgtatgtgtagattacattagtttggataaaaagaaagcactgtggtttcctgcattggtggtttgtcctgattgtagtgatgagattgctgtaaaaaaggacaatattcttgttcgatctttcaaagatggaaaatttacttcagttccaagaaaagatgtccatgaaattactagtgacactgcaccaaagcctgatgctgttttaaagcaagcctttgaacaggcacttgaatttcacaaaagtagaactattcctgctaactggaagactgaattgaaagaagatagctctagcagtgaagcagaggaagaagaggaggaggaagatgatgaaaaagaaaaggaggataatagcagtgaagaagaagaagaaatagaaccatttccagaagaaagggagaactttcttcagcaattgtacaaatttatggaagatagaggtacacctattaacaaacgacctgtacttggatatcgaaatttgaatctctttaagttattcagacttgtacacaaacttggaggatttgataatattgaaagtggagctgtttggaaacaagtctaccaagatcttggaatccctgtcttaaattcagctgcaggatacaatgttaaatgtgcttataaaaaatacttatatggttttgaggagtactgtagatcagccaacattgaatttcagatggcattgccagagaaagttgttaacaagcaatgtaaggagtgtgaaaatgtaaaagaaataaaagttaaggaggaaaatgaaacagagatcaaagaaataaagatggaggaggagaggaatataataccaagagaagaaaagcctattgaggatgaaattgaaagaaaagaaaatattaagccctctctgggaagtaaaaagaatttattagaatctatacctacacattctgatcaggaaaaagaagttaacattaaaaaaccagaagacaatgaaaatctggatgacaaagatgatgacacaactagggtagatgaatccctcaacataaaggtagaagctgaggaagaaaaagcaaaatctggagatgaaacgaataaagaagaagatgaagatgatgaagaagcagaagaggaggaggaggaggaagaagaagaagaggatgaagatgatgatgacaacaatgaggaagaggagtttgagtgctatccaccaggcatgaaagtccaagtgcggtatggacgagggaaaaatcaaaaaatgtatgaagctagtattaaagattctgatgtcgaaggtggagaggtcctttacttggtgcattactgcggatggaatgtgagatacgatgaatggattaaagcagataaaatagtaagacctgctgataaaaatgtgccaaagataaaacatcggaagaaaataaagaataaattagacaaagaaaaagacaaagatgaaaaatactctccaaaaaactgtaaacttcggcgcttgtccaaaccaccatttcagacaaatccatctcctgaaatggtatccaaactggatctcactgatgccaaaaactctgatactgctcatattaagtccatagaaattacttcgatccttaatggacttcaagcttctgaaagttctgctgaagacagtgagcaggaagatgagagaggtgctcaagacatggataataatggcaaagaggaatctaagattgatcatttgaccaacaacagaaatgatcttatttcaaaggaggaacagaacagttcatctttgctagaagaaaacaaagttcatgcagatttggtaatatccaaaccagtgtcaaaatctccagaaagattaaggaaagatatagaagtattatccgaagatactgattatgaagaagatgaagtcacaaaaaagagaaaggatgtcaagaaggacacaacagataaatcttcaaaaccacaaataaaacgtggtaaaagaaggtattgcaatacagaagagtgtctaaaaactggatcacctggcaaaaaggaagagaaggccaagaacaaagaatcactttgcatggaaaacagtagcaacagctcttcagatgaagatgaagaagaaacaaaagcaaagatgacaccaactaagaaatacaatggtttggaggaaaaaagaaaatctctacggacaactggtttctattcaggattttcagaagtggcagaaaaaaggattaaacttttaaataactctgatgaaagacttcaaaacagcagggccaaagatcgaaaagatgtctggtcaagtattcagggacagtggcctaaaaaaacgctgaaagagcttttttcagactctgatactgaggctgcagcttccccaccgcatcctgccccagaggagggggtggcagaggagtcactgcagactgtggctgaagaggagagttgttcacccagtgtagaactagaaaaaccacctccagtcaatgtcgatagtaaacccattgaagaaaaaacagtagaggtcaatgacagaaaagcagaatttccaagtagtggcagtaattcagtgctaaatacccctcctactacacctgaatcgccttcatcagtcactgtaacagaaggcagccggcagcagtcttctgtaacagtatcagaaccactggctccaaaccaagaagaggttcgaagtatcaagagtgaaactgatagcacaattgaggtggatagtgttgctggggagctccaagacctccagtctgaagggaatagctcgccagcaggttttgatgccagtgtgagctcaagcagtagtaatcagccagaaccagaacatcctgaaaaagcctgtacaggtcagaaaagagtgaaagatgctcagggaggaggaagttcatcaaaaaagcagaaaagaagccataaagcaacagtggtaaacaacaaaaagaagggaaaaggcacaaatagtagtgatagtgaagaactttcagctggtgaaagtataactaagagtcagccagtcaaatcagtttccactggaatgaagtctcatagtaccaaatctcccgcaaggacgcagtctccaggaaaatgtggaaagaatggtgataaggatcctgatctcaaggaacccagtaatcgattacccaaagtttacaaatggagttttcagatgtcggacctggaaaatatgacaagtgccgaacgcatcacaattcttcaagaaaaacttcaagaaatcagaaaacattatctgtcattaaaatctgaagtagcttccattgatcggaggagaaagcgtttaaagaagaaagagagagaaagtgctgctacatcctcatcctcctcttcaccttcatccagttccataacagctgctgttatgttaactttagctgaaccgtcaatgtccagcgcatcacaaaatggaatgtcagttgagtgcaggtgacagcaggacttgctaaagcactttgcacttaatggctgttgagggccactttttttttatactgcacagtggcacaaaaaaatatcagacaagcactattttatatttaaaaattgtttcttgacaagctgacttggcacttaagtgcacttttttatgaagaaaaagtacaatgaactgcttttcctcaagcaataattgtttccaacttgtctgggaattgtgtgtctggtaactggaaggccttccactgtggcaaatggaggcttttcactgcctgtagagacaatacagtaagcatagttaaggggtgggtcagaacatgttaagataacttactgtatatgtattcccttgtattttgttaaagctggaacatttgatatttttccatttatttatgaaaaaatatgaacctattttcatttgtacaaggtaattgttttttaaagcaagtcaccttagggtggctttaattgtataagtcaagcacatgtaataaattcaaaacctgcagttaacaggatattagacatcaatcctggtaaccaaatattaaagattctctttaaaaaagactgaacatgtttacaggtttgaattaggctaaaaggtcttgcagtggcttttcatggcccttcaaattggaatggaactactgtactttgccatttttctataaatcagtatttttttttaattttgatatacattgtgtgaaaaaagaaaatggctaataaactgtattaaatcttaaacaatgtataaagattgtacttagccagttcaaagtgtatatttattcataatgaattataacagttatatttttgtgttttcttgtaaatgtttcttttcccttaaatacagataattcatttgtattgcttattttattatgagctacaacaaaaggacttcaggaacaagtaatgtattagtatggttcaagattgttgataggaactgtctcaaaaggatggtggttattttaaatataaatagctaatgggggtggtaggcctataaaattaaatgccttgtataaaatccaaaatgaatgcaaaattgttttcacttgtattgactttatgttgtatgattccaatctctgttctgtttggcacttgtatttaattcttcacctttgtaagacatttgtatattgtggatgtgttcattcaagctatttaatatctggcactgttaatacacagtactttattgtacagactgttttactgttttaattgtagttctgtgtactttttttggatggggctggcatgttttctttgtttcctggcaatacgacgtgggaatttcaatgcgttttgttgtagatgctaacgtgtcagaatcctttacattcaacttttctaagaaaagcattttcagtcttgtagtgtgtgcttacagtaactaattttgttgaaaatggtttcaagttattcaaatttgtacaggactgtaaagatttgttgacagcaaaatgttgaagaaaaaagcttatagaataaaagctataaagtatatattaggatctgcaaacaatgaagaattatgtaatatattgtacaaatgtaagcaaaggctctgaaataaaatgccatagtttgtgaatccttg

SEQ ID NO: 7426 - protein, 1312 aa, Homo sapiens; identical to SEQ ID NO: 440

SEQ ID NO: 7427 - DNA, 5776 bp, Homo sapiens
agcgatgtttgcccgtcagtcgagtccggagtgaggagctcggtcgccgaagcggagggagactcttgagcttcatcttgccgccgccacggccaccgcctggacctttgcccggagggagctgcagagggtccatcgccgccgtcctctggagggcagcgcgattgggggcccggacctccagtccgggggggatttttcgtcgtccccctccccccaaccagggagcccgagcggccgccaaacaaaggtaccagtcgccgccgcgggaggaggaggagccggagcctctgcctcagcagccgctggacccgccgcccttcttccccatctctcccccgggcctgctggttttgggggggagaaggagagaggggactctggacgtgccagggtcagatctcgcctccgaggaaggtgcagctgaacctggtgttttagaggataccttggtcccagagtcatcatgaaggcccttgatgagcctccctatttgacagtgggcactgatgtgagtgctaaatacagaggagccttttgtgaagccaagatcaagacagcaaaaagacttgtcaaagtcaaggtgacatttagacatgattcttcaacagtggaagttcaggatgaccacataaagggcccactaaaggtaggagctattgtggaagtgaagaatcttgatggtgcatatcaggaagctgttatcaataaactaacagatgcgagttggtacactgtagtttttgatgacggagatgagaagacactgagacgatcttcactgtgcctgaaaggagagaggcattttgctgaaagtgaaacattagaccagctcccactcaccaaccctgagcattttggcactccagtcataggaaagaaaacaaatagaggaagaagatctaatcatataccagaggaagagtcttcatcatcctccagtgatgaagatgaggatgataggaaacagattgatgagctactaggcaaagttgtatgtgtagattacattagtttggataaaaagaaagcactgtggtttcctgcattggtggtttgtcctgattgtagtgatgagattgctgtaaaaaaggacaatattcttgttcgatctttcaaagatggaaaatttacttcagttccaagaaaagatgtccatgaaattactagtgacactgcaccaaagcctgatgctgttttaaagcaagcctttgaacaggcacttgaatttcacaaaagtagaactattcctgctaactggaagactgaattgaaagaagatagctctagcagtgaagcagaggaagaagaggaggaggaagatgatgaaaaagaaaaggaggataatagcagtgaagaagaagaagaaatagaaccatttccagaagaaagggagaactttcttcagcaattgtacaaatttatggaagatagaggtacacctattaacaaacgacctgtacttggatatcgaaatttgaatctctttaagttattcagacttgtacacaaacttggaggatttgataatattgaaagtggagctgtttggaaacaagtctaccaagatcttggaatccctgtcttaaattcagctgcaggatacaatgttaaatgtgcttataaaaaatacttatatggttttgaggagtactgtagatcagccaacattgaatttcagatggcattgccagagaaagttgttaacaagcaatgtaaggagtgtgaaaatgtaaaagaaataaaagttaaggaggaaaatgaaacagagatcaaagaaataaagatggaggaggagaggaatataataccaagagaagaaaagcctattgaggatgaaattgaaagaaaagaaaatattaagccctctctgggaagtaaaaagaatttattagaatctatacctacacattctgatcaggaaaaagaagttaacattaaaaaaccagaagacaatgaaaatctggatgacaaagatgatgacacaactagggtagatgaatccctcaacataaaggtagaagctgaggaagaaaaagcaaaatctggatacgatgaatggattaaagcagataaaatagtaagacctgctgataaaaatgtgccaaagataaaacatcggaagaaaataaagaataaattagacaaagaaaaagacaaagatgaaaaatactctccaaaaaactgtaaacttcggcgcttgtccaaaccaccatttcagacaaatccatctcctgaaatggtatccaaactggatctcactgatgccaaaaactctgatactgctcatattaagtccatagaaattacttcgatccttaatggacttcaagcttctgaaagttctgctgaagacagtgagcaggaagatgagagaggtgctcaagacatggataataatggcaaagaggaatctaagattgatcatttgaccaacaacagaaatgatcttatttcaaaggaggaacagaacagttcatctttgctagaagaaaacaaagttcatgcagatttggtaatatccaaaccagtgtcaaaatctccagaaagattaaggaaagatatagaagtattatccgaagatactgattatgaagaagatgaagtcacaaaaaagagaaaggatgtcaagaaggacacaacagataaatcttcaaaaccacaaataaaacgtggtaaaagaaggtattgcaatacagaagagtgtctaaaaactggatcacctggcaaaaaggaagagaaggccaagaacaaagaatcactttgcatggaaaacagtagcaacagctcttcagatgaagatgaagaagaaacaaaagcaaagatgacaccaactaagaaatacaatggtttggaggaaaaaagaaaatctctacggacaactggtttctattcaggattttcagaagtggcagaaaaaaggattaaacttttaaataactctgatgaaagacttcaaaacagcagggccaaagatcgaaaagatgtctggtcaagtattcagggacagtggcctaaaaaaacgctgaaagagcttttttcagactctgatactgaggctgcagcttccccaccgcatcctgccccagaggagggggtggcagaggagtcactgcagactgtggctgaagaggagagttgttcacccagtgtagaactagaaaaaccacctccagtcaatgtcgatagtaaacccattgaagaaaaaacagtagaggtcaatgacagaaaagcagaatttccaagtagtggcagtaattcagtgctaaatacccctcctactacacctgaatcgccttcatcagtcactgtaacagaaggcagccggcagcagtcttctgtaacagtatcagaaccactggctccaaaccaagaagaggttcgaagtatcaagagtgaaactgatagcacaattgaggtggatagtgttgctggggagctccaagacctccagtctgaagggaatagctcgccagcaggttttgatgccagtgtgagctcaagcagtagtaatcagccagaaccagaacatcctgaaaaagcctgtacaggtcagaaaagagtgaaagatgctcagggaggaggaagttcatcaaaaaagcagaaaagaagccataaagcaacagtggtaaacaacaaaaagaagggaaaaggcacaaatagtagtgatagtgaagaactttcagctggtgaaagtataactaagagtcagccagtcaaatcagtttccactggaatgaagtctcatagtaccaaatctcccgcaaggacgcagtctccaggaaaatgtggaaagaatggtgataaggatcctgatctcaaggaacccagtaatcgattacccaaagtttacaaatggagttttcagatgtcggacctggaaaatatgacaagtgccgaacgcatcacaattcttcaagaaaaacttcaagaaatcagaaaacattatctgtcattaaaatctgaagtagcttccattgatcggaggagaaagcgtttaaagaagaaagagagagaaagtgctgctacatcctcatcctcctcttcaccttcatccagttccataacagctgctgttatgttaactttagctgaaccgtcaatgtccagcgcatcacaaaatggaatgtcagttgagtgcaggtgacagcaggacttgctaaagcactttgcacttaatggctgttgagggccactttttttttatactgcacagtggcacaaaaaaatatcagacaagcactattttatatttaaaaattgtttcttgacaagctgacttggcacttaagtgcacttttttatgaagaaaaagtacaatgaactgcttttcctcaagcaataattgtttccaacttgtctgggaattgtgtgtctggtaactggaaggccttccactgtggcaaatggaggcttttcactgcctgtagagacaatacagtaagcatagttaaggggtgggtcagaacatgttaagataacttactgtatatgtattcccttgtattttgttaaagctggaacatttgatatttttccatttatttatgaaaaaatatgaacctattttcatttgtacaaggtaattgttttttaaagcaagtcaccttagggtggctttaattgtataagtcaagcacatgtaataaattcaaaacctgcagttaacaggatattagacatcaatcctggtaaccaaatattaaagattctctttaaaaaagactgaacatgtttacaggtttgaattaggctaaaaggtcttgcagtggcttttcatggcccttcaaattggaatggaactactgtactttgccatttttctataaatcagtatttttttttaattttgatatacattgtgtgaaaaaagaaaatggctaataaactgtattaaatcttaaacaatgtataaagattgtacttagccagttcaaagtgtatatttattcataatgaattataacagttatatttttgtgttttcttgtaaatgtttcttttcccttaaatacagataattcatttgtattgcttattttattatgagctacaacaaaaggacttcaggaacaagtaatgtattagtatggttcaagattgttgataggaactgtctcaaaaggatggtggttattttaaatataaatagctaatgggggtggtaggcctataaaattaaatgccttgtataaaatccaaaatgaatgcaaaattgttttcacttgtattgactttatgttgtatgattccaatctctgttctgtttggcacttgtatttaattcttcacctttgtaagacatttgtatattgtggatgtgttcattcaagctatttaatatctggcactgttaatacacagtactttattgtacagactgttttactgttttaattgtagttctgtgtactttttttggatggggctggcatgttttctttgtttcctggcaatacgacgtgggaatttcaatgcgttttgttgtagatgctaacgtgtcagaatcctttacattcaacttttctaagaaaagcattttcagtcttgtagtgtgtgcttacagtaactaattttgttgaaaatggtttcaagttattcaaatttgtacaggactgtaaagatttgttgacagcaaaatgttgaagaaaaaagcttatagaataaaagctataaagtatatattaggatctgcaaacaatgaagaattatgtaatatattgtacaaatgtaagcaaaggctctgaaataaaatgccatagtttgtgaatccttg

SEQ ID NO: 7428 - protein, 1226 aa, Homo sapiens; identical to SEQ ID NO: 442

SEQ ID NO: 7429 - DNA, 462 bp, Homo sapiens
tgattcatattcattacaactctagaaaaaaggctggcaaaaaaactaccccaggggcaaatctggcttacttgtctttggaaagaaaaattgtactggaacacagccatgcctatttgtttacatattgcctatgggagttttcacacttaccatggcagagataagtagtttctacagagaccacatggcccacaaagcctaacatatttattgtctctttacagaaaatgtttgcaacccctgttctacaggaattttatctctagaatctagagatatgatatgcaaatttaaaatatatagatatagcaacacctttaaaaacataagtggaggccgggcacggtggacgcacctgtagtcctagctacccgggaggctgaggcaggagaatcgcttgaaccggaaggcagaggttgcagtgagccaagatcgcgccactgcactccagcctggtga

SEQ ID NO: 7430 - protein, 45 aa, Homo sapiens [sequence omitted]

SEQ ID NO: 7431 - DNA, 3808 bp, Homo sapiens
gtttgcccgtcagtcgagtccggagtgaggagctcggtcgccgaagcggagggagactcttgagcttcatcttgccgccgccacggccaccgcctggacctttgcccggagggagctgcagagggtccatcgccgccgtcctctggagggcagcgcgattgggggcccggacctccagtccgggggggatttttcgtcgtccccctccccccaaccagggagcccgagcggccgccaaacaaaggtaccagtcgccgccgcgggaggaggaggagccggagcctctgcctcagcagccgctggacccgccgcccttcttccccatctctcccccgggcctgctggttttgggggggagaaggagagaggggactctggacgtgccagggtcagatctcgcctccgaggaaggtgcagctgaacctggtgttttagaggataccttggtcccagagtcatcatgaaggcccttgatgagcctccctatttgacagtgggcactgatgtgagtgctaaatacagaggagccttttgtgaagccaagatcaagacagcaaaaagacttgtcaaagtcaaggtgacatttagacatgattcttcaacagtggaagttcaggatgaccacataaagggcccactaaaggtaggagctattgtggaagtgaagaatcttgatggtgcatatcaggaagctgttatcaataaactaacagatgcgagttggtacactgtagtttttgatgacggagatgagaagacactgagacgatcttcactgtgcctgaaaggagagaggcattttgctgaaagtgaaacattagaccagctcccactcaccaaccctgagcattttggcactccagtcataggaaagaaaacaaatagaggaagaagatctaatcatataccagaggaagagtcttcatcatcctccagtgatgaagatgaggatgataggaaacagattgatgagctactaggcaaagttgtatgtgtagattacattagtttggataaaaagaaagcactgtggtttcctgcattggtggtttgtcctgattgtagtgatgagattgctgtaaaaaaggacaatattcttgttcgatctttcaaagatggaaaatttacttcagttccaagaaaagatgtccatgaaattactagtgacactgcaccaaagcctgatgctgttttaaagcaagcctttgaacaggcacttgaatttcacaaaagtagaactattcctgctaactggaagactgaattgaaagaagatagctctagcagtgaagcagaggaagaagaggaggaggaagatgatgaaaaagaaaaggaggataatagcagtgaagaagaagaagaaatagaaccatttccagaagaaagggagaactttcttcagcaattgtacaaatttatggaagatagaggtacacctattaacaaacgacctgtacttggatatcgaaatttgaatctctttaagttattcagacttgtacacaaacttggaggatttgataatattgaaagtggagctgtttggaaacaagtctaccaagatcttggaatccctgtcttaaattcagctgcaggatacaatgttaaatgtgcttataaaaaatacttatatggttttgaggagtactgtagatcagccaacattgaatttcagatggcattgccagagaaagttgttaacaagcaatgtaaggagtgtgaaaatgtaaaagaaataaaagttaaggaggaaaatgaaacagagatcaaagaaataaagatggaggaggagaggaatataataccaagagaagaaaagcctattgaggatgaaattgaaagaaaagaaaatattaagccctctctgggaagtaaaaagaatttattagaatctatacctacacattctgatcaggaaaaagaagttaacattaaaaaaccagaagacaatgaaaatctggatgacaaagatgatgacacaactagggtagatgaatccctcaacataaaggtagaagctgaggaagaaaaagcaaaatctggatacgatgaatggattaaagcagataaaatagtaagacctgctgataaaaatgtgccaaagataaaacatcggaagaaaataaagaataaattagacaaagaaaaagacaaagatgaaaaatactctccaaaaaactgtaaacttcggcgcttgtccaaaccaccatttcagacaaatccatctcctgaaatggtatccaaactggatctcactgatgccaaaaactctgatactgctcatattaagtccatagaaattacttcgatccttaatggacttcaagcttctgaaagttctgctgaagacagtgagcaggaagatgagagaggtgctcaagacatggataataatggcaaagaggaatctaagattgatcatttgaccaacaacagaaatgatcttatttcaaaggaggaacagaacagttcatctttgctagaagaaaacaaagttcatgcagatttggtaatatccaaaccagtgtcaaaatctccagaaagattaaggaaagatatagaagtattatccgaagatactgattatgaagaagatgaagtcacaaaaaagagaaaggatgtcaagaaggacacaacagataaatcttcaaaaccacaaataaaacgtggtaaaagaaggtattgcaatacagaagagtgtctaaaaactggatcacctggcaaaaaggaagagaaggccaagaacaaagaatcactttgcatggaaaacagtagcaacagctcttcagatgaagatgaagaagaaacaaaagcaaagatgacaccaactaagaaatacaatggtttggaggaaaaaagaaaatctctacggacaactggtttctattcaggattttcagaagtggcagaaaaaaggattaaacttttaaataactctgatgaaagacttcaaaacagcagggccaaagatcgaaaagatgtctggtcaagtattcagggacagtggcctaaaaaaacgctgaaagagcttttttcagactctgatactgaggctgcagcttccccaccgcatcctgccccagaggagggggtggcagaggagtcactgcagactgtggctgaagaggagagttgttcacccagtgtagaactagaaaaaccacctccagtcaatgtcgatagtaaacccattgaagaaaaaacagtagaggtcaatgacagaaaagcagaatttccaagtagtggcagtaattcagtgctaaatacccctcctactacacctgaatcgccttcatcagtcactgtaacagaaggcagccggcagcagtcttctgtaacagtatcagaaccactggctccaaaccaagaagaggttcgaagtatcaagagtgaaactgatagcacaattgaggtggatagtgttgctggggagctccaagacctccagtctgaagggaatagctcgccagcaggttttgatgccagtgtgagctcaagcagtagtaatcagccagaaccagaacatcctgaaaaagcctgtacaggtcagaaaagagtgaaagatgctcagggaggaggaagttcatcaaaaaagcagaaaagaagccataaagcaacagtggtaaacaacaaaaagaagggaaaaggcagtaagtgtgaaatctctaatttttaaaatataaaaataatagctgataattttacccccagtaagaaaatggtattcagggtatgggatagtacactattttgattttgtctgtacactcaaaaaaagtcacacaaattctgtaaggctacttgcttt

SEQ ID NO: 7432 - protein, 1071 aa, Homo sapiens
MKALDEPPYLTVGTDVSAKYRGAFCEAKIKTAKRLVKVKVTFRHDSSTVEVQDDHIKGPLKVGAIVEVKNLDGAYQEAVINKLTDASWYTVVFDDGDEKTLRRSSLCLKGERHFAESETLDQLPLTNPEHFGTPVIGKKTNRGRRSNHIPEEESSSSSSDEDEDDRKQIDELLGKVVCVDYISLDKKKALWFPALVVCPDCSDEIAVKKDNILVRSFKDGKFTSVPRKDVHEITSDTAPKPDAVLKQAFEQALEFHKSRTIPANWKTELKEDSSSSEAEEEEEEEDDEKEKEDNSSEEEEEIEPFPEERENFLQQLYKFMEDRGTPINKRPVLGYRNLNLFKLFRLVHKLGGFDNIESGAVWKQVYQDLGIPVLNSAAGYNVKCAYKKYLYGFEEYCRSANIEFQMALPEKVVNKQCKECENVKEIKVKEENETEIKEIKMEEERNIIPREEKPIEDEIERKENIKPSLGSKKNLLESIPTHSDQEKEVNIKKPEDNENLDDKDDDTTRVDESLNIKVEAEEEKAKSGYDEWIKADKIVRPADKNVPKIKHRKKIKNKLDKEKDKDEKYSPKNCKLRRLSKPPFQTNPSPEMVSKLDLTDAKNSDTAHIKSIEITSILNGLQASESSAEDSEQEDERGAQDMDNNGKEESKIDHLTNNRNDLISKEEQNSSSLLEENKVHADLVISKPVSKSPERLRKDIEVLSEDTDYEEDEVTKKRKDVKKDTTDKSSKPQIKRGKRRYCNTEECLKTGSPGKKEEKAKNKESLCMENSSNSSSDEDEEETKAKMTPTKKYNGLEEKRKSLRTTGFYSGFSEVAEKRIKLLNNSDERLQNSRAKDRKDVWSSIQGQWPKKTLKELFSDSDTEAAASPPHPAPEEGVAEESLQTVAEEESCSPSVELEKPPPVNVDSKPIEEKTVEVNDRKAEFPSSGSNSVLNTPPTTPESPSSVTVTEGSRQQSSVTVSEPLAPNQEEVRSIKSETDSTIEVDSVAGELQDLQSEGNSSPAGFDASVSSSSSNQPEPEHPEKACTGQKRVKDAQGGGSSSKKQKRSHKATVVNNKKKGKGSKCEISNF

SEQ ID NO: 7433 - DNA, 1020 bp, Homo sapiens
ttgcaatacagaagagtgtctaaaaactggatcacctggcaaaaaggaagagaaggccaagaacaaagaatcactttgcatggaaaacagtagcaacagctcttcagatgaagatgaagaagaaacaaaagcaaagatgacaccaactaagaaatacaatggtttggaggaaaaaagaaaatctctacggacaactggtttctattcaggattttcagaagtggcagaaaaaaggattaaacttttaaataactctgatgaaagacttcaaaacagcagggccaaagatcgaaaagatgtctggtcaagtattcagggacagtggcctaaaaaaacgctgaaagagcttttttcagactctgatactgaggctgcagcttccccaccgcatcctgccccagaggagggggtggcagaggagtcactgcagactgtggctgaagaggagagttgttcacccagtgtagaactagaaaaaccacctccagtcaatgtcgatagtaaacccattgaagaaaaaacagtagaggtcaatgacagaaaagcagaatttccaagtagtggcagtaattcagtgctaaatacccctcctactacacctgaatcgccttcatcagtcactgtaacagaaggcagccggcagcagtcttctgtaacagtatcagaaccactggctccaaaccaagaagaggttcgaagtatcaagagtgaaactgatagcacaattgaggtggatagtgttgctggggagctccaagacctccagtctgaagggaatagctcgccagcaggttttgatgccagtgtgagctcaagcagtagtaatcagccagaaccagaacatcctgaaaaagacccctccacccttaaccaaatactgtatgtaggggtttggagcaaccaactgtccaggcactgctttcctcagacaaccgtgtcaaactgattttcaagcctgactaacttgtcctgtacaggtcagaaaagagtgaaagatgctcagggaggaggaagttcatc

SEQ ID NO: 7434 - protein, 288 aa, Homo sapiens
MENSSNSSSDEDEEETKAKMTPTKKYNGLEEKRKSLRTTGFYSGFSEVAEKRIKLLNNSDERLQNSRAKDRKDVWSSIQGQWPKKTLKELFSDSDTEAAASPPHPAPEEGVAEESLQTVAEEESCSPSVELEKPPPVNVDSKPIEEKTVEVNDRKAEFPSSGSNSVLNTPPTTPESPSSVTVTEGSRQQSSVTVSEPLAPNQEEVRSIKSETDSTIEVDSVAGELQDLQSEGNSSPAGFDASVSSSSSNQPEPEHPEKDPSTLNQILYVGVWSNQLSRHCFPQTTVSN

SEQ ID NO: 7435 - DNA, 2315 bp, Homo sapiens
aaagggggggaacctagagtcggtgggggggaagcgatgtttgcccgtcagtcgagtccggagtgaggagctcggtcgccgaagcggagggagactcttgagcttcatcttgccgccgccacggccaccgcctggacctttgcccggagggagctgcagagggtccatcgccgccgtcctctggagggcagcgcgattgggggcccggacctccagtccgggggggatttttcgtcgtccccctccccccaaccagggagcccgagcggccgccaaacaaaggtaccagtcgccgccgcgggaggaggaggagccggagcctctgcctcagcagccgctggacccgccgcccttcttccccatctctcccccgggcctgctggttttgggggggagaaggagagaggggactctggacgtgccagggtcagatctcgcctccgaggaaggtgcagctgaacctggtgttttagaggataccttggtcccagagtcatcatgaaggcccttgatgagcctccctatttgacagtgggcactgatgtgagtgctaaatacagaggagccttttgtgaagccaagatcaagacagcaaaaagacttgtcaaagtcaaggtgacatttagacatgattcttcaacagtggaagttcaggatgaccacataaagggcccactaaaggtaggagctattgtggaagtgaagaatcttgatggtgcatatcaggaagctgttatcaataaactaacagatgcgagttggtacactgtagtttttgatgacggagatgagaagacactgagacgatcttcactgtgcctgaaaggagagaggcattttgctgaaagtgaaacattagaccagctcccactcaccaaccctgagcattttggcactccagtcataggaaagaaaacaaatagaggaagaagatctaatcatataccagaggaagagtcttcatcatcctccagtgatgaagatgaggatgataggaaacagattgatgagctactaggcaaagttgtatgtgtagattacattagtttggataaaaagaaagcactgtggtttcctgcattggtggtttgtcctgattgtagtgatgagattgctgtaaaaaaggacaatattcttgttcgatctttcaaagatggaaaatttacttcagttccaagaaaagatgtccatgaaattactagtgacactgcaccaaagcctgatgctgttttaaagcaagcctttgaacaggcacttgaatttcacaaaagtagaactattcctgctaactggaagactgaattgaaagaagatagctctagcagtgaagcagaggaagaagaggaggaggaagatgatgaaaaagaaaaggaggataatagcagtgaagaagaagtaagtgaaaacagttgataccttttaaaattataaataacagttgggtttcccttgtgggttaggatttggcattaagtcattactcatataagtatttttagtatgagaaatatttcataatcttgtatttgagatcctcataatcagatagtttacttggttactttagatatatgatcttgtgaaatagaaaatattaagcctgattttcctaataacctcaaaaacatgtcttagtcttcctatgctttttttaatgagatgattaagaaagtatccaccaggctgggcgcagtggctcaggcctgtaatcccagcactttgggaggccaaggcaggcggatcacgaggtcaggagatcgagaccatcctggctaacacagcgaaaccccgtctttactaaaaatacaaaaaattagccgggggtggtggtgggcacctgtagtcccagctactcggtaggctgaggcaggagaatggcatgaaaccgagagacggagcttgcagtgagccaagatcgcgccactgcactccagcctgggcgacagagcgagactctgtctcaaaaaaaaaaaaaaaacgagaacaaaaacaaaaaaacttaccatctaggccaggcacggtgactcacgaccataatcgtagcactttgggagggcaaggcaggtggctaacttgaactcaggagtttgagaccagactgggcaacatggtgaaaccccatctcaacaaaaataaaaataaaaataattagcagggcatgtcagtgcactccagccccagtgcactcagtagccccagctactgaggaggctgtgttgggaggacggcctgagccctggaggtggaggttgcaatgagccgtgaatttaccactgccctacatcctgggtgacagagtgagaccctgtcttatt

SEQ ID NO: 7436 - protein, 304 aa, Homo sapiens [sequence omitted]

SEQ ID NO: 7437 - DNA, 565 bp, Homo sapiens
attacagcataaagaacatgatgaccaggaaagaggctggtgtgataaatattttaatgctatttcagaacaagacaagactgatgacagttagtttgagataaatgggatgttactttagcaataaagacaaatttagaaattacatgcctactaaaaaataagattgtgctggctgggcacggtggctcactttgggaggctgagacaggcagatcacaaggtcagaagatcgagaccatcctggctaagacagtgaaaccccgtctctactaaaaatacaaaaaattagccaggcgtggtggcacacacctgtagtcccagttactcgggaggctgagccaggagaatcacttgaacatggaaggcagaggctgcagtgagccgagatcataccactgcactccagcctggtgacagagctaggccctgtctctttacaaaaaaagaaaaaggaaaaagaaaagaaaaaaagaaaatgtttcaaatggccaaaggaaacttgcaatttaagagaaggttgactgttctaaagattcttcagccaaagaaaaagagagagaga

SEQ ID NO: 7438 - protein, 46 aa, Homo sapiens
AEIIPLHSSLVTELGPVSLQKKKKEKEKKKRKCFKWPKETCNLREG

SEQ ID NO: 7439 - DNA, 270 bp, Homo sapiens
ccccatctctcccccgggcctgctggttttgggggggagaaggagagaggggactctggacgtgccagggtcagatctcgcctccgaggaaggtgcagctgaacctggtgttttagaggataccttggtcccagagtcatcatgaaggtaagattgcctgcggaaaacgaatctctggggttatcgaattcaggaagtaggaggtttcgacgaggtcgtcgtgtggggcttccgagttttgcagaggaaggtgtgtttggtgacttggtg

SEQ ID NO: 7440 - protein, 42 aa, Homo sapiens
MKVRLPAENESLGLSNSGSRRFRRGRRVGLPSFAEEGVFGDL

SEQ ID NO: 7441 - DNA, 1404 bp, Homo sapiens
agcgagaggccggccgggggccaccgaggggccaggagggcctgtgggccgcgggcaggaccggcccgccacagagcccctgcccacgtcccgttccgggctcagacccgacaagtgggagcgagatcaacatctggccccgccgcggggacaacattagctttgaagtttaaatccaatggagaagactcaagaaacagtccaaagaattcttctagaaccctataaatacttacttcagttaccaggtaaacaagtgagaaccaaactttcacaggcatttaatcattggctgaaagttccagaggacaagctacagattattattgaagtgacagaaatgttgcataatgccagtttactcatcgatgatattgaagacaactcaaaactccgacgtggctttccagtggcccacagcatctatggaatcccatctgtcatcaattctgccaattacgtgtatttccttggcttggagaaagtcttaacccttgatcacccagatgcagtgaagctttttacccgccagcttttggaactccatcagggacaaggcctagatatttactggagggataattacacttgtcccactgaagaagaatataaagctatggtgctgcagaaaacaggtggactgtttggattagcagtaggtctcatgcagttgttctctgattacaaagaagatttaaaaccgctacttaatacacttgggctctttttccaaattagggatgattatgctaatctacactccaaagaatatagtgaaaacaaaagtttttgtgaagatctgacagagggaaagttctcatttcctactattcatgctatttggtcaaggcctgaaagcacccaggtgcagaatatcttgcgccagagaacagaaaacatagatataaaaaaatactgtgtacattatcttgaggatgtaggttcttttgaatacactcgtaatacccttaaagagcttgaagctaaagcctataaacagattgatgcacgtggtgggaaccctgagctagtagccttagtaaaacacttaagtaagatgttcaaagaagaaaatgaataatgttaagccattcttgattggacctcatagcttattttagttaatcttttttttgtcttttagccttaccaccttttaaaaaatttgttattctccagaaacagtaaataggtgagtaggggtggtgcaagtgaattcgttttcatttagaagcccctctgtacagataatcaaaattcaaagttgaaagaatcaaaagcagccacagttatgtaggtctgatttgaatgtcataattgcagtgacaggacattgccaccaactctatcctactaccatcaatgttgtgtttattccgtcaataaaaaagacttgcttccagg

SEQ ID NO: 7442 - protein, 300 aa, Homo sapiens [sequence omitted]

SEQ ID NO: 7443 - DNA, 2838 bp, Homo sapiens
agcgagaggccggccgggggccaccgaggggccaggagggcctgtgggccgcgggcaggaccggcccgccacagagcccctgcccacgtcccgttccgggctcagacccgacaagtgggagcgagatcaacatctggccccgccgcggggacaacattagctttgaagtttaaatccaatggagaagactcaagaaacagtccaaagaattcttctagaaccctataaatacttacttcagttaccaggtaaacaagtgagaaccaaactttcacaggcatttaatcattggctgaaagttccagaggacaagctacagattattattgaagtgacagaaatgttgcataatgccagtttactcatcgatgatattgaagacaactcaaaactccgacgtggctttccagtggcccacagcatctatggaatcccatctgtcatcaattctgccaattacgtgtatttccttggcttggagaaagtcttaacccttgatcacccagatgcagtgaagctttttacccgccagcttttggaactccatcagggacaaggcctagatatttactggagggataattacacttgtcccactgaagaagaatataaagctatggtgctgcagaaaacaggtggactgtttggattagcagtaggtctcatgcagttgttctctgattacaaagaagatttaaaaccgctacttaatacacttgggctctttttccaaattagggatgattatgctaatctacactccaaagaatatagtgaaaacaaaagtttttgtgaagatctgacagagggaaagttctcatttcctactattcatgctatttggtcaaggcctgaaagcacccaggtgcagaatatcttgcgccagagaacagaaaacatagatataaaaaaatactgtgtacattatcttgaggatgtaggttcttttgaatacactcgtaatacccttaaagagcttgaagctaaagcctataaacagattgatgcacgtggtgggaaccctgagctagtagccttagtaaaacacttaagtaagatgttcaaagaagaaaatgaataatgttaagccattcttgattggacctcatagcttattttagttaatcttttttttgtcttttagccttaccaccttttaaaaaatttgttattctccagaaacagtaaataggtgagtaggggtggtgcaagtgaattcgttttcatttagaagcccctctgtacagataatcaaaattcaaagttgaaagaatcaaaagcagccacagttatgtaggtctgatttgaatgtcataattgcagtgacaggacattgccaccaactctatcctactaccatcaatgttgtgtttattccgtcaataaaaaagacttgcttccaggaatttttatccatacactttctaactgtactatctgggcagttccaagccagtttctattagctagctggaccaaagaccacaaatctctttttttcctaaacgctgctgtaaggaatatctcacttttccccccggaaacaccctcactgaagtcttctatgaaaaggctgataatgggctgggcgcggtggctcacgcctgtaatcccagcactttgggaggccgaggcgggcagatcacgaggtcaggagatcgagaccatcctgacacggtgaaaccctgtctctactaaaaatacaaaaaattagctgggcgtggtggtgggcgcctgtagtcccagctactcgggaggctgaggcaggagaatggtgtgaacccaggaggcggagcttgcagtgagccgagatagtgcctctgcactccagcctgggtgacagagcgagactccgtctcaaaaaaaagggctgataatgataaacagtgagcactccggtcctttttcttaggttttccttttttccttcctctccaccccacaagttttgctttttaaccaaggtgtctctgcttgatgaaattcacatgctagtctaaatctttttttctcccttgtaacatttatgtgccccaaactggttagtatatgggtacagcattccctttccaattgggaagcggaaaaagagagtatgggatattttagaagggagcctttgaaccttattatatttccccatcattgatagtgacaatcttaaaagggttgttttcttaccttaagtacaaaagcatggaaaaatgcgcttttccttcccgcccacatcaccaccccgacttgaagacagtaggtgcttgaatggaaagtgagtaggcatctttaatcgccctgattaaaggaaagtgttagcctgagagggcctgactgaaaagtaaccaaaggcttaatatcaaacactaattagctttttagtgccttaaccctgacctggttaccagttttctgtagtttctacacccaagccactgaagtcatctgtggcccaagaggtaggacaaaaaaaaaaaaaaaaaaagctgatttcaatatttgatttgttgacatcccaaaatgaaagttttatgtttcccttagaaacatgttttgcttggttctatagtatgttacttaggatctatttaccatatatttgtatgagaaatcctcacccaagcattcaacctaaatctttgaaaagttgggtgctgtctttagtaacttttaaaatagtttaaatctcccattttaatagtgataaggaaacctgttaaaatcatggctattgatgttatagtatggaaagttgaactttatgaacccatacttttaaaaagcatttttaaaaatctaacactgactatagaaacaaattaaaatgtctacctttaagtataa

SEQ ID NO: 7444 - protein, 300 aa, Homo sapiens [sequence omitted]

SEQ ID NO: 7445 - DNA, 1706 bp, Homo sapiens
cggcggcgatggaccctctgcagctccctccgggcaaaggtccaggcggtggccgtggcggcggcaagatgaagctcaagagtctccctccgcttcggcgaccgagctcctcactccggactcgactgacgggcaaacatcgcttcccccccaccgactctaggttccccccctttctcccctcccctagattttttttccccccctcccctacctctttcccggatggcctcttagacgaccttggattggttaaagttctttagaacccgcctatacactgttcctattggtccctggatacaaacaacgacgccattttcccaccagttctatggaaacagaaagttacgcctcaaggctttctgggaaataaagtccatactctggggccaacgcgcaaatcctcgtccgcgagaactgcaaggcccgcaatgccctgcgcctgcgtggaccgattagctttgaagtttaaatccaatggagaagactcaagaaacagtccaaagaattcttctagaaccctataaatacttacttcagttaccaggtaaacaagtgagaaccaaactttcacaggcatttaatcattggctgaaagttccagaggacaagctacagattattattgaagtgacagaaatgttgcataatgccagtttactcatcgatgatattgaagacaactcaaaactccgacgtggctttccagtggcccacagcatctatggaatcccatctgtcatcaattctgccaattacgtgtatttccttggcttggagaaagtcttaacccttgatcacccagatgcagtgaagctttttacccgccagcttttggaactccatcagggacaaggcctagatatttactggagggataattacacttgtcccactgaagaagaatataaagctatggtgctgcagaaaacaggtggactgtttggattagcagtaggtctcatgcagttgttctctgattacaaagaagatttaaaaccgctacttaatacacttgggctctttttccaaattagggatgattatgctaatctacactccaaagaatatagtgaaaacaaaagtttttgtgaagatctgacagagggaaagttctcatttcctactattcatgctatttggtcaaggcctgaaagcacccaggtgcagaatatcttgcgccagagaacagaaaacatagatataaaaaaatactgtgtacattatcttgaggatgtaggttcttttgaatacactcgtaatacccttaaagagcttgaagctaaagcctataaacagattgatgcacgtggtgggaaccctgagctagtagccttagtaaaacacttaagtaagatgttcaaagaagaaaatgaataatgttaagccattcttgattggacctcatagcttattttagttaatcttttttttgtcttttagccttaccaccttttaaaaaatttgttattctccagaaacagtaaataggtgagtaggggtggtgcaagtgaattcgttttcatttagaagcccctctgtacagataatcaaaattcaaagttgaaagaatcaaaagcagccacagttatgtaggtctgatttgaatgtcataattgcagtgacaggacattgccaccaactctatcctactaccatcaatgttgtgtttattccgtcaataaaaaagacttgcttccagg

SEQ ID NO: 7446 - protein, 300 aa, Homo sapiens [sequence omitted]

SEQ ID NO: 7447 - DNA, 3140 bp, Homo sapiens
cggcggcgatggaccctctgcagctccctccgggcaaaggtccaggcggtggccgtggcggcggcaagatgaagctcaagagtctccctccgcttcggcgaccgagctcctcactccggactcgactgacgggcaaacatcgcttcccccccaccgactctaggttccccccctttctcccctcccctagattttttttccccccctcccctacctctttcccggatggcctcttagacgaccttggattggttaaagttctttagaacccgcctatacactgttcctattggtccctggatacaaacaacgacgccattttcccaccagttctatggaaacagaaagttacgcctcaaggctttctgggaaataaagtccatactctggggccaacgcgcaaatcctcgtccgcgagaactgcaaggcccgcaatgccctgcgcctgcgtggaccgattagctttgaagtttaaatccaatggagaagactcaagaaacagtccaaagaattcttctagaaccctataaatacttacttcagttaccaggtaaacaagtgagaaccaaactttcacaggcatttaatcattggctgaaagttccagaggacaagctacagattattattgaagtgacagaaatgttgcataatgccagtttactcatcgatgatattgaagacaactcaaaactccgacgtggctttccagtggcccacagcatctatggaatcccatctgtcatcaattctgccaattacgtgtatttccttggcttggagaaagtcttaacccttgatcacccagatgcagtgaagctttttacccgccagcttttggaactccatcagggacaaggcctagatatttactggagggataattacacttgtcccactgaagaagaatataaagctatggtgctgcagaaaacaggtggactgtttggattagcagtaggtctcatgcagttgttctctgattacaaagaagatttaaaaccgctacttaatacacttgggctctttttccaaattagggatgattatgctaatctacactccaaagaatatagtgaaaacaaaagtttttgtgaagatctgacagagggaaagttctcatttcctactattcatgctatttggtcaaggcctgaaagcacccaggtgcagaatatcttgcgccagagaacagaaaacatagatataaaaaaatactgtgtacattatcttgaggatgtaggttcttttgaatacactcgtaatacccttaaagagcttgaagctaaagcctataaacagattgatgcacgtggtgggaaccctgagctagtagccttagtaaaacacttaagtaagatgttcaaagaagaaaatgaataatgttaagccattcttgattggacctcatagcttattttagttaatcttttttttgtcttttagccttaccaccttttaaaaaatttgttattctccagaaacagtaaataggtgagtaggggtggtgcaagtgaattcgttttcatttagaagcccctctgtacagataatcaaaattcaaagttgaaagaatcaaaagcagccacagttatgtaggtctgatttgaatgtcataattgcagtgacaggacattgccaccaactctatcctactaccatcaatgttgtgtttattccgtcaataaaaaagacttgcttccaggaatttttatccatacactttctaactgtactatctgggcagttccaagccagtttctattagctagctggaccaaagaccacaaatctctttttttcctaaacgctgctgtaaggaatatctcacttttccccccggaaacaccctcactgaagtcttctatgaaaaggctgataatgggctgggcgcggtggctcacgcctgtaatcccagcactttgggaggccgaggcgggcagatcacgaggtcaggagatcgagaccatcctgacacggtgaaaccctgtctctactaaaaatacaaaaaattagctgggcgtggtggtgggcgcctgtagtcccagctactcgggaggctgaggcaggagaatggtgtgaacccaggaggcggagcttgcagtgagccgagatagtgcctctgcactccagcctgggtgacagagcgagactccgtctcaaaaaaaagggctgataatgataaacagtgagcactccggtcctttttcttaggttttccttttttccttcctctccaccccacaagttttgctttttaaccaaggtgtctctgcttgatgaaattcacatgctagtctaaatctttttttctcccttgtaacatttatgtgccccaaactggttagtatatgggtacagcattccctttccaattgggaagcggaaaaagagagtatgggatattttagaagggagcctttgaaccttattatatttccccatcattgatagtgacaatcttaaaagggttgttttcttaccttaagtacaaaagcatggaaaaatgcgcttttccttcccgcccacatcaccaccccgacttgaagacagtaggtgcttgaatggaaagtgagtaggcatctttaatcgccctgattaaaggaaagtgttagcctgagagggcctgactgaaaagtaaccaaaggcttaatatcaaacactaattagctttttagtgccttaaccctgacctggttaccagttttctgtagtttctacacccaagccactgaagtcatctgtggcccaagaggtaggacaaaaaaaaaaaaaaaaaaagctgatttcaatatttgatttgttgacatcccaaaatgaaagttttatgtttcccttagaaacatgttttgcttggttctatagtatgttacttaggatctatttaccatatatttgtatgagaaatcctcacccaagcattcaacctaaatctttgaaaagttgggtgctgtctttagtaacttttaaaatagtttaaatctcccattttaatagtgataaggaaacctgttaaaatcatggctattgatgttatagtatggaaagttgaactttatgaacccatacttttaaaaagcatttttaaaaatctaacactgactatagaaacaaattaaaatgtctacctttaagtataa

SEQ ID NO: 7448 - protein, 300 aa, Homo sapiens [sequence omitted]

SEQ ID NO: 7449 - DNA, 1482 bp, Homo sapiens
gggaggcggcaacgacgcctgcgcagtgtgaccgggatggcgcattttcttgcaccaactaatgcggtgtcgctggcggctgaggagggcggagagttctgtggtgaaatagtgggaaggattcatgtaggcatcgggaagagcctaagtccacattataaaataggaagttgatgcggggtacagttactcccggaccggcggcgtgaaagtcgtgatatcatcgttgaactattagctttgaagtttaaatccaatggagaagactcaagaaacagtccaaagaattcttctagaaccctataaatacttacttcagttaccaggtaaacaagtgagaaccaaactttcacaggcatttaatcattggctgaaagttccagaggacaagctacagattattattgaagtgacagaaatgttgcataatgccagtttactcatcgatgatattgaagacaactcaaaactccgacgtggctttccagtggcccacagcatctatggaatcccatctgtcatcaattctgccaattacgtgtatttccttggcttggagaaagtcttaacccttgatcacccagatgcagtgaagctttttacccgccagcttttggaactccatcagggacaaggcctagatatttactggagggataattacacttgtcccactgaagaagaatataaagctatggtgctgcagaaaacaggtggactgtttggattagcagtaggtctcatgcagttgttctctgattacaaagaagatttaaaaccgctacttaatacacttgggctctttttccaaattagggatgattatgctaatctacactccaaagaatatagtgaaaacaaaagtttttgtgaagatctgacagagggaaagttctcatttcctactattcatgctatttggtcaaggcctgaaagcacccaggtgcagaatatcttgcgccagagaacagaaaacatagatataaaaaaatactgtgtacattatcttgaggatgtaggttcttttgaatacactcgtaatacccttaaagagcttgaagctaaagcctataaacagattgatgcacgtggtgggaaccctgagctagtagccttagtaaaacacttaagtaagatgttcaaagaagaaaatgaataatgttaagccattcttgattggacctcatagcttattttagttaatcttttttttgtcttttagccttaccaccttttaaaaaatttgttattctccagaaacagtaaataggtgagtaggggtggtgcaagtgaattcgttttcatttagaagcccctctgtacagataatcaaaattcaaagttgaaagaatcaaaagcagccacagttatgtaggtctgatttgaatgtcataattgcagtgacaggacattgccaccaactctatcctactaccatcaatgttgtgtttattccgtcaataaaaaagacttgcttccagg

SEQ ID NO: 7450 - protein, 300 aa, Homo sapiens [sequence omitted]

SEQ ID NO: 7451 - DNA, 2916 bp, Homo sapiens
gggaggcggcaacgacgcctgcgcagtgtgaccgggatggcgcattttcttgcaccaactaatgcggtgtcgctggcggctgaggagggcggagagttctgtggtgaaatagtgggaaggattcatgtaggcatcgggaagagcctaagtccacattataaaataggaagttgatgcggggtacagttactcccggaccggcggcgtgaaagtcgtgatatcatcgttgaactattagctttgaagtttaaatccaatggagaagactcaagaaacagtccaaagaattcttctagaaccctataaatacttacttcagttaccaggtaaacaagtgagaaccaaactttcacaggcatttaatcattggctgaaagttccagaggacaagctacagattattattgaagtgacagaaatgttgcataatgccagtttactcatcgatgatattgaagacaactcaaaactccgacgtggctttccagtggcccacagcatctatggaatcccatctgtcatcaattctgccaattacgtgtatttccttggcttggagaaagtcttaacccttgatcacccagatgcagtgaagctttttacccgccagcttttggaactccatcagggacaaggcctagatatttactggagggataattacacttgtcccactgaagaagaatataaagctatggtgctgcagaaaacaggtggactgtttggattagcagtaggtctcatgcagttgttctctgattacaaagaagatttaaaaccgctacttaatacacttgggctctttttccaaattagggatgattatgctaatctacactccaaagaatatagtgaaaacaaaagtttttgtgaagatctgacagagggaaagttctcatttcctactattcatgctatttggtcaaggcctgaaagcacccaggtgcagaatatcttgcgccagagaacagaaaacatagatataaaaaaatactgtgtacattatcttgaggatgtaggttcttttgaatacactcgtaatacccttaaagagcttgaagctaaagcctataaacagattgatgcacgtggtgggaaccctgagctagtagccttagtaaaacacttaagtaagatgttcaaagaagaaaatgaataatgttaagccattcttgattggacctcatagcttattttagttaatcttttttttgtcttttagccttaccaccttttaaaaaatttgttattctccagaaacagtaaataggtgagtaggggtggtgcaagtgaattcgttttcatttagaagcccctctgtacagataatcaaaattcaaagttgaaagaatcaaaagcagccacagttatgtaggtctgatttgaatgtcataattgcagtgacaggacattgccaccaactctatcctactaccatcaatgttgtgtttattccgtcaataaaaaagacttgcttccaggaatttttatccatacactttctaactgtactatctgggcagttccaagccagtttctattagctagctggaccaaagaccacaaatctctttttttcctaaacgctgctgtaaggaatatctcacttttccccccggaaacaccctcactgaagtcttctatgaaaaggctgataatgggctgggcgcggtggctcacgcctgtaatcccagcactttgggaggccgaggcgggcagatcacgaggtcaggagatcgagaccatcctgacacggtgaaaccctgtctctactaaaaatacaaaaaattagctgggcgtggtggtgggcgcctgtagtcccagctactcgggaggctgaggcaggagaatggtgtgaacccaggaggcggagcttgcagtgagccgagatagtgcctctgcactccagcctgggtgacagagcgagactccgtctcaaaaaaaagggctgataatgataaacagtgagcactccggtcctttttcttaggttttccttttttccttcctctccaccccacaagttttgctttttaaccaaggtgtctctgcttgatgaaattcacatgctagtctaaatctttttttctcccttgtaacatttatgtgccccaaactggttagtatatgggtacagcattccctttccaattgggaagcggaaaaagagagtatgggatattttagaagggagcctttgaaccttattatatttccccatcattgatagtgacaatcttaaaagggttgttttcttaccttaagtacaaaagcatggaaaaatgcgcttttccttcccgcccacatcaccaccccgacttgaagacagtaggtgcttgaatggaaagtgagtaggcatctttaatcgccctgattaaaggaaagtgttagcctgagagggcctgactgaaaagtaaccaaaggcttaatatcaaacactaattagctttttagtgccttaaccctgacctggttaccagttttctgtagtttctacacccaagccactgaagtcatctgtggcccaagaggtaggacaaaaaaaaaaaaaaaaaaagctgatttcaatatttgatttgttgacatcccaaaatgaaagttttatgtttcccttagaaacatgttttgcttggttctatagtatgttacttaggatctatttaccatatatttgtatgagaaatcctcacccaagcattcaacctaaatctttgaaaagttgggtgctgtctttagtaacttttaaaatagtttaaatctcccattttaatagtgataaggaaacctgttaaaatcatggctattgatgttatagtatggaaagttgaactttatgaacccatacttttaaaaagcatttttaaaaatctaacactgactatagaaacaaattaaaatgtctacctttaagtataa

SEQ ID NO: 7452 - protein, 300 aa, Homo sapiens [sequence omitted]

SEQ ID NO: 7453 - DNA, 1863 bp, Homo sapiens
agtgtgaccgggatggcgcattttcttgcaccaactaatgcggtgtcgctggcggctgaggagggcggagagttctgtggtgaaatagtgggaaggattcatgtaggcatcgggaagagcctaagtccacattataaaataggaagttgatgcggggtacagttactcccggaccggcggcgtgaaagtcgtgatatcatcgttgaactgtgagcggcagtggcggcggctggggggaacccggatgggaagaagggcgggggaggctgggaggcggggcagaggaaagaaagaaaggagagtgaggacccggatgctgaaccggattgtgtatgaattttccatcccctagctttaagcgaggagggagaggaagggttggccaagtggggcggaagggagcatctgagcgaggaggaagcagaaacctcaccgtttcttcccctccggactctgtgctagcactgtatacgtttgcagttctctgcccagccgctgtggaaaatcggcctcgaagtgattgaaattccctgtttatatcaggcggcttctttcagatccatcgtctttctcccggagtatgaatggaaggattcagtatgcgcttcacatttattagctttgaagtttaaatccaatggagaagactcaagaaacagtccaaagaattcttctagaaccctataaatacttacttcagttaccaggtaaacaagtgagaaccaaactttcacaggcatttaatcattggctgaaagttccagaggacaagctacagattattattgaagtgacagaaatgttgcataatgccagtttactcatcgatgatattgaagacaactcaaaactccgacgtggctttccagtggcccacagcatctatggaatcccatctgtcatcaattctgccaattacgtgtatttccttggcttggagaaagtcttaacccttgatcacccagatgcagtgaagctttttacccgccagcttttggaactccatcagggacaaggcctagatatttactggagggataattacacttgtcccactgaagaagaatataaagctatggtgctgcagaaaacaggtggactgtttggattagcagtaggtctcatgcagttgttctctgattacaaagaagatttaaaaccgctacttaatacacttgggctctttttccaaattagggatgattatgctaatctacactccaaagaatatagtgaaaacaaaagtttttgtgaagatctgacagagggaaagttctcatttcctactattcatgctatttggtcaaggcctgaaagcacccaggtgcagaatatcttgcgccagagaacagaaaacatagatataaaaaaatactgtgtacattatcttgaggatgtaggttcttttgaatacactcgtaatacccttaaagagcttgaagctaaagcctataaacagattgatgcacgtggtgggaaccctgagctagtagccttagtaaaacacttaagtaagatgttcaaagaagaaaatgaataatgttaagccattcttgattggacctcatagcttattttagttaatcttttttttgtcttttagccttaccaccttttaaaaaatttgttattctccagaaacagtaaataggtgagtaggggtggtgcaagtgaattcgttttcatttagaagcccctctgtacagataatcaaaattcaaagttgaaagaatcaaaagcagccacagttatgtaggtctgatttgaatgtcataattgcagtgacaggacattgccaccaactctatcctactaccatcaatgttgtgtttattccgtcaataaaaaagacttgcttccagg

SEQ ID NO: 7454 - protein, 300 aa, Homo sapiens [sequence omitted]

SEQ ID NO: 7455 - DNA, 3297 bp, Homo sapiens
agtgtgaccgggatggcgcattttcttgcaccaactaatgcggtgtcgctggcggctgaggagggcggagagttctgtggtgaaatagtgggaaggattcatgtaggcatcgggaagagcctaagtccacattataaaataggaagttgatgcggggtacagttactcccggaccggcggcgtgaaagtcgtgatatcatcgttgaactgtgagcggcagtggcggcggctggggggaacccggatgggaagaagggcgggggaggctgggaggcggggcagaggaaagaaagaaaggagagtgaggacccggatgctgaaccggattgtgtatgaattttccatcccctagctttaagcgaggagggagaggaagggttggccaagtggggcggaagggagcatctgagcgaggaggaagcagaaacctcaccgtttcttcccctccggactctgtgctagcactgtatacgtttgcagttctctgcccagccgctgtggaaaatcggcctcgaagtgattgaaattccctgtttatatcaggcggcttctttcagatccatcgtctttctcccggagtatgaatggaaggattcagtatgcgcttcacatttattagctttgaagtttaaatccaatggagaagactcaagaaacagtccaaagaattcttctagaaccctataaatacttacttcagttaccaggtaaacaagtgagaaccaaactttcacaggcatttaatcattggctgaaagttccagaggacaagctacagattattattgaagtgacagaaatgttgcataatgccagtttactcatcgatgatattgaagacaactcaaaactccgacgtggctttccagtggcccacagcatctatggaatcccatctgtcatcaattctgccaattacgtgtatttccttggcttggagaaagtcttaacccttgatcacccagatgcagtgaagctttttacccgccagcttttggaactccatcagggacaaggcctagatatttactggagggataattacacttgtcccactgaagaagaatataaagctatggtgctgcagaaaacaggtggactgtttggattagcagtaggtctcatgcagttgttctctgattacaaagaagatttaaaaccgctacttaatacacttgggctctttttccaaattagggatgattatgctaatctacactccaaagaatatagtgaaaacaaaagtttttgtgaagatctgacagagggaaagttctcatttcctactattcatgctatttggtcaaggcctgaaagcacccaggtgcagaatatcttgcgccagagaacagaaaacatagatataaaaaaatactgtgtacattatcttgaggatgtaggttcttttgaatacactcgtaatacccttaaagagcttgaagctaaagcctataaacagattgatgcacgtggtgggaaccctgagctagtagccttagtaaaacacttaagtaagatgttcaaagaagaaaatgaataatgttaagccattcttgattggacctcatagcttattttagttaatcttttttttgtcttttagccttaccaccttttaaaaaatttgttattctccagaaacagtaaataggtgagtaggggtggtgcaagtgaattcgttttcatttagaagcccctctgtacagataatcaaaattcaaagttgaaagaatcaaaagcagccacagttatgtaggtctgatttgaatgtcataattgcagtgacaggacattgccaccaactctatcctactaccatcaatgttgtgtttattccgtcaataaaaaagacttgcttccaggaatttttatccatacactttctaactgtactatctgggcagttccaagccagtttctattagctagctggaccaaagaccacaaatctctttttttcctaaacgctgctgtaaggaatatctcacttttccccccggaaacaccctcactgaagtcttctatgaaaaggctgataatgggctgggcgcggtggctcacgcctgtaatcccagcactttgggaggccgaggcgggcagatcacgaggtcaggagatcgagaccatcctgacacggtgaaaccctgtctctactaaaaatacaaaaaattagctgggcgtggtggtgggcgcctgtagtcccagctactcgggaggctgaggcaggagaatggtgtgaacccaggaggcggagcttgcagtgagccgagatagtgcctctgcactccagcctgggtgacagagcgagactccgtctcaaaaaaaagggctgataatgataaacagtgagcactccggtcctttttcttaggttttccttttttccttcctctccaccccacaagttttgctttttaaccaaggtgtctctgcttgatgaaattcacatgctagtctaaatctttttttctcccttgtaacatttatgtgccccaaactggttagtatatgggtacagcattccctttccaattgggaagcggaaaaagagagtatgggatattttagaagggagcctttgaaccttattatatttccccatcattgatagtgacaatcttaaaagggttgttttcttaccttaagtacaaaagcatggaaaaatgcgcttttccttcccgcccacatcaccaccccgacttgaagacagtaggtgcttgaatggaaagtgagtaggcatctttaatcgccctgattaaaggaaagtgttagcctgagagggcctgactgaaaagtaaccaaaggcttaatatcaaacactaattagctttttagtgccttaaccctgacctggttaccagttttctgtagtttctacacccaagccactgaagtcatctgtggcccaagaggtaggacaaaaaaaaaaaaaaaaaaagctgatttcaatatttgatttgttgacatcccaaaatgaaagttttatgtttcccttagaaacatgttttgcttggttctatagtatgttacttaggatctatttaccatatatttgtatgagaaatcctcacccaagcattcaacctaaatctttgaaaagttgggtgctgtctttagtaacttttaaaatagtttaaatctcccattttaatagtgataaggaaacctgttaaaatcatggctattgatgttatagtatggaaagttgaactttatgaacccatacttttaaaaagcatttttaaaaatctaacactgactatagaaacaaattaaaatgtctacctttaagtataa

SEQ ID NO: 7456 - protein, 300 aa, Homo sapiens [sequence omitted]

SEQ ID NO: 7457 - DNA, 1362 bp, Homo sapiens
gtgaccgggatggcgcattttcttgcaccaactaatgcggtgtcgctggcggctgaggagggcggagagttctgtggtgaaatagtgggaaggattcatgtaggcatcgggaagagcctaagtccacattataaaataggaagttgatgcggggtacagttactcccggaccggcggcgtgaaagtcgtgatatcatcgttgaactgtaaacaagtgagaaccaaactttcacaggcatttaatcattggctgaaagttccagaggacaagctacagattattattgaagtgacagaaatgttgcataatgccagtttactcatcgatgatattgaagacaactcaaaactccgacgtggctttccagtggcccacagcatctatggaatcccatctgtcatcaattctgccaattacgtgtatttccttggcttggagaaagtcttaacccttgatcacccagatgcagtgaagctttttacccgccagcttttggaactccatcagggacaaggcctagatatttactggagggataattacacttgtcccactgaagaagaatataaagctatggtgctgcagaaaacaggtggactgtttggattagcagtaggtctcatgcagttgttctctgattacaaagaagatttaaaaccgctacttaatacacttgggctctttttccaaattagggatgattatgctaatctacactccaaagaatatagtgaaaacaaaagtttttgtgaagatctgacagagggaaagttctcatttcctactattcatgctatttggtcaaggcctgaaagcacccaggtgcagaatatcttgcgccagagaacagaaaacatagatataaaaaaatactgtgtacattatcttgaggatgtaggttcttttgaatacactcgtaatacccttaaagagcttgaagctaaagcctataaacagattgatgcacgtggtgggaaccctgagctagtagccttagtaaaacacttaagtaagatgttcaaagaagaaaatgaataatgttaagccattcttgattggacctcatagcttattttagttaatcttttttttgtcttttagccttaccaccttttaaaaaatttgttattctccagaaacagtaaataggtgagtaggggtggtgcaagtgaattcgttttcatttagaagcccctctgtacagataatcaaaattcaaagttgaaagaatcaaaagcagccacagttatgtaggtctgatttgaatgtcataattgcagtgacaggacattgccaccaactctatcctactaccatcaatgttgtgtttattccgtcaataaaaaagacttgcttccagg

SEQ ID NO: 7458 - protein, 246 aa, Homo sapiens; identical to SEQ ID NO: 446

SEQ ID NO: 7459 - DNA, 2796 bp, Homo sapiens
gtgaccgggatggcgcattttcttgcaccaactaatgcggtgtcgctggcggctgaggagggcggagagttctgtggtgaaatagtgggaaggattcatgtaggcatcgggaagagcctaagtccacattataaaataggaagttgatgcggggtacagttactcccggaccggcggcgtgaaagtcgtgatatcatcgttgaactgtaaacaagtgagaaccaaactttcacaggcatttaatcattggctgaaagttccagaggacaagctacagattattattgaagtgacagaaatgttgcataatgccagtttactcatcgatgatattgaagacaactcaaaactccgacgtggctttccagtggcccacagcatctatggaatcccatctgtcatcaattctgccaattacgtgtatttccttggcttggagaaagtcttaacccttgatcacccagatgcagtgaagctttttacccgccagcttttggaactccatcagggacaaggcctagatatttactggagggataattacacttgtcccactgaagaagaatataaagctatggtgctgcagaaaacaggtggactgtttggattagcagtaggtctcatgcagttgttctctgattacaaagaagatttaaaaccgctacttaatacacttgggctctttttccaaattagggatgattatgctaatctacactccaaagaatatagtgaaaacaaaagtttttgtgaagatctgacagagggaaagttctcatttcctactattcatgctatttggtcaaggcctgaaagcacccaggtgcagaatatcttgcgccagagaacagaaaacatagatataaaaaaatactgtgtacattatcttgaggatgtaggttcttttgaatacactcgtaatacccttaaagagcttgaagctaaagcctataaacagattgatgcacgtggtgggaaccctgagctagtagccttagtaaaacacttaagtaagatgttcaaagaagaaaatgaataatgttaagccattcttgattggacctcatagcttattttagttaatcttttttttgtcttttagccttaccaccttttaaaaaatttgttattctccagaaacagtaaataggtgagtaggggtggtgcaagtgaattcgttttcatttagaagcccctctgtacagataatcaaaattcaaagttgaaagaatcaaaagcagccacagttatgtaggtctgatttgaatgtcataattgcagtgacaggacattgccaccaactctatcctactaccatcaatgttgtgtttattccgtcaataaaaaagacttgcttccaggaatttttatccatacactttctaactgtactatctgggcagttccaagccagtttctattagctagctggaccaaagaccacaaatctctttttttcctaaacgctgctgtaaggaatatctcacttttccccccggaaacaccctcactgaagtcttctatgaaaaggctgataatgggctgggcgcggtggctcacgcctgtaatcccagcactttgggaggccgaggcgggcagatcacgaggtcaggagatcgagaccatcctgacacggtgaaaccctgtctctactaaaaatacaaaaaattagctgggcgtggtggtgggcgcctgtagtcccagctactcgggaggctgaggcaggagaatggtgtgaacccaggaggcggagcttgcagtgagccgagatagtgcctctgcactccagcctgggtgacagagcgagactccgtctcaaaaaaaagggctgataatgataaacagtgagcactccggtcctttttcttaggttttccttttttccttcctctccaccccacaagttttgctttttaaccaaggtgtctctgcttgatgaaattcacatgctagtctaaatctttttttctcccttgtaacatttatgtgccccaaactggttagtatatgggtacagcattccctttccaattgggaagcggaaaaagagagtatgggatattttagaagggagcctttgaaccttattatatttccccatcattgatagtgacaatcttaaaagggttgttttcttaccttaagtacaaaagcatggaaaaatgcgcttttccttcccgcccacatcaccaccccgacttgaagacagtaggtgcttgaatggaaagtgagtaggcatctttaatcgccctgattaaaggaaagtgttagcctgagagggcctgactgaaaagtaaccaaaggcttaatatcaaacactaattagctttttagtgccttaaccctgacctggttaccagttttctgtagtttctacacccaagccactgaagtcatctgtggcccaagaggtaggacaaaaaaaaaaaaaaaaaaagctgatttcaatatttgatttgttgacatcccaaaatgaaagttttatgtttcccttagaaacatgttttgcttggttctatagtatgttacttaggatctatttaccatatatttgtatgagaaatcctcacccaagcattcaacctaaatctttgaaaagttgggtgctgtctttagtaacttttaaaatagtttaaatctcccattttaatagtgataaggaaacctgttaaaatcatggctattgatgttatagtatggaaagttgaactttatgaacccatacttttaaaaagcatttttaaaaatctaacactgactatagaaacaaattaaaatgtctacctttaagtataa

SEQ ID NO: 7460 - protein, 246 aa, Homo sapiens; identical to SEQ ID NO: 446

SEQ ID NO: 7461 - DNA, 1327 bp, Homo sapiens
cttgcaccaactaatgcggtgtcgctggcggctgaggagggcggagagttctgtggtgaaatagtgggaaggattcatattagctttgaagtttaaatccaatggagaagactcaagaaacagtccaaagaattcttctagaaccctataaatacttacttcagttaccaggtaaacaagtgagaaccaaactttcacaggcatttaatcattggctgaaagttccagaggacaagctacagattattattgaagtgacagaaatgttgcataatgccagtttactcatcgatgatattgaagacaactcaaaactccgacgtggctttccagtggcccacagcatctatggaatcccatctgtcatcaattctgccaattacgtgtatttccttggcttggagaaagtcttaacccttgatcacccagatgcagtgaagctttttacccgccagcttttggaactccatcagggacaaggcctagatatttactggagggataattacacttgtcccactgaagaagaatataaagctatggtgctgcagaaaacaggtggactgtttggattagcagtaggtctcatgcagttgttctctgattacaaagaagatttaaaaccgctacttaatacacttgggctctttttccaaattagggatgattatgctaatctacactccaaagaatatagtgaaaacaaaagtttttgtgaagatctgacagagggaaagttctcatttcctactattcatgctatttggtcaaggcctgaaagcacccaggtgcagaatatcttgcgccagagaacagaaaacatagatataaaaaaatactgtgtacattatcttgaggatgtaggttcttttgaatacactcgtaatacccttaaagagcttgaagctaaagcctataaacagattgatgcacgtggtgggaaccctgagctagtagccttagtaaaacacttaagtaagatgttcaaagaagaaaatgaataatgttaagccattcttgattggacctcatagcttattttagttaatcttttttttgtcttttagccttaccaccttttaaaaaatttgttattctccagaaacagtaaataggtgagtaggggtggtgcaagtgaattcgttttcatttagaagcccctctgtacagataatcaaaattcaaagttgaaagaatcaaaagcagccacagttatgtaggtctgatttgaatgtcataattgcagtgacaggacattgccaccaactctatcctactaccatcaatgttgtgtttattccgtcaataaaaaagacttgcttccagg

SEQ ID NO: 7462 - protein, 300 aa, Homo sapiens [sequence omitted]

SEQ ID NO: 7463 - DNA, 2761 bp, Homo sapiens
cttgcaccaactaatgcggtgtcgctggcggctgaggagggcggagagttctgtggtgaaatagtgggaaggattcatattagctttgaagtttaaatccaatggagaagactcaagaaacagtccaaagaattcttctagaaccctataaatacttacttcagttaccaggtaaacaagtgagaaccaaactttcacaggcatttaatcattggctgaaagttccagaggacaagctacagattattattgaagtgacagaaatgttgcataatgccagtttactcatcgatgatattgaagacaactcaaaactccgacgtggctttccagtggcccacagcatctatggaatcccatctgtcatcaattctgccaattacgtgtatttccttggcttggagaaagtcttaacccttgatcacccagatgcagtgaagctttttacccgccagcttttggaactccatcagggacaaggcctagatatttactggagggataattacacttgtcccactgaagaagaatataaagctatggtgctgcagaaaacaggtggactgtttggattagcagtaggtctcatgcagttgttctctgattacaaagaagatttaaaaccgctacttaatacacttgggctctttttccaaattagggatgattatgctaatctacactccaaagaatatagtgaaaacaaaagtttttgtgaagatctgacagagggaaagttctcatttcctactattcatgctatttggtcaaggcctgaaagcacccaggtgcagaatatcttgcgccagagaacagaaaacatagatataaaaaaatactgtgtacattatcttgaggatgtaggttcttttgaatacactcgtaatacccttaaagagcttgaagctaaagcctataaacagattgatgcacgtggtgggaaccctgagctagtagccttagtaaaacacttaagtaagatgttcaaagaagaaaatgaataatgttaagccattcttgattggacctcatagcttattttagttaatcttttttttgtcttttagccttaccaccttttaaaaaatttgttattctccagaaacagtaaataggtgagtaggggtggtgcaagtgaattcgttttcatttagaagcccctctgtacagataatcaaaattcaaagttgaaagaatcaaaagcagccacagttatgtaggtctgatttgaatgtcataattgcagtgacaggacattgccaccaactctatcctactaccatcaatgttgtgtttattccgtcaataaaaaagacttgcttccaggaatttttatccatacactttctaactgtactatctgggcagttccaagccagtttctattagctagctggaccaaagaccacaaatctctttttttcctaaacgctgctgtaaggaatatctcacttttccccccggaaacaccctcactgaagtcttctatgaaaaggctgataatgggctgggcgcggtggctcacgcctgtaatcccagcactttgggaggccgaggcgggcagatcacgaggtcaggagatcgagaccatcctgacacggtgaaaccctgtctctactaaaaatacaaaaaattagctgggcgtggtggtgggcgcctgtagtcccagctactcgggaggctgaggcaggagaatggtgtgaacccaggaggcggagcttgcagtgagccgagatagtgcctctgcactccagcctgggtgacagagcgagactccgtctcaaaaaaaagggctgataatgataaacagtgagcactccggtcctttttcttaggttttccttttttccttcctctccaccccacaagttttgctttttaaccaaggtgtctctgcttgatgaaattcacatgctagtctaaatctttttttctcccttgtaacatttatgtgccccaaactggttagtatatgggtacagcattccctttccaattgggaagcggaaaaagagagtatgggatattttagaagggagcctttgaaccttattatatttccccatcattgatagtgacaatcttaaaagggttgttttcttaccttaagtacaaaagcatggaaaaatgcgcttttccttcccgcccacatcaccaccccgacttgaagacagtaggtgcttgaatggaaagtgagtaggcatctttaatcgccctgattaaaggaaagtgttagcctgagagggcctgactgaaaagtaaccaaaggcttaatatcaaacactaattagctttttagtgccttaaccctgacctggttaccagttttctgtagtttctacacccaagccactgaagtcatctgtggcccaagaggtaggacaaaaaaaaaaaaaaaaaaagctgatttcaatatttgatttgttgacatcccaaaatgaaagttttatgtttcccttagaaacatgttttgcttggttctatagtatgttacttaggatctatttaccatatatttgtatgagaaatcctcacccaagcattcaacctaaatctttgaaaagttgggtgctgtctttagtaacttttaaaatagtttaaatctcccattttaatagtgataaggaaacctgttaaaatcatggctattgatgttatagtatggaaagttgaactttatgaacccatacttttaaaaagcatttttaaaaatctaacactgactatagaaacaaattaaaatgtctacctttaagtataa

SEQ ID NO: 7464 - protein, 300 aa, Homo sapiens [sequence omitted]

SEQ ID NO: 7465 - DNA, 2368 bp, Homo sapiens
gagagtgaggacccggatgctgaaccggattgtgtatgaattttccatcccctagctttaagcgaggagggagaggaagggttggccaagtggggcggaagggagcatctgagcgaggaggaagcagaaacctcaccgtttcttcccctccggactctgtgctagcactgtatacgtttgcagttctctgcccagccgctgtggaaaatcggcctcgaagtgattgaaattccctgtttatatcaggcggcttctttcagatccatcgtctttctcccggagtatgaatggaaggattcagtatgcgcttcacatttgtatgtctctggccattctcaaaccaggcccttccctttgaaaagtcttttgcatgggatgttcacttcttagacgcaaggttgtgtgccctggtttcatcgtctaacgcgttagaaggcgctttcatttcttcatgggtgttgagcgccgaccactggggtggcctctgccttcgtagacctgcgcctggtgagacggacagatgctgaacaaaacgatgtgaaattaccgcagtggcagtgccccagaggagagttccacggtgataggagaatgagggaatttggcttctttagggagggaaaggaagggtttctgagcaagtgaggatcgagctgagagctgaagggctagcaggagttaactaaggaaagagaaaaggaaaagacattccagacaaaaagactaacttgtcagaaagccctgtggcggaagggagcttttccaatatgaagaactgagcctggagagatgggatgagggggagtgtcgaaccttttaggctttgtaaaggagttttggttttctcctaatagcaatgggatatcttccaaggaatctcaatcaaaagggagagatggctccgattggaatgtcatccctggctgaagagtagaggaagcgaaaaaaagaagagttaaagaggcaaatgcagggaacccgacgaggaggctattgccgtagtagttcacatggtgaaaagaatggagcgtttgtattaatgattatggattcactctttgaacaaatttctggcagctttttagttttgaaagtgagaagtttcagactctcactgagattagctttgaagtttaaatccaatggagaagactcaagaaacagtccaaagaattcttctagaaccctataaatacttacttcagttaccaggtaaacaagtgagaaccaaactttcacaggcatttaatcattggctgaaagttccagaggacaagctacagattattattgaagtgacagaaatgttgcataatgccagtttactcatcgatgatattgaagacaactcaaaactccgacgtggctttccagtggcccacagcatctatggaatcccatctgtcatcaattctgccaattacgtgtatttccttggcttggagaaagtcttaacccttgatcacccagatgcagtgaagctttttacccgccagcttttggaactccatcagggacaaggcctagatatttactggagggataattacacttgtcccactgaagaagaatataaagctatggtgctgcagaaaacaggtggactgtttggattagcagtaggtctcatgcagttgttctctgattacaaagaagatttaaaaccgctacttaatacacttgggctctttttccaaattagggatgattatgctaatctacactccaaagaatatagtgaaaacaaaagtttttgtgaagatctgacagagggaaagttctcatttcctactattcatgctatttggtcaaggcctgaaagcacccaggtgcagaatatcttgcgccagagaacagaaaacatagatataaaaaaatactgtgtacattatcttgaggatgtaggttcttttgaatacactcgtaatacccttaaagagcttgaagctaaagcctataaacagattgatgcacgtggtgggaaccctgagctagtagccttagtaaaacacttaagtaagatgttcaaagaagaaaatgaataatgttaagccattcttgattggacctcatagcttattttagttaatcttttttttgtcttttagccttaccaccttttaaaaaatttgttattctccagaaacagtaaataggtgagtaggggtggtgcaagtgaattcgttttcatttagaagcccctctgtacagataatcaaaattcaaagttgaaagaatcaaaagcagccacagttatgtaggtctgatttgaatgtcataattgcagtgacaggacattgccaccaactctatcctactaccatcaatgttgtgtttattccgtcaataaaaaagacttgcttccagg

SEQ ID NO: 7466 - protein, 300 aa, Homo sapiens [sequence omitted]

SEQ ID NO: 7467 - DNA, 3802 bp, Homo sapiens
gagagtgaggacccggatgctgaaccggattgtgtatgaattttccatcccctagctttaagcgaggagggagaggaagggttggccaagtggggcggaagggagcatctgagcgaggaggaagcagaaacctcaccgtttcttcccctccggactctgtgctagcactgtatacgtttgcagttctctgcccagccgctgtggaaaatcggcctcgaagtgattgaaattccctgtttatatcaggcggcttctttcagatccatcgtctttctcccggagtatgaatggaaggattcagtatgcgcttcacatttgtatgtctctggccattctcaaaccaggcccttccctttgaaaagtcttttgcatgggatgttcacttcttagacgcaaggttgtgtgccctggtttcatcgtctaacgcgttagaaggcgctttcatttcttcatgggtgttgagcgccgaccactggggtggcctctgccttcgtagacctgcgcctggtgagacggacagatgctgaacaaaacgatgtgaaattaccgcagtggcagtgccccagaggagagttccacggtgataggagaatgagggaatttggcttctttagggagggaaaggaagggtttctgagcaagtgaggatcgagctgagagctgaagggctagcaggagttaactaaggaaagagaaaaggaaaagacattccagacaaaaagactaacttgtcagaaagccctgtggcggaagggagcttttccaatatgaagaactgagcctggagagatgggatgagggggagtgtcgaaccttttaggctttgtaaaggagttttggttttctcctaatagcaatgggatatcttccaaggaatctcaatcaaaagggagagatggctccgattggaatgtcatccctggctgaagagtagaggaagcgaaaaaaagaagagttaaagaggcaaatgcagggaacccgacgaggaggctattgccgtagtagttcacatggtgaaaagaatggagcgtttgtattaatgattatggattcactctttgaacaaatttctggcagctttttagttttgaaagtgagaagtttcagactctcactgagattagctttgaagtttaaatccaatggagaagactcaagaaacagtccaaagaattcttctagaaccctataaatacttacttcagttaccaggtaaacaagtgagaaccaaactttcacaggcatttaatcattggctgaaagttccagaggacaagctacagattattattgaagtgacagaaatgttgcataatgccagtttactcatcgatgatattgaagacaactcaaaactccgacgtggctttccagtggcccacagcatctatggaatcccatctgtcatcaattctgccaattacgtgtatttccttggcttggagaaagtcttaacccttgatcacccagatgcagtgaagctttttacccgccagcttttggaactccatcagggacaaggcctagatatttactggagggataattacacttgtcccactgaagaagaatataaagctatggtgctgcagaaaacaggtggactgtttggattagcagtaggtctcatgcagttgttctctgattacaaagaagatttaaaaccgctacttaatacacttgggctctttttccaaattagggatgattatgctaatctacactccaaagaatatagtgaaaacaaaagtttttgtgaagatctgacagagggaaagttctcatttcctactattcatgctatttggtcaaggcctgaaagcacccaggtgcagaatatcttgcgccagagaacagaaaacatagatataaaaaaatactgtgtacattatcttgaggatgtaggttcttttgaatacactcgtaatacccttaaagagcttgaagctaaagcctataaacagattgatgcacgtggtgggaaccctgagctagtagccttagtaaaacacttaagtaagatgttcaaagaagaaaatgaataatgttaagccattcttgattggacctcatagcttattttagttaatcttttttttgtcttttagccttaccaccttttaaaaaatttgttattctccagaaacagtaaataggtgagtaggggtggtgcaagtgaattcgttttcatttagaagcccctctgtacagataatcaaaattcaaagttgaaagaatcaaaagcagccacagttatgtaggtctgatttgaatgtcataattgcagtgacaggacattgccaccaactctatcctactaccatcaatgttgtgtttattccgtcaataaaaaagacttgcttccaggaatttttatccatacactttctaactgtactatctgggcagttccaagccagtttctattagctagctggaccaaagaccacaaatctctttttttcctaaacgctgctgtaaggaatatctcacttttccccccggaaacaccctcactgaagtcttctatgaaaaggctgataatgggctgggcgcggtggctcacgcctgtaatcccagcactttgggaggccgaggcgggcagatcacgaggtcaggagatcgagaccatcctgacacggtgaaaccctgtctctactaaaaatacaaaaaattagctgggcgtggtggtgggcgcctgtagtcccagctactcgggaggctgaggcaggagaatggtgtgaacccaggaggcggagcttgcagtgagccgagatagtgcctctgcactccagcctgggtgacagagcgagactccgtctcaaaaaaaagggctgataatgataaacagtgagcactccggtcctttttcttaggttttccttttttccttcctctccaccccacaagttttgctttttaaccaaggtgtctctgcttgatgaaattcacatgctagtctaaatctttttttctcccttgtaacatttatgtgccccaaactggttagtatatgggtacagcattccctttccaattgggaagcggaaaaagagagtatgggatattttagaagggagcctttgaaccttattatatttccccatcattgatagtgacaatcttaaaagggttgttttcttaccttaagtacaaaagcatggaaaaatgcgcttttccttcccgcccacatcaccaccccgacttgaagacagtaggtgcttgaatggaaagtgagtaggcatctttaatcgccctgattaaaggaaagtgttagcctgagagggcctgactgaaaagtaaccaaaggcttaatatcaaacactaattagctttttagtgccttaaccctgacctggttaccagttttctgtagtttctacacccaagccactgaagtcatctgtggcccaagaggtaggacaaaaaaaaaaaaaaaaaaagctgatttcaatatttgatttgttgacatcccaaaatgaaagttttatgtttcccttagaaacatgttttgcttggttctatagtatgttacttaggatctatttaccatatatttgtatgagaaatcctcacccaagcattcaacctaaatctttgaaaagttgggtgctgtctttagtaacttttaaaatagtttaaatctcccattttaatagtgataaggaaacctgttaaaatcatggctattgatgttatagtatggaaagttgaactttatgaacccatacttttaaaaagcatttttaaaaatctaacactgactatagaaacaaattaaaatgtctacctttaagtataa

SEQ ID NO: 7468 - protein, 300 aa, Homo sapiens [sequence omitted]

SEQ ID NO: 7469 - DNA, 2298 bp, Homo sapiens
aggagaatgagggaatttggcttctttagggagggaaaggaagggtttctgagcaagtgaggatcgagctgagagctgaagggctagcaggagttaactaaggaaagagaaaaggaaaagacattccagacaaaaagactaacttgtcagaaagccctgtggcggaagggagcttttccaatatgaagaactgagcctggagagatgggatgagggggagtgtcgaaccttttaggctttgtaaaggagttttggttttctcctaatagcaatgggatatcttccaaggaatctcaatcaaaagggagagatggctccgattggaatgtcatccctggctgaagagtagaggaagcgaaaaaaagaagagttaaagaggcaaatgcagggaacccgacgaggaggctattgccgtagtagttcacatggtgaaaagaatggagcgtttgtattaatgattatggattcactctttgaacaaatttctggcagctttttagttttgaaagtgagaagtttcagactctcactgaggtattctgtagttttttcactctaaaaggaaactagtagagttcatgtaacacacactaatgcctctttacatttaactttagtatgtgatagctgaaatttccagctgtgataaattgggaaatcctttgatttaaaagaaaaacaaaggcgggtgagggtgagagtatatgccacggtgtgtagaatcctttagactcttaagaagacacaaggcggctgggcgtggtggctcacgcttgtaatcccagcactttgggaggccgaggcgggcggatcacgaggtcaggagatcgagaccatcctggctaacacggtgaaagcccgtctctactaaaaatacaaaaaaattagccgggcaaggtggcgggcgcctgtagtcccagctactcgggaggctgaggcaggagaatggcgtgaacccgggaggcggagtttgcagtgagacgagatcacgccactgcactccagcctgggcgacagagtgagacgctgtttcagaagaaagacacaagattagctttgaagtttaaatccaatggagaagactcaagaaacagtccaaagaattcttctagaaccctataaatacttacttcagttaccaggtaaacaagtgagaaccaaactttcacaggcatttaatcattggctgaaagttccagaggacaagctacagattattattgaagtgacagaaatgttgcataatgccagtttactcatcgatgatattgaagacaactcaaaactccgacgtggctttccagtggcccacagcatctatggaatcccatctgtcatcaattctgccaattacgtgtatttccttggcttggagaaagtcttaacccttgatcacccagatgcagtgaagctttttacccgccagcttttggaactccatcagggacaaggcctagatatttactggagggataattacacttgtcccactgaagaagaatataaagctatggtgctgcagaaaacaggtggactgtttggattagcagtaggtctcatgcagttgttctctgattacaaagaagatttaaaaccgctacttaatacacttgggctctttttccaaattagggatgattatgctaatctacactccaaagaatatagtgaaaacaaaagtttttgtgaagatctgacagagggaaagttctcatttcctactattcatgctatttggtcaaggcctgaaagcacccaggtgcagaatatcttgcgccagagaacagaaaacatagatataaaaaaatactgtgtacattatcttgaggatgtaggttcttttgaatacactcgtaatacccttaaagagcttgaagctaaagcctataaacagattgatgcacgtggtgggaaccctgagctagtagccttagtaaaacacttaagtaagatgttcaaagaagaaaatgaataatgttaagccattcttgattggacctcatagcttattttagttaatcttttttttgtcttttagccttaccaccttttaaaaaatttgttattctccagaaacagtaaataggtgagtaggggtggtgcaagtgaattcgttttcatttagaagcccctctgtacagataatcaaaattcaaagttgaaagaatcaaaagcagccacagttatgtaggtctgatttgaatgtcataattgcagtgacaggacattgccaccaactctatcctactaccatcaatgttgtgtttattccgtcaataaaaaagacttgcttccagg

SEQ ID NO: 7470 - protein, 300 aa, Homo sapiens [sequence omitted]

SEQ ID NO: 7471 - DNA, 3732 bp, Homo sapiens
aggagaatgagggaatttggcttctttagggagggaaaggaagggtttctgagcaagtgaggatcgagctgagagctgaagggctagcaggagttaactaaggaaagagaaaaggaaaagacattccagacaaaaagactaacttgtcagaaagccctgtggcggaagggagcttttccaatatgaagaactgagcctggagagatgggatgagggggagtgtcgaaccttttaggctttgtaaaggagttttggttttctcctaatagcaatgggatatcttccaaggaatctcaatcaaaagggagagatggctccgattggaatgtcatccctggctgaagagtagaggaagcgaaaaaaagaagagttaaagaggcaaatgcagggaacccgacgaggaggctattgccgtagtagttcacatggtgaaaagaatggagcgtttgtattaatgattatggattcactctttgaacaaatttctggcagctttttagttttgaaagtgagaagtttcagactctcactgaggtattctgtagttttttcactctaaaaggaaactagtagagttcatgtaacacacactaatgcctctttacatttaactttagtatgtgatagctgaaatttccagctgtgataaattgggaaatcctttgatttaaaagaaaaacaaaggcgggtgagggtgagagtatatgccacggtgtgtagaatcctttagactcttaagaagacacaaggcggctgggcgtggtggctcacgcttgtaatcccagcactttgggaggccgaggcgggcggatcacgaggtcaggagatcgagaccatcctggctaacacggtgaaagcccgtctctactaaaaatacaaaaaaattagccgggcaaggtggcgggcgcctgtagtcccagctactcgggaggctgaggcaggagaatggcgtgaacccgggaggcggagtttgcagtgagacgagatcacgccactgcactccagcctgggcgacagagtgagacgctgtttcagaagaaagacacaagattagctttgaagtttaaatccaatggagaagactcaagaaacagtccaaagaattcttctagaaccctataaatacttacttcagttaccaggtaaacaagtgagaaccaaactttcacaggcatttaatcattggctgaaagttccagaggacaagctacagattattattgaagtgacagaaatgttgcataatgccagtttactcatcgatgatattgaagacaactcaaaactccgacgtggctttccagtggcccacagcatctatggaatcccatctgtcatcaattctgccaattacgtgtatttccttggcttggagaaagtcttaacccttgatcacccagatgcagtgaagctttttacccgccagcttttggaactccatcagggacaaggcctagatatttactggagggataattacacttgtcccactgaagaagaatataaagctatggtgctgcagaaaacaggtggactgtttggattagcagtaggtctcatgcagttgttctctgattacaaagaagatttaaaaccgctacttaatacacttgggctctttttccaaattagggatgattatgctaatctacactccaaagaatatagtgaaaacaaaagtttttgtgaagatctgacagagggaaagttctcatttcctactattcatgctatttggtcaaggcctgaaagcacccaggtgcagaatatcttgcgccagagaacagaaaacatagatataaaaaaatactgtgtacattatcttgaggatgtaggttcttttgaatacactcgtaatacccttaaagagcttgaagctaaagcctataaacagattgatgcacgtggtgggaaccctgagctagtagccttagtaaaacacttaagtaagatgttcaaagaagaaaatgaataatgttaagccattcttgattggacctcatagcttattttagttaatcttttttttgtcttttagccttaccaccttttaaaaaatttgttattctccagaaacagtaaataggtgagtaggggtggtgcaagtgaattcgttttcatttagaagcccctctgtacagataatcaaaattcaaagttgaaagaatcaaaagcagccacagttatgtaggtctgatttgaatgtcataattgcagtgacaggacattgccaccaactctatcctactaccatcaatgttgtgtttattccgtcaataaaaaagacttgcttccaggaatttttatccatacactttctaactgtactatctgggcagttccaagccagtttctattagctagctggaccaaagaccacaaatctctttttttcctaaacgctgctgtaaggaatatctcacttttccccccggaaacaccctcactgaagtcttctatgaaaaggctgataatgggctgggcgcggtggctcacgcctgtaatcccagcactttgggaggccgaggcgggcagatcacgaggtcaggagatcgagaccatcctgacacggtgaaaccctgtctctactaaaaatacaaaaaattagctgggcgtggtggtgggcgcctgtagtcccagctactcgggaggctgaggcaggagaatggtgtgaacccaggaggcggagcttgcagtgagccgagatagtgcctctgcactccagcctgggtgacagagcgagactccgtctcaaaaaaaagggctgataatgataaacagtgagcactccggtcctttttcttaggttttccttttttccttcctctccaccccacaagttttgctttttaaccaaggtgtctctgcttgatgaaattcacatgctagtctaaatctttttttctcccttgtaacatttatgtgccccaaactggttagtatatgggtacagcattccctttccaattgggaagcggaaaaagagagtatgggatattttagaagggagcctttgaaccttattatatttccccatcattgatagtgacaatcttaaaagggttgttttcttaccttaagtacaaaagcatggaaaaatgcgcttttccttcccgcccacatcaccaccccgacttgaagacagtaggtgcttgaatggaaagtgagtaggcatctttaatcgccctgattaaaggaaagtgttagcctgagagggcctgactgaaaagtaaccaaaggcttaatatcaaacactaattagctttttagtgccttaaccctgacctggttaccagttttctgtagtttctacacccaagccactgaagtcatctgtggcccaagaggtaggacaaaaaaaaaaaaaaaaaaagctgatttcaatatttgatttgttgacatcccaaaatgaaagttttatgtttcccttagaaacatgttttgcttggttctatagtatgttacttaggatctatttaccatatatttgtatgagaaatcctcacccaagcattcaacctaaatctttgaaaagttgggtgctgtctttagtaacttttaaaatagtttaaatctcccattttaatagtgataaggaaacctgttaaaatcatggctattgatgttatagtatggaaagttgaactttatgaacccatacttttaaaaagcatttttaaaaatctaacactgactatagaaacaaattaaaatgtctacctttaagtataa

SEQ ID NO: 7472 - protein, 300 aa, Homo sapiens [sequence omitted]

SEQ ID NO: 7473 - DNA, 1354 bp, Homo sapiens
aatataatcacttgaatgaagaattttctaattgagatataatttacataccacccatttaaagtgtacatttcagcagtttttagtgtattcacagggctgtgcaaccatcacaatttaattttataacattttgatccctgcgaaaagaaaccctgtactcattagcaattagtccctgttcctaaccactaatctactttctttctctgtagattggcttattctgaacatttcgtataaatggaatcatacaatatgtagtctcttgagattggcttctttcacttaacatgttttcaaggcttcatagctgtagaatcttgctttgtttttttgagatccagcctgggtgacagagcgagactccgtctcaaaaaaaagggctgataatgataaacagtgagcactccggtcctttttcttaggttttccttttttccttcctctccaccccacaagttttgctttttaaccaaggtgtctctgcttgatgaaattcacatgctagtctaaatctttttttctcccttgtaacatttatgtgccccaaactggttagtatatgggtacagcattccctttccaattgggaagcggaaaaagagagtatgggatattttagaagggagcctttgaaccttattatatttccccatcattgatagtgacaatcttaaaagggttgttttcttaccttaagtacaaaagcatggaaaaatgcgcttttccttcccgcccacatcaccaccccgacttgaagacagtaggtgcttgaatggaaagtgagtaggcatctttaatcgccctgattaaaggaaagtgttagcctgagagggcctgactgaaaagtaaccaaaggcttaatatcaaacactaattagctttttagtgccttaaccctgacctggttaccagttttctgtagtttctacacccaagccactgaagtcatctgtggcccaagaggtaggacaaaaaaaaaaaaaaaaaaagctgatttcaatatttgatttgttgacatcccaaaatgaaagttttatgtttcccttagaaacatgttttgcttggttctatagtatgttacttaggatctatttaccatatatttgtatgagaaatcctcacccaagcattcaacctaaatctttgaaaagttgggtgctgtctttagtaacttttaaaatagtttaaatctcccattttaatagtgataaggaaacctgttaaaatcatggctattgatgttatagtatggaaagttgaactttatgaacccatacttttaaaaagcatttttaaaaatctaacactgactatagaaacaaattaaaatgtctacctttaagtataa

SEQ ID NO: 7474 - protein, 50 aa, Homo sapiens
MFPLETCFAWFYSMLLRIYLPYICMRNPHPSIQPKSLKSWVLSLVTFKIV

SEQ ID NO: 7475 - DNA, 426 bp, Homo sapiens
cgagaatgtcagcgacagtattggaggccagaggagtggtcagcccacccaagccccgcctctgggcgggggcccaagcgatttccgagtgctgaaacctgggatgacagagcagcccagggaaagcgcgtgttccagtttactagataccacagaagtttttgcatttctgacaagtggatggccccaccctgactcatcaacctggggatccacgaaccaactcagtgcaagaggacagcttctacttcttatgatttcacctctgacccaaccagtcagcactccccattccctggccccgtacctgtcaaactatctgaaaaaccccctaacctctgagcctttggtgagatggatttgagtaacaactctgtctcccacgtggcatggccagcctcgcgtcaattaaactttctttactgc

SEQ ID NO: 7476 - protein, 86 aa, Homo sapiens
MTEQPRESACSSLLDTTEVFAFLTSGWPHPDSSTWGSTNQLSARGQLLLLMISPLTQPVSTPHSLAPYLSNYLKNPLTSEPLVRWI

SEQ ID NO: 7477 - DNA, 1966 bp, Homo sapiens
attctcgtctatgctccagcagccgtacctcactccggtggaggcgggacttcctacagcacttccggccagagcctcaagcttcgctgctgggcagttggctggaggggctgctgctgggaacacctggagtctccgcgggcagatctcatattttggattctggatatattataatgagtgacactttgacagcggatgtcattggtcgaagagttgaagttaatggagaacatgcaacagtacgttttgctggtgttgtccctcccgtggcaggaccctggttaggagtagaatgggacaatcccgagagaggaaagcatgatgggagccacgaagggactgtgtattttaaatgcaggcacccgacaggaggatcctttattcgtccgaacaaggtaaattttggaacagactttcttactgcaattaagaaccgctatgtgttagaagatggaccagaggaagatagaaaagagcaaattgttacaattggaaataaacctgtggagactatcggttttgactctattatgaaacagcaaagtcagctgagcaagttgcaagaagtttctctgaggaactgtgcagtaagttgtgctggtgaaaaaggaggagttgctgaagcatgtcctaatatcagaaaggtagatttgtcaaaaaacctgttgtcatcatgggatgaagtgatacacattgctgatcagctcagacacctggaagtccttaatgtcagtgaaaataaactaaaatttccctccggttcagtattaactggaacgctttctgtactgaaggttttagtcctcaatcaaacaggaataacgtgggctgaggtgctgcggtgtgtcgcggggtgcccaggcctggaggaactctaccttgagtctaacaacattttcatttccgaaaggccaacagatgttctccagacagtcaagttattagatctttcctctaatcaattaattgatgaaaatcagctgtatctgatagcccacctgcccaggttagaacaattaatcctctctgacactggaatttcttctctacattttccggatgctggaattgggtgcaaaacgtccatgttcccatccttgaagtacctggtagtaaacgacaatcagatatcacaatggtcgtttttcaatgagctagagaagttaccaagtctacgggctttgtcctgcctaagaaaccccctgaccaaagaggacaaagaagcagagacggcgcgactactcattatcgccagcattggccagctgaagacgctgaacaaatgtgagattctccccgaggagaggcggagagctgagcttgactaccgaaaagcttttggaaatgagtggaaacaggctggtggacataaggatccggaaaaaaacagactcagcgaagaattcctcacagcccatcccagataccagttcctctgcctgaaatatggtgcacctgaagattgggaactcaaaacacagcaaccacttatgctgaaaaaccagctactaacactgaagataaaataccctcatcaacttgatcagaaagtcctggagaaacaactgccgggctccatgacaattcaaaaggtgaagggattgctgtcacgtcttctcaaagttcctgtgtcagaccttctgttgtcctatgaaagtcccaaaaagccgggcagagaaatcgagctggaaaatgacctaaagtcattacagttttattctgtggaaaatggagattgtctattagtgcgatggtgacaaccaactaataaaatttaaagaccacactgcttatcgtgtctggggttcaccggaaataaatgattcactggaacaattctactgtcaaaacaaagggggtttacaacttgtcctaagtataacaagggatgtattttttgttgggaagtgaccatttctaggcttatacataatagcaataataaaggctttgaacctactaa

SEQ ID NO: 7478 - protein, 527 aa, Homo sapiens; identical to SEQ ID NO: 450

SEQ ID NO: 7479 - DNA, 1862 bp, Homo sapiens
ctcaagcttcgctgctgggcagttggctggaggggctgctgctgggaacacctggagtctccgcgggcagatctcatattttggattctggatatattataatgagtgacactttgacagcggatgtcattggtcgaagagttgaagttaatggagaacatgcaacagtacgttttgctggtgttgtccctcccgtggcaggcacccgacaggaggatcctttattcgtccgaacaaggtaaattttggaacagactttcttactgcaattaagaaccgctatgtgttagaagatggaccagaggaagatagaaaagagcaaattgttacaattggaaataaacctgtggagactatcggttttgactctattatgaaacagcaaagggccagtggatagcatacgtgcttatgtatccatgtgaactctgtttttcatgcagtcagctgagcaagttgcaagaagtttctctgaggaactgtgcagtaagttgtgctggtgaaaaaggaggagttgctgaagcatgtcctaatatcagaaaggtagatttgtcaaaaaacctgttgtcatcatgggatgaagtgatacacattgctgatcagctcagacacctggaagtccttaatgtcagtgaaaataaactaaaatttccctccggttcagtattaactggaacgctttctgtactgaaggttttagtcctcaatcaaacaggaataacgtgggctgaggtgctgcggtgtgtcgcggggtgcccaggcctggaggaactctaccttgagtctaacaacattttcatttccgaaaggccaacagatgttctccagacagtcaagttattagatctttcctctaatcaattaattgatgaaaatcagctgtatctgatagcccacctgcccaggttagaacaattaatcctctctgacactggaatttcttctctacattttccggatgctggaattgggtgcaaaacgtccatgttcccatccttgaagtacctggtagtaaacgacaatcagatatcacaatggtcgtttttcaatgagctagagaagttaccaagtctacgggctttgtcctgcctaagaaaccccctgaccaaagaggacaaagaagcagagacggcgcgactactcattatcgccagcattggccagctgaagacgctgaacaaatgtgagattctccccgaggagaggcggagagctgagcttgactaccgaaaagcttttggaaatgagtggaaacaggctggtggacataaggatccggaaaaaaacagactcagcgaagaattcctcacagcccatcccagataccagttcctctgcctgaaatatggtgcacctgaagattgggaactcaaaacacagcaaccacttatgctgaaaaaccagctactaacactgaagataaaataccctcatcaacttgatcagaaagtcctggagaaacaactgccgggctccatgacaattcaaaaggtgaagggattgctgtcacgtcttctcaaagttcctgtgtcagaccttctgttgtcctatgaaagtcccaaaaagccgggcagagaaatcgagctggaaaatgacctaaagtcattacagttttattctgtggaaaatggagattgtctattagtgcgatggtgacaaccaactaataaaatttaaagaccacactgcttatcgtgtctggggttcaccggaaataaatgattcactggaacaattctactgtcaaaacaaagggggtttacaacttgtcctaagtataacaagggatgtattttttgttgggaagtgaccatttctaggcttatacataatagcaataataaaggctttgaacctactaa

SEQ ID NO: 7480 - protein, 414 aa, Homo sapiens
MYPCELCFSCSQLSKLQEVSLRNCAVSCAGEKGGVAEACPNIRKVDLSKNLLSSWDEVIHIADQLRHLEVLNVSENKLKFPSGSVLTGTLSVLKVLVLNQTGITWAEVLRCVAGCPGLEELYLESNNIFISERPTDVLQTVKLLDLSSNQLIDENQLYLIAHLPRLEQLILSDTGISSLHFPDAGIGCKTSMFPSLKYLVVNDNQISQWSFFNELEKLPSLRALSCLRNPLTKEDKEAETARLLIIASIGQLKTLNKCEILPEERRRAELDYRKAFGNEWKQAGGHKDPEKNRLSEEFLTAHPRYQFLCLKYGAPEDWELKTQQPLMLKNQLLTLKIKYPHQLDQKVLEKQLPGSMTIQKVKGLLSRLLKVPVSDLLLSYESPKKPGREIELENDLKSLQFYSVENGDCLLVRW

SEQ ID NO: 7481 - DNA, 510 bp, Homo sapiens
taaataagtaggccgggcgcggtggctcacacctgtaatcccagcactttaggaggccgagacaggcggatcacctgaggtcaggagttcgagaccagcctggccaacatggtgaaaccccgtctctactaaaaatacaaaaattagccaggtgtgctggcaggcgactgtcagctacttgagaggctgaggcaagagaatcgcttgaacccccgaggcagatgttgcagtgagccgaaatcacgccatcgcactccagcctgggggacaagagcaagacttcgtctcaaaaaaaaaaaaaaaaagtaaataagtaaataacaaataaagcatatacagtcttttatggaactacaacgttggaatctatagcctgcccctttagtaattttcacatttggctacgaacttttattttattttattttatttatttttttgagatggagtctcactctgtcacccaggctggagtacatgagcccagatcgcgccactgcactccagcct

SEQ ID NO: 7482 - protein, 53 aa, Homo sapiens
PGVLAGDCQLLERLRQENRLNPRGRCCSEPKSRHRTPAWGTRARLRLKKKKKK

SEQ ID NO: 7483 - DNA, 337 bp, Homo sapiens
agtaagttgtgctggtgaaaaaggaggagttgctgaagcatgtcctagtatccttttcaccgagagcttgttattggaatctgactatggattttatacctgtgccagagactgctaattgcctacccattgtccagtcttgacaacttccttcctaatgcagttcagttttgcttggtgtagttggggcccagataaattatttaccttcccagacccctttgcttgcaagtttgccagcatgttcaggtggaagtttctacaccgggctccttgaaagggggcacacgcgcctggcctcacaatgaactttttcgtttctcagtgaagttttgga

SEQ ID NO: 7484 - protein, 39 aa, Homo sapiens
MQFSFAWCSWGPDKLFTFPDPFACKFASMFRWKFLHRAP

SEQ ID NO: 7485 - DNA, 576 bp, Homo sapiens
cagctggaacaaagttttttcttgggtatcaaaagaggttctcagtgttgcttttgcccttcttcctttcctgggcttcttgtattcatctgaatggactataggcactttcctggggcgagggcggcagggcaagagcagtatctttcagcaggaggaacctgggagactgtttatgttcttgaaatggagaggtttgcatttggggaagggaaagcaattcttttatttttaagagatggagttggccgggcgcggtggctcaggcctgtaatccccgcctcggcctgtcaaagtgctgagattataggtgtgagccaccgtgcgtagcaggaaagcatttctttttctttttttttcttttgagacagagtcttgctctgtcacccaggctggagtgcagtggcacaatctcagctcattgcaacctccacctcctgggttcaagtgattctcctccctcagcttccagagtagctgggactacaggcgcacaccaccatgcctggctaatttttgtatatttattttttgagacggagcctcgctctgtcgcccaggctggagtgcagtgcc

SEQ ID NO: 7486 - protein, 78 aa, Homo sapiens
MDYRHFPGARAAGQEQYLSAGGTWETVYVLEMERFAFGEGKAILLFLRDGVGRARWLRPVIPASACQSAEIIGVSHRA

SEQ ID NO: 7487 - DNA, 1236 bp, Homo sapiens
ccagcctggcactgcacggtctggtggaaacgtgagaagtgtcctgtggatcgtgtctcaggtggcaccaggtttctgtcagcgcagaaagagaactgttaccaaaggtgacactcggggaaaacatttgaagtatttgaaggcagtcttctcttgctagttttgagtcaggacacctaaggaacaatgatgtaatacacatgtaaacatgttgcttttcatttgttgtcttttgttgagtttcactggtcattaacaatgagctagataagctacagagtctgcagctctgggtagatagaagattctgcccttggaagtggtcgttgtccatcactcctaaaaatcacactgaataaaggcagctccatgtgtcctgggaaaggcacaggctctctggacgcttacctatcctttgtttgtttgtttgttttgtttttacttatagtggcctttggtttatcattcatctcttttgctttcttaaacagaatatggtgcacctgaagattgggaactcaaaacacagcaaccacttatgctgaaaaaccagctactaacactgaagataaaataccctcatcaacttgatcagaaagtcctggagaaacaactgccgggctccatgacaattcaaaaggtgaagggattgctgtcacgtcttctcaaagttcctgtgtcagaccttctgttgtcctatgaaagtcccaaagtaagttgcccagcaaaatacaaagtcaaagtcaagcttagtcctcgtattatgacattaaactgtctctagatagcaacagtttgattctaaatggagaccatgggtctgtttgtttgattttaagggtaagctactgcctggggacggggtgggggaagagtatgtgtagcatgctttatcggatctgtcttaatcacatccttccccaccttcgttctaattttagaagccgggcagagaaatcgagctggaaaatgacctaaagtcattacagttttattctgtggaaaatggagattgtctattagtgcgatggtgacaaccaactaataaaatttaaagaccacactgcttatcgtgtctggggttcaccggaaataaatgattcactggaacaattctactgtcaaaacaaagggggtttacaacttgtcctaagtataacaagggatgtattttttgttgggaagtgaccatttctaggcttatacataatagcaataataaaggctttgaaccta

SEQ ID NO: 7488 - protein, 81 aa, Homo sapiens
MLKNQLLTLKIKYPHQLDQKVLEKQLPGSMTIQKVKGLLSRLLKVPVSDLLLSYESPKVSCPAKYKVKVKLSPRIMTLNCL

SEQ ID NO: 7489 - DNA, 1010 bp, Homo sapiens
ccagcctggcactgcacggtctggtggaaacgtgagaagtgtcctgtggatcgtgtctcaggtggcaccaggtttctgtcagcgcagaaagagaactgttaccaaaggtgacactcggggaaaacatttgaagtatttgaaggcagtcttctcttgctagttttgagtcaggacacctaaggaacaatgatgtaatacacatgtaaacatgttgcttttcatttgttgtcttttgttgagtttcactggtcattaacaatgagctagataagctacagagtctgcagctctgggtagatagaagattctgcccttggaagtggtcgttgtccatcactcctaaaaatcacactgaataaaggcagctccatgtgtcctgggaaaggcacaggctctctggacgcttacctatcctttgtttgtttgtttgttttgtttttacttatagtggcctttggtttatcattcatctcttttgctttcttaaacagaatatggtgcacctgaagattgggaactcaaaacacagcaaccacttatgctgaaaaaccagctactaacactgaagataaaataccctcatcaacttgatcagaaagtcctggagaaacaactgccgggctccatgacaattcaaaaggtgaagggattgctgtcacgtcttctcaaagttcctgtgtcagaccttctgttgtcctatgaaagtcccaaaaagccgggcagagaaatcgagctggaaaatgacctaaagtcattacagttttattctgtggaaaatggagattgtctattagtgcgatggtgacaaccaactaataaaatttaaagaccacactgcttatcgtgtctggggttcaccggaaataaatgattcactggaacaattctactgtcaaaacaaagggggtttacaacttgtcctaagtataacaagggatgtattttttgttgggaagtgaccatttctaggcttatacataatagcaataataaaggctttgaacctacta

SEQ ID NO: 7490 - protein, 88 aa, Homo sapiens
MLKNQLLTLKIKYPHQLDQKVLEKQLPGSMTIQKVKGLLSRLLKVPVSDLLLSYESPKKPGREIELENDLKSLQFYSVENGDCLLVRW

SEQ ID NO: 7491 - DNA, 500 bp, Homo sapiens
cactgaagataaaataccctcatcaacttgatcagaaagtcctggagaaacaactgccgggtaagaagaaccagcctgtcttttccttaaactctgaatcatcggcctaggctccatgacaattcaaaaggtgaagggattgctgtcacgtcttctcaaagttcctgtgtcagaccttctgttgtcctatgaaagtcccaaaaagccgggcagagaaatcgagctggaaaatgacctaaagtcattacagttttattctgtggaaaatggagattgtctattagtgcgatggtgacaaccaactaataaaatttaaagaccacactgcttatcgtgtctggggttcaccggaaataaatgattcactggaacaattctactgtcaaaacaaagggggtttacaacttgtcctaagtataacaagggatgtattttttgttgggaagtgaccatttctaggcttatacataatagcaataataaaggctttgaacctacta

SEQ ID NO: 7492 - protein, 59 aa, Homo sapiens
MTIQKVKGLLSRLLKVPVSDLLLSYESPKKPGREIELENDLKSLQFYSVENGDCLLVRW

SEQ ID NO: 7493 - DNA, 3689 bp, Homo sapiens
gtagaaaggtggtttatgatgggagtggctatggttttgtctttacaaataaaatagcattaaaatttttacatttaaactttatgggccatgtatagggtgaagatgtaagcatgggcatctggatggctgccataggacctaaaagataccaggacagtctgtggctgtgtgagaagacctgtgagacaggaatgctgtcttctcctcagtattctccgtgggaactgacggaactgtggaaactgaaggaacggtgcggtgatccttgtcgatgtcaagcaagataacagggacttgaattagcagagtctaaaatcagggcaggcaaacgataatctgagtgcaagtctgaggagtcccagggtttagcagtagactgtatggtctttcaagagagttccagactggcactttcacccagaaccaatgcggtgtttcttaatgtttgcacaaatttccttaaaaatcaacttgtactgtagcataagaaaagtttttatttatctattggaagattatcagaaaaataccaagttattttataaaagaaaaaatatttctaaatcctgatgcattgtggctaattagtaattcaccattacctatagtttttggttaaaacttggcctagttcagaaatctgtagtagtaactgagagtttgaatttcaacctggattgcaggatagctctgtagagctaattaggataattatcagacaaaaaggaactcacaggaatgctgtgtgatcatgtgatcacatatttgagcagtggtcacttataccaaagtttggggtttctggaaataatgtcagattttgtggatctctgaagtgggcaacttgaactaacttgaagaggaaccaatatgattctcagttctgaaccttggttttaaagaagttcatttatatggtagactaatacccaaattttctttctgccatctaacataaatcctgaaggtcacagtttagtactcatagtttttaaatgctaaagttgtgtgagtatgaataaaagcaaatacctctcagggttttagtgccatcgggaaggatatttctaaattttgttgacattttgaaagaattagttttgctttcctcctatcattgcctaatgtttacctaatatgagtacatttcaatcaaagctggttatcacagaagaagatatactcagcttaggtataattgtagggaaaagcatgtgattaatttaagtactcttagaaatagtgcaactgagaagacagataatagcatattgttatacatagtagaggatgtctccccaagtttaagggacatttcccaaaatgaccaaccaaatcatttctagtaaccctttaaaatagtagtttcaatagagaattccattaaaactagtcttatgacagatattaactgtgttcagattttattaggctagctagtttctttctatttaatatttaaatcttatcatgaaatgcagtgatgagctgtaaaaataaatatgaaataagatcagaaaatcattagtaggttcaaagcctttattattgctattatgtataagcctagaaatggtcacttcccaacaaaaaatacatcccttgttatacttaggacaagttgtaaaccccctttgttttgacagtagaattgttccagtgaatcatttatttccggtgaaccccagacacgataagcagtgtggtctttaaattttattagttggttgtcaccatcgcactaatagacaatctccattttccacagaataaaactgtaatgactttaggtcattttccagctcgatttctctgcccggcttctaaaattagaacgaaggtggggaaggatgtgattaagacagatccgataaagcatgctacacatactcttcccccaccccgtccccaggcagtagcttacccttaaaatcaaacaaacagacccatggtctccatttagaatcaaactgttgctatctagagacagtttaatgtcataatacgaggactaagcttgactttgactttgtattttgctgggcaacttactttgggactttcataggacaacagaaggtctgacacaggaactttgagaagacgtgacagcaatcccttcaccttttgaattgtcatggagcctatcaaaagacaagaaaagtccattcgttctctcaaatgacagttacctgtaaaactagctcatgtgatgagaccacagtatcattgcaatgatagctgtatctgtcttttttttttttttttttttgagactgacttacttacttacttaagtaagtcttgctctgtcgcccaggctggagtgcaatggtgtaatctcggctcactgcaacctccgcttcccgggttcaaacaattctcctgcctcagcctcctgagtagctggtgcccatcaccacacccagctaacttttgtatttttagtagagacggggtttcaccatgttggccaggctggtcttgaactcctgacctcgtgatccgcccgccctggccccccaaagtgctgggattacaagcatgagcccagcgcctggctgtatctttcattttacccaagtcactttacccaagtaagtaattaggggaaagcctgagtcttgtaccacctgttcatttggggaactgtgggaaacggagccaacggacctaagtgccctttgacagtgagtttcataccatttcagtagtgtatttctttcttaatctgaataaaccagaatgatactctcagcacagaagaataaagggagcgagtcattaacgttttctttttaaacctttatgatgacttccttatgaattactgaacgaacactggaatgggactcaggtatcctgaggacatctctcaactctggccttagttccccctctgtaaaattagggtgccaactaaatgatctacaaggtcccttccagcgccgccattctgtaattacatcatgtgtaactgtattaaacatacacaagtgactgccaggcatgggaatgtaacttccgagtaaatgctttggtttgttcagaatacactatgaacttctttccaaagacgggttgtggtaaatagtggatattttgattataagaaatagagtttccttgaagctttagctggagatacagcaatagtgtggtgttcctacaaatatcacagtgtattcaaacatatttttctatcaaaaatcatttttgtaaaagctgtgtgtttttatccaacttgtgataataaatgttctttattttagaataaaaactggcctttttgtatgtattgaatacagttaatagaatttataattttaattaacaatttgctctttcatgtgtgaatatgtgatagtctagtcctttcaaaagattgagacggactggctttcattgtttgaaggctggtgagagaaggggttacctgctgcacaccagtggggagtgacatactcctaacacatgccagaaacaaaaagtttggtcataaaacagttctaataagaaatctgcctggcctgctcacacctgtaaccccagcactttgggaggcagagggatcagagcccaggaatttgagaccagcctgggcaacatgaggataccccatctctacaaaaaataaaaaattagccaagcatagcgatgtacgcctctagtcccagctacttggg

SEQ ID NO: 7494 - protein, 58 aa, Homo sapiens
MGIWMAAIGPKRYQDSLWLCEKTCETGMLSSPQYSPWELTELWKLKERCGDPCRCQAR

SEQ ID NO: 7495 - DNA, 3304 bp, Homo sapiens
gtagaaaggtggtttatgatgggagtggctatggttttgtctttacaaataaaatagcattaaaatttttacatttaaactttatgggccatgtatagggtgaagatgtaagcatgggcatctggatggctgccataggacctaaaagataccaggacagtctgtggctgtgtgagaagacctgtgagacaggaatgctgtcttctcctcagtattctccgtgggaactgacggaactgtggaaactgaaggaacggtgcggtgatccttgtcgatgtcaagcaagataacagggacttgaattagcagagtctaaaatcagggcaggcaaacgataatctgagtgcaagtctgaggagtcccagggtttagcagtagactgtatggtctttcaagagagttccagactggcactttcacccagaaccaatgcggtgtttcttaatgtttgcacaaatttccttaaaaatcaacttgtactgtagcataagaaaagtttttatttatctattggaagattatcagaaaaataccaagttattttataaaagaaaaaatatttctaaatcctgatgcattgtggctaattagtaattcaccattacctatagtttttggttaaaacttggcctagttcagaaatctgtagtagtaactgagagtttgaatttcaacctggattgcaggatagctctgtagagctaattaggataattatcagacaaaaaggaactcacaggaatgctgtgtgatcatgtgatcacatatttgagcagtggtcacttataccaaagtttggggtttctggaaataatgtcagattttgtggatctctgaagtgggcaacttgaactaacttgaagaggaaccaatatgattctcagttctgaaccttggttttaaagaagttcatttatatggtagactaatacccaaattttctttctgccatctaacataaatcctgaaggtcacagtttagtactcatagtttttaaatgctaaagttgtgtgagtatgaataaaagcaaatacctctcagggttttagtgccatcgggaaggatatttctaaattttgttgacattttgaaagaattagttttgctttcctcctatcattgcctaatgtttacctaatatgagtacatttcaatcaaagctggttatcacagaagaagatatactcagcttaggtataattgtagggaaaagcatgtgattaatttaagtactcttagaaatagtgcaactgagaagacagataatagcatattgttatacatagtagaggatgtctccccaagtttaagggacatttcccaaaatgaccaaccaaatcatttctagtaaccctttaaaatagtagtttcaatagagaattccattaaaactagtcttatgacagatattaactgtgttcagattttattaggctagctagtttctttctatttaatatttaaatcttatcatgaaatgcagtgatgagctgtaaaaataaatatgaaataagatcagaaaatcattagtaggttcaaagcctttattattgctattatgtataagcctagaaatggtcacttcccaacaaaaaatacatcccttgttatacttaggacaagttgtaaaccccctttgttttgacagtagaattgttccagtgaatcatttatttccggtgaaccccagacacgataagcagtgtggtctttaaattttattagttggttgtcaccatcgcactaatagacaatctccattttccacagaataaaactgtaatgactttaggtcattttccagctcgatttctctgcccggcttctaaaattagaacgaaggtggggaaggatgtgattaagacagatccgataaagcatgctacacatactcttcccccaccccgtccccaggcagtagcttacccttaaaatcaaacaaacagacccatggtctccatttagaatcaaactgttgctatctagagacagtttaatgtcataatacgaggactaagcttgactttgactttgtattttgctgggcaacttactttgggactttcataggacaacagaaggtctgacacaggaactttgagaagacgtgacagcaatcccttcaccttttgaattgtcatggagcctatcaaaagacaagaaaagtccattcgttctctcaaatgacagttacctgtaaaactagctcatgtgatgagaccacagtatcattgcaatgatagctgtatctgtcttttttttttttttttttttgagactgacttacttacttacttaagtaagtcttgctctgtcgcccaggctggagtgcaatggtgtaatctcggctcactgcaacctccgcttcccgggttcaaacaattctcctgcctcagcctcctgagtagctggtgcccatcaccacacccagctaacttttgtatttttagtagagacggggtttcaccatgttggccaggctggtcttgaactcctgacctcgtgatccgcccgccctggccccccaaagtgctgggattacaagcatgagcccagcgcctggctgtatctttcattttacccaagtcactttacccaagtaagtaattaggggaaagcctgagtcttgtaccacctgttcatttggggaactgtgggaaacggagccaacggacctaagtgccctttgacagtgagtttcataccatttcagtagtgtatttctttcttaatctgaataaaccagaatgatactctcagcacagaagaataaagggagcgagtcattaacgttttctttttaaacctttatgatgacttccttatgaattactgaacgaacactggaatgggactcaggtatcctgaggacatctctcaactctggccttagttccccctctgtaaaattagggtgccaactaaatgatctacaaggtcccttccagcgccgccattctgtaattacatcatgtgtaactgtattaaacatacacaagtgactgccaggcatgggaatgtaacttccgagtaaatgctttggtttgttcagaatacactatgaacttctttccaaagacgggttgtggtaaatagtggatattttgattataagaaatagagtttccttgaagctttagctggagatacagcaatagtgtggtgttcctacaaatatcacagtgtattcaaacatatttttctatcaaaaatcatttttgtaaaagctgtgtgtttttatccaacttgtgataataaatgttctttattttagaataaaaactggcctttttgtatgtattg

SEQ ID NO: 7496 - protein, 58 aa, Homo sapiens; identical to SEQ ID NO: 7494

SEQ ID NO: 7497 - DNA, 572 bp, Homo sapiens
gtagaaaggtggtttatgatgggagtggctatggttttgtctttacaaataaaatagcattaaaatttttacatttaaactttatgggccatgtatagggtgaagatgtaagcatgggcatctggatggctgccataggacctaaaagataccaggacagtctgtggctgtgtgagaagacctgtgagacaggaatgctgtcttctcctcagtattctccgtgggaactgacggaactgtggaaactgaaggaacggtgcggtgatccttgtcgatgtcaagcaagataacagggacttgaattagcagagtctaaaatcagggcaggcaaacgataatctgagtgcaagtctgaggagtcccagggtttagcagtagactgtatggtctttcaagagagttccagactggcactttcacccagaaccaatgcggtgtttcttaatgtttgcacaaatttccttaaaaatcaacttgtactgtagcataagaaaagtttttatttatctattggaagattatcagaaaaataccaagttattttataaaagaaaaaatatttctaaatcctg

SEQ ID NO: 7498 - protein, 58 aa, Homo sapiens; identical to SEQ ID NO: 7494

SEQ ID NO: 7499 - DNA, 2017 bp, Homo sapiens
gccaggcggagggggcggggcttcggccggctaagccgcggccacccgcggtctgagggaccggaggagcggggccgggagctgcgaggagccctccagacgtcgccgagcgcgagggcgggcgtgctcggagtggtcgctcgtcagccgccgcccctcagtctccgcacttgcaggtcccctccctctccgccgggacgcgggagagcccggctcgcggcgggggcggccaatgcgaaactggctggtgctgctgtgcccgtgtgtgctcggggccgcgctgcacctctggctgcggctgcgctccccgccgcccgcctgcgcctccggggccggccctgcagatcagttggccttatttcctcagtggaaatctactcactatgatgtggtagttggcgtgttgtcagctcgcaataaccatgaacttcgaaacgtgataagaagcacctggatgagacatttgctacagcatcccacattaagtcaacgtgtgcttgtgaagttcataataggtgctcatggctgtgaagtgcctgtggaagacagggaagatccttattcctgtaaactactcaacatcacaaatccagttttgaatcaggaaattgaagcgttcagtctgtccgaagacacttcatcggggctgcctgaggatcgagttgtcagcgtgagtttccgagttctctaccccatcgttattaccagtcttggagtgttctacgatgccaatgatgtgggtttccagaggaacatcactgtcaaactttatcaggcagaacaagaggaggccctcttcattgctcgcttcagtcctccaagctgtggtgtgcaggtgaacaagctgtggtacaagcccgtggaacaattcatcttaccagagagctttgaaggtacaatcgtgtgggagagccaagacctccacggccttgtgtcaagaaatctccacaaagtgacagtgaatgatggagggggagttctcagagtcattacagctggggagggtgcattgcctcatgaattcttggaaggtgtggagggagttgcaggtggttttatatatactattcaggaaggtgatgctctcttacacaaccttcattctcgccctcaaagacttattgatcatataaggaatctccatgaggaagatgccttactgaaggaggaaagcagcatctatgatgatattgtttttgtggatgttgtcgacacttatcgtaatgttcctgcaaaattattgaacttctatagatggactgtggaaacaacgagcttcaatttgttgctgaagacagatgatgactgttacatagacctcgaagctgtatttaataggattgtccaaaagaatctggatgggcctaatttttggtggggaaatttcagactgaattgggcagttgaccgaaccggaaagtggcaggagttggagtacccgagccccgcttaccctgcctttgcatgtgggtcaggatatgtgatctccaaggacatcgtcaagtggctggcaagcaactcggggaggttaaagacctatcagggtgaagatgtaagcatgggcatctggatggctgccataggacctaaaagataccaggacagtctgtggctgtgtgagaagacctgtgagacaggaatgctgtcttctcctcagtattctccgtgggaactgacggaactgtggaaactgaaggaacggtgcggtgatccttgtcgatgtcaagcaagataacagggacttgaattagcagagtctaaaatcagggcaggcaaacgataatctgagtgcaagtctgaggagtcccagggtttagcagtagactgtatggtctttcaagagagttccagactggcactttcacccagaaccaatgcggtgtttcttaatgtttgcacaaatttccttaaaaatcaacttgtactgtagcataagaaaagtttttatttatctattggaagattatcagaaaaataccaagttattttataaaagaaaaaatatttctaaatcctg

SEQ ID NO: 7500 - protein, 500 aa, Homo sapiens; identical to SEQ ID NO: 452

SEQ ID NO: 7501 - DNA, 3092 bp, Homo sapiens
ggaggagcggggccgggagctgcgaggagccctccagacgtcgccgagcgcgagggcgggcgtgctcggagtggtcgctcgtcagccgccgcccctcagtctccgcacttgcaggtcccctccctctccgccgggacgcgggagagcccggctcgcggcgggggcggccaatgcgaaactggctggtgctgctgtgcccgtgtgtgctcggggccgcgctgcacctctggctgcggctgcgctccccgccgcccgcctgcgcctccggggccggccctgcagatcagttggccttatttcctcagtggaaatctactcactatgatgtggtagttggcgtgttgtcagctcgcaataaccatgaacttcgaaacgtgataagaagcacctggatgagacatttgctacagcatcccacattaagtcaacgttttgaatcaggaaattgaagcgttcagtctgtccgaagacacttcatcggggctgcctgaggatcgagttgtcagcgtgagtttccgagttctctaccccatcgttattaccagtcttggagtgttctacgatgccaatgatgtgggtttccagaggaacatcactgtcaaactttatcaggcagaacaagaggaggccctcttcattgctcgcttcagtcctccaagctgtggtgtgcaggtgaacaagctgtggtacaagcccgtggaacaattcatcttaccagagagctttgaaggtacaatcgtgtgggagagccaagacctccacggccttgtgtcaagaaatctccacaaagtgacagtgaatgatggagggggagttctcagagtcattacagctggggagggtgcattgcctcatgaattcttggaaggtgtggagggagttgcaggtggttttatatatactattcagggtaagtttgctagttgaaacttgaaaagtacactgaatgtcttacacttaatctttatacttgagagaaaaggattttttcttttttgtcttttaaaaaactttattcagataaaattcacccttttaaagtggttcagtggttttagtgtattcttagagttctacaaccggctccacctcccaaaaggaaaccccacacccattagcagttactcctcattcttacctccccaaccccccaccccctaacaactactgatgcactttctttctctatggatttgcctgttttgaacatttcacataaatggaaatgcacagtacgtactctgtgtgtcagtttctttgctgtaacatgtgttccaggtctgtccattttgtatgtatcagtacttcttttttatgatcatataatattctattgcatcgatatgccctattttattcattcattaatggatggacatttagattgcttctactttttgaatatgaataattctgtagtaaacatgtaggtacaagtttttgtgtggtcatatatttccatttctcttaaatgtctaggagtagaagacctgggtcatataattgtgtgtttaatcacttgaggcactgccaggttgttttctaaagcagcagcccactttacatttccatagtcagtatatgaggattctagtttctccatattcttgtcaacacttaataaattgtctgtcttttaaaatataccaatcctagtgggtgtaaattgttatttcattgtgatttttattcgtatttccataataactaatgatgttgagcattttcttcatgtgcttattggccatttgtatatcttccttttttgtttcgttgtttttctttttttctgagacgaggcctcactctgttgcccaggctggagtgcagtggcatgatcacagctcactgtagccttgacctccccgggctcaagtgaacttcccatttcagcctcccgaatagctgggactacaagtgcatgccaccatgcccagctaattattaaatgttttgtagagacagggttttgtcatattgctgaggctgcacactgttaacagggtgaattattatggtatatgagctagatgtgggaagtgagggagggaggagggggaggaagtgagggaggaaggggtggagagagggagaaggtggtgagggagggaggggtggagggaagaagggaggaaaggaggggagagagagtcatttgtatatctttagagaaatatctattcagatcctttgcccatttataaaattattttgttattgttgaattgtaagagttctttatatatgctggatacaagtcccttatcagatacatgctttgcaaatggtgccctttaacacacaaaagttgtaaattttgatgaagtccaattttgtcacatgtttttgctgtcatatgtaaggaactattgtctaatgtgaggtcacaaagatttgtgcctttgttttacagttccaagagttttatagttttagcacttatacgtaggtcttggatccatgttcattttcatatatggcatgaaatagaggtttaacttcattcttttgcatgtggatatccagttgtcccagcacccatttgttgaaaatcagtgactgtagatgtaaggatttacttgaggactctcaattctattccattgatctatgtgtctgcgtctttaaccagtactacactgtcttgattatgtagctttttagtaagatttgaaattgggaggctgggcacggtggctcactcctgtaatcccagcactttgggagcccgaggcaggtggatcacgaggtcaggagttcgagaccagcctgaccaacatggtgaaaccctgtctctactaaaaatacaaaaaaattagccaggcatggtgtcgggcgcctgtaatcccagctactccagaggctgaggcagaagaatcgcttgaacctgggaggcagaggttgcattgagctgagattgccactgcatttcatcctgggtgacagcaagactccgtctcaaaaaaaaaaaaaaaaaaaaaagaaattaggaaatgtgaatcctccaaccttgttctttttcaagcttgattggctattctgggtctcttgcacttccatatgaattttatgatcagcttgttaatttgtgc

SEQ ID NO: 7502 - protein, 92 aa, Homo sapiens
MRNWLVLLCPCVLGAALHLWLRLRSPPPACASGAGPADQLALFPQWKSTHYDVVVGVLSARNNHELRNVIRSTWMRHLLQHPTLSQRFESGN

SEQ ID NO: 7503 - DNA, 1872 bp, Homo sapiens
ggaggagcggggccgggagctgcgaggagccctccagacgtcgccgagcgcgagggcgggcgtgctcggagtggtcgctcgtcagccgccgcccctcagtctccgcacttgcaggtcccctccctctccgccgggacgcgggagagcccggctcgcggcgggggcggccaatgcgaaactggctggtgctgctgtgcccgtgtgtgctcggggccgcgctgcacctctggctgcggctgcgctccccgccgcccgcctgcgcctccggggccggccctgcaggtggagtctcactcttgttgcccaggctggagtgcaatggcgcggtctcggctcaccccaacctccacctcccgggttcaagagattctcctgcctcagcctcccaagtagctgggataacagatcagttggccttatttcctcagtggaaatctactcactatgatgtggtagttggcgtgttgtcagctcgcaataaccatgaacttcgaaacgtgataagaagcacctggatgagacatttgctacagcatcccacattaagtcaacgtgtgcttgtgaagttcataataggtgctcatggctgtgaagtgcctgtggaagacagggaagatccttattcctgtaaactactcaacatcacaaatccagttttgaatcaggaaattgaagcgttcagtctgtccgaagacacttcatcggggctgcctgaggatcgagttgtcagcgtgagtttccgagttctctaccccatcgttattaccagtcttggagtgttctacgatgccaatgatgtgggtttccagaggaacatcactgtcaaactttatcaggcagaacaagaggaggccctcttcattgctcgcttcagtcctccaagctgtggtgtgcaggtgaacaagctgtggtacaagcccgtggaacaattcatcttaccagagagctttgaaggtacaatcgtgtgggagagccaagacctccacggccttgtgtcaagaaatctccacaaagtgacagtgaatgatggagggggagttctcagagtcattacagctggggagggtgcattgcctcatgaattcttggaaggtgtggagggagttgcaggtggttttatatatactattcagggtaagtttgctagttgaaacttgaaaagtacactgaatgtcttacacttaatctttatacttgagagaaaaggattttttcttttttgtcttttaaaaaactttattcagataaaattcacccttttaaagtggttcagtggttttagtgtattcttagagttctacaaccggctccacctcccaaaaggaaaccccacacccattagcagttactcctcattcttacctccccaaccccccaccccctaacaactactgatgcactttctttctctatggatttgcctgttttgaacatttcacataaatggaaatgcacagtacgtactctgtgtgtcagtttctttgctgtaacatgtgttccaggtctgtccattttgtatgtatcagtacttcttttttatgatcatataatattctattgcatcgatatgccctattttattcattcattaatggatggacatttagattgcttctactttttgaatatgaataattctgtagtaaacatgtaggtacaagtttttgtgtggtcatatatttccatttctcttaaatgtctaggagtagaagacctgggtcatataattgtgtgtttaatcacttgaggcactgccaggttgttttctaaagcagcagcccactttacatttccatagtcagtatatgaggattctagtttctccatattcttgtcaacacttaataaattgtctgtcttttaaaatatacc

SEQ ID NO: 7504 - protein, 326 aa, Homo sapiens
MRNWLVLLCPCVLGAALHLWLRLRSPPPACASGAGPAGGVSLLLPRLECNGAVSAHPNLHLPGSRDSPASASQVAGITDQLALFPQWKSTHYDVVVGVLSARNNHELRNVIRSTWMRHLLQHPTLSQRVLVKFIIGAHGCEVPVEDREDPYSCKLLNITNPVLNQEIEAFSLSEDTSSGLPEDRVVSVSFRVLYPIVITSLGVFYDANDVGFQRNITVKLYQAEQEEALFIARFSPPSCGVQVNKLWYKPVEQFILPESFEGTIVWESQDLHGLVSRNLHKVTVNDGGGVLRVITAGEGALPHEFLEGVEGVAGGFIYTIQGKFAS

SEQ ID NO: 7505 - DNA, 1322 bp, Homo sapiens
ctttctaggctgttttagtctaggccgagtacattcctgaactcagtgctctggaaccacaatcggggtcagtttcctagacatctctgggattcactttagatcacctgtagagttcatcccgcagcatctcagctgggttaaggtgtggaggctagacaactgaccggccctggtgactaaccaagaaactttttcctacccattctgtggtgtgccattcacaatgtgttcagcaataggaaccacacatttttgtaacatactatgggtctttggaattgagtacaagtagttgaaactatatgttaattctgtcagtgtcaaagggatctccttttcatttgtatctgaacttccattttaaaaacttctgaatacgctactctcagcatactgcttataggatagcctgctccgcaaaagcagtcaaaaaataaattaaaaaaaacaaaacgacttttaaataaaagccaaactaaaacaggggtggaaaaaaaggaaaatgcagatatgctaaaggaaaacaacactactagaatctcatatttggagataatcacatttaacatttttgcttctatgtgttatagttgctaggattatgccgttcattctactttataatttacttactttaacatatcacgaacatcttttgatgtgctctattatttgtaatggctatatagaattacattgtatgaaagtattgtcatttaactctgtatttgggtgttgatagagtttcaatttttcggtgttatggaaaagactgtagtaaatatcactgcacctctgttttatgtgtataactggttattttcttaggatgaatttgctgggattacaggcatgagccactgcgcctggccaccaggtctagttattaagagttttaatgactatagccttgtgctttttatctcccttcaggctttaggctaaatagacttgattttattacctttattaattttgtataatattttttcttttaaaaaacaagcaggccacgtgtggtgtctcaggcttatcctcccagcactttgggaggccgaggcgggcagatcattgagcccatgagtttgagacgaccagcctgggcaacttgatgaaacccagtccctattcaaacaacaaaaataaccacacacacaaaaagcaagcaattatttaatagtggctatacctggtggggagctaagattatggatgattttaattttcttctttttgtatatctatcttctaaatgttccataataaacatatattagctttatataatagaaagaaaaaataaacttttagcaattaaa

SEQ ID NO: 7506 - protein, 45 aa, Homo sapiens
MPFILLYNLLTLTYHEHLLMCSIICNGYIELHCMKVLSFNSVFGC

SEQ ID NO: 7507 - DNA, 2177 bp, Homo sapiens
accggaggagcggggccgggagctgcgaggagccctccagacgtcgccgagcgcgagggcgggcgtgctcggagtggtcgctcgtcagccgccgcccctcagtctccgcacttgcaggtcccctccctctccgccgggacgcgggagagcccggctcgcggcgggggcggccaatgcgaaactggctggtgctgctgtgcccgtgtgtgctcggggccgcgctgcacctctggctgcggctgcgctccccgccgcccgcctgcgcctccggggccggccctgcagatcagttggccttatttcctcagtggaaatctactcactatgatgtggtagttggcgtgttgtcagctcgcaataaccatgaacttcgaaacgtgataagaagcacctggatgagacatttgctacagcatcccacattaagtcaacgttttgaatcaggaaattgaagcgttcagtctgtccgaagacacttcatcggggctgcctgaggatcgagttgtcagcgtgagtttccgagttctctaccccatcgttattaccagtcttggagtgttctacgatgccaatgatgtgggtttccagaggaacatcactgtcaaactttatcaggcagaacaagaggaggccctcttcattgctcgcttcagtcctccaagctgtggtgtgcaggtgaacaagctgtggtacaagcccgtggaacaattcatcttaccagaggtacaggatggcaggaaaagactgtagtaccaatgcagtccttcataggagtgggcgtgtgctttcaggggcaggcacttgatattttcttgtaccagggcagcactccagagtgatagatgaaggtaccaactgtggatgggctaaaacatagcactctgtattcaaacctcctgaggacttcatgaggcctcagaggttccaaaaccactttttgaaaaacattgcatgtttccgtagtttatttagtggagtagagaactacacaactgttttaatgacaaaggatgatgttgggtgtggattgatggaaagaccagacagagataccatttgggtaaaaattaaataatttgcttatctaaagaatgaaaagaaaaaaaagtcagtgcagacaggttaatgatagagatgggccatgtttccaagttaaataaaatttctccaaagggtgaacagttgtggatgatagcctgaaaatgtacctgtcaccttctgggtccctctaggtccagtcataactagatatgcactaaagaatgcctcgcctgccaggtgccctcattagtcctggagttaagccacacagtatggtcgcagagtgtgacagaatcaggatcagacataacaaattattcattcatcagcttcagcctttctaggctgttttagtctaggccgagtacattcctgaactcagtgctctggaaccacaatcggggtcagtttcctagacatctctgggattcactttagatcacctgtagagttcatcccgcagcatctcagctgggttaaggtgtggaggctagacaactgaccggccctggtgactaaccaagaaactttttcctacccattctgtggtgtgccattcacaatgtgttcagcaataggaaccacacatttttgtaacatactatgggtctttggaattgagtacaagtagttgaaactatatgttaattctgtcagtgtcaaagggatctccttttcatttgtatctgaacttccattttaaaaacttctgaatacgctactctcagcatactgcttataggatagcctgctccgcaaaagcagtcaaaaaataaattaaaaaaaacaaaacgacttttaaataaaagccaaactaaaacaggggtggaaaaaaaggaaaatgcagatatgctaaaggaaaacaacactactagaatctcatatttggagataatcacatttaacatttttgcttctatgtgttatagttgctaggattatgccgttcattctactttataatttacttactttaacatatcacgaacatcttttgatgtgctctattatttgtaatggctatatagaattacattgtatgaaagtattgtcatttaactctgtatttgggtgttgatagagtttcaatttttcggtgttatggaaaagactgtagtaaatatcactgcacctct

SEQ ID NO: 7508 - protein, 92 aa, Homo sapiens; identical to SEQ ID NO: 7502

SEQ ID NO: 7509 - DNA, 389 bp, Homo sapiens
ctcaagcattttttaaaaattcctgccatttgtgaattatatagcaaatgattacctaggttttggcattaagcccacttcactacttcttactagtaaaacaaaggattacatttgttcagttatataaacctgttctcattacttagttttgaatcaggaaattgaagcgttcagtctgtccgaagacacttcatcggggctgcctgaggatcgagttgtcagcgtgagtttccgagttctctaccccatcgttattaccagtcttggagtgttctacgatgccaatgatgtgggtttccagaggaacatcactgtcaaactttatcaggcagaacaagaggaggccctcttcattgctcgcttcagtcctccaagctgtggtgtgc

SEQ ID NO: 7510 - protein, 35 aa, Homo sapiens
MPMMWVSRGTSLSNFIRQNKRRPSSLLASVLQAVV

SEQ ID NO: 7511 - DNA, 1606 bp, Homo sapiens
ggccctgccggcagggcagcaagtcgggagcagctgtgggtggtgtcctacaggctctgctgtggaggaagagctgctgccctgagtggaggggcagtagaatgaaagagggcatgtctaataacagcaccactagcatctcccaagccaggaaagctgtggagcagctaaagatggaagcctgtatggacagggtcaaggtctcccaggcagctgcggacctcctggcctactgtgaagctcacgtgcgggaagatcctctcatcattccagtgcctgcatcagaaaacccctttcgcgagaagaagttcttttgtaccattctctaactccgtgtgtgatgaaaacgcctccttttctgaccttcaaagtcccctgtagagaccatgcatgctctaagccttagggagtgagaccaacacccatccctgcccagccaacagtggccggggcttgtcttatgtttccatctgttttcttcgtggcattcaatttcatttttttccttttcattttcatgttattttcattattggcaaagaaaatcaaaatgtttatagccaaataacaaatgtgccatgtaaaagtaagtctggacttaagagtttaaaatttttaaacatcagtttccaagtttatatcatattaatacatttcagtggataatttattttaaaaaaaaaactatgcctaaatatcccttatttgcaatattcagtatcaaattagagcattttgaccaactgaaacatataacgttttcatctcctttcctggagaaagcagctgcagaggttctgtatttcctgcatttccatcatcctagtaaaaagacaacaacccacaggattggaatggttttcttttgttttttttttgttgttgttgttgttttgagatggagtctcgctctgtcacccaggctggagtgcaatggcgtgacctcagctcactgcgacctccacctcctgggttcaagcgattctcctgcctcagcctcctgagtagctgggatcataggcacgcgccaccacacccagctaattttttgtatttttagtaaagacggggtttcaccatgttggtcaggctggtctcaaactcctgacctcgtgatccacccgcctcggcctcccaaagcgctgggattacaggcgtgagccaccacacccggccgtggaatggttttcttagcatatcctcctggggccgtggcgccccggctgtgggccgtggtggatgtcccttgtttcagtggtcctacaaaggtagatggtgggcggacaccgaagtcaacttgactgtaaaagtaccccataccgttgacgcgctgtggcagacctgtgggtgcggtctcccctctccaaatgccacctcttcctgctccctcctcttttggctcctactcagtagttccattgtgggctgcagtaatataaggacctgttctggacacagcactgggcccgctggggttttagtagggcagccccttccctgcaggagtgaggcatggtgacagcagtcccctatgtgcccccaagtcatctgagcattggtgtgcattaaggtactcaatcttccaacaataaataccataagtgca

SEQ ID NO: 7512 - protein, 75 aa, Homo sapiens; identical to SEQ ID NO: 454

SEQ ID NO: 7513 - DNA, 1959 bp, Homo sapiens
gggggcgagggtcgcagagtcgccggctctcccttccccagtctgggcccccacggcacagggggccgagcagaagcccccagcgtccagggccgggggagggtccgcctgcgcccccaggcccgcgtggtcgggccctgcagggcgggaggcgcggcgcggggcggggccggtgacgggacgcggagaccccgcgggcggcgggaggggcacgaggcgcgcgtttgcacccgagcccggcccgcgccccgatgcggagcgatgccgctcggcctggccgccccccgcgagcaccgcgctgcagacgaagcccgcgcgtgatcccgctccgggtgacctcaaagcagaagctctgaattcacctctcatctgacgactgacagctgctgccaccgccagcctctgtcccttgcccaggcctgtcacacggctgcctctcagcaggggcagtagaatgaaagagggcatgtctaataacagcaccactagcatctcccaagccaggaaagctgtggagcagctaaagatggaagcctgtatggacagggtcaaggtctcccaggcagctgcggacctcctggcctactgtgaagctcacgtgcgggaagatcctctcatcattccagtgcctgcatcagaaaacccctttcgcgagaagaagttcttttgtaccattctctaactccgtgtgtgatgaaaacgcctccttttctgaccttcaaagtcccctgtagagaccatgcatgctctaagccttagggagtgagaccaacacccatccctgcccagccaacagtggccggggcttgtcttatgtttccatctgttttcttcgtggcattcaatttcatttttttccttttcattttcatgttattttcattattggcaaagaaaatcaaaatgtttatagccaaataacaaatgtgccatgtaaaagtaagtctggacttaagagtttaaaatttttaaacatcagtttccaagtttatatcatattaatacatttcagtggataatttattttaaaaaaaaaactatgcctaaatatcccttatttgcaatattcagtatcaaattagagcattttgaccaactgaaacatataacgttttcatctcctttcctggagaaagcagctgcagaggttctgtatttcctgcatttccatcatcctagtaaaaagacaacaacccacaggattggaatggttttcttttgttttttttttgttgttgttgttgttttgagatggagtctcgctctgtcacccaggctggagtgcaatggcgtgacctcagctcactgcgacctccacctcctgggttcaagcgattctcctgcctcagcctcctgagtagctgggatcataggcacgcgccaccacacccagctaattttttgtatttttagtaaagacggggtttcaccatgttggtcaggctggtctcaaactcctgacctcgtgatccacccgcctcggcctcccaaagcgctgggattacaggcgtgagccaccacacccggccgtggaatggttttcttagcatatcctcctggggccgtggcgccccggctgtgggccgtggtggatgtcccttgtttcagtggtcctacaaaggtagatggtgggcggacaccgaagtcaacttgactgtaaaagtaccccataccgttgacgcgctgtggcagacctgtgggtgcggtctcccctctccaaatgccacctcttcctgctccctcctcttttggctcctactcagtagttccattgtgggctgcagtaatataaggacctgttctggacacagcactgggcccgctggggttttagtagggcagccccttccctgcaggagtgaggcatggtgacagcagtcccctatgtgcccccaagtcatctgagcattggtgtgcattaaggtactcaatcttccaacaataaataccataagtgca

SEQ ID NO: 7514 - protein, 75 aa, Homo sapiens; identical to SEQ ID NO: 454

SEQ ID NO: 7515 - DNA, 2005 bp, Homo sapiens
cttgtggacggcggatgaggatgaggcgcccagatcttcccgaaatatttcctaatcgttcatcatgatgttatgttgttgttttcacaaagggaattaatattggcctccttttctacaaatcttgccaacactgcgtgaaatgttttcgttgcttctctattcccaaggtttcgtattattttaccaagtcggaaaatggacggcgcttaaactgttttttccctgaaaggaagagggctgtaatcactaaagtgttttaaaatctccagcgcaaaagcctgcggtgccacagggacgaggcctggagagcagtcgctcctagaaccggggcgcgaagggcacccccgcctccagcacgcgccctccgccctcccggcctcgctccccccggagtgggggcctcgccggcccctggtccccgtcactcagcaacgtcgggtcagccttcgccgggttagtggcgacgcggccgcgcgaattcgcacaggggcagtagaatgaaagagggcatgtctaataacagcaccactagcatctcccaagccaggaaagctgtggagcagctaaagatggaagcctgtatggacagggtcaaggtctcccaggcagctgcggacctcctggcctactgtgaagctcacgtgcgggaagatcctctcatcattccagtgcctgcatcagaaaacccctttcgcgagaagaagttcttttgtaccattctctaactccgtgtgtgatgaaaacgcctccttttctgaccttcaaagtcccctgtagagaccatgcatgctctaagccttagggagtgagaccaacacccatccctgcccagccaacagtggccggggcttgtcttatgtttccatctgttttcttcgtggcattcaatttcatttttttccttttcattttcatgttattttcattattggcaaagaaaatcaaaatgtttatagccaaataacaaatgtgccatgtaaaagtaagtctggacttaagagtttaaaatttttaaacatcagtttccaagtttatatcatattaatacatttcagtggataatttattttaaaaaaaaaactatgcctaaatatcccttatttgcaatattcagtatcaaattagagcattttgaccaactgaaacatataacgttttcatctcctttcctggagaaagcagctgcagaggttctgtatttcctgcatttccatcatcctagtaaaaagacaacaacccacaggattggaatggttttcttttgttttttttttgttgttgttgttgttttgagatggagtctcgctctgtcacccaggctggagtgcaatggcgtgacctcagctcactgcgacctccacctcctgggttcaagcgattctcctgcctcagcctcctgagtagctgggatcataggcacgcgccaccacacccagctaattttttgtatttttagtaaagacggggtttcaccatgttggtcaggctggtctcaaactcctgacctcgtgatccacccgcctcggcctcccaaagcgctgggattacaggcgtgagccaccacacccggccgtggaatggttttcttagcatatcctcctggggccgtggcgccccggctgtgggccgtggtggatgtcccttgtttcagtggtcctacaaaggtagatggtgggcggacaccgaagtcaacttgactgtaaaagtaccccataccgttgacgcgctgtggcagacctgtgggtgcggtctcccctctccaaatgccacctcttcctgctccctcctcttttggctcctactcagtagttccattgtgggctgcagtaatataaggacctgttctggacacagcactgggcccgctggggttttagtagggcagccccttccctgcaggagtgaggcatggtgacagcagtcccctatgtgcccccaagtcatctgagcattggtgtgcattaaggtactcaatcttccaacaataaataccataagtgca

SEQ ID NO: 7516 - protein, 75 aa, Homo sapiens; identical to SEQ ID NO: 454

SEQ ID NO: 7517 - DNA, 2005 bp, Homo sapiens
attacaccagctctctcagtccggggaggaggaggagcaggaggaacgcgaggaggaaggagaggaggagcggccagcagtagccacgaccgccaccaccaggcagaggaagagttcgtggggaggaaaagacctctcctcccccttggagcgccttctctctgcttttggagaaagggaatacacgataaagaaggagacggaaagaagagaaaaagtgaggcgggagacagagggaaaagggcgtgaacagaaagggccggagcgtgcaggggagcacagggcgcgggggcggcactgccgagccgggagcgctgccgcttgggcaggtgccgcggccgctgcccggaggcggcatgtgacgcgcggccgcagctgcccgcgggcggagcgctctcagaccccggagcgcacaccgcggggccatcggtgccatcgcggatctccaggctcctcatcagtccgccggggccgcagcagcgcttctgggaagacgggcgatgaactgaagggcggctccgggcaggggggcacgatcttaaggacagtcgctccctgaacgcggagccggaggagacgaagggaaggtggagcggacgccacccgcgcaccgggcaggcgcggagaccggcgtgggacagccacctggagcgcagctgccagaaagaaggactttgctgctttgggccaggatctgaacttaggtgtaaaccattgccctggcagagggaacctacccagtccattgctgcctgctacaagatatgaacagtaatggcacatattttggttatgagtcactcagaggactgtggattgaatgaactgtatccatccccatcatgatgtacagaaccaagtctcttcactacacttgtgttctgattagtggccaaataaatgacagtcagaacttcagctaaggtacaataaggttttgctgtggcgtggcacctggtctctttctagaaggaaagttcaacatacagcacaattctggacacattgtattggtttgatgctcctacctggaacagatcctcatgagctagtaagtttgaaggggagtcataaagaggaacaggcattatacgcaaggctgaagaagcagttggtaactaacagtacatctttttctaaggccaacactaaacataagttgcagagctggcctgtggtggaactcacaagtcttattggcaatatatgtgaggagacaaaaagcaacatatggagaaatacaaaaatatactccctagagatactgcctcttcagatgtcaagaaaaacctggatgaaatgaagcaagagtggcacgctgcaaagttacaaattcaaggccacccacagaaccaaacattaacacttaggtggagctggtctcttgggcagcctgacatctggtccactcctctgtcctatgccgggatcatcatgaccgtagagattatgtcactgttttgcatccttgttacataactcagttcctggtagattccagtgaaaggcacatggtggtgatatttttgagaaagtagagaagaaaagaatgaatccggatggttgttgagacagaaactgagcgtcgaacctcattttctctcgtacccaaaccttgatgaaacaacagaggaaagtattgggctgcaattgtaggcgcacaaaagcaaaccttgagtcatggatgaccgaccaaggaagagtccccttgggaggaggaggtgccaaagaccagtgatactgctttgggttatgtgcactgagggtttccaaccctgacggatatggattctaatttaaaatatcacagggaagaaaaaaatagacgttcccatggcaacattttctcagggccagctcttctgtcttattatcatatcttatttaaatatttcctggaatcagtttaaacttaatccctctgtgtgtcttctattttcagtggccatggagagcgtaacatctggtcagaggttttccttaaataaatcatataattgtaggc

SEQ ID NO: 7518 - protein, 94 aa, Homo sapiens
MLLPGTDPHELVSLKGSHKEEQALYARLKKQLVTNSTSFSKANTKHKLQSWPVVELTSLIGNICEETKSNIWRNTKIYSLEILPLQMSRKTWMK

SEQ ID NO: 7519 - DNA, 926 bp, Homo sapiens
tggagcgccttctctctgcttttggagaaagggaatacacgataaagaaggagacggaaagaagagaaaaagtgaggcgggagacagagggaaaagggcgtgaacagaaagggccggagcgtgcaggggagcacagggcgcgggggcggcactgccgagccgggagcgctgccgcttgggcaggtgccgcggccgctgcccggaggcggcatgtgacgcgcggccgcagctgcccgcgggcggagcgctctcagaccccggagcgcacaccgcggggccatcggtgccatcgcggatctccaggctcctcatcagtccgccggggccgcagcagcgcttctgggaagacgggcgatgaactgaagggcggctccgggcaggggggcacgatcttaaggacagtcgctccctgaacgcggagccggaggagacgaagggaaggtggagcggacgccacccgcgcaccgggcaggcgcggagaccggcgtgggacagccacctggagcgcagctgccagaaagaaggactttgctgctttgggccaggatctgaacttaggtgtaaaccattgccctggcagagggaacctacccagtccattgctgcctgctacaagatatgaacagtaatggcacatattttggttatgagtcactcagaggactgtggattgaatgaactgtatccatccccatcatgatgtacagaaccaagtctcttcactatgtacagtgtacttgaccagaggattcatgaggggcagtattgtagtacgcagagtgcggaagcagagaagagagtccagctgtttgttcgttaagccagatatggaagagatttgcaaaaaatgtaaatcatgtcacattttactaattttgtcttagaatatgtgttattttcattaaaagatactgtttaattatgct

SEQ ID NO: 7520 - protein, 69 aa, Homo sapiens
MNCIHPHHDVQNQVSSLCTVYLTRGFMRGSIVVRRVRKQRRESSCLFVKPDMEEICKKCKSCHILLILS

SEQ ID NO: 7521 - DNA, 1923 bp, Homo sapiens
gggcaatggcgggcgcccctcccccagcctcgttgccgccttgcagtttgatctcagactgctgtgctagcaatcagcgagactccgtgggcgtaggaccctccgagccaggtgtgggatatagtctcgtggtgcgccgtttcttaagctggtctgaaaagcgcaatattcgggtgggagtgacccgattttccaggtgcttccgtcacccctttctttgactcggaaagggaactccctgaccccttgcgcttcccaggtgaggcaatgcctcgccctgcttcggctcgcgcacggtgcgcgcacacactggcctgcgcccactgtctagcactccctagtgagatgaacccggtacctcagatggaaatgcagaaatcacccgtcttctgcgtcgctcacgctgggagctgtagaccggagctgttcctattcggccatcttggctcctagtatttttaattaagcacttgtgttctgattagtggccaaataaatgacagtcagaacttcagctaaggtacaataaggttttgctgtggcgtggcacctggtctctttctagaaggaaagttcaacatacagcacaattctggacacattgtattggtttgatgctcctacctggaacaggtggagctggtctcttgggcagcctgacatctggtccactcctctgtcctatgccgggatcatcatgaccgtagagattatgtcactgttttgcatccttgttacataactcagttcctggtagattactatgtcagagagtcacaatgaccttgcacaataacagtacaacctcgcctttgtttccaaacatcagctcctcctggatacacagcccctccgatgcagggctgcccccgggaaccgtcactcatttcggcagctacaatgtttctcgagcagctggcaatttctcctctccagacggtaccaccgatgaccctctgggaggtcataccgtctggcaagtggtcttcatcgctttcttaacgggcatcctggccttggtgaccatcatcggcaacatcctggtaattgtgtcatttaaggtcaacaagcagctgaagacggtcaacaactacttcctcttaagcctggcctgtgccgatctgattatcggggtcatttcaatgaatctgtttacgacctacatcatcatgaatcgatgggccttagggaacttggcctgtgacctctggcttgccattgactacgtagccagcaatgcctctgttatgaatcttctggtcatcagctttgacagatacttttccatcacgaggccgctcacgtaccgagccaaacgaacaacaaagagagccggtgtgatgatcggtctggcttgggtcatctcctttgtcctttgggctcctgccatcttgttctggcaatactttgttggaaagagaactgtgcctccgggagagtgcttcattcagttcctcagtgagcccaccattacttttggcacagccatcgctgctttttatatgcctgtcaccattatgactattttatactggaggatctataaggaaactgaaaagcgtaccaaagagcttgctggcctgcaagcctctgggacagaggcagagacagaaaactttgtccaccccacgggcagttctcgaagctgcagcagttacgaacttcaacagcaaagcatgaaacgctccaacaggaggaagtatggccgctgccacttctggttcacaaccaagagctggaaacccagctccgagcagatggaccaagaccacagcagcagtgacagttggaacaacaatgatgctgctgcctccctggagaactccgcctcctccgacgaggaggacattggctccgagacgagagccatctactccatcgtgctcaagcttccgggtcacagcaccatcctcaactccacca

SEQ ID NO: 7522 - protein, 380 aa, Homo sapiens
MTLHNNSTTSPLFPNISSSWIHSPSDAGLPPGTVTHFGSYNVSRAAGNFSSPDGTTDDPLGGHTVWQVVFIAFLTGILALVTIIGNILVIVSFKVNKQLKTVNNYFLLSLACADLIIGVISMNLFTTYIIMNRWALGNLACDLWLAIDYVASNASVMNLLVISFDRYFSITRPLTYRAKRTTKRAGVMIGLAWVISFVLWAPAILFWQYFVGKRTVPPGECFIQFLSEPTITFGTAIAAFYMPVTIMTILYWRIYKETEKRTKELAGLQASGTEAETENFVHPTGSSRSCSSYELQQQSMKRSNRRKYGRCHFWFTTKSWKPSSEQMDQDHSSSDSWNNNDAAASLENSASSDEEDIGSETRAIYSIVLKLPGHSTILNS

SEQ ID NO: 7523 - DNA, 567 bp, Homo sapiens
aggttttgctgtggcgtggcacctggtctctttctagaaggaaagttcaacatacagcacaattctggacacattgtattggtttgatgctcctacctggaacaggtaacagaggaagttcctaagttgtctggagattgcatgtcctcacacactaaaatcctctgagctgaatgattcagctttcactattgctgtgtctgtggacaaaaaagcaaaatgtgagtcaattccaggttccgtcacatttgggagttgccaagtaaaggaaaacataaaagattaatgttattattctgattttattttgttttgaggagaagcgtgggaaatgactaccatacaaatcaagaaattcatgaaggcaaacagttgatgactgtcacctagcaatctgttattttcttttatcctttccccaagacatatgccctctgacataagcattaaaatcaaattatacaattgtcagaaaacctgttctcaaagctttagggtaaaaattgtttaatcaaattgtaacacaaattgagaaatatcattaaagtgataatgccatcctgtaag

SEQ ID NO: 7524 - protein, 30 aa, Homo sapiens
MIQLSLLLCLWTKKQNVSQFQVPSHLGVAK

SEQ ID NO: 7525 - DNA, 2441 bp, Homo sapiens
tttaatctatagagtgttattctacactggacctctctcttattttttggagtctagcatcttgcatcttcctggagccccaactaaactcataacttctaagcttctaagaaatatatgacgagctccatgagggccaaggctctccattcttgttcaccactgcacactcaggagctcatggcatgctggctgtgctagttctatcctcaacagaataattgctgacaaactctcttgcccagaaaatgtctactggaattatggagtacaaaaaaactacaaaagcaatgaaaaaaagaaggatgttttatttacatcctatttcaaaaccattgctttcttgctattgtatgtctctgcaggcccaatatcgcgcatcttcataagaagtttagaattgttccttatgtttccttctaacaaacactggtgttaagtttcaagaagttggtgaaatggagacagccaatccaacccaggagacagtgtttgaaaacagggcttcagctacttgcatgatgtggattggggaaatggtctgtcctcctagccatgggatgtccctgctgtgttcaggaatctttccatctcttggattttaaaggaaagttaatttttccttccctataaagatagggcctttatagaggtaatcgccttaaaatgaggctattagagtggccttaatccaacatcactagagttcttagaagaaggggacatttggacacagagacatggggagaacgccatatgaagacgaaggcagagattcatctacaaaccaaggaactacaaagactgccagcagcccccagaagccaggcggcagacatggaacagattctccctcacagctgtcaggaggagccaaccctgcctccagaattgtgaagcactaagtttctgttgtttaggccttccagtctctgctactttattgcaacaactctagcaaattaatgcacaaatggcagaatggtatttttcaacttttatgagaaaagtaaaggcagttatagtagaagagagcatcatgagtcgactgtgctcagatagggctatttgcttttccccaactatgctccatacttttttcttttcatatgttttttttgagtcggggtcttgctctgctgcccaggttggagtgcagtgtcatgatcatagctcactgtaacctcgaccttctgagcttgagtgatcctcctgtctcagcctcccaagtagctgagactgcaggtgcatgccaacacagctggctatttatttgtttttattttattgtagagacagggtctcattgtgttgcccaggctggcctcaaacttctggccttaagtcatcctcctgtcttggcctcccaaagtgctgggactatgggtgtgaacccatcgcacccagacattttgtacttctttaatttggagtgtctttcctttccatgcatgcctatagaatttatgattatcatttagcccaaagaagactttcgcataaattctgccgtaacccttgttggaataaatgtattcctctaagctccctctagctctatttgtatctttattataaatattaatatatctttccttgcattgctgttacatgtatgcacatcttatcttctggcaataaataagcctcgtcccttgggggaagggctaacctttcctccttctggtattgctcaggatgctgaccacagcaccctgcacagagaagaggtttaatatttattttattacttaaattgcataagagggatctacctacttgtgaaaaaggttgctgtgacctgtgttccttcttctgtgacaagaaactaaaatgtacatatattctcttcttgatgttctttcgagttttatctccttcctagatctggttcaccagatttcctcccctccttttttttcatcaatacaaaacttcaagtcgcagtcttgccaataattcttctttgactaatttatgagttaaataaagaaaaaattcctcacacacatatcatgtccaaggtcagctcaacattgctttattccacacctctcaatgggtgtatgatgcgggcccactttaacactgtatcagtggttgattcctacgtgcagatctttctgctctttttgcctgaattatcttcaatgttctttgtgcaaaaatcacagccagtatagtctatttccaaaagagctgtaaagaggcatttcagaaacttccctaaacaatatttctttaaaatgcaccaagctggataaagccgctttgtgacctgcataaaaactccaacggataaatgtgtattaccttcccaaagaactacttctccaaagttattccagctctttccagttgaaatgtcaaacttgacataaaaatgagatgttcttgcatcaattaataaacaaataaatctgtgtttcccattgcccttt

SEQ ID NO: 7526 - protein, 123 aa, Homo sapiens [sequence omitted]

SEQ ID NO: 7527 - DNA, 1332 bp, Homo sapiens
gcacattcacttactgccatttcctgcctatgaggagttaaatggtatttttttcttcaagaaatattccacagtagttgtttaacatgttagagacagattgaagaaagagttaaaatagtattcataaatgaatttaatctgtatcatagtctgaaagattgtttcaaggccaaggcccaatactcttctatattaaattatctcaaggtatgtttattttcaatccatgcttaagtttagctacagagtcagggataaagtaggataagtgaaggtatttaattattgttttcttttccagatcctcaacagaataattgctgacaaactctcttgcccagaaaatgtctactggaattatggagtacaaaaaaactacaaaagcaatgaaaaaaagaaggatgttttatttacatcctatttcaaaaccattgctttcttgctattgtatgtctctgcaggcccaatatcgcgcatcttcataagaagtttagaattgttccttatgtttccttctaacaaacactggtatattcacatgaaagtgtatattttattcacttccaaaacagttagctcataattcagaacattgaggtttgcaaaatgactgaaggaaactttacctaaacaatagttgccagttctgctgagaattatcacgggcccacaacggctgtgtgtttttccatacagatattctaatttttttattatgcagctaatttttttttagactcgcgaataaaatagcaagtcagtctgtgcataagcatatgtttaaatctaccaggagaaatgtctggaatctttttggttattaaaattaaaattcaggataatgaaaggcatatgcaacttattatattctttatataacttatttcatctaatcctccaaatagctatataacatatttatccccaccttacatagatgttaaccaaagtctgtaaggttcgttcatttgtccacagttacccagaaaattgtttgtggagctcagtacaaggctgactgccagactccaaagtctatgttccttctactaccatacattgcctttgtttttcttttataaaagttgaaaaaatatcattctgcttttcctacttttccgaaaactatttatgatgataaatccagttttttgtgttaagtttcaagaagttggtgaaatggagacagccaatccaacccaggagacagtgtttgaaaacagggcttcagctacttgcatgatgtggattggggaaatggtctgtcctcctagccatgggatgtccctgctgtgttcaggaatctttccatctcttggattttaaagg

SEQ ID NO: 7528 - protein, 64 aa, Homo sapiens
MMINPVFCVKFQEVGEMETANPTQETVFENRASATCMMWIGEMVCPPSHGMSLLCSGIFPSLGF

SEQ ID NO: 7529 - DNA, 1332 bp, Homo sapiens
agtacggtattgttgcagctgacctgtatacgtaaggaattactgggtcatcagctctggggaatgtcttttgattatgaacacattttcagcatgtgtccactgaaggtggagctggtctcttgggcagcctgacatctggtccactcctctgtcctatgccgggatcatcatgaccgtagagattatgtcactgttttgcatccttgttacataactcagttcctggtagattactatgtcagagagtcacaatgaccttgcacaataacagtacaacctcgcctttgtttccaaacatcagctcctcctggatacacagcccctccgatgcagggctgcccccgggaaccgtcactcatttcggcagctacaatgtttctcgagcagctggcaatttctcctctccagacggtaccaccgatgaccctctgggaggtcataccgtctggcaagtggtcttcatcgctttcttaacgggcatcctggccttggtgaccatcatcggcaacatcctggtaattgtgtcatttaaggtcaacaagcagctgaagacggtcaacaactacttcctcttaagcctggcctgtgccgatctgattatcggggtcatttcaatgaatctgtttacgacctacatcatcatgaatcgatgggccttagggaacttggcctgtgacctctggcttgccattgactacgtagccagcaatgcctctgttatgaatcttctggtcatcagctttgacagatacttttccatcacgaggccgctcacgtaccgagccaaacgaacaacaaagagagccggtgtgatgatcggtctggcttgggtcatctcctttgtcctttgggctcctgccatcttgttctggcaatactttgttggaaagagaactgtgcctccgggagagtgcttcattcagttcctcagtgagcccaccattacttttggcacagccatcgctgctttttatatgcctgtcaccattatgactattttatactggaggatctataaggaaactgaaaagcgtaccaaagagcttgctggcctgcaagcctctgggacagaggcagagacagaaaactttgtccaccccacgggcagttctcgaagctgcagcagttacgaacttcaacagcaaagcatgaaacgctccaacaggaggaagtatggccgctgccacttctggttcacaaccaagagctggaaacccagctccgagcagatggaccaagaccacagcagcagtgacagttggaacaacaatgatgctgctgcctccctggagaactccgcctcctccgacgaggaggacattggctccg

SEQ ID NO: 7530 - protein, 358 aa, Homo sapiens
MTLHNNSTTSPLFPNISSSWIHSPSDAGLPPGTVTHFGSYNVSRAAGNFSSPDGTTDDPLGGHTVWQVVFIAFLTGILALVTIIGNILVIVSFKVNKQLKTVNNYFLLSLACADLIIGVISMNLFTTYIIMNRWALGNLACDLWLAIDYVASNASVMNLLVISFDRYFSITRPLTYRAKRTTKRAGVMIGLAWVISFVLWAPAILFWQYFVGKRTVPPGECFIQFLSEPTITFGTAIAAFYMPVTIMTILYWRIYKETEKRTKELAGLQASGTEAETENFVHPTGSSRSCSSYELQQQSMKRSNRRKYGRCHFWFTTKSWKPSSEQMDQDHSSSDSWNNNDAAASLENSASSDEEDIG

SEQ ID NO: 7531 - DNA, 1645 bp, Homo sapiens
atcgccagaatggctgaacccaggcgctttctacggctctctttcctcttggtcagctccaagtatgagatttatgaacgttgaagaggttcattgattcaccattgtggtacaggatgttgacagcaaagaagggcgaacgctgttggagaagctgttcagccagcaggagaacgggcctccagaagaagcagagaagttttgctcccggatcattgccatgggtcttctccttccttttagtgattgcttcagggaaccgtgtaatcagaatgcccagacgaatgcagcttcgtttgatcaagatcaactttatacctgggctgcagttagtcaacccacacactcattggactattcagaagggcagtttcctaggcgagttccatccatggggccaccatccaaacctcccgatgaggaacacaggctcgaggatgctgaaacagaggatgatggagaatctcaatctgctgtttcagaaactccccaaaaacgctcagatgctgtccagaaggaagttgttgacatgaagtctgagggacaggccactgtaattcagcagctggaacagactattgaggatctgagaaccaaaatagctgaactagagaggcagtatcctgccctggacacagaggtggccagtggtcatcaagggcttgagaatggagtgacagcctcaggcgatgtctgtctcgaagctctcaggttagaagaaaaggaagtacggcatcataggattttagaggcgaaatcgatacagacttcccccacggaagagggcggggtgctgacactgcctcctgtggatgggctgccagggcgtcctccatgcccccctggggctgaaagtggacctcagacaaagttctgttcagagatttctttgattgtgtctccaaggcgaatatcagtccagctcgacagccatcagcccacacagagcatctcacagcctccaccacctccatcccttctgtggtctgctgggcaaggacagcctgggtcacagccgccccattctatttctaccgagtttcaaaccagccacgaacactctgtttcctctgcctttaaaaacagctgtaacatcccatctccaccacctctgccttgcacagagtcctccagctccatgcctggcctgggcatggtgcctcccccacctccccctctccctggcatgacagtgcctactctgcccagtacagccattccccaacctcctcctctgcagggtacagaaatgctgccaccccctccccctcctcttcccggagcgggcatacctcctccgccgcctctacccggagcaggcatactccctctgccccctctacccggagcgggaatacctcctccgccccctctacccggagcggcaataccccctccgccccctcttcccggggcaggcataccccttcctccccctcttcccggagcaggaatacctcctccaccccctctacccggagcgggcataccccctcctcccccacttcccggagcgggcataccccctccgcccccacttcccggagcgggcataccccctcctccccctcttcccggagcgggcatacctcctccaccccctctacccggagcgggcataccccctccgcccccacttcccgga

SEQ ID NO: 7532 - protein, 474 aa, Homo sapiens
MGLLLPFSDCFREPCNQNAQTNAASFDQDQLYTWAAVSQPTHSLDYSEGQFPRRVPSMGPPSKPPDEEHRLEDAETEDDGESQSAVSETPQKRSDAVQKEVVDMKSEGQATVIQQLEQTIEDLRTKIAELERQYPALDTEVASGHQGLENGVTASGDVCLEALRLEEKEVRHHRILEAKSIQTSPTEEGGVLTLPPVDGLPGRPPCPPGAESGPQTKFCSEISLIVSPRRISVQLDSHQPTQSISQPPPPPSLLWSAGQGQPGSQPPHSISTEFQTSHEHSVSSAFKNSCNIPSPPPLPCTESSSSMPGLGMVPPPPPPLPGMTVPTLPSTAIPQPPPLQGTEMLPPPPPPLPGAGIPPPPPLPGAGILPLPPLPGAGIPPPPPLPGAAIPPPPPLPGAGIPLPPPLPGAGIPPPPPLPGAGIPPPPPLPGAGIPPPPPLPGAGIPPPPPLPGAGIPPPPPLPGAGIPPPPPLP

SEQ ID NO: 7533 - DNA, 6024 bp, Homo sapiens
atgcattcgattcgcacggtggagattaaagtccccgagatagaggaaacgtttttcgcgcccagccgcagccgcagccgcagcgacggcagccacgggagccgccgcgcattatgcaaagcggcggcagatgcgagcggggccagccgggcgcgcgtcggcctcccctcccagcggctccccccgccgccgcctgactctcccgggagactccctaggcccggacctggggccgaggagggccgggatggcctgagtgcccgcggcgcggcggcgcagcagcgggattgcaccatggggaaccaggatgggaagctgaagaggagcgcaggtgatgctttgcacgaaggcggcggtggcgccgaggatgcgctggggcccagggatgtggaagccacaaagaaggggagcgggggcaagaaggcgctaggcaagcacggcaaggggggagggggcggcggcggcggcggggagtcgggcaagaagaagagcaagtccgactccagagcctcggtgttttccaacctgcggatcaggaagaatctgtccaaggggaaaggcgccggcggctcccgcgaagatgtactggattcccaggccctgcagaccggggagctggacagcgctcactccctgctcaccaagactccagacctcagcctctcggcggacgaggccggcctgtcggataccgagtgtgcggacccttttgaggtgaccggtccagggggtcctgggcctgccgaggctaggggcgccgaggagcctgcagcgccccccactgccgtctcccctcagcccggggccttcctgggcctggaccggttcctgctggggccgagcggcggggctggggaggccccgggcagtccggacaccgagcaggcgctgtccgcgctctccgacctgcccgagagcctggccgccgagccccgggagccccagcaaccgccgtcccccggcggcctcccggtctccgaggcgcccagtctcccggcagcgcaacccgcggccaaagactcgccctcctccacggctttcccatttcccgaggccgggccgggggaggaagcggccggagcccccgtgcgaggggctggggacacggatgaggagggtgaggaggatgcttttgaggatgcgccccggggctctccgggggaggagtgggccccggaggtgggagaggacgccccgcagaggctgggggaagagccggaggaggaggcgcaaggacctgacgcccccgcggccgcttccctgcccggcagccccgcgcctagccagcgctgtttcaagccctacccgctcatcaccccctgctacatcaagaccaccacccggcagctcagctcgcccaatcactccccgtctcagtcccctaatcagagccccaggatcaagaggcggccggaaccctccctgagccgagggtccagaactgccctggcctccgtagccgccccggccaagaagcaccgggccgacggcggccttgcggccggcctgagccgctcggctgactggacggaggagctaggcgcccgcacgccccgggtgggaggctccgcgcacctgctggagcgcggggtggcgagtgacagcggcggtggggtgtccccagcactggccgccaaggcgtctggggcccccgcggctgcggatggcttccagaacgtgttcacagggcgaacgctgttggagaagctgttcagccagcaggagaacgggcctccagaagaagcagagaagttttgctcccggatcattgccatgggtcttctccttccttttagtgattgcttcagggaaccgtgtaatcagaatgcccagacgaatgcagcttcgtttgatcaagatcaactttatacctgggctgcagttagtcaacccacacactcattggactattcagaagggcagtttcctaggcgagttccatccatggggccaccatccaaacctcccgatgaggaacacaggctcgaggatgctgaaacagaatctcaatctgctgtttcagaaactccccaaaaacgctcagatgctgtccagaaggaagttgttgacatgaagtctgagggacaggccactgtaattcagcagctggaacagactattgaggatctgagaaccaaaatagctgaactagagaggcagtatcctgccctggacacagaggtggccagtggtcatcaagggcttgagaatggagtgacagcctcaggcgatgtctgtctcgaagctctcaggttagaagaaaaggaagtacggcatcataggattttagaggcgaaatcgatacagacttcccccacggaagagggcggggtgctgacactgcctcctgtggatgggctgccagggcgtcctccatgcccccctggggctgaaagtggacctcagacaaagttctgttcagagatttctttgattgtgtctccaaggcgaatatcagtccagctcgacagccatcagcccacacagagcatctcacagcctccaccacctccatcccttctgtggtctgctgggcaaggacagcctgggtcacagccgccccattctatttctaccgagtttcaaaccagccacgaacactctgtttcctctgcctttaaaaacagctgtaacatcccatctccaccacctctgccttgcacagagtcctccagctccatgcctggcctgggcatggtgcctcccccacctccccctctccctggcatgacagtgcctactctgcccagtacagccattccccaacctcctcctctgcagggtacagaaatgctgccaccccctccccctcctcttcccggagcgggcatacctcctccgccgcctctacccggagcaggcatactccctctgccccctctacccggagcgggaatacctcctccgccccctctacccggagcggcaataccccctccgccccctcttcccggggcaggcataccccttcctccccctcttcccggagcaggaatacctcctccaccccctctacccggagcgggcataccccctcctcccccacttcccggagcgggcataccccctccgcccccacttcccggagcgggcataccccctcctccccctcttcccggagcgggcatacctcctccaccccctctacccggagcgggcataccccctccgcccccacttcccggagcgggcataccccctccgcccccacttcccggagcgggcataccccctcctccccctcttcccggagcgggcatacctcctccaccccctctacccggagcgggcataccccctccgcccccacttcccggagcgggcatacccccacctccccctctacccggagcgggcataccccctccgccccctctacccggagtgggcatacctcctccgccccctctacccggagcgggcataccccctcctccccctctacccggagcgggcataccccctcctccccctcttcccggagcgggcatacctcctccaccccctctacccagagtgggcataccccctccgcccccacttcccggagcgggcatacccccacctccccctctacccggagcgggcataccccctccgccccctctacctggagtgggaatacctcctccgccccctctacctggagtgggaatacctcctccgccccctctacctggtgctgggattcccccacctcctcccttgccaggtatggggattccacctgctccagctcccccactccctccacctgggacaggaatcccaccgccccctctgcttcctgtatcaggccctccactcctcccacaagttgggagtagcactttaccaaccccacaggtgtgtggatttcttcctcctccattgccaagtggcttgtttggattagggatgaatcaggacaaagggagtaggaagcagcccatagagccttgtcgaccaatgaagcctctttactggaccaggattcaactacatagtaaaagagactccagtacttcacttatttgggaaaaaattgaagagccatccatagattgtcatgaatttgaggaattattttctaaaactgctgtaaaggagagaaagaaacctatctctgatactatctcaaagacgaaggctaaacaagttgtcaagttattaagcaacaaaagatcacaagcagttggaatactaatgtctagccttcatttagatatgaaagacatacaacatgctgttgtgaacttggataattctgtggttgacctggagacccttcaagctctctatgagaatagagcacagtcagacgaactcgaaaaaatagaaaagcatggccgatcttccaaagacaaggaaaatgccaagtctctggacaaacctgaacagttcctttatgaactgtcactaatccccaacttttcagagcgagtcttttgcatcctgttccagtccacattttcagaaagcatttgctcaattcgtcgcaaactggaattactacagaaattgtgtgagacattaaaaaatggcccaggggttatgcaggttctaggtttggttcttgcctttggcaactacatgaatggaggaaataagactcgaggacaggcagatggctttggattagacattcttccaaaactgaaagatgtcaagagcagtgacaatagcagaagccttttgtcatatattgtttcgtattatctccgaaattttgatgaggatgctggaaaagaacagtgcctctttccactgccagaaccccaggacctttttcaggcctcacagatgaagtttgaagattttcaaaaagatctcagaaaactgaagaaagacttgaaagcctgtgaagttgaagcagggaaagtataccaggtctcctcaaaagagcatatgcagcctttcaaggaaaacatggaacaatttattattcaagccaaaattgaccaagaggcagaggaaaattcactgacagagactcataaatgctttttggagaccacggcatatttcttcatgaaaccaaaacttggagagaaggaggtgtccccaaatgctttcttcagtatctggcatgaattcagctctgactttaaagacttctggaagaaagagaacaaacttcttctacaagagagagtaaaagaagccgaagaggtgtgtagacagaagaaaggaaaatcactttataaaataaaaccaagacatgactctggaattaaagcaaagataagcatgaaaacttgaacaatgaaaagcagaatgaaaatgagtcattgcaacgactttcacaaaattcagctgacctgagagtgggagggaaactaccgtcattctgctcatgtttcttcttgacctcttgcataatctttttgttttctagacagttcactaattgttgaattttactgtatattcatataaaaatgcaaacgtactagaccagtggagaatttgacaccttttctttttgtaaaagtttatggtattataccgatagaccaaaacagcatgtgtaagaggcagtatctgcactaattctcaacatgctaaacattaactacaattcactgttgtgagaatattcctcgtcacagcaaaaacactttcctttctactgacaaccagtcctccacatcacagcatttagacatatgggtaaaatgttatttctagtgaattgtttgtatcagtttcatgtctaagtataaattttctattttaaacaacttaagaaaaccaatgttctaaatcataattgtttgtatttatgtaaagtatggtctcttactttttagtttgtagtttaagtgcaaagaaacagtagtggttttttttctattgttttgtagtcttcctgtccccttcagtccctccagtgtgtatattaccattctccaatgaaataatagggcatttaacaaagatcgctatgtgcaatactgtatttagtgtttctatttcaatttttctaggatgttaatttatatgaaaataaaatgaataataaaagaataaagatacttgcaa

SEQ ID NO: 7534 - protein, 1746 aa, Homo sapiens
MHSIRTVEIKVPEIEETFFAPSRSRSRSDGSHGSRRALCKAAADASGASRARVGLPSQRLPPPPPDSPGRLPRPGPGAEEGRDGLSARGAAAQQRDCTMGNQDGKLKRSAGDALHEGGGGAEDALGPRDVEATKKGSGGKKALGKHGKGGGGGGGGGESGKKKSKSDSRASVFSNLRIRKNLSKGKGAGGSREDVLDSQALQTGELDSAHSLLTKTPDLSLSADEAGLSDTECADPFEVTGPGGPGPAEARGAEEPAAPPTAVSPQPGAFLGLDRFLLGPSGGAGEAPGSPDTEQALSALSDLPESLAAEPREPQQPPSPGGLPVSEAPSLPAAQPAAKDSPSSTAFPFPEAGPGEEAAGAPVRGAGDTDEEGEEDAFEDAPRGSPGEEWAPEVGEDAPQRLGEEPEEEAQGPDAPAAASLPGSPAPSQRCFKPYPLITPCYIKTTTRQLSSPNHSPSQSPNQSPRIKRRPEPSLSRGSRTALASVAAPAKKHRADGGLAAGLSRSADWTEELGARTPRVGGSAHLLERGVASDSGGGVSPALAAKASGAPAAADGFQNVFTGRTLLEKLFSQQENGPPEEAEKFCSRIIAMGLLLPFSDCFREPCNQNAQTNAASFDQDQLYTWAAVSQPTHSLDYSEGQFPRRVPSMGPPSKPPDEEHRLEDAETESQSAVSETPQKRSDAVQKEVVDMKSEGQATVIQQLEQTIEDLRTKIAELERQYPALDTEVASGHQGLENGVTASGDVCLEALRLEEKEVRHHRILEAKSIQTSPTEEGGVLTLPPVDGLPGRPPCPPGAESGPQTKFCSEISLIVSPRRISVQLDSHQPTQSISQPPPPPSLLWSAGQGQPGSQPPHSISTEFQTSHEHSVSSAFKNSCNIPSPPPLPCTESSSSMPGLGMVPPPPPPLPGMTVPTLPSTAIPQPPPLQGTEMLPPPPPPLPGAGIPPPPPLPGAGILPLPPLPGAGIPPPPPLPGAAIPPPPPLPGAGIPLPPPLPGAGIPPPPPLPGAGIPPPPPLPGAGIPPPPPLPGAGIPPPPPLPGAGIPPPPPLPGAGIPPPPPLPGAGIPPPPPLPGAGIPPPPPLPGAGIPPPPPLPGAGIPPPPPLPGAGIPPPPPLPGAGIPPPPPLPGVGIPPPPPLPGAGIPPPPPLPGAGIPPPPPLPGAGIPPPPPLPRVGIPPPPPLPGAGIPPPPPLPGAGIPPPPPLPGVGIPPPPPLPGVGIPPPPPLPGAGIPPPPPLPGMGIPPAPAPPLPPPGTGIPPPPLLPVSGPPLLPQVGSSTLPTPQVCGFLPPPLPSGLFGLGMNQDKGSRKQPIEPCRPMKPLYWTRIQLHSKRDSSTSLIWEKIEEPSIDCHEFEELFSKTAVKERKKPISDTISKTKAKQVVKLLSNKRSQAVGILMSSLHLDMKDIQHAVVNLDNSVVDLETLQALYENRAQSDELEKIEKHGRSSKDKENAKSLDKPEQFLYELSLIPNFSERVFCILFQSTFSESICSIRRKLELLQKLCETLKNGPGVMQVLGLVLAFGNYMNGGNKTRGQADGFGLDILPKLKDVKSSDNSRSLLSYIVSYYLRNFDEDAGKEQCLFPLPEPQDLFQASQMKFEDFQKDLRKLKKDLKACEVEAGKVYQVSSKEHMQPFKENMEQFIIQAKIDQEAEENSLTETHKCFLETTAYFFMKPKLGEKEVSPNAFFSIWHEFSSDFKDFWKKENKLLLQERVKEAEEVCRQKKGKSLYKIKPRHDSGIKAKISMKT

SEQ ID NO: 7535 - DNA, 315 bp, Homo sapiens
cccaatctcaacagtggctcaccatatgtactctctccccatgtaaatttctttagaacccaaagcctcagttttttatggagttcttcttttgcttgaattggccaagactttctttacttccccccgaccaccacacacacacacaattgaaacaaaatacatacacaggccgggggcggtggctcacacctttaatctcactactccggaggctgaggcagaagaatcgcttgaacccgggggtcagaggtttcagtgagctgagatggagccactgcactccagcatggatgacagagtgacaccccatct

SEQ ID NO: 7536 - protein, 75 aa, Homo sapiens
MEFFFCLNWPRLSLLPPDHHTHTQLKQNTYTGRGRWLTPLISLLRRLRQKNRLNPGVRGFSELRWSHCTPAWMTE

SEQ ID NO: 7537 - DNA, 1364 bp, Homo sapiens
ctggaggcccagcagagcaaggcttcccaggtggaaagctgttgtttcatgccttttattttcgggccgtgtgctttttggagaccacggcatatttcttcatgaaaccaaaacttggagagaaggaggtgtccccaaatgctttcttcagtatctggcatgaattcagctctgactttaaagacttctggaagaaagagaacaaacttcttctacaagagagagtaaaagaagccgaagaggtgtgtagacagaagaaaggaaaatcactttataaaataaaaccaagacatgactctggaattaaagcaaagataagcatgaaaacttgaacaatgaaaagcagaatgaaaatgagtcattgcaacgactttcacaaaattcagctgacctgagagtgggagggaaactaccgtcattctgctcatgtttcttcttgacctcttgcataatctttttgttttctagacagttcactaattgttgaattttactgtatattcatataaaaatgcaaacgtactagaccagtggagaatttgacaccttttctttttgtaaaagtttatggtattataccgatagaccaaaacagcatgtgtaagaggcagtatctgcactaattctcaacatgctaaacattaactacaattcactgttgtgagaatattcctcgtcacagcaaaaacactttcctttctactgacaaccagtcctccacatcacagcatttagacatatgggtaaaatgttatttctagtgaattgtttgtatcagtttcatgtctaagtataaattttctattttaaaatttaagaaccgtttataatcagtgctttcccaactcttgggttgctctccataactatgtatttgtgaaagaaaatggtcattttttttactgaagtcatataatgacttgggtcagctcgtaatgcattgtgatggttttgtatgagctgggtgtttttttccattacttttaatgatcttcgttgcaagttatagttgtggataaaggggagaatttattgctcttgcaaaccaattatggaaagcaacttaagaaaaccaatgttctaaatcataattgtttgtatttatgtaaagtatggtctcttactttttagtttgtagtttaagtgcaaagaaacagtagtggttttttttctattgttttgtagtcttcctgtccccttcagtccctccagtgtgtatattaccattctccaatgaaataatagggcatttaacaaagatcgctatgtgcaatactgtatttagtgtttctatttcaatttttctaggatgttaatttatatgaaaataaaatgaataataaaagaataaagatacttgcaaa

SEQ ID NO: 7538 - protein, 76 aa, Homo sapiens [sequence omitted]

SEQ ID NO: 7539 - DNA, 1170 bp, Homo sapiens
atacacactctgcatagaaattcttatgtagtaaaagaagccgaagaggtgtgtagacagaagaaaggaaaatcactttataaaataaaaccaagacatgactctggaattaaagcaaagataagcatgaaaacttgaacaatgaaaagcagaatgaaaatgagtcattgcaacgactttcacaaaattcagctgacctgagagtgggagggaaactaccgtcattctgctcatgtttcttcttgacctcttgcataatctttttgttttctagacagttcactaattgttgaattttactgtatattcatataaaaatgcaaacgtactagaccagtggagaatttgacaccttttctttttgtaaaagtttatggtattataccgatagaccaaaacagcatgtgtaagaggcagtatctgcactaattctcaacatgctaaacattaactacaattcactgttgtgagaatattcctcgtcacagcaaaaacactttcctttctactgacaaccagtcctccacatcacagcatttagacatatgggtaaaatgttatttctagtgaattgtttgtatcagtttcatgtctaagtataaattttctattttaaaatttaagaaccgtttataatcagtgctttcccaactcttgggttgctctccataactatgtatttgtgaaagaaaatggtcattttttttactgaagtcatataatgacttgggtcagctcgtaatgcattgtgatggttttgtatgagctgggtgtttttttccattacttttaatgatcttcgttgcaagttatagttgtggataaaggggagaatttattgctcttgcaaaccaattatggaaagcaacttaagaaaaccaatgttctaaatcataattgtttgtatttatgtaaagtatggtctcttactttttagtttgtagtttaagtgcaaagaaacagtagtggttttttttctattgttttgtagtcttcctgtccccttcagtccctccagtgtgtatattaccattctccaatgaaataatagggcatttaacaaagatcgctatgtgcaatactgtatttagtgtttctatttcaatttttctaggatgttaatttatatgaaaataaaatgaataataaaagaataaagatacttgcaaa

SEQ ID NO: 7540 - protein, 59 aa, Homo sapiens
SKDKHENLNNEKQNENESLQRLSQNSADLRVGGKLPSFCSCFFLTSCIIFLFSRQFTNC

SEQ ID NO: 7541 - DNA, 4177 bp, Homo sapiens
ttcagagctaagtctccgggctcctttcacatctgcaggagcagccagcctgggaccgcgcggcgcggggcgcgctctcgcctctcctgcaccctcagccggcgcgcttctcttatgggcgtctgctgcagtctggctgcggtcgaactgaaagcggcggcgggagaccaaacttagaccccgctgtggactagagaactcagagaaggcagagggagagggagagagagagagagaagggacccgaggaggaggcttccatcacgtcattgcaggatgttctggaagctttccctgtccttgttcctggtggcggtgctggtgaaggtggcggaagcccggaagaaccggccggcgggcgccatcccctcgccttacaaggacggcagcagcaacaactcggagagatggcagcaccagatcaaggaggtgctggcctccagccaggaggccctggtggtcaccgagcgcaagtacctcaagagtgactggtgcaagacgcagccgctgcggcagacggtgagcgaggagggctgccggagccgcaccatcctcaaccgcttctgctacggccagtgcaactccttctacatcccgcggcacgtgaagaaggaggaggagtccttccagtcctgcgccttctgcaagccccagcgcgtcacctccgtcctcgtggagctcgagtgccccggcctggacccacccttccgactcaagaaaatccagaaggtgaagcagtgccggtgcatgtccgtgaacctgagcgactcggacaagcagtgagcgccgggccggacgcagctcagccccgcgcgcgcccggccgctgggtggcgccgccgccgcctctgtccctgccctccgagcccactgtcacgctgcctggtgttccccctcagcagcaagcacttctcttagggctgacggtgtccttgtcacagacgtggatcgcaagtggagcttttgctgatgtgttcctgaccgaccccgggtcccacctgtgccccctaaaccaggcggtggatcaggcccgaaggaaaatgctggaaaaccaccaccgccacccagcagtcagagaggacctttcgaggtgatgcactgtaaatccggcattgatgtttccaccatgtggaaaagcaaggatttccctggccccgccctgcactccagctcgcccctttcccgcgcgaagtgaaggatgcgtcacttttctgagcggcccctcagacctctcctgctggtccctggacctctggctgggagcgctcattcttgtgactggcaggctgccctcggtcgctgctgtgatgaggatatgtgcaacctccataaatatgtcggtggacggggcgtctcctaataaacctgataccaagaagacaacttgagccacttggatcccgaagtgggcttcccgggaaacctcgagcagagcaggctacacaatcccccatcctcaagtccccaccgcctcttcttcctcactgtccccgccccctatttgtggactaaagatgaactctggtgtgcatgctattattgctgcaattagaatattatcacacacaaaggtctctatattaacgctggttttataagtgaccgtatattgtaaagagctgttaaaaagtattatagacctattcatgtattatttcacatgttttgactctggcttgcagcaccattcggagtaaggatgacagcaggcccagaaggtgtcttactcagaaaaaaaaatgcctggtcagcaattcactgtcatgcacctatttttagattgggcagggagatgggaggagtcgtgatttttactttgaatactatttcactgacgttactaagcattgcagcacaatgtagaaattggcttgggatggataggtatagggaagggcattcgttgggaaattgatgaccggaaactagaaagcccctataatgtggaatatgcatatgtggggtgaaaccgtatactactttcactgccatgacactaggcaaaaaatatttcctgttaaaagaaagagaaaaagagagggatattgaaaaatataaggagttgagtcgctttgtggtatagaagggagtaaggaataaaagatatagaatagtaatctagttgaactgttctgcacaaaacatgcttccttttcaaagaatagacttcaaaagggacgaacaaacattaggtcaccttttgtgtttataatgaattgttgacgtttccatgctgtggtctcttgatatacggaagtagacgtaacttattttccagcgaaattatatacttcttctgggctcctttgctcagttgccccaggaaggcttccctgtgagtaatgcttatggaatctgacaaatgtgaatgagctgccattggtgggaatcagtaaactttgaaaacctttcactgatgattccctggtaagtgctcctgtgaggggccacttccctagtatgtgagagagaccctctgcaagccgctgtggggacttagcttcctgatactaggtagtgatggtggatctagagacattcacttgaagagcaaggattggggtggggtgggttggtgaatctatctcaggccactgcactgcaaggtgcatttctgtcatttctgcaacaccatgagacctgagcaagaatgtgctgtggcagagggggtcttggtttcataaatgggtatatacagcctgaactcaggaggcagaaatcaaaagaaatccttgagggctggaacctgaggatagagcgaaaatggagagaagggtgttcaaggtcaggagtgatttttgcatttggtggaaaacctcaagtcagactcagtggcagaacatgcagcagaaaagctgtgaaggaaggaaatttacgtgattgtaatggaggctaggggtggattgggaggtgagtggaggagagtctctgaccagctgcagagccaacccctatcattttattaacatggaacccacacagataggggagggattaagctaagaacttacagaatgcaaacacgagcacactctcttcgaacccaattgtgggtgtagcaatgaaagcaatatgatatgctgcagtgtgaagctccttctggggttatcgtatgtacaaagtttaccttataatggctcaaattgtatttaatttttttgttttgtttataaatgaagaaaagctataagtataatgtaattattttataggtatactattaaattatagaacaaataaagataatctaggattatatgtgatcccggtgtgacgtgccataaaagtggaatttttgacttgttgcagtgagctgtgaagcagcactatgcgttcagagagtttttgttcaaccatggtgagttcaacctctagcttatgtcacatgatctcctttggggtctggaatcttctaagagaaatagaatcaggcatccaaggagcagaagtgatggaggtggccctcaatcctggtctttggaagcttccaagcctcttccacatcccctgccagctgaagacagagtattctcactgtgctggctgaaggagaaacactaaacaaggaaaccttgagaaactgcagcaatggaagtccactgttagtctctccgttagcaccagggacacacttgttctgagttttgttcattttcacatttactcctcatgagttccaacatttcttaatttaaatatttcttagtttatagcatctccatttttctattaattgacttaatctgccatttaagaaaactccgtaatcaataaaaaataaaatccacaatcaaactgcacatggttgatccactgtgtaggcttcaaaggaattaaactcaacttcctaggaaataattcatcttagtttattaaatgggacagaatatttcactgctaacgtattctaactcacttgtttttgaaattggccagatgatttttaagttataaagtcaatgaaaatgacttttgctattgtgtgaacaacttagaatgtatatattcccagaaggcttatttaatgattgacctatcaccactgattattaatgtctgcatgaatgataacaataagaccaagtcatcaataatgcaatgaaaattttttaagtgaaagcaagtttattaagaaagtaaaggaataaagaatgcctacttcataggcagagcagcct

SEQ ID NO: 7542 - protein, 168 aa, Homo sapiens; identical to SEQ ID NO: 458

SEQ ID NO: 7543 - DNA, 3261 bp, Homo sapiens
ttcagagctaagtctccgggctcctttcacatctgcaggagcagccagcctgggaccgcgcggcgcggggcgcgctctcgcctctcctgcaccctcagccggcgcgcttctcttatgggcgtctgctgcagtctggctgcggtcgaactgaaagcggcggcgggagaccaaacttagaccccgctgtggactagagaactcagagaaggcagagggagagggagagagagagagagaagggacccgaggaggaggcttccatcacgtcattgcaggatgttctggaagctttccctgtccttgttcctggtggcggtgctggtgaaggtggcggaagcccggaagaaccggccggcgggcgccatcccctcgccttacaaggacggcagcagcaacaactcggagagatggcagcaccagatcaaggaggtgctggcctccagccaggaggccctggtggtcaccgagcgcaagtacctcaagagtgactggtgcaagacgcagccgctgcggcagacggtgagcgaggagggctgccggagccgcaccatcctcaaccgcttctgctacggccagtgcaactccttctacatcccgcggcacgtgaagaaggaggaggagtccttccagtcctgcgccttctgcaagccccagcgcgtcacctccgtcctcgtggagctcgagtgccccggcctggacccacccttccgactcaagaaaatccagaaggtgaagcagtgccggtgcatgtccgtgaacctgagcgactcggacaagcagtgagcgccgggccggacgcagctcagccccgcgcgcgcccggccgctgggtggcgccgccgccgcctctgtccctgccctccgagcccactgtcacgctgcctggtgttccccctcagcagcaagcacttctcttagggctgacggtgtccttgtcacagacgtggatcgcaagtggagcttttgctgatgtgttcctgaccgaccccgggtcccacctgtgccccctaaaccaggcggtggatcaggcccgaaggaaaatgctggaaaaccaccaccgccacccagcagtcagagaggacctttcgaggtgatgcactgtaaatccggcattgatgtttccaccatgtggaaaagcaaggatttccctggccccgccctgcactccagctcgcccctttcccgcgcgaagtgaaggatgcgtcacttttctgagcggcccctcagacctctcctgctggtccctggacctctggctgggagcgctcattcttgtgactggcaggctgccctcggtcgctgctgtgatgaggatatgtgcaacctccataaatatgtcggtggacggggcgtctcctaataaacctgataccaagaagacaacttgagccacttggatcccgaagtgggcttcccgggaaacctcgagcagagcaggctacacaatcccccatcctcaagtccccaccgcctcttcttcctcactgtccccgccccctatttgtggactaaagatgaactctggtgtgcatgctattattgctgcaattagaatattatcacacacaaaggtctctatattaacgctggttttataagtgaccgtatattgtaaagagctgttaaaaagtattatagacctattcatgtattatttcacatgttttgactctggcttgcagcaccattcggagtaaggatgacagcaggcccagaaggtgtcttactcagaaaaaaaaatgcctggtcagcaattcactgtcatgcacctatttttagattgggcagggagatgggaggagtcgtgatttttactttgaatactatttcactgacgttactaagcattgcagcacaatgtagaaattggcttgggatggataggtatagggaagggcattcgttgggaaattgatgaccggaaactagaaagcccctataatgtggaatatgcatatgtggggtgaaaccgtatactactttcactgccatgacactaggcaaaaaatatttcctgttaaaagaaagagaaaaagagagggatattgaaaaatataaggagttgagtcgctttgtggtatagaagggagtaaggaataaaagatatagaatagtaatctagttgaactgttctgcacaaaacatgcttccttttcaaagaatagacttcaaaagggacgaacaaacattaggtcaccttttgtgtttataatgaattgttgacgtttccatgctgtggtctcttgatatacggaagtagacgtaacttattttccagcgaaattatatacttcttctgggctcctttgctcagttgccccaggaaggcttccctgtgagtaatgcttatggaatctgacaaatgtgaatgagctgccattggtgggaatcagtaaactttgaaaacctttcactgatgattccctggtaagtgctcctgtgaggggccacttccctagtatgtgagagagaccctctgcaagccgctgtggggacttagcttcctgatactaggtagtgatggtggatctagagacattcacttgaagagcaaggattggggtggggtgggttggtgaatctatctcaggccactgcactgcaaggtgcatttctgtcatttctgcaacaccatgagacctgagcaagaatgtgctgtggcagagggggtcttggtttcataaatgggtatatacagcctgaactcaggaggcagaaatcaaaagaaatccttgagggctggaacctgaggatagagcgaaaatggagagaagggtgttcaaggtcaggagtgatttttgcatttggtggaaaacctcaagtcagactcagtggcagaacatgcagcagaaaagctgtgaaggaaggaaatttacgtgattgtaatggaggctaggggtggattgggaggtgagtggaggagagtctctgaccagctgcagagccaacccctatcattttattaacatggaacccacacagataggggagggattaagctaagaacttacagaatgcaaacacgagcacactctcttcgaacccaattgtgggtgtagcaatgaaagcaatatgatatgctgcagtgtgaagctccttctggggttatcgtatgtacaaagtttaccttataatggctcaaattgtatttaatttttttgttttgtttataaatgaagaaaagctataagtataatgtaattattttataggtatactattaaattatagaacaaataaagataatctaggattatatgtg

SEQ ID NO: 7544 - protein, 168 aa, Homo sapiens; identical to SEQ ID NO: 458

SEQ ID NO: 7545 - DNA, 987 bp, Homo sapiens
atgggccatcagaatcacactttcagcagtgatttcatacttttgggattgttctcttcttccccaacaagtgtggtcttcttcttagttttatttgtcattttcattatgagtgtaacagaaaatacgctcatgatcctcctcattcgcagtgactcccgactccacactccaatgtattttctgctcagccatctctccttaatggatatcttgcatgtttccaacatcgttcccaaaatggtcactaactttctgtcaggcagcagaactatttcatttgcaggttgtgggttccaggtatttctgtccctcaccctcctgggtggtgagtgccttctcctggctgcaatgtcctgtgatcgctatgtggctatctgtcacccgctgcgctatccgattcttatgaaggagtatgccagcgctctcatggctggaggctcctggctcattggggttttcaactccacagtccacacagcttatgcactgcagtttcccttctgtggctctagggcaattgatcacttcttctgtgaagtccctgccatgttgaagttgtcctgtgcagacacaacacgctatgaacgaggggtttgtgtaagtgctgtgatcttcctgctgatccctttctccttgatctctgcttcttatggccaaattattcttactgtcctccagatgaaatcatcagaggcaaggaaaaagtcattttccacttgttccttccacatgattgtggtcacgatgtactatgggccatttatttttacatatatgagacctaaatcataccacactccaggccaggataagttcctggcaatattctatacgatcctcacacccacactcaaccctttcatctacagctttaggaataaagatgttctggcggtgatgaaaaatatgctcaaaagtaactttctgcacaaaaaaatgaataggaaaattcctgaatgtgtgttctgtctatttctatgttaa

SEQ ID NO: 7546 - protein, 328 aa, Homo sapiens
MGHQNHTFSSDFILLGLFSSSPTSVVFFLVLFVIFIMSVTENTLMILLIRSDSRLHTPMYFLLSHLSLMDILHVSNIVPKMVTNFLSGSRTISFAGCGFQVFLSLTLLGGECLLLAAMSCDRYVAICHPLRYPILMKEYASALMAGGSWLIGVFNSTVHTAYALQFPFCGSRAIDHFFCEVPAMLKLSCADTTRYERGVCVSAVIFLLIPFSLISASYGQIILTVLQMKSSEARKKSFSTCSFHMIVVTMYYGPFIFTYMRPKSYHTPGQDKFLAIFYTILTPTLNPFIYSFRNKDVLAVMKNMLKSNFLHKKMNRKIPECVFCLFLC

SEQ ID NO: 7547 - DNA, 969 bp, Homo sapiens
atgaattgccacaaaagtttaaaggacatatccagctaccagcgacctacaacggaatgttcaaaagactatgtgtatctccaccacaatacccagggggcctctcgtctgatacctcggtctggaaggcgtgcccagctgcccttccgcaggagacaccagtgtgtagagcagagcccttcctttcgagagggtcttcacgctctcatcgtggtcggcggtcgcgggagaggggccctcctggacccgcaagcacgcccactactgccaaagacgccgcggctggtctcgcagcagcgcgtcctccggcagccccagcgagtgagcccggggctcggatttctgcacgagaaccggctgacccacgcacacctgaaaaccgagaacatcctgcatgtggattctgagttaaacaccgtctacagcgagcacaggagcgatgagaagtcagtgaggagcaccagcgtccgagtggctgacttccccaatgccacctctgacctactaccaggtttcacactcttccagacctgtgaaaaccaagagcgcctggtgatgttgaagaccctacggctcatcccattacgcgtgatctcctgtaccaagaagcagaaatatttctacaaatggggcctagtttgggatgagaacagctctgacagcccatatgtgaagaactgcaaacgtctgaagagtgacatgctccaagactctctggagcacgtgcagctgtttgacctgatgcggagggtggtaaaattggacgctgcccagcacatcactctggctgagactcttctgcaccccgtctttgctggcctggcaacctcagtcgtggtccttccacacaagccacaacccaagcagatgacagacgcaggacactgcatgaggagagcggaactgggctgcccaatccccattctccagcccctaccaccaggtcccaggaccagaaccacacaatga

SEQ ID NO: 7548 - protein, 322 aa, Homo sapiens [sequence omitted]

SEQ ID NO: 7549 - DNA, 1994 bp, Homo sapiens
cggccaccaggtggcgcctgtttatcatcttccgcacctgcgccctgggctcactcgctggggctgccggaggacgcgctccttcaggacccgctgcggccaccaggtggagcctctttatcatcttccgcacccgagccccgggctcactcgctggggctgccggaggacgcgctgctgcgagaccagccgcggcgtctttggcagtagtgggcgtgcttgcgggtccaggagggcccctctcccgcgaccgccgaccacgatgagagcgtgaagaccctctcgaaaggaagggctctgctctacacactggtgtctcctgcggaagggcagctgggcacgccttccagaccgagttacagcagaaagttttcatggagaaatggaatcacacttcaaatgatttcattttgttgggtctgcttcccccaaatcaaactggaatatttctcttgtgccttatcatcctcatattctttctggcctcggtgggtaactcggccatgattcacctcatccacgtggatcctcgtctccacacaccgatgtactttcttctcagccagctctcccttatggacctgatgtacatctccaccaccgtccccaagatggcgtacaacttcctgtccggccagaaaggcatctccttcctgggatgtggtgtgcaaagcttcttcttcctgaccatggcgtgttctgaaggcttactcctgacctccatggcctacgaccgttatttggccatctgccactctctctattatcctatccgcatgagtaaaatgatgtgtgtgaagatgattggaggctcttggacactggggtccatcaactccttggcacacacagtctttgcccttcatattccctactgcaggtctagggctattgaccatttcttctgcgatgtcccagccatgttgcttcttgcctgtacagatacttgggtctatgaatatatggtttttgtaagtacaagcctctttctccttttccctttcattggcatcacttcttcctgtggccgagtcctatttgctgtctatcatatgcactcaaaggaggggagaaaaaaggccttcaccaccatttcaacacatttaactgtagtgatcttttactatgcaccttttgtctacacctatcttcggcccaggaatctccgctcaccagctgaagacaagatcctggcagtcttctacaccatccttacccccatgctcaatcccattatctacagcctgaggaataaggaagtcctgggggctatgaggagagtgtttgggatattctctttcctgaaagaataatcatggccatccccactccctttgtatttcctctttccaagttgattccaacacgctagagcagggttgtccaatagaaatacaacataatttaaaattttctaataggtacatttaagcagtcaaataaatttaaataatatatttaattcaaaacaatgttataattaatattaatattaacaatattgatgttaattacatagcatactatttcaataaattatatgcaatatattatagtacatgtttgtacatatattactattaacgtgataatgtttattcttgtatattgacatagaatttcttcatgtaataacacaaatttgttaatgttgccttttactctgtttgcattctaagtcttcaaagtcttgtgtttgttttatagagtgcagcgcagcttggacaaaacacatttcaagtgcccagtagtcagtgtctatagtgttggacagcacattcttagagcatccccaatcaatagtttcagaagttatatatgcatgtgtatgtgcatgtatggtgtatacaaacatatttttgttatatacaatattgctgatgaactgaaaattaacaagtaaaatgcacatgctaaggtagtgtttatgtgtttctttatctgttggctcatttttagcatatgcacatttattgtaattaacatttgaagtc

SEQ ID NO: 7550 - protein, 312 aa, Homo sapiens; identical to SEQ ID NO: 460

SEQ ID NO: 7551 - DNA, 1883 bp, Homo sapiens
ccggaggacgcgctgctgcgagaccagccgcggcgtctttggcagtagtgggcgtgcttgcgggtccaggagggcccctctcccgcgaccgccgaccacgatgagagcgtgaagaccctctcgaaaggaagggctctgctctacacactggtgtctcctgcggaagggcagctgggcacgccttccagaccgagcaaaagttgaaaaatcagtaacccaagatgactaaccaaatcaatatgctgggcaggatgagacatcagtgtctgcctcagacagaagagcacacacaaaacatgacctctcactccaagcccagttacagcagaaagttttcatggagaaatggaatcacacttcaaatgatttcattttgttgggtctgcttcccccaaatcaaactggaatatttctcttgtgccttatcatcctcatattctttctggcctcggtgggtaactcggccatgattcacctcatccacgtggatcctcgtctccacacaccgatgtactttcttctcagccagctctcccttatggacctgatgtacatctccaccaccgtccccaagatggcgtacaacttcctgtccggccagaaaggcatctccttcctgggatgtggtgtgcaaagcttcttcttcctgaccatggcgtgttctgaaggcttactcctgacctccatggcctacgaccgttatttggccatctgccactctctctattatcctatccgcatgagtaaaatgatgtgtgtgaagatgattggaggctcttggacactggggtccatcaactccttggcacacacagtctttgcccttcatattccctactgcaggtctagggctattgaccatttcttctgcgatgtcccagccatgttgcttcttgcctgtacagatacttgggtctatgaatatatggtttttgtaagtacaagcctctttctccttttccctttcattggcatcacttcttcctgtggccgagtcctatttgctgtctatcatatgcactcaaaggaggggagaaaaaaggccttcaccaccatttcaacacatttaactgtagtgatcttttactatgcaccttttgtctacacctatcttcggcccaggaatctccgctcaccagctgaagacaagatcctggcagtcttctacaccatccttacccccatgctcaatcccattatctacagcctgaggaataaggaagtcctgggggctatgaggagagtgtttgggatattctctttcctgaaagaataatcatggccatccccactccctttgtatttcctctttccaagttgattccaacacgctagagcagggttgtccaatagaaatacaacataatttaaaattttctaataggtacatttaagcagtcaaataaatttaaataatatatttaattcaaaacaatgttataattaatattaatattaacaatattgatgttaattacatagcatactatttcaataaattatatgcaatatattatagtacatgtttgtacatatattactattaacgtgataatgtttattcttgtatattgacatagaatttcttcatgtaataacacaaatttgttaatgttgccttttactctgtttgcattctaagtcttcaaagtcttgtgtttgttttatagagtgcagcgcagcttggacaaaacacatttcaagtgcccagtagtcagtgtctatagtgttggacagcacattcttagagcatccccaatcaatagtttcagaagttatatatgcatgtgtatgtgcatgtatggtgtatacaaacatatttttgttatatacaatattgctgatgaactgaaaattaacaagtaaaatgcacatgctaaggt

SEQ ID NO: 7552 - protein, 82 aa, Homo sapiens
MTNQINMLGRMRHQCLPQTEEHTQNMTSHSKPSYSRKFSWRNGITLQMISFCWVCFPQIKLEYFSCALSSSYSFWPRWVTRP

SEQ ID NO: 7553 - DNA, 1957 bp, Homo sapiens
ccggaggacgcgctgctgcgagaccagccgcggcgtctttggcagtagtgggcgtgcttgcgggtccaggagggcccctctcccgcgaccgccgaccacgatgagagcgtgaagaccctctcgaaaggaagggctctgctctacacactggtgtctcctgcggaagggcagctgggcacgccttccagaccgagcaaaagttgaaaaatcagtaacccaagatgactaaccaaatcaatatgctgggcaggatgagacatcagtgtctgcctcagacagaagagcacacacaaaacatgacctctcactccaagcccagttacagcagaaagttttcatggagaaatggaatcacacttcaaatgatttcattttgttgggtctgcttcccccaaatcaaactggaatatttctcttgtgccttatcatcctcatattctttctggcctcggtgggtaactcggccatgattcacctcatccacgtggatcctcgtctccacacaccgatgtactttcttctcagccagctctcccttatggacctgatgtacatctccaccaccgtccccaagatggcgtacaacttcctgtccggccagaaaggcatctccttcctgggatgtggtgtgcaaagcttcttcttcctgaccatggcgtgttctgaaggcttactcctgacctccatggcctacgaccgttatttggccatctgccactctctctattatcctatccgcatgagtaaaatgatgtgtgtgaagatgattggaggctcttggacactggggtccatcaactccttggcacacacagtctttgcccttcatattccctactgcaggtctagggctattgaccatttcttctgcgatgtcccagccatgttgcttcttgcctgtacagatacttgggtctatgaatatatggtttttgtaagtacaagcctctttctccttttccctttcattggcatcacttcttcctgtggccgagtcctatttgctgtctatcatatgcactcaaaggaggggagaaaaaaggccttcaccaccatttcaacacatttaactgtagtgatcttttactatgcaccttttgtctacacctatcttcggcccaggaatctccgctcaccagctgaagacaagatcctggcagtcttctacaccatccttacccccatgctcaatcccattatctacagcctgaggaataaggaagtcctgggggctatgaggagagtgtttgggatattctctttcctgaaagaataatcatggccatccccactccctttgtatttcctctttccaagttgattccaacacgctagagcagggttgtccaatagaaatacaacataatttaaaattttctaataggtacatttaagcagtcaaataaatttaaataatatatttaattcaaaacaatgttataattaatattaatattaacaatattgatgttaattacatagcatactatttcaataaattatatgcaatatattatagtacatgtttgtacatatattactattaacgtgataatgtttattcttgtatattgacatagaatttcttcatgtaataacacaaatttgttaatgttgccttttactctgtttgcattctaagtcttcaaagtcttgtgtttgttttatagagtgcagcgcagcttggacaaaacacatttcaagtgcccagtagtcagtgtctatagtgttggacagcacattcttagagcatccccaatcaatagtttcagaagttatatatgcatgtgtatgtgcatgtatggtgtatacaaacatatttttgttatatacaatattgctgatgaactgaaaattaacaagtaaaatgcacatgctaaggtagtgtttatgtgtttctttatctgttggctcatttttagcatatgcacatttattgtaattaacatttgaagtc

SEQ ID NO: 7554 - protein, 82 aa, Homo sapiens; identical to SEQ ID NO: 7552

SEQ ID NO: 7555 - DNA, 939 bp, Homo sapiens; identical to SEQ ID NO: 4377

SEQ ID NO: 7556 - protein, 312 aa, Homo sapiens; identical to SEQ ID NO: 4378

SEQ ID NO: 7557 - DNA, 963 bp, Homo sapiens
atgaaaacaggaaatcaaagttttgggacagattttctacttgttggtcttttccaatatggctggataaactctcttctctttgtcgtcattgccaccctctttacagttgctctgacaggaaatatcatgctgatccacctcattcgactgaacaccagactccacactccaatgtactttctgctcagtcagctctccatcgttgacctcatgtacatctccaccacagtgcccaagatggcagtcagcttcctctcacagagtaagaccattagatttttgggctgtgagattcaaacgtatgtgttcttggcccttggtggaactgaagcccttctccttggttttatgtcttatgatcgctatgtagctatctgtcaccctttacattatcctatgcttatgagcaagaagatctgctgcctcatggttgcatgtgcatgggccagtggttctatcaatgctttcatacatacattgtatgtgtttcagcttccattctgtaggtctcggctcattaaccactttttctgtgaagttccagctctactatcattggtgtgtcaggacacctcccagtatgagtatacagtcctcctgagtggacttattatcttgctactaccattcctagccattctggcttcctatgctcgtgtgcttattgtggtattccagatgagctcaggaaaaggacaggcaaaagctgtttccacttgttcctcccacctgattgtggcaagcctgttctatgcaaccactctctttacctacacaaggccacactccttgcgttccccttcacgggataaggcggtggcagtattttacaccattgtcacacctctactgaacccatttatctacagcctgagaaataaggaagtgacgggggcagtgaggagactgttgggatattggatatgctgtagaaaatatgacttcagatctctgtattga

SEQ ID NO: 7558 - protein, 320 aa, Homo sapiens
MKTGNQSFGTDFLLVGLFQYGWINSLLFVVIATLFTVALTGNIMLIHLIRLNTRLHTPMYFLLSQLSIVDLMYISTTVPKMAVSFLSQSKTIRFLGCEIQTYVFLALGGTEALLLGFMSYDRYVAICHPLHYPMLMSKKICCLMVACAWASGSINAFIHTLYVFQLPFCRSRLINHFFCEVPALLSLVCQDTSQYEYTVLLSGLIILLLPFLAILASYARVLIVVFQMSSGKGQAKAVSTCSSHLIVASLFYATTLFTYTRPHSLRSPSRDKAVAVFYTIVTPLLNPFIYSLRNKEVTGAVRRLLGYWICCRKYDFRSLY

SEQ ID NO: 7559 - DNA, 939 bp, Homo sapiens
atggaaaattacaatcaaacatcaactgatttcatcttattggggctgttcccacaatcaagaattggccttttcgtattcaccctcatttttctcattttcctaatggctctaattggaaatctatccatgattcttctcatctttttggacatccatctccacacacctatgtatttcctacttagtcagctctccctcattgacctaaattacatctccaccattgttccaaagatggtttatgattttctgtatggaaacaagtctatctccttcactggatgtgggattcagagtttcttcttcttgactttagcagttgcagaagggctgctcctgacatcaatggcctatgatcgttatgtggccatttgctttcctctccactatcccatccgtataagcaaaagagtgtgtgtgatgatgataacaggatcttggatgataagctctatcaactcttgtgctcacacagtatatgcactctgtatcccatattgcaagtccagagccatcaatcattttttctgtgatgttccagctatgttgacgctagcctgcacagacacttgggtctatgagagcacagtgtttttgagcagcaccatctttcttgtgcttcctttcactggtattgcatgttcctatggccgggttctccttgctgtctaccgcatgcactctgcagaagggaggaagaaggcctattcaacctgtagcacccacctcactgtagtgtccttctactatgcaccctttgcttatacctatgtacgtccaagatccctgcgatctccaacagaggacaagattctggctgttttctacaccatcctcaccccaatgctcaaccccatcatctacagcctgagaaacaaggaggtgatgggggccctgacacaagtgattcagaaaatcttctcagtgaaaatgtag

SEQ ID NO: 7560 - protein, 312 aa, Homo sapiens; identical to SEQ ID NO: 465

SEQ ID NO: 7561 - DNA, 1080 bp, Homo sapiens
atgctgtggagagctgtccttgtctatactccagaagacactcttttgtgtcatctgattgacattctagacaagtgttgtcaatgtgaaataattcttactgtagacatgcagattcaggaaagagcacacgaatgccccatggaaaattacaatcaaacatcaactgatttcatcttattaggattcttcccaccatcaagaattggccttttcctcttcatcctcattgttttcattttcctaatggctctaattggaaacctatccatgattcttctcatcttcttggacacccatctccacacacccatgtatttcctacttagtcagctctccctcattgacctaaattacatctccaccattgttcctaagatggcatctgattttctgtctggtaacaagtctatctccttcactgggtgtgggattcagagtttcttcttctcggcattaggaggtgcagaagcactacttttggcatctatggcctatgatcgttacattgctatttgctttcctcttcactatcccatccgcatgagcaaaagaatgtgtgtgctgatgataacagggtcttggatcataggctcgatcaatgcttgtgctcacactgtatatgtactccatattccttattgccaatccagggccatcaatcatttcttctgtgatgtcccagcaatggtgactctggcctgcatggacacctgggtctatgagggcacagtgtttttgagcaccaccatctttctcgtgtttcccttcattgctatttcatgttcctatggccgggttctccttgctgtctaccacatgaaatctgcagaagggaggaagaaagcctacctgacctgcagcacccacctcactgtagtaactttctactatgcaccttttgtctacacttatctacgtccaagatccctgcgatctccaacagaggacaaggttctggctgtcttctacaccaccctcactccaatgctcaaccccatcatctatagcctgaggaacaaggaggtgatgggggccctgacacgagtgagtcagagaatctgctctgggaaaatgtag

SEQ ID NO: 7562 - protein, 359 aa, Homo sapiens
MLWRAVLVYTPEDTLLCHLIDILDKCCQCEIILTVDMQIQERAHECPMENYNQTSTDFILLGFFPPSRIGLFLFILIVFIFLMALIGNLSMILLIFLDTHLHTPMYFLLSQLSLIDLNYISTIVPKMASDFLSGNKSISFTGCGIQSFFFSALGGAEALLLASMAYDRYIAICFPLHYPIRMSKRMCVLMITGSWIIGSINACAHTVYVLHIPYCQSRAINHFFCDVPAMVTLACMDTWVYEGTVFLSTTIFLVFPFIAISCSYGRVLLAVYHMKSAEGRKKAYLTCSTHLTVVTFYYAPFVYTYLRPRSLRSPTEDKVLAVFYTTLTPMLNPIIYSLRNKEVMGALTRVSQRICSGKM

SEQ ID NO: 7563 - DNA, 834 bp, Homo sapiens
atgggaaactccctcatggttctcctaatctacctggatacccagctccatacccccatgtacttcctcctcagtcaactgtcccccatggacgtcaggctcatctgcaccaccgtacccaagatggccttcaactacttgtctggcagcaagtccatttctatggctggctgtgccacacaaattttcttctgtgtatcactgcttggctctgaatgctttctgttggctgttatgtcttatgactgctacattgccatttgccaccctctaagatacaccaatctcatgagacccaaaatttgtagacttatgactgccttctcctggatcctgggctctacagatggaatcatttatgctgtagccacattttccttctcctactgtgggtctcgggaaatagcccacttcttctgtgagttaccttccctactaatcctctcatgcaatgacacatcaatatttgaaaaggttattttcatttgctctatagtaatgcttgttttccctgttgcaatcatcattgcttcctatgctggagttattctggctgtcattcacatgggatctggagagggtcgtcgcaaagctttcacgacctgttcctctcacctcatggtggtgggaatgttctatggagcaggtttgttcatgtacatacagcccacatctgatcgctccccaacgcaggacaagctggtgtctgtattctacaccatcctcactcccatgctgaatcccctcatctacagcctccgcaacaaggaagtgaccagagcattcatgaagatctcaggaaagggcaagtctggagagagagttacctcataa

SEQ ID NO: 7564 - protein, 277 aa, Homo sapiens [sequence omitted]

SEQ ID NO: 7565 - DNA, 906 bp, Homo sapiens
atgccaggatccctcggtgaatacaggtttttgcaagcttttgacaatggcaaccactctcaggccctagcaactgtggccttcatgggaaactctgtcatggttctcctcatctacctggacacccagctccacacccccatgtacttcctcctcagtcaactgttcctcatggacctcatgctcatctgctctaccgtacccaagatggccttcaactacttgtctggcagcaagtccatttctatggctggttgtgccacacaaattttcttctatgtatcactgcttggctccgaatgctttctgttggctgttatgtcttatgaccgctatattgccatttgccaccctctaagatacaccaatctcatgagacccaaaatttgtggacttatgactgccttctcctggatcctgggctctatggatgcaatcattgatgctgtagcgacattttccttctcctactgtgggtctcgggaaatagcccacttcttctgtgacttcccttccctactaatcctctcatgcaatgacacatcaatatttgaaaaggttcttttcatctgctgtatagtaatgattgtttttcctgttgcaatcatcatcgcttcctatgctcgagttattctggctgtcattcacatgggatctggagagggtcgtcgcaaagcttttactacctgttcctctcacctcatggtggtgggaatgtactatggagcaggtttgttcatgtacatacggcccacatctgatcgctcccctatgcaggacaagctggtgtctgtattctacaccatcctcactcccatgctgaatcccctcatctacagcctccgcaacaaggaggtgaccagagcactcaggaaagtgttaggaaagggcaagtgtggagagtga

SEQ ID NO: 7566 - protein, 301 aa, Homo sapiens
MPGSLGEYRFLQAFDNGNHSQALATVAFMGNSVMVLLIYLDTQLHTPMYFLLSQLFLMDLMLICSTVPKMAFNYLSGSKSISMAGCATQIFFYVSLLGSECFLLAVMSYDRYIAICHPLRYTNLMRPKICGLMTAFSWILGSMDAIIDAVATFSFSYCGSREIAHFFCDFPSLLILSCNDTSIFEKVLFICCIVMIVFPVAIIIASYARVILAVIHMGSGEGRRKAFTTCSSHLMVVGMYYGAGLFMYIRPTSDRSPMQDKLVSVFYTILTPMLNPLIYSLRNKEVTRALRKVLGKGKCGE

SEQ ID NO: 7567 - DNA, 2484 bp, Homo sapiens
atggaggtagaaggacttcagaatacagaggctaaataccatgacagcagtgaacttacagaaggagctactgctcagcatgtgactttctgggccacagacactattgagcatgttacacaggcctttgtttccatggcaacaggactacaggaaggttatggccagactgacatagacagtgttctagtggacgcaattgcggcggctccagtcctcaggggactccagtcctcagggggctccagtcctcaggggggtgctccagtcctcaggggggcgttccagtcctcaggtggctccagtcctcagggtgctccagtcctcagggggctcgagtcctcaggcggctccagtactcagggggctccagtcctcagggggctccagtcctcagggcggctccagtcctcagggggctccagtcctcagtgtgctccagtcttcaggcagctccagtcctcagggggctccagtcctcggggggctccaatcctcggggggctccagtcctcagggctgctccagtcctcagggggctccagtcttcaggcggctccagtcctcagggtgctccagtcctcagggggctccagtcctcagggggctccattcctcagggggctccagtcttcaggcggctccagtcctcagggtgctccagtcctcagggggctccagtcttcaggcggctccagtcctcaggcggctccagtcctcagggggctccagtcctcagggggctccattcctcagggggctccagtcttcaggtggctccagtcctcagggtgctccagtcctcagggggctccagtcctcagggcggctccattcctcagggggttccagtcttcaggcggctccagtcctcagggtgctccagtcctcagggggctccagtcctcagggcggctccagtcctcagggggctccagtcctcagggggctccagtcctcagggtggctccagtcctcagggggctccagtcctcaggcggctccagtcctcagggggctccagtcttcaggcggctccagtcctcagggggctccattcctcagggggctccagtcctcagggggcttcagtcctcaggcggctccagtcctcaggcggctccagtcctcaggggggctccagtcttcaagggtatccagtcctcaggggggctccagtcttcaggcggctccagtcctcagggggctccagtcctcagggtgctccagtcctcaggggtatccagtcctcaggggggctccagtcctcatggggcttcagttcttaggcggctccagtcctcagggggctccagtcctcagggggctccagtcctcaggcggctccagtcctcagggggctccagtcctcaggagggcgctccagcacccgtgactcgccaggctccgtctgagacccgtgctaggctcgctctgtccctgcgttccctcgcctctctctccagttgtttttcccattctcacaccagcactgcaccaagcccaccacacacgttcctcttctttctggtcctgggcatctttttagtggccttcatgggaaactctgtcatggttctcctcatctacctggacacccagctccacacccccatgtacttcctcctcagccaactgtccctcatggacctcatgctcatctgcaccaccgtacccaagatggccttcaactacctgtctggcagcaagtccatttctatggctggttgtgtcacacaaattttcttctatatatcactgtctggctctgaatgttttcttttggctgttatggcttatgaccgctatattgctatttgccaccctctaagatataccaatctcatgaatcctaaaatttgtggacttatggctaccttctcctggatcctgggctctacagatggaatcattgatgctgtagccacattttccttctccttttgtgggtctcgggaaatagcccacttcttctgtgaattcccttccctactaatcctctcatgcaatgacacatcaatatttgaagaggttattttcatctgctgtatagtaatgcttgttttccctgttgcaatcatcattgcttcctatgctcgagttattctggctgtcattcacatgggatctggagagggtcgttgcaaagctttcacgacctgttcctctcacctcatggtggtgggaatgtactatggagcagctttgttcatgtacatacggcccacatctgatcactccccaacgcaggacaagatggtgtctgtattctacaccatcctcactcccatgctgaatcccctcatctacagcctccgcaacaaggaggtgactagagcattcatgaagatcttaggaaagggcaagtctgagagtgagttacctcataaactttatgttttgctgtttgctaaattcttctttctaatatccatctttttctatgatgtcaaaatactagcattgattatgtacattgcctaa

SEQ ID NO: 7568 - protein, 827 aa, Homo sapiens
MEVEGLQNTEAKYHDSSELTEGATAQHVTFWATDTIEHVTQAFVSMATGLQEGYGQTDIDSVLVDAIAAAPVLRGLQSSGGSSPQGGAPVLRGAFQSSGGSSPQGAPVLRGLESSGGSSTQGAPVLRGLQSSGRLQSSGGSSPQCAPVFRQLQSSGGSSPRGAPILGGLQSSGLLQSSGGSSLQAAPVLRVLQSSGGSSPQGAPFLRGLQSSGGSSPQGAPVLRGLQSSGGSSPQAAPVLRGLQSSGGSIPQGAPVFRWLQSSGCSSPQGAPVLRAAPFLRGFQSSGGSSPQGAPVLRGLQSSGRLQSSGGSSPQGAPVLRVAPVLRGLQSSGGSSPQGAPVFRRLQSSGGSIPQGAPVLRGLQSSGGSSPQAAPVLRGAPVFKGIQSSGGLQSSGGSSPQGAPVLRVLQSSGVSSPQGGSSPHGASVLRRLQSSGGSSPQGAPVLRRLQSSGGSSPQEGAPAPVTRQAPSETRARLALSLRSLASLSSCFSHSHTSTAPSPPHTFLFFLVLGIFLVAFMGNSVMVLLIYLDTQLHTPMYFLLSQLSLMDLMLICTTVPKMAFNYLSGSKSISMAGCVTQIFFYISLSGSECFLLAVMAYDRYIAICHPLRYTNLMNPKICGLMATFSWILGSTDGIIDAVATFSFSFCGSREIAHFFCEFPSLLILSCNDTSIFEEVIFICCIVMLVFPVAIIIASYARVILAVIHMGSGEGRCKAFTTCSSHLMVVGMYYGAALFMYIRPTSDHSPTQDKMVSVFYTILTPMLNPLIYSLRNKEVTRAFMKILGKGKSESELPHKLYVLLFAKFFFLISIFFYDVKILALIMYIA

SEQ ID NO: 7569 - DNA, 939 bp, Homo sapiens; identical to SEQ ID NO: 473

SEQ ID NO: 7570 - protein, 312 aa, Homo sapiens; identical to SEQ ID NO: 474

SEQ ID NO: 7571 - DNA, 936 bp, Homo sapiens; identical to SEQ ID NO: 475

SEQ ID NO: 7572 - protein, 311 aa, Homo sapiens; identical to SEQ ID NO: 476

SEQ ID NO: 7573 - DNA, 963 bp, Homo sapiens; identical to SEQ ID NO: 477

SEQ ID NO: 7574 - protein, 320 aa, Homo sapiens; identical to SEQ ID NO: 478

SEQ ID NO: 7575 - DNA, 963 bp, Homo sapiens; identical to SEQ ID NO: 479

SEQ ID NO: 7576 - protein, 320 aa, Homo sapiens; identical to SEQ ID NO: 480

SEQ ID NO: 7577 - DNA, 939 bp, Homo sapiens; identical to SEQ ID NO: 481

SEQ ID NO: 7578 - protein, 312 aa, Homo sapiens; identical to SEQ ID NO: 482

SEQ ID NO: 7579 - DNA, 4208 bp, Homo sapiens
agtattctgtaaggacatttgtgtttatatatatctgtcatatgtatatatatatcatatatatatcagtcatatatatatctcacacatatatgtaagtgattttatgctatgtatctttttttcttctgatatctttttctggtttcaatgttagtttaatgctagcttcatcaaataagttgggaagtggtcttttactcatattttgaaagaatttgtgtagaattactataaattgttaaggagaatttttgtagaatttgctagtgaatatatttatgttttgaattttcttttgtggaaggtttttactacaaattccacttacttagtagaattaagattattcaagttatctaattttttactgagtaattctggtctcattatgtctttcaagggaatttttttcattttttaatatcattttatagctttatattaaaagttctgaatatgagtggctctctgcctgctccctttcaccaccttaatatcttaagtgaataatgcattctcatcaagagggttaaaactaatcatcagctgatggcagttcactttttgaattacaaaaaactttccccctcaggccatttattttactcataagcaacctaactatattatagattctaaaatattatctccaaagcccctagaagatgcatacatttagtccaaaaggtttaataactccccaagctgatatttccctttctcctttgatatttccataatttggagtgcccattgtctgttttatttcatattgggacaagctgaacagggactaaggtgaaggcagagaggcattcagggcaaatcgtttaaggaggtactacaaatacaaggtcaacacttgcaggaaactaagaaagagtgtctccttaaaatttgtgtcctaggtgtcttatctagttctggcctttttaatgtgaattctttttttttttttttttgagatgaagtctggctctgtcacccaggctagagtgcactggtgcgatctcgcctgactgcaacctccacctcctgggttcaagggattctcctgcctcagcctcccaagtagctgggattacaggcatgcaccaccacacctggctaatttttgtatttttagtggagacagggtttcaccatgttggccaggctggtcttgaactcctgacctgaggtgatccacccacctcggcctcccaaagtgctgtgattacaggcatcaaccactgcacccagcttgaattctttgtgtcctctaaaaactcaaaattattttttagtattttaccagaaacatgggaggcatcaatttaaaaggaatgcacagaagacacttcatcactacttccaaccaagcagtaatgggctggagatcctagattaagctactggcagatctggtgtctggcgagggctctgctcctggtttgcagatgggtgtcctctcattatgccctcgcatggttgagagaaaaatcatcgttcttctgtttcttcttagaagggcactaattttattcatgagctccatcctcatgacctaatcacagcctaaaggcctcacctcctaatactattatattgggggtttagattgcaacgtatgtatttgggggggtcggcacaaacattcagctcataacatcttgtgaatcacttttaattgcaatgttggaacattgctttaaaatgatgcaggtcttatttccatatatgcattaggcagttcttgcattgctataaagaaatacaggaaactgggtaatttataaataaaagaggtttaattggctcacagttctgtaggctttacaggaagcatggtggtgctcagatctgcttggcatctagggaggcctcaggaagcttccattcatggcagaaggtgaagacagagtaggtatgtcgtgtagtaaaagcaggaatacgcaagagacagagtggggggcggtgccaaacacttttaaatgaccacatctcatatgaattcagggcaagagctcacttaatcaccaaggggttggcccaaaccattcatgagggatctgcccccattatccaaatccctctgccagtctccaacattaggagttacacttcaacacgagatttgagtggggacaaatatccaaactatattaagaagaaacgcagcagttcccaattttgtctctcatcaccctcccacacaccaaatcatatatgtgaggagtacttttatatgcacaacttgccctatttagaactgttctggaatgagtgcatttcccatagtactatctaaaattccatcccctgcagttcccttcaagaaaccacatgacagtatcaataatgcattgcattttaggaataaagttaaatattttctaatttattttaaccattaataaactgttcttaactctttttataacaataatttttagatcagttcacaagtgattacaacacacacggcagcaagatggataattgctgtcctaatgcatacattacactaaacattattacatacaatgatattgccaaggatttaaaattttgatcagcagtttcaggaagctaggagcttttaactaaatggatgaatcatggagaagagtcccgccatttctcgttcaagattggtgactcagtgtcagtgggacatgagacttctatgatctgaccttagaatgacccctttttatggtggaacaaggttttaagcaaggccattcccctggagccataaaggattgactagggaagattgcactgagctttgctatgaacagggctgctgcatttttgtgatttttccccagtctgtggtttttcctgagcctgtatccagacagtggtcattccaagtccagctttgctgtctgttacagcttctgtttgactatgtctttatactcttgccttattaagttataaaactgtttattgctttattgtctcagctcaaaggtgaataacaaaaccccaagcatatgtcagccttggaaatttagtattgaccttcctgggccctcagtgcctgctcatttcctatacctagcatttacgtttccaatgcttcatctacaccttcattcactactacctatatgtcatttgccttattatctatggtacgtatactgagttctagtaaaatagtatttcaagtgcaagtttacacattccttatattaactttaattcaatacttgccatttcttttttgcttcagaaccaggagttgaaaatatttccatttgtcttttaaagaggttataaaattgtcacaaggacatgggacatgctggctatttttccctttttactattttatagcatccaattaggtggataataaaattcttatttttccaatgagtagtccaagacttcacgaataaaagtaccatgcttaatgtcacactactaacaagcggcaggaccagtgtttaaatgtaaatatatcttatttcaaaatttgtttgttttaccaaattttgtagctccttccaagactcccaaccttcaccttttctttctatccctaagaatacatatgattttcacatacgaagttcgtttataaccttttgctaattaattagtgaaaaaagatgcaatgaattttgcaaaatgtcatgcaaaaaatgaagcaggaacagacaattaggaaatattaaaccatggttagtagcattgcatatcagcattggtttgattgtaatttcattgttctggactctcgcttgtttagttggtgtccctgaggcctgcagtccttccaggtgctgagagtggagcttcccaggccttcatcctctccaggacctcaaccttcctcgttccatgtacagacatagagccctttccacttcctttttgtaagaaatagtattctttcccacagatgtccagctcacaccagcctgctgcttgcctttcactgaccccttcgatggatgctacggacttggatccactgccaaggaaacacgtcacagagcagtgtgtggttggcatactaagctccaccaagaaagaagacatcacccagagtcatgctgtattatccagaatacttatgtgtctccataccagagattgaccacccaaacttcttcatttataaaaagcttctccaagtacttgattgcttgaaattggactatagtagcttcaagaaacacttataaacattagccaattac

SEQ ID NO: 7580 - protein, 65 aa, Homo sapiens
MSSSHQPAACLSLTPSMDATDLDPLPRKHVTEQCVVGILSSTKKEDITQSHAVLSRILMCLHTRD

SEQ ID NO: 7581 - DNA, 1610 bp, Homo sapiens
acatctcgcggcgaggaggagaggccggaagggcgccccagccccagggctcctgccccgcctgggcctccggctttcgtttccccgcaacgcttcgctttcgtttcccgctggcgcctggctccctccgggtttcgtttcccgccggcgcctggctcccgccaggtttcgtttccgaggcggggccgagggcggcgtcgctgaggcgcccatggccttcgcccgccggctcctgcgcgggccactgtcggggccgctgctcgggcggcgcggggtctgcgctggggccatggctccgccgcgccgcttcgtcctggagcttcccgactgcaccctggctcacttcgccctaggcgccgacgcccccggcgacgcagacgcccccgacccccgcctggcggcgctgctggggcccccggagcgcagctactcgctgtgcgtgcccgtgaccccggacgccggctgcggggcccgggtccgggcggcgcggctgcaccagcgcctgctgcaccagctgcgccgcggccccttccagcggtgccagctgctcaggctgctctgctactgcccgggcggccaggccggcggcgcacagcaaggcttcctgctgcgcgaccccctggatgaccctgacacccggcaagcgctgctcgagctgctgggcgcctgtcaggaggcaccacgcccgcacttgggcgagttcgaggccgacccgcgcggccagctgtggcagcgcctctgggaggtgcaagacggcaggcggctgcaggtgggctgcgcacaggtcgtgcccgtcccggagcccccgctgcacccggtggtgccagacttgcccagttccgtggtcttcccggaccgggaagccgcccgggccgttttggaggagtgtacctcctttattcctgaagcccgggcagtgcttgacctggtcgaccagtgcccaaaacagatccagaaaggaaagttccaggttgttgccatcgaaggactggatgccacgggtaaaaccacggtgacccagtcagtggcagattcacttaaggctctgcccccagcccatcaccctgtgtaccagtggccagaggacctgctcaaacctgaccttatcctgctgctcactgtgagtcctgaggagaggttgcagaggctgcagggccggggcatggagaagaccagggaagaagcagaacttgaggccaacagtgtgtttcgtcaaaaggtagaaatgtcctaccagcggatggagaatcctggctgccatgtggttgatgccagcccctccagagaaaaggtcctgcagacggtcccagctgggaggaaccttataccatccttctctccacctgctcggcagtgaagtttgtgggactggaatcttggattcatcacactcgagtcaaggcctggaatgacccctgacatcccagaagaacatctcagatatcagtgtgaaaagtctggggatttcaaactgaaaatccaaaagataagtaaatgagtgggaactctctgttcagttcaatcccacccttccttaccagatactaaagtcatttctacctttcctcttgagatttgctgttagatattagaacttctctttgtcacat

SEQ ID NO: 7582 - protein, 381 aa, Homo sapiens
MAFARRLLRGPLSGPLLGRRGVCAGAMAPPRRFVLELPDCTLAHFALGADAPGDADAPDPRLAALLGPPERSYSLCVPVTPDAGCGARVRAARLHQRLLHQLRRGPFQRCQLLRLLCYCPGGQAGGAQQGFLLRDPLDDPDTRQALLELLGACQEAPRPHLGEFEADPRGQLWQRLWEVQDGRRLQVGCAQVVPVPEPPLHPVVPDLPSSVVFPDREAARAVLEECTSFIPEARAVLDLVDQCPKQIQKGKFQVVAIEGLDATGKTTVTQSVADSLKALPPAHHPVYQWPEDLLKPDLILLLTVSPEERLQRLQGRGMEKTREEAELEANSVFRQKVEMSYQRMENPGCHVVDASPSREKVLQTVPAGRNLIPSFSPPARQ

SEQ ID NO: 7583 - DNA, 2906 bp, Homo sapiens
gtcgctgaggcgcccatggccttcgcccgccggctcctgcgcgggccactgtcggggccgctgctcgggcggcgcggggtctgcgctggggccatggctccgccgcgccgcttcgtcctggagcttcccgactgcaccctggctcacttcgccctaggcgccgacgcccccggcgacgcagacgcccccgacccccgcctggcggcgctgctggggcccccggagcgcagctactcgctgtgcgtgcccgtgaccccggacgccggctgcggggcccgggtccgggcggcgcggctgcaccagcgcctgctgcaccagctgcgccgcggccccttccagcggtgccagctgctcaggctgctctgctactgcccgggcggccaggccggcggcgcacagcaaggcttcctgctgcgcgaccccctggatgaccctgacacccggcaagcgctgctcgagctgctgggcgcctgtcaggaggcaccacgcccgcacttgggcgagttcgaggccgacccgcgcggccagctgtggcagcgcctctgggaggtgcaagacggcaggcggctgcaggtgggctgcgcacaggtcgtgcccgtcccggagcccccgctgcacccggtggtgccagacttgcccagttccgtggtcttcccggaccgggaagccgcccgggccgttttggaggagtgtacctcctttattcctgaagcccgggcagtgcttgacctggtcgaccagtgcccaaaacagatccagaaaggaaagttccaggttgttgccatcgaaggactggatgccacgggtaaaaccacggtgacccagtcagtggcagattcacttaaggctgtcctcttaaagtcaccaccctcttgcattggccagtggaggaagatctttgatgatgaaccaactatcattagaagagctttttactctttgggcaattatattgtggcctccgaaatagctaaagaatctgccaaatctcctgtgattgtagacaggtactggcacagcacggccacctatgccatagccactgaggtgagtgggggtctccagcacctgcccccagcccatcaccctgtgtaccagtggccagaggacctgctcaaacctgaccttatcctgctgctcactgtgagtcctgaggagaggttgcagaggctgcagggccggggcatggagaagaccagggaagaagcagaacttgaggccaacagtgtgtttcgtcaaaaggtagaaatgtcctaccagcggatggagaatcctggctgccatgtggttgatgccagcccctccagagaaaaggtcctgcagacggtattaagcctaatccagaatagttttagtgaaccgtagttactctggccaggtgccacgtctaactagattagatgttgtttgaaacatctacatccaccatttgttatgcagtgttcccaaatttctgttctacaagcatgttgtgtggcagaaaactggagaccaggcatcttaattttacttcagccatcgtaccctcttctgactgatggacccgtcatcacaaaggtccctctcatcatgttccagtgagaggccagcgattgctttcttcctggcatagtaaacattttcttggaacatatgtttcacttaatcactaccaaatatctggaagacctgtcttactcagacagcaccaggtgtacagaagcagcagacaagatcttccagatcagcagggagaccccggagcctctgcttctcctacactggcatgctgatgagatcgtgacatgcccacattggcttcttccacatctggttgcactcgtcatgatgggctcgctgcatctccctcagtcccaaattctagagccaagtgttcctgcagaggctgtctatgtgtcctggctgcccaaggacactcctgcagagccatttttgggtaaggaacacttacaaagaaggcattgatcttgtgtctgaggctcagagcccttttgataggcttctgagtcatatataaagacattcaagccaagatgctccaactgcaaatataccaaccttctctgaattatattttgcttatttatatttcttttctttttttctaaagtatggctctgaatagaatgcacattttccattgaactggatgcatttcatttagccaatccagtaatttatttatattaatctatacataatatgtttcctcagcataggagctatgattcattaattaaaagtggagtcaaaacgctaaatgcaatgtttgttgtgtattttcattacacaaacttaatttgtcttgttaaataagtacagtggatcttggagtgggatttcttggtaaattatcttgcacttgaatgtctcatgattacatatgaaatcgctttgacatatctttagacagaaaaaagtagctgagtgagggggaaattatagagctgtgtgactttagggagtaggttgaaccaggtgattacctaaaattccttccagttcaaaggcagataaatctgtaaattattttatcctatctaccatttcttaagaagacattactccaaaataattaaatttaaggctttatcaggtctgcatatagaatcttaaattctaataaagtttcatgttaatgtcataggatttttaaaagagctataggtaatttctatataatatgtgtatattaaaatgtaattgatttcagttgaaagtattttaaagctgataaatagcattagggttctttgcaatgtggtatctagctgtattattggttttatttactttaaacattttgaaaagcttatactggcagcctagaaaaacaaacaattaatgtatctttatgtccctggcacatgaataaactttgctgtggtttactaatctatgctgtc

SEQ ID NO: 7584 - protein, 449 aa, Homo sapiens
MAFARRLLRGPLSGPLLGRRGVCAGAMAPPRRFVLELPDCTLAHFALGADAPGDADAPDPRLAALLGPPERSYSLCVPVTPDAGCGARVRAARLHQRLLHQLRRGPFQRCQLLRLLCYCPGGQAGGAQQGFLLRDPLDDPDTRQALLELLGACQEAPRPHLGEFEADPRGQLWQRLWEVQDGRRLQVGCAQVVPVPEPPLHPVVPDLPSSVVFPDREAARAVLEECTSFIPEARAVLDLVDQCPKQIQKGKFQVVAIEGLDATGKTTVTQSVADSLKAVLLKSPPSCIGQWRKIFDDEPTIIRRAFYSLGNYIVASEIAKESAKSPVIVDRYWHSTATYAIATEVSGGLQHLPPAHHPVYQWPEDLLKPDLILLLTVSPEERLQRLQGRGMEKTREEAELEANSVFRQKVEMSYQRMENPGCHVVDASPSREKVLQTVLSLIQNSFSEP

SEQ ID NO: 7585 - DNA, 2414 bp, Homo sapiens
tgttaggcagcaacagtgctgatgctggactgtggcaggcagagggtgctatcctgacacacttcaccttagtgcaggaaacttcaatttggtggaagaaaggcgatttcgaggtgccaatctgggcgacacttcccagttggagagtcagcaaaagggagagggcaattccaagaagagggaaaagcttgtgcacagtgtacctcctttattcctgaagcccgggcagtgcttgacctggtcgaccagtgcccaaaacagatccagaaaggaaagttccaggttgttgccatcgaaggactggatgccacgggtaaaaccacggtgacccagtcagtggcagattcacttaaggctgtcctcttaaagtcaccaccctcttgcattggccagtggaggaagatctttgatgatgaaccaactatcattagaagagctttttactctttgggcaattatattgtggcctccgaaatagctaaagaatctgccaaatctcctgtgattgtagacaggtactggcacagcacggccacctatgccatagccactgaggtgagtgggggtctccagcacctgcccccagcccatcaccctgtgtaccagtggccagaggacctgctcaaacctgaccttatcctgctgctcactgtgagtcctgaggagaggttgcagaggctgcagggccggggcatggagaagaccagggaagaagcagaacttgaggccaacagtgtgtttcgtcaaaaggtagaaatgtcctaccagcggatggagaatcctggctgccatgtggttgatgccagcccctccagagaaaaggtcctgcagacggtattaagcctaatccagaatagttttagtgaaccgtagttactctggccaggtgccacgtctaactagattagatgttgtttgaaacatctacatccaccatttgttatgcagtgttcccaaatttctgttctacaagcatgttgtgtggcagaaaactggagaccaggcatcttaattttacttcagccatcgtaccctcttctgactgatggacccgtcatcacaaaggtccctctcatcatgttccagtgagaggccagcgattgctttcttcctggcatagtaaacattttcttggaacatatgtttcacttaatcactaccaaatatctggaagacctgtcttactcagacagcaccaggtgtacagaagcagcagacaagatcttccagatcagcagggagaccccggagcctctgcttctcctacactggcatgctgatgagatcgtgacatgcccacattggcttcttccacatctggttgcactcgtcatgatgggctcgctgcatctccctcagtcccaaattctagagccaagtgttcctgcagaggctgtctatgtgtcctggctgcccaaggacactcctgcagagccatttttgggtaaggaacacttacaaagaaggcattgatcttgtgtctgaggctcagagcccttttgataggcttctgagtcatatataaagacattcaagccaagatgctccaactgcaaatataccaaccttctctgaattatattttgcttatttatatttcttttctttttttctaaagtatggctctgaatagaatgcacattttccattgaactggatgcatttcatttagccaatccagtaatttatttatattaatctatacataatatgtttcctcagcataggagctatgattcattaattaaaagtggagtcaaaacgctaaatgcaatgtttgttgtgtattttcattacacaaacttaatttgtcttgttaaataagtacagtggatcttggagtgggatttcttggtaaattatcttgcacttgaatgtctcatgattacatatgaaatcgctttgacatatctttagacagaaaaaagtagctgagtgagggggaaattatagagctgtgtgactttagggagtaggttgaaccaggtgattacctaaaattccttccagttcaaaggcagataaatctgtaaattattttatcctatctaccatttcttaagaagacattactccaaaataattaaatttaaggctttatcaggtctgcatatagaatcttaaattctaataaagtttcatgttaatgtcataggatttttaaaagagctataggtaatttctatataatatgtgtatattaaaatgtaattgatttcagttgaaagtattttaaagctgataaatagcattagggttctttgcaatgtggtatctagctgtattattggttttatttactttaaacattttgaaaagcttatactggcagcctagaaaaacaaacaattaatgtatctttatgtccctggcacatgaataaactttgctgtggtttactaatctatgctgtc

SEQ ID NO: 7586 - protein, 59 aa, Homo sapiens
MEKTREEAELEANSVFRQKVEMSYQRMENPGCHVVDASPSREKVLQTVLSLIQNSFSEP

SEQ ID NO: 7587 - DNA, 643 bp, Homo sapiens
agcgaagcgttgcggggaaacgaaagccggaggcccaggcggggcaggagccctggggctggggcgcccttccggcctctcctcctcgccgcgagatgtgcgcgataaacggccggcgctcgggagcagacgcttggccccggggccccaggtgcgcggctccgcgggcctgcgcggtccccaggcgccggctcccggggctgacaccgaatgaggccccgcgccgtcggccccaagaatatgacagtatcagaataacaggagctaaccctaactgaacacttaaagtttgccaggcactattctgaattcttcacaaaaattagcagttttactctgcacaaaaatcgcctgagatacgttgctttgctgatgaagaaatggaaatccagagaaataaagtcgcttactcagtcacccagctacatgatttgtggctctggaagttcagctactaggactcttccaacttcctacaggtgtcacgaaagcacaagaccacacacttacacacagttctgatgaaagagggctaaaaggaagatttcagtaaaaaggtcaacaaggctttctaaaaaaactgtaaaggtaaataaatgatgtgtcgcagtaattctcaccaattaggaagcatcttagaaaa

SEQ ID NO: 7588 - protein, 60 aa, Homo sapiens
MCAINGRRSGADAWPRGPRCAAPRACAVPRRRLPGLTPNEAPRRRPQEYDSIRITGANPN

SEQ ID NO: 7589 - DNA, 1494 bp, Homo sapiens
tgtcctgctccccaatgacaggttgctcagagactgctgatttccatccctatataaagagagtccctggcatacagagactgctctgctccaggcatctgccacaatgtgggtgcttacacctgctgcttttgctgggaagctcttgagtgtgttcaggcaacctctgagctctctgtggaggagcctggtcccgctgttctgctggctgagggcaaccttctggctgctagctaccaagaggagaaagcagcagctggtcctgagagggccagatgagaccaaagaggaggaagaggaccctcctctgcccaccaccccaaccagcgtcaactatcacttcactcgccagtgcaactacaaatgcggcttctgtttccacacagccaaaacatcctttgtgctgccccttgaggaagcaaagagaggattgcttttgcttaaggaagctggtatggagaagatcaacttttcaggtggagagccatttcttcaagaccggggagaatacctgggcaagttggtgaggttctgcaaagtagagttgcggctgcccagcgtgagcatcgtgagcaatggaagcctgatccgggagaggtggttccagaattatggtgagtatttggacattctcgctatctcctgtgacagctttgacgaggaagtcaatgtccttattggccgtggccaaggaaagaagaaccatgtggaaaaccttcaaaagctgaggaggtggtgtagggattatagagtcgctttcaagataaattctgtcattaatcgtttcaacgtggaagaggacatgacggaacagatcaaagcactaaaccctgtccgctggaaagtgttccagtgcctcttaattgagggtgagaattgtggagaagatgctctaagagaagcagaaagatttgttattggtgatgaagaatttgaaagattcttggagcgccacaaagaagtgtcctgcttggtgcctgaatctaaccagaagatgaaagactcctaccttattctggatgaatatatgcgctttctgaactgtagaaagggacggaaggacccttccaagtccatcctggatgttggtgtagaagaagctataaaattcagtggatttgatgaaaagatgtttctgaagcgaggaggaaaatacatatggagtaaggctgatctgaagctggattggtagagcggaaagtggaacgagacttcaacacaccagtgggaaaactcctagagtaactgccattgtctgcaatactatcccgttggtatttcccagtggctgaaaacctgattttctgctgcacgtggcatctgattacctgtggtcactgaacacacgaataacttggatagcaaatcctgagacaatggaaaaccattaactttacttcattggcttataaccttgttgttattgaaacagcacttctgtttttgagtttgttttagctaaaaagaaggaatacacacaggaataatgacccc

SEQ ID NO: 7590 - protein, 361 aa, Homo sapiens; identical to SEQ ID NO: 486

SEQ ID NO: 7591 - DNA, 3348 bp, Homo sapiens
tgtcctgctccccaatgacaggttgctcagagactgctgatttccatccctatataaagagagtccctggcatacagagactgctctgctccaggcatctgccacaatgtgggtgcttacacctgctgcttttgctgggaagctcttgagtgtgttcaggcaacctctgagctctctgtggaggagcctggtcccgctgttctgctggctgagggcaaccttctggctgctagctaccaagaggagaaagcagcagctggtcctgagagggccagatgagaccaaagaggaggaagaggaccctcctctgcccaccaccccaaccagcgtcaactatcacttcactcgccagtgcaactacaaatgcggcttctgtttccacacagccaaaacatcctttgtgctgccccttgaggaagcaaagagaggattgcttttgcttaaggaagctggtatggagaagatcaacttttcaggtggagagccatttcttcaagaccggggagaatacctgggcaagttggtgaggttctgcaaagtagagttgcggctgcccagcgtgagcatcgtgagcaatggaagcctgatccgggagaggtggttccagaattatggtgagtatttggacattctcgctatctcctgtgacagctttgacgaggaagtcaatgtccttattggccgtggccaaggaaagaagaaccatgtggaaaaccttcaaaagctgaggaggtggtgtagggattatagagtcgctttcaagataaattctgtcattaatcgtttcaacgtggaagaggacatgacggaacagatcaaagcactaaaccctgtccgctggaaagtgttccagtgcctcttaattgagggtgagaattgtggagaagatgctctaagagaagcagaaagatttgttattggtgatgaagaatttgaaagattcttggagcgccacaaagaagtgtcctgcttggtgcctgaatctaaccagaagatgaaagactcctaccttattctggatgaatatatgcgctttctgaactgtagaaagggacggaaggacccttccaagtccatcctggatgttggtgtagaagaagctataaaattcagtggatttgatgaaaagatgtttctgaagcgaggaggaaaatacatatggagtaaggctgatctgaagctggattggtagagcggaaagtggaacgagacttcaacacaccagtgggaaaactcctagagtaactgccattgtctgcaatactatcccgttggtatttcccagtggctgaaaacctgattttctgctgcacgtggcatctgattacctgtggtcactgaacacacgaataacttggatagcaaatcctgagacaatggaaaaccattaactttacttcattggcttataaccttgttgttattgaaacagcacttctgtttttgagtttgttttagctaaaaagaaggaatacacacaggaataatgaccccaaaaatgcttagataaggcccctatacacaggacctgacatttagctcaatgatgcgtttgtaagaaataagctctagtgatatctgtgggggcaaaatttaatttggatttgattttttaaaacaatgtttactgcgatttctatatttccattttgaaactatttcttgttccaggtttgttcatttgacagagtcagtattttttgccaaatatccagataaccagttttcacatctgagacattacaaagtatctgcctcaattatttctgctggttataatgcttttttttttttgcctttatgccattgcagtcttgtactttttactgtgatgtacagaaatagtcaacagatgtttccaagaacatatgatatgataatcctaccaattttcaagaagtctctagaaagagataacacatggaaagacggtgtggtgcagcccagcccacggtggctgttccatgaatgctggctacctatgtgtgtggtacctgttgtgtccctttctcttcaaagatcctgagcaaaacaaagatacgctttccatttgatgatggagttgacatggaggcagtgcttgcattgctttgttcgcctatcatctggccacatgaggctgtcaagcaaaagaataggagtgtagttgagtagctggttggccctacatctctgagaagtgacggcacactgggttggcataagatatcctaaaatcacgctggaaccttgggcaaggaagaatgtgagcaagagtagagagagtgcctggatttcatgtcagtgaagccaagtcaccatatcatatttttgaatgaactctgagtcagttgaaatagggtaccatctaggtcagtttaagaagagtcagctcagagaaagcaagcataagggaaaatgtcacgtaaactagatcagggaacaaaatcctctccttgtggaaatatcccatgcagtttgttgatacaacttagtatcttattgcctaaaaaaaaatttcttatcattgtttcaaaaaagcaaaatcatggaaaatttttgttgtccaggcaaataaaaggtcattttaatttaaggaaaaaaaatattcctacttaaattttaagtctataattcaatttaaatatgtgtgtgtctcatccaggataggataggttgtcttctattttccattttacctatttactttttttgtaagaaaagagaaaaatgaattctaaagatgttccccatgggttttgattgtgtctaagctatgatgaccttcatataatcagcataaacataaaacaaattttttacttaacatgagtgcactttactaatcctcatggcacagtggctcacgcctgtaatcccagcacttgggaggacaatgtgggtggatcacgaggtcaggagttcgagaacagcctggccaacatggtgaaaccccgtctccactaaaaatacaaaaattagccaggcatggtggcgtacacttgtaattccagctactcaagaggctgaggcaggaggattgcttgaaccctgaaggcagaggttacagagccaagatagcgccactgcactccagcctggatgacagagcaagactccgtctcaaaaaaaaaaaaaaaaaaaagcaagagagttcaactaagaaaggtcacatatgtgaaagcccaaggacactgtttgatatacagcaggtattcaatcagtgttatttgaaaccaaatctgaatttgaagtttgaatcttctgagttggaatgaatttttttctagctgagggaaactgtatttttctttccccaaagaggaatgtaatgtaaagtgaaataaaactataagctatgttaaatac

SEQ ID NO: 7592 - protein, 361 aa, Homo sapiens; identical to SEQ ID NO: 486

SEQ ID NO: 7593 - DNA, 888 bp, Homo sapiens
gctctgctccaggcatctgccacaatgtgggtgcttacacctgctgcttttgctgggaagctcttgagtgtgttcaggcaacctctgagctctctgtggaggagcctggtcccgctgttctgctggctgagggcaaccttctggctgctagctaccaagaggagaaagcagcagctggtcctgagagggccagatgagaccaaagaggaggaagaggaccctcctctgcccaccaccccaaccagcgtcaactatcacttcactcgccagtgcaactacaaatgcggcttctgtttccacacagccaaaacatcctttgtgctgccccttgaggaagcaaagagaggattgcttttgcttaaggaagctggtatggagaagatcaacttttcaggtggagagccatttcttcaagaccggggagaatacctgggcaagttggtgaggttctgcaaagtagagttgcggctgcccagcgtgagcatcgtgagcaatggaagcctgatccgggagaggtggttccagaattatggtgtgctccatgggatggcattcttcttattgctattgctatttttattgttggttcttatatttccttccctcctgggccttcagccaggcctgctgaggaactggaagggaggaaaaactaatcttgcttactctaattgcttttcaagctgtgcacggcattatggcagttttagttccttagggctctcagtaaacaagtttggcaagttagataatagaccttttactgagatgactatcttgtacattgcaatttagcaaatacaagatctatggccttagtttagacactaggtaggaaaattaacacatttgacagctttgtaataaaatatctctgttgggactgga

SEQ ID NO: 7594 - protein, 256 aa, Homo sapiens [sequence omitted]

SEQ ID NO: 7595 - DNA, 833 bp, Homo sapiens
ctctgctccaggcatctgccacaatgtgggtgcttacacctgctgcttttgctgggaagctcttgagtgtgttcaggcaacctctgagctctctgtggaggagcctggtcccgctgttctgctggctgagggcaaccttctggctgctagctaccaagaggagaaagcagcagctggtcctgagagggccagatgagaccaaagaggaggaagaggaccctcctctgcccaccaccccaaccagcgtcaactatcacttcactcgccagtgcaactacaaatgcggcttctgtttccacacagccaaaacatcaggtatggagaagatcaacttttcaggtggagagccatttcttcaagaccggggagaatacctgggcaagttggtgaggttctgcaaagtagagttgcggctgcccagcgtgagcatcgtgagcaatggaagcctgatccgggagaggtggttccagaattatggtgtgctccatgggatggcattcttcttattgctattgctatttttattgttggttcttatatttccttccctcctgggccttcagccaggcctgctgaggaactggaagggaggaaaaactaatcttgcttactctaattgcttttcaagctgtgcacggcattatggcagttttagttccttagggctctcagtaaacaagtttggcaagttagataatagaccttttactgagatgactatcttgtacattgcaatttagcaaatacaagatctatggccttagtttagacactaggtaggaaaattaacacatttgacagctttgtaataaaatatctctgttgggactgga

SEQ ID NO: 7596 - protein, 238 aa, Homo sapiens
MWVLTPAAFAGKLLSVFRQPLSSLWRSLVPLFCWLRATFWLLATKRRKQQLVLRGPDETKEEEEDPPLPTTPTSVNYHFTRQCNYKCGFCFHTAKTSGMEKINFSGGEPFLQDRGEYLGKLVRFCKVELRLPSVSIVSNGSLIRERWFQNYGVLHGMAFFLLLLLFLLLVLIFPSLLGLQPGLLRNWKGGKTNLAYSNCFSSCARHYGSFSSLGLSVNKFGKLDNRPFTEMTILYIAI

SEQ ID NO: 7597 - DNA, 1530 bp, Homo sapiens
gagaatacctgggcaagttggtgaggttctgcaaagtagagttgcggctgcccagcgtgagcatcgtgacaaaacaaagatacgctttccatttgatgatggagttgacatggaggcagtgcttgcattgctttgttcgcctatcatctggccacatgaggctgtcaagcaaaagaataggagtgtagttgagtagctggttggccctacatctctgagaagtgacggcacactgggttggcataagatatcctaaaatcacgctggaaccttgggcaaggaagaatgtgagcaagagtagagagagtgcctggatttcatgtcagtgaagccaagtcaccatatcatatttttgaatgaactctgagtcagttgaaatagggtaccatctaggtcagtttaagaagagtcagctcagagaaagcaagcataagggaaaatgtcacgtaaactagatcagggaacaaaatcctctccttgtggaaatatcccatgcagtttgttgatacaacttagtatcttattgcctaaaaaaaaatttcttatcattgtttcaaaaaagcaaaatcatggaaaatttttgttgtccaggcaaataaaaggtcattttaatttagctgcaatttcagtgttcctcactaggtggcatttaaatgtcgcctgatgtcattaagcaccatccaaaaagtctgcttcataatctattttcaagacttggtgattctgaaagttttggtttttgtgactttgtttctcaggaaaaaaaatattcctacttaaattttaagtctataattcaatttaaatatgtgtgtgtctcatccaggataggataggttgtcttctattttccattttacctatttactttttttgtaagaaaagagaaaaatgaattctaaagatgttccccatgggttttgattgtgtctaagctatgatgaccttcatataatcagcataaacataaaacaaattttttacttaacatgagtgcactttactaatcctcatggcacagtggctcacgcctgtaatcccagcacttgggaggacaatgtgggtggatcacgaggtcaggagttcgagaacagcctggccaacatggtgaaaccccgtctccactaaaaatacaaaaattagccaggcatggtggcgtacacttgtaattccagctactcaagaggctgaggcaggaggattgcttgaaccctgaaggcagaggttacagagccaagatagcgccactgcactccagcctggatgacagagcaagactccgtctcaaaaaaaaaaaaaaaaaaaagcaagagagttcaactaagaaaggtcacatatgtgaaagcccaaggacactgtttgatatacagcaggtattcaatcagtgttatttgaaaccaaatctgaatttgaagtttgaatcttctgagttggaatgaatttttttctagctgagggaaactgtatttttctttccccaaagaggaatgtaatgtaaagtgaaataaaactataagctatgttaaatac

SEQ ID NO: 7598 - protein, 74 aa, Homo sapiens
MSRKLDQGTKSSPCGNIPCSLLIQLSILLPKKKFLIIVSKKQNHGKFLLSRQIKGHFNLAAISVFLTRWHLNVA

SEQ ID NO: 7599 - DNA, 1881 bp, Homo sapiens
gagccttcctgagccaaccctcgcaaggaaagtctgtctgttcaccccactatccttgtcttgaaggatgaagaaaagagggccccccgggaggtcccaaaaggtggaatggacatctgggatccaagcacagcaatttctttatttttcttaaggtatccagcttgttggaatctaagatctgcgaagcctctcactagaggatgaaaatcgttctgcataaaggcctgggctttatgaaaaatatattcacacctcccgtgtccgagctgggataccaaagaagttcctggttgagtactacttatgaatgaaggattcaggggatgcacaggacacagaggaatctgggggatattatggttctgggaatgtggaatgtaacgtctcatcttcagcccatctgtgctactgatcatctcattccagaagccatgccttctctcaggagcagacagcacaagactttcctgccagaggcacagtccccagtgggagtagcatccacataagacaggatgcagagatgtcttcaagcagcttcaaacaaaacttcaagaaagaaagtgcaagtgaaaaaggaaattcatccttccagtcacttaacacagcactgtcacggacaccttgtgcctccttaaaattcgtatactgaagttctaagccccagtaccccagaatgtgaccttctttggaaatagggtcattgcagatatgattagttaagaggagatcatactggagtgggctttaatccaatatgactggtgtccttatgtaaaggggaaatttggacacagacacacacaaggagaacaccatgtgaactgaagtcaaagatttgggtgatgcttctacaagccaagaaatgccaaagatgaccagcaaagcaccggcagctggtggaggagcctggaccagattcttcctcacagccctcaaaaggaaccaatcttgccaaagctttgacttagacttctagccccctgtgatggttaatgttaagtggcagcttgactgggttaagggatgcccagatagctggtaagacagtatgtctgtgtgcatctctcagagtgtttctggacaagatcagcatttgaatccttagagtaaagaagatctgccctcacccacgtgcatcaccctatctctggagagcgcgaacaaacaggaggaagggcacatatgctccttctgttccagctggcacatccatcttctcctgccccctgacttcagagctcctggttctcgggcctcaggattccagcacttacatgagagcgtgcttccccctccctactccacccctaggttctccgccctttggcctctgactgaattccaccaccagcttttcagggtctccagcttgcagacggcagatcgtgggacttcttggcctccataattatgtaagccaattcccataataaatctcctatctatctatctatctatccatctatcaatcatctatctagtctatctatctatctatctctatcctattgattctgtgtctctgaggaaccctaatacacctccagaactgtgagatgatacatttctgtggtttaagccactcagaaggtggtactttgtttcaccaggcctagcaaactaatacaagtgcatggaaggtgactactcatgactgcaacttagagaacaagggttataataaaaataaaagtgttatacaaaggtggcaagataaatgacaataaatgaaaatattaacatgtgaattaaaaagtaaagatatttttcctagcattctcccagaaagtagagacgcgtctctcttgtttgccatcatatccagcaatggcaagataagttctaggcacttcataaaaatttgttgaatgaaag

SEQ ID NO: 7600 - protein, 61 aa, Homo sapiens
MHRTQRNLGDIMVLGMWNVTSHLQPICATDHLIPEAMPSLRSRQHKTFLPEAQSPVGVAST

SEQ ID NO: 7601 - DNA, 2954 bp, Homo sapiens
acgccattctcctgcctcagcctcccgagtagctgggactacaggcgcccgccactgcgcccggctaattttttgtatttttagtagagagggggtttcaccgtggtctcgatctcctgacctcgtgatccgcccgcctcagcctcccaaagtgctgggattacaggcgtgagccaccgcgcccggccagttcaatggattttaaaaattattattctctagaaaaaagaccacgaactttggagtggacatcctgagacctgcctacgaagaccattaggtggcctccagaagacactcccctgattcctacaccgagggaacacacagcagcaagctaggaaagaaggggtgacccagcccaacgctgtaaaccagggcgcgaaccggcgttgagctgtgcagctgcgccctgggctccagtcctgctctgccgcagaccccaccggagccagcacctgcctccccgaccctcgctggggcggctgtgagatgagcccagagccttcctgagccaaccctcgcaaggaaagtctgtctgttcaccccactatccttgtcttgaaggatgaagaaaagagggccccccgggaggtcccaaaaggtggaatggacatctgggatccaagcacagcaatttctttatttttcttaaggtatccagcttgttggaatctaagatctgcgaaggtattaatagaattcctgcatcttctgccactccccatagaagcttgaagttacacaaatgttaaattatacgtcagatgtgcatatatgaacaaaacctacgagtgtgcatgaaataacaccttcttaaatatatagattcttttttctgcaatattaaatggaaaccccactagaacatcgtttttccttaatagcataccctccacactgtgtggtctaaattcaagctctaccacctactagccattaagcaagttattaaggtcttcgtgcttccattttcttacgtggaaaatgaggtggcaatagtatgtatgagttcttcggagggattaaacaagtcaaataggccaagtgccatggcttacacctgtaagcccagcactttgggaggccaaggcaggaggactgcttgagcccaggaggtcaaggctgaagtgagctgtgtttgcatcactgcactccagcctgggcagcagagtgagactttgtctctcaataaataaagaaatagtcaaattaaatataactggcaaactaaaacaactccatagtccttagctacaatttgtctcatttctccaaagaattaaatcagatgattcttaactaactcaaagctctgcataatttgtcttctgctacacatacatctttatagtaaaataaaataaagctgtcccctctgtattgagaagttattctggtaaatatttgacctcttcaaatatatgaacgagcacttgccttctaatgcctcagtttcagattctttttagaaatgtcattattcaagaaaaatgcacaatgggaagaatcttaacaacagcactttgttacttcagcctctcactagaggatgaaaatcgttctgcataaaggcctgggctttatgaaaaatatattcacacctcccgtgtccgagctgggataccaaagaagttcctggttgagtactacttatgaatgaaggattcaggggatgcacaggtgggtgactgcaaatgcacagacgttgtgctgtgttccccacaataaaggggtctgtattaagatgcaggcattctcatggaacacagacgtataacactcaagctgggggactgcaaaggagcatctggggctgcaggaagagagttaaggtgcaaaaatgccctgacccaactgagacttgtaattgctcatgtggtaatacatgtgacttcattcccctgctctgtctttgtgaatgcaaccattgttggggagatagtgagaggggacactggcattgaaagttttgtttgcagcaggcctcaaaaggcactcagatgcagatttccctgcaaagacttcccggcctatcatggagttccccatccctagatctctgatctctgagctggtgtaatacttagtctttgtctgtgttgatcatggcatctgccacacttaatgtttgtggcattcactttctgatgcttagatcttacgattctagagaacagcatttttctacatattccctcttagggccttgaacataataagtgctcaataaatactgagtgaaatcctctactctgagctttgcctctgagcagctgtcctagttctctccaacaagaagtttgttgggtctctcaagttcacttccacctgtcactgtcagttttcagtccagccccttactcaggtctggctggcccatctcccccagagggctgtcccatagagcccattgtaaaggacactcattgttgccaagagtttgtgccaatgcagtatgactcacccttcactcattgaacaagctcttcctgattacctagatgggcaaaatttccctgctcatgcgaagcaggctggcgactcagtgctgcagcaaatggcccagaagctgggaaagcagatagccgttctgacacttctcttctagacagaaaatcaagggaagctcaagacccacacttgaattttttttaaaaaattagacaaggggctgggtgtggtggctcatgcctgtaatcccagcactttgggaggccgaggcaggcagatcacctgaggttgggagttcaagaccagcctgaccaacatggagaaacccctgtctctgttaaaaatacaaaattagccaggcgtggtggcacatgcctataatcccagctactcgggaggctaaggcaggagaatcgcttgaaccccagaggcagaggttgcggtgagccgagatcgcaccactgcactgcagcctggcaacaagagcgaaactcagtctc

SEQ ID NO: 7602 - protein, 98 aa, Homo sapiens
MEHRRITLKLGDCKGASGAAGRELRCKNALTQLRLVIAHVVIHVTSFPCSVFVNATIVGEIVRGDTGIESFVCSRPQKALRCRFPCKDFPAYHGVPHP

SEQ ID NO: 7603 - DNA, 952 bp, Homo sapiens
gagcctcccgcgtgcccggcctctgtgcgcgctcgcgccccgcccgcgcagccgcttctccccgcgcgggctctcggcaggcgggaggcggcagggctggcattgcagtgcgggccgtgcgggctgcgcgggcgcggggaggcgcgggcggcaaactgcgggcacccggcaccccgcagccagtaccgggcggaggcgtcagagccgcgcaccgcggacgagcaggcccaggcatccagtaccctgctgactctgacatgcccccagcctcccccagctctgcagggagccctggtgccagagaccttctcccatttctccctatgggtgcctgacctgagggcagagacatctgagtgtgtataagcacagcaggacaccaggacctggcctgaagacatttcctctcctcccctctggatttctcagagactgttctgcgatgaccacaacaaggtaccggcccacctgggacctggccctcgacccgctggtgtcttgcaagctctgtcttggggagtacccagtggagcagatgacaaccatagcccagtgccaatgcatcttctgtactctgtgcctgaaacagtatgttgagctcttgatcaaagaaggattagaaactgcaattagctgcccagatgctgcctgccctaaacagggccacctacaggagaacgagattgagtgcatggttgcagctgaaattatgcaaagatataaaaagctacaatttgaaagagaggtgctgtttgatccctgtcggacttggtgcccggcgtccacctgccaagctgtgtgtcagctccaggacgtggggctgcagaccccccagccagtgcagtgcaaagcctgccgtatggaattctgctccacctgcaaagccagctggcaccctggccagggctgcccggagaccatgccgatcaccttcctccccggggagaccagg

SEQ ID NO: 7604 - protein, 169 aa, Homo sapiens
MTTTRYRPTWDLALDPLVSCKLCLGEYPVEQMTTIAQCQCIFCTLCLKQYVELLIKEGLETAISCPDAACPKQGHLQENEIECMVAAEIMQRYKKLQFEREVLFDPCRTWCPASTCQAVCQLQDVGLQTPQPVQCKACRMEFCSTCKASWHPGQGCPETMPITFLPGET

SEQ ID NO: 7605 - DNA, 1812 bp, Homo sapiens
gagcctcccgcgtgcccggcctctgtgcgcgctcgcgccccgcccgcgcagccgcttctccccgcgcgggctctcggcaggcgggaggcggcagggctggcattgcagtgcgggccgtgcgggctgcgcgggcgcggggaggcgcgggcggcaaactgcgggcacccggcaccccgcagccagtaccgggcggaggcgtcagagccgcgcaccgcggacgagcaggcccaggcatccagtaccctgctgactctgacatgcccccagcctcccccagctctgcagggagccctggtgccagagaccttctcccatttctccctatgggtgcctgacctgagggcagagacatctgagtgtgtataagcacagcaggacaccaggacctggcctgaagacatttcctctcctcccctctggatttctcagagactgttctgcgatgaccacaacaaggtaccggcccacctgggacctggccctcgacccgctggtgtcttgcaagctctgtcttggggagtacccagtggagcagatgacaaccatagcccagtgccaatgcatcttctgtactctgtgcctgaaacagtatgttgagctcttgatcaaagaaggattagaaactgcaattagctgcccagatgctgcctgccctaaacagggccacctacaggagaacgagattgagtgcatggttgcagctgaaattatgcaaagatataaaaagctacaatttgaaagagaggtgctgtttgatccctgtcggacttggtgcccggcgtccacctgccaagctgtgtgtcagctccaggacgtggggctgcagaccccccagccagtgcagtgcaaagcctgccgtatggaattctgctccacctgcaaagccagctggcaccctggccagggctgcccggagaccatgccgatcaccttcctccccggggagaccagtgctgctttcaaaatggaagaagatgacgcgcccatcaagcgctgccccaagtgcaaagtctacatcgagcgagacgaaggctgcgcgcagatgatgtgcaagaactgcaagcacgccttctgctggtactgcctggagtctctggacgatgatttccttctgatacactacgataagggaccctgccggaacaagctgggccactcccgggcatctgtgatctggcatcggacacaggttgtgggcatttttgcaggatttgggctgctgctcttggtggcctcacctttcctactcctggccactccctttgtactttgctgcaagtgcaagtgcagtaaaggtgacgacgacccgttacccacctagaggaagcgcgatgctggaacacatccctgcctccgggaagtgtggctctcccccaaccctccccaccgtccccccttcactaaacatctttcttgccttatgtgccccattgagcttcacagtgtcaggctggacgccgtgatttcagggacctatgtcacaatgttcgctgaggccccaggtgtggtggggaggggaggcaggtgtgggtagcgcacatccccacagatcaatctctgcagatgacagggaggtgctgtgagaagtgcaccaggcagctttctctctgtggtagactaggcatgtctggggatggcctaagagactttctgctccttggcttctagatggcaccatgttgtcagagaagtcttttaaggactgccactctcttcagacagaatctgattattccagcttgagagaagcactctgtttatgacaactgtttttattactaatggcatttagtaaaatcctttttagaaggt

SEQ ID NO: 7606 - protein, 292 aa, Homo sapiens; identical to SEQ ID NO: 488

SEQ ID NO: 7607 - DNA, 5654 bp, Homo sapiens
gagcctcccgcgtgcccggcctctgtgcgcgctcgcgccccgcccgcgcagccgcttctccccgcgcgggctctcggcaggcgggaggcggcagggctggcattgcagtgcgggccgtgcgggctgcgcgggcgcggggaggcgcgggcggcaaactgcgggcacccggcaccccgcagccagtaccgggcggaggcgtcagagccgcgcaccgcggacgagcaggcccaggcatccagtaccctgctgactctgacatgcccccagcctcccccagctctgcagggagccctggtgccagagaccttctcccatttctccctatgggtgcctgacctgagggcagagacatctgagtgtgtataagcacagcaggacaccaggacctggcctgaagacatttcctctcctcccctctggatttctcagagactgttctgcgatgaccacaacaaggtaccggcccacctgggacctggccctcgacccgctggtgtcttgcaagctctgtcttggggagtacccagtggagcagatgacaaccatagcccagtgccaatgcatcttctgtactctgtgcctgaaacagtatgttgagctcttgatcaaagaaggattagaaactgcaattagctgcccagatgctgcctgccctaaacagggccacctacaggagaacgagattgagtgcatggttgcagctgaaattatgcaaagatataaaaagctacaatttgaaagagaggtgctgtttgatccctgtcggacttggtgcccggcgtccacctgccaagctgtgtgtcagctccaggacgtggggctgcagaccccccagccagtgcagtgcaaagcctgccgtatggaattctgctccacctgcaaagccagctggcaccctggccagggctgcccggagaccatgccgatcaccttcctccccggggagaccagtgctgctttcaaaatggaagaagatgacgcgcccatcaagcgctgccccaagtgcaaagtctacatcgagcgagacgaaggctgcgcgcagatgatgtgcaagaactgcaagcacgccttctgctggtactgcctggagtctctggacgatgatttccttctgatacactacgataagggaccctgccggaacaagctgggccactcccgggcatctgtgatctggcatcggacacaggttgtgggcatttttgcaggatttgggctgctgctcttggtggcctcacctttcctactcctggccactccctttgtactttgctgcaagtgcaagtgcagtaaaggtgacgacgacccgttacccacctagaggaagcgcgatgctggaacacatccctgcctccgggaagtgtggctctcccccaaccctccccaccgtccccccttcactaaacatctttcttgccttatgtgccccattgagcttcacagtgtcaggctggacgccgtgatttcagggacctatgtcacaatgttcgctgaggccccaggtgtggtggggaggggaggcaggtgtgggtagcgcacatccccacagatcaatctctgcagatgacagggaggtgctgtgagaagtgcaccaggcagctttctctctgtggtagactaggcatgtctggggatggcctaagagactttctgctccttggcttctagatggcaccatgttgtcagagaagtcttttaaggactgccactctcttcagacagaatctgattattccagcttgagagaagcactctgtttatgacaactgtttttattactaatggcatttagtaaaatcctttttagaaggtattttttttccaactgagtagtgaaaatcaacaaggtgcatataaaccatcctatgcctttcttgaaatgtgcattttaagaagttatagttaaacgacttttcaggagatttagaaagccttatgcactctttgtgtttttcttgaaacttgctgtagtaactttttgaacgctgtaagctgtgtactgttataagtgtgcttcctatattgttgcatttccttgataatattgacgtgtttaaaggaacatctcatctccattagatttgccttttgttgttttctctctttggtgattcagctcagctcatgggcctcatcccttctctcccaggtagcagaaaacgctttttattgtattcaatcccactgctttgctcggcaatggttctcctccgaattgctgccgtctggcctctggcctcagtcttcagatagacagtaagaagaaagcagcctcattgatccgcagatgtaggggcctcttggcagaggctggaggactctgggggctagggaagagcctgccagattttcacatttttaaaatgttctagtcattttgagaaatcatatatcttacacagttccaagtcctgttgctaaccgttttgctcttgttggggaaaagaacctcccatttcacttcgttttaacgtggggattttaccacttgatcttttacagggctgtctgtgaccatttccatggcagcaggatgcagggattaataaggacacatacacattattccaccaattgactttgaaaagtggagaaagtgtattctttaaagagaatttacttctaaaagccacaggtgcttttacaaagcaaactgcattgaatttaaaacttctaaaaataacaggcaaatattgtagctatattacagtgggattttaaaaatcttgttaaacattctataaagaagtaaaacaaaatccttttatctcagttatttgcccatcacaagcacatttttaaaatgttgctttgtgtgtgtttgacttctgcatttgagtatcagtctcaggtcctagtttactttccctggttggaaatttatttcttatttcctaacattgaattcgttagaaaaaacagcgtcacctcactcttcacctgtcatgttgattttccttatgaacccgaagccatttagaaaatccctgtgtgtcaaaattacattcaaaaagctctccttgtaattgcaagtttagtaactcagtaagaacatgcctgcgactccctttctggatggaacctgggctgtggctctctgtcgtttgtggtgctgtgatggtgtctactgttagaatagcttttctggaggtgggtggcaactccacgcgggagtcattggctgggcttgagccctcagcctgtgatatgtggatgcagctgtccagccactgccctttaacatgcccagcacacatgggaggcctgtggccctgtgtccagtggcccacaggacacgcctccaccatatgctcatccttcctgcctgaaattgctgctgcccatcgcatgagcccacacagtagcacccccgtccttaggatgagagtcagagcctttggaaaggctgcatccccagggctagagctcagatgaccttatttctagagggacaggctgttctgttggaagagtctctggcccagtcatgcacatctgtagccccagccatccttgtgccttcacctctgatgtgtttcacaagcacgtagttcaacccagatagggaccacagagattctggggccagccaggggcagtcaaattggcacctactggctctgactttttgtatgaagcatgcctcagtttcctcattttgatctagatataaaattaaaattgtccatttcctatataaataccagcaagatcactctgagatacataaactcgcatttccttctgttttagtaaggagtgccagacttatctttgatgggaatacagtatgaaccctgcttgatgtaaaatggaaatagcacacaggcagatggccctgggtttggactttgatcttgccatcattccccagtaaaacctggggagttctgcgttgagtggacggacttattcctgtgaagcggcataatttgtctccattgaaaaatggcattcactcttacagatggtgttcactgcaagccccagaagcatatggcatgtgttcactaagaggcctttaatcctggggagtaaggggcgaaggcccttagacaaccatggctgctgtactgccgcccagggtgggtggccagtgaggactggccttagcccagtggacctgtggcttctctgaggcccttgagtaactgaccacatttggaggttttgctggaaatgcctgacctctcagtctggctctgctgtgtagtccatagcccagccagatgagcttgcagcctcataggaggtcagcaccttgcaaagatgcagtcaccatagatgtccacgtagcagagactgacttaggatctgagataaagcatcggattgcaggaataactgtccaaattagttcttcctcctcaactcataggagtagctgtggacagaggaaccaacatctgccacctctggcattttctttctttttttttctttttgagacggagtttcgcttttgtcccccaagctggagtacaatgacaggatctcggctcactgcaagctctgcctcccgggttcaagcgattctcctgcctcagcctcccaagtagctgggattacaggcacccaccacctcacccagctaatttttgtattttcagtagagacggggtttcaccatgttggccaggctactctcaaactcctgacctcaggtgatctgcccacctcggcttcccaaagtgctggaattacaggcctgagccaccccacccggcctattttcttaaaggggaacaaatgatcttgacaacatattattccataaaaccagtttagggcacaggccagttcctgattagaacacaggacctgtgggagggactatcagagatgcaaaaattacttcaagatgagtttattgttttcatttgtattgcaaaagttagaagtcattttacaaattaaaaaaacatttttttcttggtagtctttaaaaattaggggattgaaaggatccaggatgggctttgtgtgtgtgtctcagattctcatttattagtgagcacacctgtgtatatatataaatcacaaggagatcatcaagggaaaacattttgcatgtgtaaagcttcatgaagttctctttaaaaaataccaaagcttgtttatttctgataattaacctaagcccttatgaaaataaacaaaatgaagggattatgacaggtattaccaaaaacaccaaaaggaacaaaggggcctgcgttaaaacctaattgctaatgcttcacaactaggagagcatgccgtcttgatgtttaaaaaacccagggtctccacccttcctttgatttgtgcaattctgtcttccacagttccggagccttcagtgaggggtagctacatgccccatgcctgccctttctttccttctttgctcactttactatgggtgtattttaatcttgtataaaaatatgcatgaatgagtcatgcacatgtatacgttatgtatttgacaagtggtggtgaaacaaaatcaaaacagatttgatttgtgtttttgaaatgtcagtacattttgtgccactaacactgtgatgtataaaagagctgtttgaatgccttttaatgttgtgttttgtactctggaatcatatggaaaaagtttgatttgtaatttcaatacatattttaaatgt

SEQ ID NO: 7608 - protein, 292 aa, Homo sapiens; identical to SEQ ID NO: 488

SEQ ID NO: 7609 - DNA, 5743 bp, Homo sapiens
gagcctcccgcgtgcccggcctctgtgcgcgctcgcgccccgcccgcgcagccgcttctccccgcgcgggctctcggcaggcgggaggcggcagggctggcattgcagtgcgggccgtgcgggctgcgcgggcgcggggaggcgcgggcggcaaactgcgggcacccggcaccccgcagccagtaccgggcggaggcgtcagagccgcgcaccgcggacgagcaggcccaggcatccagtaccctgctgactctgacatgcccccagcctcccccagctctgcagggagccctggtgccagagaccttctcccatttctccctatgggtgcctgacctgagggcagagacatctgagtgtgtataagcacagcaggacaccaggacctggcctgaagacatttcctctcctcccctctggatttctcagagactgttctgcgatgaccacaacaaggtaccggcccacctgggacctggccctcgacccgctggtgtcttgcaagctctgtcttggggagtacccagtggagcagatgacaaccatagcccagtgccaatgcatcttctgtactctgtgcctgaaacagtatgttgagctcttgatcaaagaaggattagaaactgcaattagctgcccagatgctgcctgccctaaacagggccacctacaggagaacgagattgagtgcatggttgcagctgaaattatgcaaagatataaaaagctacaatttgaaagagaggtgctgtttgatccctgtcggacttggtgcccggcgtccacctgccaagctgtgtgtcagctccaggacgtggggctgcagaccccccagccagtgcagtgcaaagcctgccgtatggaattctgctccacctgcaaagccagctggcaccctggccagggctgcccggagaccatgccgatcaccttcctccccggggagaccagtgctgctttcaaaatggaagaagatgacgcgcccatcaagcgctgccccaagtgcaaagtctacatcgagcgagacgaaggctgcgcgcagatgatgtgcaagaactgcaagcacgccttctgctggtactgcctggagtctctggacgatgatttccttctgatacactacgataagggaccctgccggaacaagctgggccactcccgggcatctgtgatctggcatcggacacaggttgtgggcatttttgcaggatttgggctgctgctcttggtggcctcacctttcctactcctggccactccctttgtactttgctgcaagtgcaagtgcagtaaaggtgacgacgacccgttacccacctagaggaagcgcgatgctggaacacatccctgcctccgggaagtgtggctctcccccaaccctccccaccgtccccccttcactaaacatctttcttgccttatgtgccccattgagcttcacagtgtcaggctggacgccgtgatttcagggacctatgtcacaatgttcgctgaggccccaggtgtggtggggaggggaggcaggtgtgggtagcgcacatccccacagatcaatctctgcagatgacagggaggtgctgtgagaagtgcaccaggcagctttctctctgtggtagactaggcatgtctggggatggcctaagagactttctgctccttggcttctagatggcaccatgttgtcagagaagtcttttaaggactgccactctcttcagacagaatctgattattccagcttgagagaagcactctgtttatgacaactgtttttattactaatggcatttagtaaaatcctttttagaaggtattttttttccaactgagtagtgaaaatcaacaaggtgcatataaaccatcctatgcctttcttgaaatgtgcattttaagaagttatagttaaacgacttttcaggagatttagaaagccttatgcactctttgtgtttttcttgaaacttgctgtagtaactttttgaacgctgtaagctgtgtactgttataagtgtgcttcctatattgttgcatttccttgataatattgacgtgtttaaaggaacatctcatctccattagatttgccttttgttgttttctctctttggtgattcagctcagctcatgggcctcatcccttctctcccaggtagcagaaaacgctttttattgtattcaatcccactgctttgctcggcaatggttctcctccgaattgctgccgtctggcctctggcctcagtcttcagatagacagtaagaagaaagcagcctcattgatccgcagatgtaggggcctcttggcagaggctggaggactctgggggctagggaagagcctgccagattttcacatttttaaaatgttctagtcattttgagaaatcatatatcttacacagttccaagtcctgttgctaaccgttttgctcttgttggggaaaagaacctcccatttcacttcgttttaacgtggggattttaccacttgatcttttacagggctgtctgtgaccatttccatggcagcaggatgcagggattaataaggacacatacacattattccaccaattgactttgaaaagtggagaaagtgtattctttaaagagaatttacttctaaaagccacaggtgcttttacaaagcaaactgcattgaatttaaaacttctaaaaataacaggcaaatattgtagctatattacagtgggattttaaaaatcttgttaaacattctataaagaagtaaaacaaaatccttttatctcagttatttgcccatcacaagcacatttttaaaatgttgctttgtgtgtgtttgacttctgcatttgagtatcagtctcaggtcctagtttactttccctggttggaaatttatttcttatttcctaacattgaattcgttagaaaaaacagcgtcacctcactcttcacctgtcatgttgattttccttatgaacccgaagccatttagaaaatccctgtgtgtcaaaattacattcaaaaagctctccttgtaattgcaagtttagtaactcagtaagaacatgcctgcgactccctttctggatggaacctgggctgtggctctctgtcgtttgtggtgctgtgatggtgtctactgttagaatagcttttctggaggtgggtggcaactccacgcgggagtcattggctgggcttgagccctcagcctgtgatatgtggatgcagctgtccagccactgccctttaacatgcccagcacacatgggaggcctgtggccctgtgtccagtggcccacaggacacgcctccaccatatgctcatccttcctgcctgaaattgctgctgcccatcgcatgagcccacacagtagcacccccgtccttaggatgagagtcagagcctttggaaaggctgcatccccagggctagagctcagatgaccttatttctagagggacaggctgttctgttggaagagtctctggcccagtcatgcacatctgtagccccagccatccttgtgccttcacctctgatgtgtttcacaagcacgtagttcaacccagatagggaccacagagattctggggccagccaggggcagtcaaattggcacctactggctctgactttttgtatgaagcatgcctcagtttcctcattttgatctagatataaaattaaaattgtccatttcctatataaataccagcaagatcactctgagatacataaactcgcatttccttctgttttagtaaggagtgccagacttatctttgatgggaatacagtatgaaccctgcttgatgtaaaatggaaatagcacacaggcagatggccctgggtttggactttgatcttgccatcattccccagtaaaacctggggagttctgcgttgagtggacggacttattcctgtgaagcggcataatttgtctccattgaaaaatggcattcactcttacagatggtgttcactgcaagccccagaagcatatggcatgtgttcactaagaggcctttaatcctggggagtaaggggcgaaggcccttagacaaccatggctgctgtactgccgcccagggtgggtggccagtgaggactggccttagcccagtggacctgtggcttctctgaggcccttgagtaactgaccacatttggaggttttgctggaaatgcctgacctctcagtctggctctgctgtgtagtccatagcccagccagatgagcttgcagcctcataggaggtcagcaccttgcaaagatgcagtcaccatagatgtccacgtagcagagactgacttaggatctgagataaagcatcggattgcaggaataactgtccaaattagttcttcctcctcaactcataggagtagctgtggacagaggaaccaacatctgccacctctggcattttctttctttttttttctttttgagacggagtttcgcttttgtcccccaagctggagtacaatgacaggatctcggctcactgcaagctctgcctcccgggttcaagcgattctcctgcctcagcctcccaagtagctgggattacaggcacccaccacctcacccagctaatttttgtattttcagtagagacggggtttcaccatgttggccaggctactctcaaactcctgacctcaggtgatctgcccacctcggcttcccaaagtgctggaattacaggcctgagccaccccacccggcctattttcttaaaggggaacaaatgatcttgacaacatattattccataaaaccagtttagggcacaggccagttcctgattagaacacaggacctgtgggagggactatcagagatgcaaaaattacttcaagatgagtttattgttttcatttgtattgcaaaagttagaagtcattttacaaattaaaaaaacatttttttcttggtagtctttaaaaattaggggattgaaaggatccaggatgggctttgtgtgtgtgtctcagattctcatttattagtgagcacacctgtgtatatatataaatcacaaggagatcatcaagggaaaacattttgcatgtgtaaagcttcatgaagttctctttaaaaaataccaaagcttgtttatttctgataattaacctaagcccttatgaaaataaacaaaatgaagggattatgacaggtattaccaaaaacaccaaaaggaacaaaggggcctgcgttaaaacctaattgctaatgcttcacaactaggagagcatgccgtcttgatgtttaaaaaacccagggtctccacccttcctttgatttgtgcaattctgtcttccacagttccggagccttcagtgaggggtagctacatgccccatgcctgccctttctttccttctttgctcactttactatgggtgtattttaatcttgtataaaaatatgcatgaatgagtcatgcacatgtatacgttatgtatttgacaagtggtggtgaaacaaaatcaaaacagatttgatttgtgtttttgaaatgtcagtacattttgtgccactaacactgtgatgtataaaagagctgtttgaatgccttttaatgttgtgttttgtactctggaatcatatggaaaaagtttgatttgtaatttcaatacatattttaaatgtattgtgtcttacgtagtttgtccccccctttagcagggattcctttttaaagctattttggctggaatacaggtgacttttgtaaaccc

SEQ ID NO: 7610 - protein, 292 aa, Homo sapiens; identical to SEQ ID NO: 488

SEQ ID NO: 7611 - DNA, 667 bp, Homo sapiens
ctggcattgcagtgcgggccgtgcgggctgcgcgggcgcggggaggcgcgggcggcaaactgcgggcacccggcaccccgcagccagtaccgggcggaggcgtcagagccgcgcaccgcggacgagcaggcccaggcatccagtaccctgctgactctgacatgcccccagcctcccccagctctgcagggagccctggtgccagagaccttctcccatttctccctatgggtgcctgacctgagggcagagacatctgagtgtgtataagcacagcaggacaccaggacctggcctgaagacatttcctctcctcccctctggatttctcagagacagtctcgctgtgtcgcctaggctggagtgcagtggcatgatctcggctcactgcaaactctgcttcccgggttcacatcattctcctgcctcagcctccccagcagctgggactacaggcgcacactgccacgcccggctaatttttgtatttttagtagagacggggtttcaccatgttagccaggatggtctcgatctcctgaccttgtgatccacctgcctcagcctcccaaagtgctgggattacaggcgtaagccaccgcgcctggccaaatcttttataaaattataccttcaggctatgtgggtataaggtgtatatggagca

SEQ ID NO: 7612 - protein, 58 aa, Homo sapiens
MISAHCKLCFPGSHHSPASASPAAGTTGAHCHARLIFVFLVETGFHHVSQDGLDLLTL

SEQ ID NO: 7613 - DNA, 5333 bp, Homo sapiens
tggcattgcagtgcgggccgtgcgggctgcgcgggcgcggggaggcgcgggcggcaaactgcgggcacccggcaccccgcagccagtaccgggcggaggcgtcagagccgcgcaccgcggacgagcaggcccaggcatccagtaccctgctgactctgacatgcccccagcctcccccagctctgcagggagccctggtgccagagaccttctcccatttctccctatgggtgcctgacctgagggcagagacatctgagtgtgtataagcacagcaggacaccaggacctggcctgaagacatttcctctcctcccctctggatttctcagagaggtgctgtttgatccctgtcggacttggtgcccggcgtccacctgccaagctgtgtgtcagctccaggacgtggggctgcagaccccccagccagtgcagtgcaaagcctgccgtatggaattctgctccacctgcaaagccagctggcaccctggccagggctgcccggagaccatgccgatcaccttcctccccggggagaccaggtaccctttgtacacaagctgccaccaaaggcatggctgtgggccaggagaagcaggcatgctttcttcctaaaagtgctgttacagttgctgctttcaaaatggaagaagatgacgcgcccatcaagcgctgccccaagtgcaaagtctacatcgagcgagacgaaggctgcgcgcagatgatgtgcaagaactgcaagcacgccttctgctggtactgcctggagtctctggacgatgatttccttctgatacactacgataagggaccctgccggaacaagctgggccactcccgggcatctgtgatctggcatcggacacaggttgtgggcatttttgcaggatttgggctgctgctcttggtggcctcacctttcctactcctggccactccctttgtactttgctgcaagtgcaagtgcagtaaaggtgacgacgacccgttacccacctagaggaagcgcgatgctggaacacatccctgcctccgggaagtgtggctctcccccaaccctccccaccgtccccccttcactaaacatctttcttgccttatgtgccccattgagcttcacagtgtcaggctggacgccgtgatttcagggacctatgtcacaatgttcgctgaggccccaggtgtggtggggaggggaggcaggtgtgggtagcgcacatccccacagatcaatctctgcagatgacagggaggtgctgtgagaagtgcaccaggcagctttctctctgtggtagactaggcatgtctggggatggcctaagagactttctgctccttggcttctagatggcaccatgttgtcagagaagtcttttaaggactgccactctcttcagacagaatctgattattccagcttgagagaagcactctgtttatgacaactgtttttattactaatggcatttagtaaaatcctttttagaaggtattttttttccaactgagtagtgaaaatcaacaaggtgcatataaaccatcctatgcctttcttgaaatgtgcattttaagaagttatagttaaacgacttttcaggagatttagaaagccttatgcactctttgtgtttttcttgaaacttgctgtagtaactttttgaacgctgtaagctgtgtactgttataagtgtgcttcctatattgttgcatttccttgataatattgacgtgtttaaaggaacatctcatctccattagatttgccttttgttgttttctctctttggtgattcagctcagctcatgggcctcatcccttctctcccaggtagcagaaaacgctttttattgtattcaatcccactgctttgctcggcaatggttctcctccgaattgctgccgtctggcctctggcctcagtcttcagatagacagtaagaagaaagcagcctcattgatccgcagatgtaggggcctcttggcagaggctggaggactctgggggctagggaagagcctgccagattttcacatttttaaaatgttctagtcattttgagaaatcatatatcttacacagttccaagtcctgttgctaaccgttttgctcttgttggggaaaagaacctcccatttcacttcgttttaacgtggggattttaccacttgatcttttacagggctgtctgtgaccatttccatggcagcaggatgcagggattaataaggacacatacacattattccaccaattgactttgaaaagtggagaaagtgtattctttaaagagaatttacttctaaaagccacaggtgcttttacaaagcaaactgcattgaatttaaaacttctaaaaataacaggcaaatattgtagctatattacagtgggattttaaaaatcttgttaaacattctataaagaagtaaaacaaaatccttttatctcagttatttgcccatcacaagcacatttttaaaatgttgctttgtgtgtgtttgacttctgcatttgagtatcagtctcaggtcctagtttactttccctggttggaaatttatttcttatttcctaacattgaattcgttagaaaaaacagcgtcacctcactcttcacctgtcatgttgattttccttatgaacccgaagccatttagaaaatccctgtgtgtcaaaattacattcaaaaagctctccttgtaattgcaagtttagtaactcagtaagaacatgcctgcgactccctttctggatggaacctgggctgtggctctctgtcgtttgtggtgctgtgatggtgtctactgttagaatagcttttctggaggtgggtggcaactccacgcgggagtcattggctgggcttgagccctcagcctgtgatatgtggatgcagctgtccagccactgccctttaacatgcccagcacacatgggaggcctgtggccctgtgtccagtggcccacaggacacgcctccaccatatgctcatccttcctgcctgaaattgctgctgcccatcgcatgagcccacacagtagcacccccgtccttaggatgagagtcagagcctttggaaaggctgcatccccagggctagagctcagatgaccttatttctagagggacaggctgttctgttggaagagtctctggcccagtcatgcacatctgtagccccagccatccttgtgccttcacctctgatgtgtttcacaagcacgtagttcaacccagatagggaccacagagattctggggccagccaggggcagtcaaattggcacctactggctctgactttttgtatgaagcatgcctcagtttcctcattttgatctagatataaaattaaaattgtccatttcctatataaataccagcaagatcactctgagatacataaactcgcatttccttctgttttagtaaggagtgccagacttatctttgatgggaatacagtatgaaccctgcttgatgtaaaatggaaatagcacacaggcagatggccctgggtttggactttgatcttgccatcattccccagtaaaacctggggagttctgcgttgagtggacggacttattcctgtgaagcggcataatttgtctccattgaaaaatggcattcactcttacagatggtgttcactgcaagccccagaagcatatggcatgtgttcactaagaggcctttaatcctggggagtaaggggcgaaggcccttagacaaccatggctgctgtactgccgcccagggtgggtggccagtgaggactggccttagcccagtggacctgtggcttctctgaggcccttgagtaactgaccacatttggaggttttgctggaaatgcctgacctctcagtctggctctgctgtgtagtccatagcccagccagatgagcttgcagcctcataggaggtcagcaccttgcaaagatgcagtcaccatagatgtccacgtagcagagactgacttaggatctgagataaagcatcggattgcaggaataactgtccaaattagttcttcctcctcaactcataggagtagctgtggacagaggaaccaacatctgccacctctggcattttctttctttttttttctttttgagacggagtttcgcttttgtcccccaagctggagtacaatgacaggatctcggctcactgcaagctctgcctcccgggttcaagcgattctcctgcctcagcctcccaagtagctgggattacaggcacccaccacctcacccagctaatttttgtattttcagtagagacggggtttcaccatgttggccaggctactctcaaactcctgacctcaggtgatctgcccacctcggcttcccaaagtgctggaattacaggcctgagccaccccacccggcctattttcttaaaggggaacaaatgatcttgacaacatattattccataaaaccagtttagggcacaggccagttcctgattagaacacaggacctgtgggagggactatcagagatgcaaaaattacttcaagatgagtttattgttttcatttgtattgcaaaagttagaagtcattttacaaattaaaaaaacatttttttcttggtagtctttaaaaattaggggattgaaaggatccaggatgggctttgtgtgtgtgtctcagattctcatttattagtgagcacacctgtgtatatatataaatcacaaggagatcatcaagggaaaacattttgcatgtgtaaagcttcatgaagttctctttaaaaaataccaaagcttgtttatttctgataattaacctaagcccttatgaaaataaacaaaatgaagggattatgacaggtattaccaaaaacaccaaaaggaacaaaggggcctgcgttaaaacctaattgctaatgcttcacaactaggagagcatgccgtcttgatgtttaaaaaacccagggtctccacccttcctttgatttgtgcaattctgtcttccacagttccggagccttcagtgaggggtagctacatgccccatgcctgccctttctttccttctttgctcactttactatgggtgtattttaatcttgtataaaaatatgcatgaatgagtcatgcacatgtatacgttatgtatttgacaagtggtggtgaaacaaaatcaaaacagatttgatttgtgtttttgaaatgtcagtacattttgtgccactaacactgtgatgtataaaagagctgtttgaatgccttttaatgttgtgttttgtactctggaatcatatggaaaaagtttgatttgtaatttcaatacatattttaaatgt

SEQ ID NO: 7614 - protein, 141 aa, Homo sapiens
MAVGQEKQACFLPKSAVTVAAFKMEEDDAPIKRCPKCKVYIERDEGCAQMMCKNCKHAFCWYCLESLDDDFLLIHYDKGPCRNKLGHSRASVIWHRTQVVGIFAGFGLLLLVASPFLLLATPFVLCCKCKCSKGDDDPLPT

SEQ ID NO: 7615 - DNA, 5422 bp, Homo sapiens
tggcattgcagtgcgggccgtgcgggctgcgcgggcgcggggaggcgcgggcggcaaactgcgggcacccggcaccccgcagccagtaccgggcggaggcgtcagagccgcgcaccgcggacgagcaggcccaggcatccagtaccctgctgactctgacatgcccccagcctcccccagctctgcagggagccctggtgccagagaccttctcccatttctccctatgggtgcctgacctgagggcagagacatctgagtgtgtataagcacagcaggacaccaggacctggcctgaagacatttcctctcctcccctctggatttctcagagaggtgctgtttgatccctgtcggacttggtgcccggcgtccacctgccaagctgtgtgtcagctccaggacgtggggctgcagaccccccagccagtgcagtgcaaagcctgccgtatggaattctgctccacctgcaaagccagctggcaccctggccagggctgcccggagaccatgccgatcaccttcctccccggggagaccaggtaccctttgtacacaagctgccaccaaaggcatggctgtgggccaggagaagcaggcatgctttcttcctaaaagtgctgttacagttgctgctttcaaaatggaagaagatgacgcgcccatcaagcgctgccccaagtgcaaagtctacatcgagcgagacgaaggctgcgcgcagatgatgtgcaagaactgcaagcacgccttctgctggtactgcctggagtctctggacgatgatttccttctgatacactacgataagggaccctgccggaacaagctgggccactcccgggcatctgtgatctggcatcggacacaggttgtgggcatttttgcaggatttgggctgctgctcttggtggcctcacctttcctactcctggccactccctttgtactttgctgcaagtgcaagtgcagtaaaggtgacgacgacccgttacccacctagaggaagcgcgatgctggaacacatccctgcctccgggaagtgtggctctcccccaaccctccccaccgtccccccttcactaaacatctttcttgccttatgtgccccattgagcttcacagtgtcaggctggacgccgtgatttcagggacctatgtcacaatgttcgctgaggccccaggtgtggtggggaggggaggcaggtgtgggtagcgcacatccccacagatcaatctctgcagatgacagggaggtgctgtgagaagtgcaccaggcagctttctctctgtggtagactaggcatgtctggggatggcctaagagactttctgctccttggcttctagatggcaccatgttgtcagagaagtcttttaaggactgccactctcttcagacagaatctgattattccagcttgagagaagcactctgtttatgacaactgtttttattactaatggcatttagtaaaatcctttttagaaggtattttttttccaactgagtagtgaaaatcaacaaggtgcatataaaccatcctatgcctttcttgaaatgtgcattttaagaagttatagttaaacgacttttcaggagatttagaaagccttatgcactctttgtgtttttcttgaaacttgctgtagtaactttttgaacgctgtaagctgtgtactgttataagtgtgcttcctatattgttgcatttccttgataatattgacgtgtttaaaggaacatctcatctccattagatttgccttttgttgttttctctctttggtgattcagctcagctcatgggcctcatcccttctctcccaggtagcagaaaacgctttttattgtattcaatcccactgctttgctcggcaatggttctcctccgaattgctgccgtctggcctctggcctcagtcttcagatagacagtaagaagaaagcagcctcattgatccgcagatgtaggggcctcttggcagaggctggaggactctgggggctagggaagagcctgccagattttcacatttttaaaatgttctagtcattttgagaaatcatatatcttacacagttccaagtcctgttgctaaccgttttgctcttgttggggaaaagaacctcccatttcacttcgttttaacgtggggattttaccacttgatcttttacagggctgtctgtgaccatttccatggcagcaggatgcagggattaataaggacacatacacattattccaccaattgactttgaaaagtggagaaagtgtattctttaaagagaatttacttctaaaagccacaggtgcttttacaaagcaaactgcattgaatttaaaacttctaaaaataacaggcaaatattgtagctatattacagtgggattttaaaaatcttgttaaacattctataaagaagtaaaacaaaatccttttatctcagttatttgcccatcacaagcacatttttaaaatgttgctttgtgtgtgtttgacttctgcatttgagtatcagtctcaggtcctagtttactttccctggttggaaatttatttcttatttcctaacattgaattcgttagaaaaaacagcgtcacctcactcttcacctgtcatgttgattttccttatgaacccgaagccatttagaaaatccctgtgtgtcaaaattacattcaaaaagctctccttgtaattgcaagtttagtaactcagtaagaacatgcctgcgactccctttctggatggaacctgggctgtggctctctgtcgtttgtggtgctgtgatggtgtctactgttagaatagcttttctggaggtgggtggcaactccacgcgggagtcattggctgggcttgagccctcagcctgtgatatgtggatgcagctgtccagccactgccctttaacatgcccagcacacatgggaggcctgtggccctgtgtccagtggcccacaggacacgcctccaccatatgctcatccttcctgcctgaaattgctgctgcccatcgcatgagcccacacagtagcacccccgtccttaggatgagagtcagagcctttggaaaggctgcatccccagggctagagctcagatgaccttatttctagagggacaggctgttctgttggaagagtctctggcccagtcatgcacatctgtagccccagccatccttgtgccttcacctctgatgtgtttcacaagcacgtagttcaacccagatagggaccacagagattctggggccagccaggggcagtcaaattggcacctactggctctgactttttgtatgaagcatgcctcagtttcctcattttgatctagatataaaattaaaattgtccatttcctatataaataccagcaagatcactctgagatacataaactcgcatttccttctgttttagtaaggagtgccagacttatctttgatgggaatacagtatgaaccctgcttgatgtaaaatggaaatagcacacaggcagatggccctgggtttggactttgatcttgccatcattccccagtaaaacctggggagttctgcgttgagtggacggacttattcctgtgaagcggcataatttgtctccattgaaaaatggcattcactcttacagatggtgttcactgcaagccccagaagcatatggcatgtgttcactaagaggcctttaatcctggggagtaaggggcgaaggcccttagacaaccatggctgctgtactgccgcccagggtgggtggccagtgaggactggccttagcccagtggacctgtggcttctctgaggcccttgagtaactgaccacatttggaggttttgctggaaatgcctgacctctcagtctggctctgctgtgtagtccatagcccagccagatgagcttgcagcctcataggaggtcagcaccttgcaaagatgcagtcaccatagatgtccacgtagcagagactgacttaggatctgagataaagcatcggattgcaggaataactgtccaaattagttcttcctcctcaactcataggagtagctgtggacagaggaaccaacatctgccacctctggcattttctttctttttttttctttttgagacggagtttcgcttttgtcccccaagctggagtacaatgacaggatctcggctcactgcaagctctgcctcccgggttcaagcgattctcctgcctcagcctcccaagtagctgggattacaggcacccaccacctcacccagctaatttttgtattttcagtagagacggggtttcaccatgttggccaggctactctcaaactcctgacctcaggtgatctgcccacctcggcttcccaaagtgctggaattacaggcctgagccaccccacccggcctattttcttaaaggggaacaaatgatcttgacaacatattattccataaaaccagtttagggcacaggccagttcctgattagaacacaggacctgtgggagggactatcagagatgcaaaaattacttcaagatgagtttattgttttcatttgtattgcaaaagttagaagtcattttacaaattaaaaaaacatttttttcttggtagtctttaaaaattaggggattgaaaggatccaggatgggctttgtgtgtgtgtctcagattctcatttattagtgagcacacctgtgtatatatataaatcacaaggagatcatcaagggaaaacattttgcatgtgtaaagcttcatgaagttctctttaaaaaataccaaagcttgtttatttctgataattaacctaagcccttatgaaaataaacaaaatgaagggattatgacaggtattaccaaaaacaccaaaaggaacaaaggggcctgcgttaaaacctaattgctaatgcttcacaactaggagagcatgccgtcttgatgtttaaaaaacccagggtctccacccttcctttgatttgtgcaattctgtcttccacagttccggagccttcagtgaggggtagctacatgccccatgcctgccctttctttccttctttgctcactttactatgggtgtattttaatcttgtataaaaatatgcatgaatgagtcatgcacatgtatacgttatgtatttgacaagtggtggtgaaacaaaatcaaaacagatttgatttgtgtttttgaaatgtcagtacattttgtgccactaacactgtgatgtataaaagagctgtttgaatgccttttaatgttgtgttttgtactctggaatcatatggaaaaagtttgatttgtaatttcaatacatattttaaatgtattgtgtcttacgtagtttgtccccccctttagcagggattcctttttaaagctattttggctggaatacaggtgacttttgtaaaccc

SEQ ID NO: 7616 - protein, 141 aa, Homo sapiens; identical to SEQ ID NO: 7614

SEQ ID NO: 7617 - DNA, 5314 bp, Homo sapiens
ggcgtcagagccgcgcaccgcggacgagcaggcccaggcatccagtaccctgctgactctgacatgcccccagcctcccccagctctgcagggagccctggtgccagagaccttctcccatttctccctatgggtgcctgacctgagggcagagacatctgagtgtgtataagcacagcaggacaccaggacctggcctgaagacatttcctctcctcccctctggatttctcagagtgcctgaaacagtatgttgagctcttgatcaaagaaggattagaaactgcaattagctgcccagatgctgcctgccctaaacagggccacctacaggagaacgagattgagtgcatggttgcagctgaaattatgcaaagatataaaaagctacaatttgaaagagaggtgctgtttgatccctgtcggacttggtgcccggcgtccacctgccaagctgtgtgtcagctccaggacgtggggctgcagaccccccagccagtgcagtgcaaagcctgccgtatggaattctgctccacctgcaaagccagctggcaccctggccagggctgcccggagaccatgccgatcaccttcctccccggggagaccagtgctgctttcaaaatggaagaagatgacgcgcccatcaagcgctgccccaagtgcaaagtctacatcgagcgagacgaaggctgcgcgcagatgatgtgcaagaactgcaagcacgccttctgctggtactgcctggagtctctggacgatgatttccttctgatacactacgataagggaccctgccggaacaagctgggccactcccgggcatctgtgatctggcatcggacacaggttgtgggcatttttgcaggatttgggctgctgctcttggtggcctcacctttcctactcctggccactccctttgtactttgctgcaagtgcaagtgcagtaaaggtgacgacgacccgttacccacctagaggaagcgcgatgctggaacacatccctgcctccgggaagtgtggctctcccccaaccctccccaccgtccccccttcactaaacatctttcttgccttatgtgccccattgagcttcacagtgtcaggctggacgccgtgatttcagggacctatgtcacaatgttcgctgaggccccaggtgtggtggggaggggaggcaggtgtgggtagcgcacatccccacagatcaatctctgcagatgacagggaggtgctgtgagaagtgcaccaggcagctttctctctgtggtagactaggcatgtctggggatggcctaagagactttctgctccttggcttctagatggcaccatgttgtcagagaagtcttttaaggactgccactctcttcagacagaatctgattattccagcttgagagaagcactctgtttatgacaactgtttttattactaatggcatttagtaaaatcctttttagaaggtattttttttccaactgagtagtgaaaatcaacaaggtgcatataaaccatcctatgcctttcttgaaatgtgcattttaagaagttatagttaaacgacttttcaggagatttagaaagccttatgcactctttgtgtttttcttgaaacttgctgtagtaactttttgaacgctgtaagctgtgtactgttataagtgtgcttcctatattgttgcatttccttgataatattgacgtgtttaaaggaacatctcatctccattagatttgccttttgttgttttctctctttggtgattcagctcagctcatgggcctcatcccttctctcccaggtagcagaaaacgctttttattgtattcaatcccactgctttgctcggcaatggttctcctccgaattgctgccgtctggcctctggcctcagtcttcagatagacagtaagaagaaagcagcctcattgatccgcagatgtaggggcctcttggcagaggctggaggactctgggggctagggaagagcctgccagattttcacatttttaaaatgttctagtcattttgagaaatcatatatcttacacagttccaagtcctgttgctaaccgttttgctcttgttggggaaaagaacctcccatttcacttcgttttaacgtggggattttaccacttgatcttttacagggctgtctgtgaccatttccatggcagcaggatgcagggattaataaggacacatacacattattccaccaattgactttgaaaagtggagaaagtgtattctttaaagagaatttacttctaaaagccacaggtgcttttacaaagcaaactgcattgaatttaaaacttctaaaaataacaggcaaatattgtagctatattacagtgggattttaaaaatcttgttaaacattctataaagaagtaaaacaaaatccttttatctcagttatttgcccatcacaagcacatttttaaaatgttgctttgtgtgtgtttgacttctgcatttgagtatcagtctcaggtcctagtttactttccctggttggaaatttatttcttatttcctaacattgaattcgttagaaaaaacagcgtcacctcactcttcacctgtcatgttgattttccttatgaacccgaagccatttagaaaatccctgtgtgtcaaaattacattcaaaaagctctccttgtaattgcaagtttagtaactcagtaagaacatgcctgcgactccctttctggatggaacctgggctgtggctctctgtcgtttgtggtgctgtgatggtgtctactgttagaatagcttttctggaggtgggtggcaactccacgcgggagtcattggctgggcttgagccctcagcctgtgatatgtggatgcagctgtccagccactgccctttaacatgcccagcacacatgggaggcctgtggccctgtgtccagtggcccacaggacacgcctccaccatatgctcatccttcctgcctgaaattgctgctgcccatcgcatgagcccacacagtagcacccccgtccttaggatgagagtcagagcctttggaaaggctgcatccccagggctagagctcagatgaccttatttctagagggacaggctgttctgttggaagagtctctggcccagtcatgcacatctgtagccccagccatccttgtgccttcacctctgatgtgtttcacaagcacgtagttcaacccagatagggaccacagagattctggggccagccaggggcagtcaaattggcacctactggctctgactttttgtatgaagcatgcctcagtttcctcattttgatctagatataaaattaaaattgtccatttcctatataaataccagcaagatcactctgagatacataaactcgcatttccttctgttttagtaaggagtgccagacttatctttgatgggaatacagtatgaaccctgcttgatgtaaaatggaaatagcacacaggcagatggccctgggtttggactttgatcttgccatcattccccagtaaaacctggggagttctgcgttgagtggacggacttattcctgtgaagcggcataatttgtctccattgaaaaatggcattcactcttacagatggtgttcactgcaagccccagaagcatatggcatgtgttcactaagaggcctttaatcctggggagtaaggggcgaaggcccttagacaaccatggctgctgtactgccgcccagggtgggtggccagtgaggactggccttagcccagtggacctgtggcttctctgaggcccttgagtaactgaccacatttggaggttttgctggaaatgcctgacctctcagtctggctctgctgtgtagtccatagcccagccagatgagcttgcagcctcataggaggtcagcaccttgcaaagatgcagtcaccatagatgtccacgtagcagagactgacttaggatctgagataaagcatcggattgcaggaataactgtccaaattagttcttcctcctcaactcataggagtagctgtggacagaggaaccaacatctgccacctctggcattttctttctttttttttctttttgagacggagtttcgcttttgtcccccaagctggagtacaatgacaggatctcggctcactgcaagctctgcctcccgggttcaagcgattctcctgcctcagcctcccaagtagctgggattacaggcacccaccacctcacccagctaatttttgtattttcagtagagacggggtttcaccatgttggccaggctactctcaaactcctgacctcaggtgatctgcccacctcggcttcccaaagtgctggaattacaggcctgagccaccccacccggcctattttcttaaaggggaacaaatgatcttgacaacatattattccataaaaccagtttagggcacaggccagttcctgattagaacacaggacctgtgggagggactatcagagatgcaaaaattacttcaagatgagtttattgttttcatttgtattgcaaaagttagaagtcattttacaaattaaaaaaacatttttttcttggtagtctttaaaaattaggggattgaaaggatccaggatgggctttgtgtgtgtgtctcagattctcatttattagtgagcacacctgtgtatatatataaatcacaaggagatcatcaagggaaaacattttgcatgtgtaaagcttcatgaagttctctttaaaaaataccaaagcttgtttatttctgataattaacctaagcccttatgaaaataaacaaaatgaagggattatgacaggtattaccaaaaacaccaaaaggaacaaaggggcctgcgttaaaacctaattgctaatgcttcacaactaggagagcatgccgtcttgatgtttaaaaaacccagggtctccacccttcctttgatttgtgcaattctgtcttccacagttccggagccttcagtgaggggtagctacatgccccatgcctgccctttctttccttctttgctcactttactatgggtgtattttaatcttgtataaaaatatgcatgaatgagtcatgcacatgtatacgttatgtatttgacaagtggtggtgaaacaaaatcaaaacagatttgatttgtgtttttgaaatgtcagtacattttgtgccactaacactgtgatgtataaaagagctgtttgaatgccttttaatgttgtgttttgtactctggaatcatatggaaaaagtttgatttgtaatttcaatacatattttaaatgt

SEQ ID NO: 7618 - protein, 209 aa, Homo sapiens
MVAAEIMQRYKKLQFEREVLFDPCRTWCPASTCQAVCQLQDVGLQTPQPVQCKACRMEFCSTCKASWHPGQGCPETMPITFLPGETSAAFKMEEDDAPIKRCPKCKVYIERDEGCAQMMCKNCKHAFCWYCLESLDDDFLLIHYDKGPCRNKLGHSRASVIWHRTQVVGIFAGFGLLLLVASPFLLLATPFVLCCKCKCSKGDDDPLPT

SEQ ID NO: 7619 - DNA, 5403 bp, Homo sapiens
ggcgtcagagccgcgcaccgcggacgagcaggcccaggcatccagtaccctgctgactctgacatgcccccagcctcccccagctctgcagggagccctggtgccagagaccttctcccatttctccctatgggtgcctgacctgagggcagagacatctgagtgtgtataagcacagcaggacaccaggacctggcctgaagacatttcctctcctcccctctggatttctcagagtgcctgaaacagtatgttgagctcttgatcaaagaaggattagaaactgcaattagctgcccagatgctgcctgccctaaacagggccacctacaggagaacgagattgagtgcatggttgcagctgaaattatgcaaagatataaaaagctacaatttgaaagagaggtgctgtttgatccctgtcggacttggtgcccggcgtccacctgccaagctgtgtgtcagctccaggacgtggggctgcagaccccccagccagtgcagtgcaaagcctgccgtatggaattctgctccacctgcaaagccagctggcaccctggccagggctgcccggagaccatgccgatcaccttcctccccggggagaccagtgctgctttcaaaatggaagaagatgacgcgcccatcaagcgctgccccaagtgcaaagtctacatcgagcgagacgaaggctgcgcgcagatgatgtgcaagaactgcaagcacgccttctgctggtactgcctggagtctctggacgatgatttccttctgatacactacgataagggaccctgccggaacaagctgggccactcccgggcatctgtgatctggcatcggacacaggttgtgggcatttttgcaggatttgggctgctgctcttggtggcctcacctttcctactcctggccactccctttgtactttgctgcaagtgcaagtgcagtaaaggtgacgacgacccgttacccacctagaggaagcgcgatgctggaacacatccctgcctccgggaagtgtggctctcccccaaccctccccaccgtccccccttcactaaacatctttcttgccttatgtgccccattgagcttcacagtgtcaggctggacgccgtgatttcagggacctatgtcacaatgttcgctgaggccccaggtgtggtggggaggggaggcaggtgtgggtagcgcacatccccacagatcaatctctgcagatgacagggaggtgctgtgagaagtgcaccaggcagctttctctctgtggtagactaggcatgtctggggatggcctaagagactttctgctccttggcttctagatggcaccatgttgtcagagaagtcttttaaggactgccactctcttcagacagaatctgattattccagcttgagagaagcactctgtttatgacaactgtttttattactaatggcatttagtaaaatcctttttagaaggtattttttttccaactgagtagtgaaaatcaacaaggtgcatataaaccatcctatgcctttcttgaaatgtgcattttaagaagttatagttaaacgacttttcaggagatttagaaagccttatgcactctttgtgtttttcttgaaacttgctgtagtaactttttgaacgctgtaagctgtgtactgttataagtgtgcttcctatattgttgcatttccttgataatattgacgtgtttaaaggaacatctcatctccattagatttgccttttgttgttttctctctttggtgattcagctcagctcatgggcctcatcccttctctcccaggtagcagaaaacgctttttattgtattcaatcccactgctttgctcggcaatggttctcctccgaattgctgccgtctggcctctggcctcagtcttcagatagacagtaagaagaaagcagcctcattgatccgcagatgtaggggcctcttggcagaggctggaggactctgggggctagggaagagcctgccagattttcacatttttaaaatgttctagtcattttgagaaatcatatatcttacacagttccaagtcctgttgctaaccgttttgctcttgttggggaaaagaacctcccatttcacttcgttttaacgtggggattttaccacttgatcttttacagggctgtctgtgaccatttccatggcagcaggatgcagggattaataaggacacatacacattattccaccaattgactttgaaaagtggagaaagtgtattctttaaagagaatttacttctaaaagccacaggtgcttttacaaagcaaactgcattgaatttaaaacttctaaaaataacaggcaaatattgtagctatattacagtgggattttaaaaatcttgttaaacattctataaagaagtaaaacaaaatccttttatctcagttatttgcccatcacaagcacatttttaaaatgttgctttgtgtgtgtttgacttctgcatttgagtatcagtctcaggtcctagtttactttccctggttggaaatttatttcttatttcctaacattgaattcgttagaaaaaacagcgtcacctcactcttcacctgtcatgttgattttccttatgaacccgaagccatttagaaaatccctgtgtgtcaaaattacattcaaaaagctctccttgtaattgcaagtttagtaactcagtaagaacatgcctgcgactccctttctggatggaacctgggctgtggctctctgtcgtttgtggtgctgtgatggtgtctactgttagaatagcttttctggaggtgggtggcaactccacgcgggagtcattggctgggcttgagccctcagcctgtgatatgtggatgcagctgtccagccactgccctttaacatgcccagcacacatgggaggcctgtggccctgtgtccagtggcccacaggacacgcctccaccatatgctcatccttcctgcctgaaattgctgctgcccatcgcatgagcccacacagtagcacccccgtccttaggatgagagtcagagcctttggaaaggctgcatccccagggctagagctcagatgaccttatttctagagggacaggctgttctgttggaagagtctctggcccagtcatgcacatctgtagccccagccatccttgtgccttcacctctgatgtgtttcacaagcacgtagttcaacccagatagggaccacagagattctggggccagccaggggcagtcaaattggcacctactggctctgactttttgtatgaagcatgcctcagtttcctcattttgatctagatataaaattaaaattgtccatttcctatataaataccagcaagatcactctgagatacataaactcgcatttccttctgttttagtaaggagtgccagacttatctttgatgggaatacagtatgaaccctgcttgatgtaaaatggaaatagcacacaggcagatggccctgggtttggactttgatcttgccatcattccccagtaaaacctggggagttctgcgttgagtggacggacttattcctgtgaagcggcataatttgtctccattgaaaaatggcattcactcttacagatggtgttcactgcaagccccagaagcatatggcatgtgttcactaagaggcctttaatcctggggagtaaggggcgaaggcccttagacaaccatggctgctgtactgccgcccagggtgggtggccagtgaggactggccttagcccagtggacctgtggcttctctgaggcccttgagtaactgaccacatttggaggttttgctggaaatgcctgacctctcagtctggctctgctgtgtagtccatagcccagccagatgagcttgcagcctcataggaggtcagcaccttgcaaagatgcagtcaccatagatgtccacgtagcagagactgacttaggatctgagataaagcatcggattgcaggaataactgtccaaattagttcttcctcctcaactcataggagtagctgtggacagaggaaccaacatctgccacctctggcattttctttctttttttttctttttgagacggagtttcgcttttgtcccccaagctggagtacaatgacaggatctcggctcactgcaagctctgcctcccgggttcaagcgattctcctgcctcagcctcccaagtagctgggattacaggcacccaccacctcacccagctaatttttgtattttcagtagagacggggtttcaccatgttggccaggctactctcaaactcctgacctcaggtgatctgcccacctcggcttcccaaagtgctggaattacaggcctgagccaccccacccggcctattttcttaaaggggaacaaatgatcttgacaacatattattccataaaaccagtttagggcacaggccagttcctgattagaacacaggacctgtgggagggactatcagagatgcaaaaattacttcaagatgagtttattgttttcatttgtattgcaaaagttagaagtcattttacaaattaaaaaaacatttttttcttggtagtctttaaaaattaggggattgaaaggatccaggatgggctttgtgtgtgtgtctcagattctcatttattagtgagcacacctgtgtatatatataaatcacaaggagatcatcaagggaaaacattttgcatgtgtaaagcttcatgaagttctctttaaaaaataccaaagcttgtttatttctgataattaacctaagcccttatgaaaataaacaaaatgaagggattatgacaggtattaccaaaaacaccaaaaggaacaaaggggcctgcgttaaaacctaattgctaatgcttcacaactaggagagcatgccgtcttgatgtttaaaaaacccagggtctccacccttcctttgatttgtgcaattctgtcttccacagttccggagccttcagtgaggggtagctacatgccccatgcctgccctttctttccttctttgctcactttactatgggtgtattttaatcttgtataaaaatatgcatgaatgagtcatgcacatgtatacgttatgtatttgacaagtggtggtgaaacaaaatcaaaacagatttgatttgtgtttttgaaatgtcagtacattttgtgccactaacactgtgatgtataaaagagctgtttgaatgccttttaatgttgtgttttgtactctggaatcatatggaaaaagtttgatttgtaatttcaatacatattttaaatgtattgtgtcttacgtagtttgtccccccctttagcagggattcctttttaaagctattttggctggaatacaggtgacttttgtaaaccc

SEQ ID NO: 7620 - protein, 209 aa, Homo sapiens; identical to SEQ ID NO: 7618

SEQ ID NO: 7621 - DNA, 2282 bp, Homo sapiens
ttatagcggctgcataagcttaactgcgcagagctatactgctttttgaaatactaacttgcaagttcagcaacagctaagaaaacaatcctagacttggaaattgaaagattggaagagaagtggagggattcctttggaaccctttacgtacgtatgtgtaaggaattgtaggcatccagtaccctgctgactctgacatgcccccagcctcccccagctctgcagggagccctggtgccagagaccttctcccatttctccctatgggtgcctgacctgagggcagagacatctgagtgtgtataagcacagcaggacaccaggacctggcctgaagacatttcctctcctcccctctggatttctcagaggttgcccacctctgtgtcaatgcagcctgctcttaatgactccagctctctaggctggacgcagtggctcacaccggtaatcccagcactttgggaggctgaagccggtggatcacctgaggtcaggagcttgagaccagcctggccaacatggtgaaactccgtgtcttctaaaaaaatacaaaaattagagcggcatggtggcgggcgcctgtaatcccagctactcgggaggctgaggcaggagaattgcttgaacccaggaggtggaggttgcagtgagccaagatcgtgccactgcattgcagtctgggaaacaagagcaaaactgcgtctcaaaaaaaattttcttctcagtactgctttaatggcatctcataagttttcttaaataatattctcattaatgtttagttctacatatttttaaaattacatatttttctataacccatgagttactgataagtctttcaaaattttccaacgtgtgggatctttttattatcaatatctatcttaattgcattgaggtcagaacacatggtctgctgagttgttctttatgtcccagtataatgtcagcttttgtgaatgttctgtgtctttttgagaaaactgtgaattcccagtttattggttctgggtttttacaatctattacatcaagattgtttgcagtacctttcatattttctacattttcactagttttgcatgtttgccattttaaagtcatatataatgagttttctcagtgcgttggtgtacttggcatttttctcagtaagtatcatttttgctttatatattttgaagttatttgttgtatacaaacttaaaatttatggattcttaatgaattaagacttttataatgtattaccttctttttctctagttaggctttattctttaaagcctgttttgtcgatagctttcttttggttggcatttttcttgatcacttttctccatcctttgacttctaatttatccaatttcttatacttttaggtatatttatctgtttttaaaatttaattttaccatttcttggctatcaagcttaatccatttattttttatgactttaatatatttggatttttttcttcaaatgcttttatgccgttttctgttttttaaatgcatatttgtttctttatagtattacttctttttttcttttataatttggaagttatacattctgtttctcttctcttagtagacagcactgatattttcctgtgtgcacagaaagtaaaaaaaaagaaagccttaaattctcagtttctaaaaaccctaagagccttagaattctgtagtccacttacaggtttataagctacgatgcttattcgttttttagttcaatctgttttaactgggctttagttattttctgctgggaagggtcttgatagaatctaattcatcataatgagggaagtggatgtctgcaattactgatttttgttgctgctgaagacatgggtggccccttggctcaaaacctgtttcatcatttggatggagcatcaaagaagatgggaactctccactgataggtttttcatgacacttatgtagattttcaattaagtaggcacaagagattttcagtgtagaaaaagtattttatgattcatgtgaactagacaaaggactgagatcttacgtgcgtgtaagtccagggccatgtgacacactttgcaaatgtggaaagaacacagcactggtaaacttagctgtcgtcaagttgatattctagattattttcattctataatgttttaaaccttattttctgtagtaaacatatattaacatttataaggtgacccacacactaccgtttttaaaaagatagtgttatttttaaaatagacacctctttgacct

SEQ ID NO: 7622 - protein, 45 aa, Homo sapiens
MQPALNDSSSLGWTQWLTPVIPALWEAEAGGSPEVRSLRPAWPTW

SEQ ID NO: 7623 - DNA, 423 bp, Homo sapiens
ctacattccaggcccgcttcaagaattgatgtgcaacccagcgtagggaagaactgcttctggactgcacctgaggcagcaccaccggcaacggagccccgccacctgctgtacccgtccaccttctctggttgacctccctggggccagacagcccactcagagtccgtgctccctcctatggagatgaaggagctgtgtccacaggcgtgcacacagggagaacgccgtgggaacctgcaggcagagactgggggtgcatctaccagccaaggaacacccaggactgccagcagtaccaggaagttgcagagcaacacgggcatcctccttaccgctctcagaagattccagccctgcagatacctgaaccttcagtttccaacctccagacctggaagacagtaaagctctgttgttgta

SEQ ID NO: 7624 - protein, 75 aa, Homo sapiens
MEMKELCPQACTQGERRGNLQAETGGASTSQGTPRTASSTRKLQSNTGILLTALRRFQPCRYLNLQFPTSRPGRQ

SEQ ID NO: 7625 - DNA, 3544 bp, Homo sapiens
gtcccagctctgtcctggctggctgggccccacctcaacctctgctgtgcagcttttccttctaggagagatggagccagcaggagagaaagatgagccattgagtgtaaaacacgggaggccaatgaagtgtccctctcaggagagcccctatctgttcagctacagaaacagcaactacctgaccagactgcagaaaccccaagacaagcttgaggtaagagaaggagcggaaatcagatgtcctgacaaagacccctccgatacggttcccacctcagttcataggctgaagccggctgacatcaacgtaattggagccctgggtgactctctcacggcaggcaatggggccgggtccacacctgggaacgtcttggacgtcttgactcagtaccgaggcctgtcctggagcgtcggcggagatgagaacatcggcaccgttaccaccctggcgaacatcctccgggaattcaacccttccctgaagggcttctctgttggcactgggaaagaaaccagtcctaatgccttcttaaaccaggctgtggcaggaggccgagctgaggatctacctgtccaggccaggaggctggtggacctgatgaagaatgacacgaggatacactttcaggaagactggaagataataaccctgtttataggcggcaatgacctctgtgatttctgcaatgatctggtccactattctccccagaacttcacagacaacattggaaaggccctggacatcctccatgctgaggttcctcgggcatttgtgaacctggtgacggtgcttgagatcgtcaacctgagggagctgtaccaggagaaaaaagtctactgcccaaggatgatcctcaggtctctgtgtccctgtgtcctgaagtttgatgataactcaacagaacttgctaccctcatcgaattcaacaagaagtttcaggagaagacccaccaactgattgagagtgggcgatatgacacaagggaagattttactgtggttgtgcagccgttctttgaaaacgtggacatgccaaagacctcggaaggattgcctgacaactctttcttcgctcctgactgtttccacttcagcagcaagtctcactcccgagcagccagtgctctctggaacaatatgctggagcctgttggccagaagacgactcgtcataagtttgaaaacaagatcaatatcacatgtccgaaccaggtccagccgtttctgaggacctacaagaacagcatgcagggtcatgggacctggctgccatgcagggacagagccccttctgccttgcaccctacctcagtgcatgccctgagacctgcagacatccaagttgtggctgctctgggggattctctgaccgctggcaatggaattggctccaaaccagacgacctccccgatgtcaccacacagtatcggggactgtcatacagagaaagtaaaccagggttcttatcagactcctgggtcagcaaatccaacaggaaatgcaccagaaaagcaccaaatccctgaatcttcacctccccgcttgcatgtatacgtgtacacgtggtgttcctacgtctctgtttactgtctttatgtgtttattcatgttgtcttgtagtcacacagctgcctttacatatatgtacacatctgcacagaaaacctctgaaacccatcgcacacttcgagaggccataaccaagacacaatcacaatcagccatgtcttgaaagattagcaattcgacaagaggaaagggtgagaaagggcatcccgaacacggaagtggagaagctcagggtgtgtcaggcgagcggttgcgtgtagatattctcaagtttctttctctcctaataaagttctcattcctgtaggcttcaaagtaagtggcgagtagctcagaatttacctgggaaaacaactagaacgaagctggccacaagggggcagcgtgctaatgagtggcggagccaggacagcacctttgctgccgcctcccttttcttctgagtcagtttgcttcctggggaagtgacagggagcagggagggggtgatcaagactgtgaaggttctctggccagacctgagcagagtcccagagaggatgggtttccagggcgagagggaggcgccatcactcggcctgtaccacccacaacgaggacctaggttgtccttagcatgaggacatcaacctctcaagaacagaggtcagtgccttcctgcgccaaggtccctgcgtttccacaagtccttggtcaggtacctggtcctaacaggctgccatggaacaaatcagagcctcactgactcaccattctgctcctaatgaggctacaagaaaaaaaaccagaggagagaaagcagagcttattacaatcaggaaagagcatgaggttctggcagctgcacttggtctcagctaaagaaggcaatgacctcatacgatagcatgggaaacaaaaatcaagcagacgaaccacattgcaggtgatagatacgcgacgtgcacctggtggggcagcctggggaagtgaggtgatgtgccctactttaaaacagatcgaccagctgggctcctgggattcagatatgaaccagcagtcctctactaaaagtttctttctgcagcgatgggaaaattcagccattgctctgtttcttccaacaagtgaagtccattacagcctaatgtctcaatcttttagttctagctctaaggcctcaggttcaatggctgctgtccctttaaacccttcatttgtcctaaatgtttcaaatagctgcccccaaatgcacgtgtgttaaagatggaagctctaggtcggggtctgagagacagcttgacacttggtagaatacatagactactgtgtctcaaagtgtgttccatggaacattaactccagacctgttcctggagaagagaaaatcctttgtatctgagggggaaacattaccataaccttcctttggggaattcatgtgtgtattagcatattaaaggctctcataaggcctgcaatgcagaaatctatttaagttttatctgtttaacccaatgtttcccttaattccagaacattttctttgttcataacacctgttaacacctcctgaaagtgttcacgtagtagacttatctgagaaaagcaatttttgagccgttaaagcttctagattggacaaactaggcaattaatgatactagatcaattcagaatgcaatttgagcctcttccccctgggaaacaaagtgaaaagagtggatctcatggaattaggggagaagtagacccagaattcatggggggtgggtggctgtgaacaggacctgcagaagaggctcggctgtgaatatttccaaggccccttgacctgtgagattctgtagtgaacggttccagctttggccagcttaacaatgtgctgggccccaaggtcttgagagcattgccttttcttccattgaaataagttcgcttgtttgggaccattcaaaggatcaaaataaaatttacttaccaaa

SEQ ID NO: 7626 - protein, 488 aa, Homo sapiens
MEPAGEKDEPLSVKHGRPMKCPSQESPYLFSYRNSNYLTRLQKPQDKLEVREGAEIRCPDKDPSDTVPTSVHRLKPADINVIGALGDSLTAGNGAGSTPGNVLDVLTQYRGLSWSVGGDENIGTVTTLANILREFNPSLKGFSVGTGKETSPNAFLNQAVAGGRAEDLPVQARRLVDLMKNDTRIHFQEDWKIITLFIGGNDLCDFCNDLVHYSPQNFTDNIGKALDILHAEVPRAFVNLVTVLEIVNLRELYQEKKVYCPRMILRSLCPCVLKFDDNSTELATLIEFNKKFQEKTHQLIESGRYDTREDFTVVVQPFFENVDMPKTSEGLPDNSFFAPDCFHFSSKSHSRAASALWNNMLEPVGQKTTRHKFENKINITCPNQVQPFLRTYKNSMQGHGTWLPCRDRAPSALHPTSVHALRPADIQVVAALGDSLTAGNGIGSKPDDLPDVTTQYRGLSYRESKPGFLSDSWVSKSNRKCTRKAPNP

SEQ ID NO: 7627 - DNA, 928 bp, Homo sapiens
ctgattgagagtgggcgatatgacacaagggaagattttactgtggttgtgcagccgttctttgaaaacgtggacatgccaaagacctcggaaggattgcctgacaactctttcttcgctcctgactgtttccacttcagcagcaagtctcactcccgagcagccagtgctctctggaacaatatgctggagcctgttggccagaagacgactcgtcataagtttgaaaacaagatcaatatcacatgtccgaaccaggtccagccgtttctgaggacctacaagaacagcatgcagggtcatgggacctggctgccatgcagggacagagccccttctgccttgcaccctacctcagtgcatgccctgagacctgcagacatccaagttgtggctgctctgggggattctctgaccgctggcaatggaattggctccaaaccagacgacctccccgatgtcaccacacagtatcggggactgtcatacagagaaagtaaaccagggttcttatcagactcctgggtcagcaaatccaacaggaaatgcaccagaaaagcaccaaatccctgaatcttcacctccccgcttgcatgtatacgtgtacacgtggtgttcctacgtctctgtttactgtctttatgtgtttattcatgttgtcttgtagtcacacagctgcctttacatatatgtacacatctgcacagaaaacctctgaaacccatcgcacacttcgagaggccataaccaagacacaatcacaatcagccatgtcttgaaagattagcaattcgacaagaggaaagggtgagaaagggcatcccgaacacggaagtggagaagctcagggtgtgtcaggcgagcggttgcgtgtagatattctcaagtttctttctctcctaataaagttctcattcctgtaggcttc

SEQ ID NO: 7628 - protein, 165 aa, Homo sapiens
MPKTSEGLPDNSFFAPDCFHFSSKSHSRAASALWNNMLEPVGQKTTRHKFENKINITCPNQVQPFLRTYKNSMQGHGTWLPCRDRAPSALHPTSVHALRPADIQVVAALGDSLTAGNGIGSKPDDLPDVTTQYRGLSYRESKPGFLSDSWVSKSNRKCTRKAPNP

SEQ ID NO: 7629 - DNA, 2614 bp, Homo sapiens
atggagctaacaagaaatggaatggagaagcccagagctctggctgaaggttccagtcttcccactggcccatctttgacaacagcaagtagtcaactgttcatctcagattttgacatgaatctgtattctgcagccaactttgttcaccatctccgcaatgccttggacgtcctgcatagagaggtgcccagagtcctggtcaacctcgtggacttcctgaaccccactatcatgcggcaggtgttcctgggaaacccagacaagtgcccagtgcagcaggccagcgttttgtgtaactgcgttctgaccctgcgggagaactcccaagagctagccaggctggaggccttcagccgagcctaccggagcagcatgcgcgagctggtggggtcaggccgctatgacacgcaggaggacttctctgtggtgctgcagcccttcttccagaacatccagctccctgtcctggcggatgggctcccagatacgtccttctttgccccagactgcatccacccaaatcagaaattccactcccagctggccagagccctttggaccaatatgcttgaaccacttggaagcaaaacagagaccctggacctgagagcagagatgcccatcacctgtcccactcagaatgagcccttcctgagaacccctcggaatagtaactacacgtaccccatcaagccagccattgagaactggggcagtgacttcctgtgtacagagtggaaggcttccaatagtgttccaacctctgtccaccagctccgaccagcagacatcaaagtggtggccgccctgggtgactctctgactacagcagtgggagctcgaccaaacaactccagtgacctacccacatcttggaggggactctcttggagcattggaggggatgggaacttggagactcacaccacactgcccaacattctgaagaagttcaacccttacctccttggcttctctaccagcacctgggaggggacagcaggactaaatgtggcagcggaaggggccagagctagggacatgccagcccaggcctgggacctggtagagcgaatgaaaaacagccccgacatcaacctggagaaagactggaagctggtcacactcttcattggggtcaacgacttgtgtcattactgtgagaatccggaggcccacttggccacggaatatgttcagcacatccaacaggccctggacatcctctctgaggagctcccaagggctttcgtcaacgtggtggaggtcatggagctggctagcctgtaccagggccaaggcgggaaatgtgccatgctggcagctcagaacaactgcacttgcctcagacactcgcaaagctccctggagaagcaagaactgaagaaagtgaactggaacctccagcatggcatctccagtttctcctactggcaccaatacacacagcgtgaggactttgcggttgtggtgcagcctttcttccaaaacacactcaccccactgaacgagagaggggacactgacctcaccttcttctccgaggactgttttcacttctcagaccgcgggcatgccgagatggccatcgcactctggaacaacatgctggaaccagtgggccgcaagactacctccaacaacttcacccacagccgagccaaactcaagtgcccctctcctgagagcccttacctctacaccctgcggaacagccgattgctcccagaccaggctgaagaagcccccgaggtgctctactgggctgtcccagtggcagcgggagtcggccttgtggtgggcatcatcgggacagtggtctggaggtgcaggagaggtggccggagggaagatcctccaatgagcctgcgcactgtggccctctaggcccgggggtgggtcctcaccctaaactccctatagccactctcttcaccgccctctgccccagccactcccggccaccaggacatgcttcaatgcctggtgccataggaagcccaggggacagtcacaacttcttggggcctgggcttcttccaggcctatgctcctggaatggatacatttaaataaagtccaaagctattttattcctgggtttgcctgcgtgaagcactcaccttccatctcttgtgcagcccaggtgtgggagctgccactttttgtggcctgcctccagcagggctgcccaagccacgaccaaccagagcccaaactgcctgccaccacgagcatatcctcaagtcaccaaacccactatttcaaaggcagaaaaaatgctggtcaccaggtggtggctggaattttggagctggctggttgccattcagtccaatccaacacatacctattaagcaactgttttgtatccaggacaatgcgaagcactgaggtgcctcctaggctgtgcatgtcgcagcctggcagagaggtcaaactccttcaataaccaagaagccacgtgatgatgtgtaactactagggcatcagtaggtaaatgtgtctgattgttttaaagaatagaaagggttcttcggggaaagtttcttgggggagagcaaccttcacatgtcattttgggaaaaggaataaaaaatgattgggacac

SEQ ID NO: 7630 - protein, 629 aa, Homo sapiens
MELTRNGMEKPRALAEGSSLPTGPSLTTASSQLFISDFDMNLYSAANFVHHLRNALDVLHREVPRVLVNLVDFLNPTIMRQVFLGNPDKCPVQQASVLCNCVLTLRENSQELARLEAFSRAYRSSMRELVGSGRYDTQEDFSVVLQPFFQNIQLPVLADGLPDTSFFAPDCIHPNQKFHSQLARALWTNMLEPLGSKTETLDLRAEMPITCPTQNEPFLRTPRNSNYTYPIKPAIENWGSDFLCTEWKASNSVPTSVHQLRPADIKVVAALGDSLTTAVGARPNNSSDLPTSWRGLSWSIGGDGNLETHTTLPNILKKFNPYLLGFSTSTWEGTAGLNVAAEGARARDMPAQAWDLVERMKNSPDINLEKDWKLVTLFIGVNDLCHYCENPEAHLATEYVQHIQQALDILSEELPRAFVNVVEVMELASLYQGQGGKCAMLAAQNNCTCLRHSQSSLEKQELKKVNWNLQHGISSFSYWHQYTQREDFAVVVQPFFQNTLTPLNERGDTDLTFFSEDCFHFSDRGHAEMAIALWNNMLEPVGRKTTSNNFTHSRAKLKCPSPESPYLYTLRNSRLLPDQAEEAPEVLYWAVPVAAGVGLVVGIIGTVVWRCRRGGRREDPPMSLRTVAL

SEQ ID NO: 7631 - DNA, 490 bp, Homo sapiens
gtctctttctagaatctgtattctgcagccaactttgttcaccatctccgcaatgccttggacgtcctgcatagagaggtgcccagagtcctggtcaacctcgtggacttcctgaaccccactatcatgcggcaggtgttcctgggaaacccagacaagtgcccagtgcagcaggccagcttgaaccacttggaagcaaaacagagaccctggacctgagagcagagatgcccatcacctgtcccactcagaatgagcccttcctgagaacccctcggaatagtaactacacgtaccccatcaagccagccattgagaactggggcagtgacttcctgtgtacagagtggaaggcttccaatagtgttccaacctctgtccaccagctccgaccagcagacatcaaagtggtggccgccctgggtgactctctgactgtgagtagtgagccatgaaccaggatgggcagctcagagtccagccaggccct

SEQ ID NO: 7632 - protein, 75 aa, Homo sapiens
MPITCPTQNEPFLRTPRNSNYTYPIKPAIENWGSDFLCTEWKASNSVPTSVHQLRPADIKVVAALGDSLTVSSEP

SEQ ID NO: 7633 - DNA, 1672 bp, Homo sapiens
ctttgttcaccatctccgcaatgccttggacgtcctgcatagagaggtgcccagagtcctggtcaacctcgtggacttcctgaaccccactatcatgcggcaggtgttcctgggaaacccagacaagtgcccagtgcagcaggccagcttgaaccacttggaagcaaaacagagaccctggacctgagagcagagatgcccatcacctgtcccactcagaatgagcccttcctgagaacccctcggaatagtaactacacgtaccccatcaagccagccattgagaactggggcagtgacttcctgtgtacagagtggaaggcttccaatagtgttccaacctctgtccaccagctccgaccagcagacatcaaagtggtggccgccctgggtgactctctgactacagcagtgggagctcgaccaaacaactccagtgacctacccacatcttggaggggactctcttggagcattggaggggatgggaacttggagactcacaccacactgcccaacattctgaagaagttcaacccttacctccttggcttctctaccagcacctgggaggggacagcaggactaaatgtggcagcggaaggggccagagctagggacatgccagcccaggcctgggacctggtagagcgaatgaaaaacagccccgacatcaacctggagaaagactggaagctggtcacactcttcattggggtcaacgacttgtgtcattactgtgagaatccggaggcccacttggccacggaatatgttcagcacatccaacaggccctggacatcctctctgaggagctcccaagggctttcgtcaacgtggtggaggtcatggagctggctagcctgtaccagggccaaggcgggaaatgtgccatgctggcagctcagaacaactgcacttgcctcagacactcgcaaagctccctggagaagcaagaactgaagaaagtgaactggaacctccagcatggcatctccagtttctcctactggcaccaatacacacagcgtgaggactttgcggttgtggtgcagcctttcttccaaaacacactcaccccactgaacgagagaggggacactgacctcaccttcttctccgaggactgttttcacttctcagaccgcgggcatgccgagatggccatcgcactctggaacaacatgctggaaccagtgggccgcaagactacctccaacaacttcacccacagccgagccaaactcaagtgcccctctcctgagagcccttacctctacaccctgcggaacagccgattgctcccagaccaggctgaagaagcccccgaggtgctctactgggctgtcccagtggcagcgggagtcggccttgtggtgggcatcatcgggacagtggtctggaggtgcaggagaggtggccggagggaagatcctccaatgagcctgcgcactgtggccctctaggcccgggggtgggtcctcaccctaaactccctatagccactctcttcaccgccctctgccccagccactcccggccaccaggacatgcttcaatgcctggtgccataggaagcccaggggacagtcacaacttcttggggcctgggcttcttccaggcctatgctcctggaatggatacatttaaataaagtccaaagctatttt

SEQ ID NO: 7634 - protein, 423 aa, Homo sapiens
MPITCPTQNEPFLRTPRNSNYTYPIKPAIENWGSDFLCTEWKASNSVPTSVHQLRPADIKVVAALGDSLTTAVGARPNNSSDLPTSWRGLSWSIGGDGNLETHTTLPNILKKFNPYLLGFSTSTWEGTAGLNVAAEGARARDMPAQAWDLVERMKNSPDINLEKDWKLVTLFIGVNDLCHYCENPEAHLATEYVQHIQQALDILSEELPRAFVNVVEVMELASLYQGQGGKCAMLAAQNNCTCLRHSQSSLEKQELKKVNWNLQHGISSFSYWHQYTQREDFAVVVQPFFQNTLTPLNERGDTDLTFFSEDCFHFSDRGHAEMAIALWNNMLEPVGRKTTSNNFTHSRAKLKCPSPESPYLYTLRNSRLLPDQAEEAPEVLYWAVPVAAGVGLVVGIIGTVVWRCRRGGRREDPPMSLRTVAL

SEQ ID NO: 7635 - DNA, 574 bp, Homo sapiens
agatttttcctaccaggaagagcatgtgctgaccaacagacatgaatttcagcctggtagttacaacattcacagacaaactgcggcctggaccagctggtgaaacataattctgaatcctgcccacagccttcggtggttttggatgaaaggccagcgccttgggagccctgcgtttgatttcaagttttaaggccggcactggtggagcaatgaatggtgaaagctctccccttaaaggagcacagttgcctttaggtgactgctaactcaggcttttgctgaggacagtgtttactttgtgagcttaatgacagggctggctttctgggagtgttgcaatgaaacagactcagacacaggccatcatgggcctcctccctagcaaggccgccacggctggcatctcaagagcagtccgttgaacttgggatttgggtgtgagacacagtttcatcagaagaatttaaaccaaagtctacatttgccctctagataaatgtgtgtgttcagcagcaaccacaactccttgcctcattctcttggttgattatgtgactgtgagaagaaaagc

SEQ ID NO: 7636 - protein, 39 aa, Homo sapiens
LQHSQTNCGLDQLVKHNSESCPQPSVVLDERPAPWEPCV

SEQ ID NO: 7637 - DNA, 663 bp, Homo sapiens
atcagtaactcaggctgtttcccacactacaggccagcactgtgggctctcagtttattgggaaatggaaataagagggaaggacaaaagtccactgggaagcagactggacagaaaggaactctgagcagctaaactctgactaatcccagggtatacctgcgttttctcttcaccagacaaactgcggcctggaccagctggtgaaacataattctgaatcctgcccacagccttcggtggttttggatgaaaggccagcgccttgggagccctgcgtttgatttcaagttttaaggccggcactggtggagcaatgaatggtgaaagctctccccttaaaggagcacagttgcctttaggtgactgctaactcaggcttttgctgaggacagtgtttactttgtgagcttaatgacagggctggctttctgggagtgttgcaatgaaacagactcagacacaggccatcatgggcctcctccctagcaaggccgccacggctggcatctcaagagcagtccgttgaacttgggatttgggtgtgagacacagtttcatcagaagaatttaaaccaaagtctacatttgccctctagataaatgtgtgtgttcagcagcaaccacaactccttgcctcattctcttggttgattatgtgac

SEQ ID NO: 7638 - protein, 45 aa, Homo sapiens
SQGIPAFSLHQTNCGLDQLVKHNSESCPQPSVVLDERPAPWEPCV

SEQ ID NO: 7639 - DNA, 759 bp, Homo sapiens
gctgtttcccacactacaggccagcactgtgggctctcagtttattgggaaatggaaataagagggaaggacaaaagtccactgggaagcagactggacagaaaggaactctgagcagctaaactctgactaatcccagggtatacctgcgttttctcttcaccagatttttcctaccaggaagagcatgtgctgaccaacagacatgaatttcagcctggtagttacaacattcacagtatacccacatcactaagctgggaggcacattttgagacccagaatcctgacacctccatgccttcaaaaggacaaactgcggcctggaccagctggtgaaacataattctgaatcctgcccacagccttcggtggttttggatgaaaggccagcgccttgggagccctgcgtttgatttcaagttttaaggccggcactggtggagcaatgaatggtgaaagctctccccttaaaggagcacagttgcctttaggtgactgctaactcaggcttttgctgaggacagtgtttactttgtgagcttaatgacagggctggctttctgggagtgttgcaatgaaacagactcagacacaggccatcatgggcctcctccctagcaaggccgccacggctggcatctcaagagcagtccgttgaacttgggatttgggtgtgagacacagtttcatcagaagaatttaaaccaaagtctacatttgccctctagataaatgtgtgtgttcagcagcaaccac

SEQ ID NO: 7640 - protein, 41 aa, Homo sapiens
HLHAFKRTNCGLDQLVKHNSESCPQPSVVLDERPAPWEPCV

SEQ ID NO: 7641 - DNA, 723 bp, Homo sapiens
gggaagcagactggacagaaaggaactctgagcagctaaactctgactaatcccagggtatacctgcgttttctcttcaccagatttttcctaccaggaagagcatgtgctgaccaacagacatgaatttcagcctggtagttacaacattcacaggagtttcactcgttgcccaggctggagtgcaacggcgcgatctcagctcactgcaacctccgcctccccagttcaagcgattctcctgcctcagcctcctgagtcactggaattacgggcgcctgacaccacgcccagctaattttttgtatttttagtagacatggggtttcactatgttggccaggctggtctcgaactcctgacctcatgatcctcctgcctcagcctcccaaagcactgggattacaggtgtgagccactgtgcctggtccattaaaaacatttgtaaagctatggtgttgataaagtattatgaaagactgcaaaaaaagatggctaatttttagttattattgcacatgtttagaggagctaatgacattttctatgattaataaaagacattatttatgtttttatttatgtattccacaacatttattttattttctccatttcaggaaaaccactatgttgttacaataaagattttcatgtaatttgtgttcaattgatagtaataatgtaacaagttaaaaatgaaggtaattgtgtttaaaattt

SEQ ID NO: 7642 - protein, 63 aa, Homo sapiens
MNFSLVVTTFTGVSLVAQAGVQRRDLSSLQPPPPQFKRFSCLSLLSHWNYGRLTPRPANFLYF

SEQ ID NO: 7643 - DNA, 4790 bp, Homo sapiens
ggagagctgcgtgacgcggcggcgcgcaagggacgtgcggagtgagtggcgctgcgggtggggccgtcggcggcgctggtgagagaacgccgagccgtcgccgcagcctccgccgccgagaagcccttgttcccgctgctgggaaggagagtctgtgccgacaagatggcggacggggagctgaacgtggacagcctcatcacccggctgctggaggtacgaggatgtcgtccaggaaagattgtgcagatgactgaagcagaagttcgaggcttatgtatcaagtctcgggagatctttctcagccagcctattcttttggaattggaagcaccgctgaaaatttgtggagatattcatggacaatatacagatttactgagattatttgaatatggaggtttcccaccagaagccaactatcttttcttaggagattatgtggacagaggaaagcagtctttggaaaccatttgtttgctattggcttataaaatcaaatatccagagaacttctttctcttaagaggaaaccatgagtgtgctagcatcaatcgcatttatggattctatgatgaatgcaaacgaagatttaatattaaattgtggaagaccttcactgattgttttaactgtctgcctatagcagccattgtggatgagaagatcttctgttgtcatggaggattgtcaccagacctgcaatctatggagcagattcggagaattatgagacctactgatgtccctgatacaggtttgctctgtgatttgctatggtctgatccagataaggatgtgcaaggctggggagaaaatgatcgtggtgtttcctttacttttggagctgatgtagtcagtaaatttctgaatcgtcatgatttagatttgatttgtcgagctcatcaggtggtggaagatggatatgaattttttgctaaacgacagttggtaaccttattttcagccccaaattactgtggcgagtttgataatgctggtggaatgatgagtgtggatgaaactttgatgtgttcatttcagatattgaaaccatctgaaaagaaagctaaataccagtatggtggactgaattctggacgtcctgtcactccacctcgaacagctaatccgccgaagaaaaggtgaagaaaggaattctgtaaagaaaccatcagatttgttaaggacatacttcataatatataagtgtgcactgtaaaaccatccagccatttgacaccctttatgatgtcacacctttaacttaaggagacgggtaaaggatcttaaatttttttctaatagaaagatgtgctacactgtattgtaataagtatactctgttatagtcaacaaagttaaatccaaattcaaaattatccattaaagttacatcttcatgtatcacaatttttaaagttgaaaagcatcccagttaaactagatgtgatagttaaaccagatgaaagcatgatgatccatctgtgtaatgtggttttagtgttgcttggttgtttaattattttgagcttgttttgtttttgtttgttttcactagaataatggcaaatacttctaatttttttccctaaacatttttaaaagtgaaatatgggaagagctttacagacattcaccaactattattttcccttgtttatctacttagatatctgtttaatcttactaagaaaactttcgcctcattacattaaaaaggaattttagagattgattgttttaaaaaaaaatacgcacattgtccaatccagtgattttaatcatacagtttgactgggcaaactttacagctgatagtgaatattttgctttatacaggaattgacactgatttggatttgtgcactctaatttttaacttattgatgctctattgtgcagtagcatttcatttaagataaggctcatatagtattacccaactagttggtaatgtgattatgtggtaccttggctttaggttttcattcgcacggaacaccttttggcatgcttaacttcctggtaacaccttcacctgcattggttttctttttcttttttctttctttttttttttttttttttttttgagttgttgtttgtttttagatccacagtacatgagaatccttttttgacaagccttggaaagctgacactgtctctttttcctccctctatacgaaggatgtatttaaatgaatgctggtcagtgggacattttgtcaactatgggtattgggtgcttaactgtctaatattgccatgtgaatgttgtatacgattgtaaggcttatgtcactaaagatttttattctgattttttcataatcaaaggtcatatgatactgtatagacaagctttgtagtgaagtatagtagcaataatttctgtacctgatcaagtttattgcagcctttcttttcctatttcttttttttaagggttagtattaacaaatggcaatgagtagaaaagttaacatgaagattttagaaggagagaacttacaggacacagatttgtgattctttgactgtgacactattggatgtgattctaaaagcttttattgagcattgtcaaatttgtaagcttcatagggatggacatcatatctataatgcccttctatatgtgctaccatagatgtgacatttttgaccttaatatcgtctttgaaaatgttaaattgagaaacctgttaacttacattttatgaattggcacattgtattacttactgcaagagatatttcattttcagcacagtgcaaaagttctttaaaatgcatatgtctttttttctaattccgttttgttttaaagcacattttaaatgtagttttctcatttagtaaaagttgtctaattgatatgaagcctgactgattttttttttccttacagtgagacatttaagcacacattttattcacatagatactatgtccttgacatattgaaatgattcttttctgaaagtattcatgatctgcatatgatgtattaggttaggtcacaaaggttttatctgaggtgatttaaataacttcctgattggagtgtgtaagctgagcgatttctaataaaattttagttgtacacttttagtagtcatagtgaagcaggtctagaaaataagcctttggcagggaaaaagggcaatgttgattaatctcagtattaaaccacattaatctgtatcccattgtctggcttttgtaaattcatccaggtcaagactaagtatgttggttaataggaatccttttttttttttttaaagactaaatgtgaaaaaataatcactacttaagctaattaatattggtcattaaatttaaaggatggaaatttatcatgtttaaaaattattcaagcactcttaaaaccacttaaacagcctccagtcataaaaatgtgttctttacaaatatttgcttggcaacacgacttgaaataaataaaactttgtttcttaggagaaaatgattctgtaattccagtgtcactaatttatattgttctttcctctgatttttttcaggttagtgatttttttgtatacaatttaatccaaatgttatgacattcagaaatcatgaaacacagtagatatctgttataatgtggtgtatcacatggattataaagcaaagttatggtcgatttctattcttgaaagaatcaactacagtgaatcctttgcatttgaagccttaacatgcattgctttaattttgcccagggacaaattttaataatcagcaagactggtttgtgcaaagcgttgagtcatcaggtatttagagcctagccagctacccagtatccatgctgccatatcccttcattgtaaaaagtacctaaacattcgtgaaatgattttttttagctgaaaaatgctggcaagaagaattttaaagcttaaaataggtggtaaatttgaagtatgagtgtgttcacgagaaacataggcttttcaaaaaaatttttattcaaggcaaagcaaggaacatcttgagatatgtctcaagaatataaagatgtattattttaagccaaggagctgaaatatatctcagtttataaattcaggtatattctttttgtctccatggcaaccataacttttgaaccaaaaaaaattgtttttacatctttatgctgaaaatgtgtttagattaggaatatggtcgggctgaatttgctgttgctccctaaccaaatccacctcttgttttccttgtgagtccatggctaaatcaaagctgcccctgagaagagacttaatccaagcctgattgtactagtggcatcacttagaagtaggctttccctcttcctagtagatctcaatgttttataattccttaaaacagctgaaaattgggacaacatactttacgcaatgaacagtagttaaataggaaataaactagttccatataagtatacacctagagttttaattacctttataatgtttcttaaaagtgaaacttagatacaattgtgattggatacttagatactaagtgaaacttagtgtaacaattttgatctgttaaattggattttacatgtacatttgaatgccagaatttctaaataaatcccctggttaggaaattttaaaagtcaaagcttgttttcttcaaccactaccttctacattggttgacttagaccgtaagctttttaagtttctcattgtaatttaccttctcatgcagattgctgatgttttattaaaccttatttttacaaaaatgaccat

SEQ ID NO: 7644 - protein, 327 aa, Homo sapiens; identical to SEQ ID NO: 492

SEQ ID NO: 7645 - DNA, 4291 bp, Homo sapiens
gctgcgtgacgcggcggcgcgcaagggacgtgcggagtgagtggcgctgcgggtggggccgtcggcggcgctggtgagctttgcggagctgggcggtgccgaggaggaggaggtggcggcctgggtctgacgcggccctgttcgagggggcctctcttgtttatttatttattttccgtgggtgcctccgagtgtgcgcgcgctctcgctacccggcggggagggggtggggggagggcccgggaaaagggggagttggagccggggtcgaaacgccgcgtgacttgtaggtgagagaacgccgagccgtcgccgcagcctccgccgccgagaagcccttgttcccgctgctgggaaggagagtctgtgccgacaagatggcggacggggagctgaacgtggacagcctcatcacccggcttgtctgcctatagcagccattgtggatgagaagatcttctgttgtcatggaggattgtcaccagacctgcaatctatggagcagattcggagaattatgagacctactgatgtccctgatacagatattgaaaccatctgaaaagaaagctaaataccagtatggtggactgaattctggacgtcctgtcactccacctcgaacagctaatccgccgaagaaaaggtgaagaaaggaattctgtaaagaaaccatcagatttgttaaggacatacttcataatatataagtgtgcactgtaaaaccatccagccatttgacaccctttatgatgtcacacctttaacttaaggagacgggtaaaggatcttaaatttttttctaatagaaagatgtgctacactgtattgtaataagtatactctgttatagtcaacaaagttaaatccaaattcaaaattatccattaaagttacatcttcatgtatcacaatttttaaagttgaaaagcatcccagttaaactagatgtgatagttaaaccagatgaaagcatgatgatccatctgtgtaatgtggttttagtgttgcttggttgtttaattattttgagcttgttttgtttttgtttgttttcactagaataatggcaaatacttctaatttttttccctaaacatttttaaaagtgaaatatgggaagagctttacagacattcaccaactattattttcccttgtttatctacttagatatctgtttaatcttactaagaaaactttcgcctcattacattaaaaaggaattttagagattgattgttttaaaaaaaaatacgcacattgtccaatccagtgattttaatcatacagtttgactgggcaaactttacagctgatagtgaatattttgctttatacaggaattgacactgatttggatttgtgcactctaatttttaacttattgatgctctattgtgcagtagcatttcatttaagataaggctcatatagtattacccaactagttggtaatgtgattatgtggtaccttggctttaggttttcattcgcacggaacaccttttggcatgcttaacttcctggtaacaccttcacctgcattggttttctttttcttttttctttctttttttttttttttttttttttgagttgttgtttgtttttagatccacagtacatgagaatccttttttgacaagccttggaaagctgacactgtctctttttcctccctctatacgaaggatgtatttaaatgaatgctggtcagtgggacattttgtcaactatgggtattgggtgcttaactgtctaatattgccatgtgaatgttgtatacgattgtaaggcttatgtcactaaagatttttattctgattttttcataatcaaaggtcatatgatactgtatagacaagctttgtagtgaagtatagtagcaataatttctgtacctgatcaagtttattgcagcctttcttttcctatttcttttttttaagggttagtattaacaaatggcaatgagtagaaaagttaacatgaagattttagaaggagagaacttacaggacacagatttgtgattctttgactgtgacactattggatgtgattctaaaagcttttattgagcattgtcaaatttgtaagcttcatagggatggacatcatatctataatgcccttctatatgtgctaccatagatgtgacatttttgaccttaatatcgtctttgaaaatgttaaattgagaaacctgttaacttacattttatgaattggcacattgtattacttactgcaagagatatttcattttcagcacagtgcaaaagttctttaaaatgcatatgtctttttttctaattccgttttgttttaaagcacattttaaatgtagttttctcatttagtaaaagttgtctaattgatatgaagcctgactgattttttttttccttacagtgagacatttaagcacacattttattcacatagatactatgtccttgacatattgaaatgattcttttctgaaagtattcatgatctgcatatgatgtattaggttaggtcacaaaggttttatctgaggtgatttaaataacttcctgattggagtgtgtaagctgagcgatttctaataaaattttagttgtacacttttagtagtcatagtgaagcaggtctagaaaataagcctttggcagggaaaaagggcaatgttgattaatctcagtattaaaccacattaatctgtatcccattgtctggcttttgtaaattcatccaggtcaagactaagtatgttggttaataggaatccttttttttttttttaaagactaaatgtgaaaaaataatcactacttaagctaattaatattggtcattaaatttaaaggatggaaatttatcatgtttaaaaattattcaagcactcttaaaaccacttaaacagcctccagtcataaaaatgtgttctttacaaatatttgcttggcaacacgacttgaaataaataaaactttgtttcttaggagaaaatgattctgtaattccagtgtcactaatttatattgttctttcctctgatttttttcaggttagtgatttttttgtatacaatttaatccaaatgttatgacattcagaaatcatgaaacacagtagatatctgttataatgtggtgtatcacatggattataaagcaaagttatggtcgatttctattcttgaaagaatcaactacagtgaatcctttgcatttgaagccttaacatgcattgctttaattttgcccagggacaaattttaataatcagcaagactggtttgtgcaaagcgttgagtcatcaggtatttagagcctagccagctacccagtatccatgctgccatatcccttcattgtaaaaagtacctaaacattcgtgaaatgattttttttagctgaaaaatgctggcaagaagaattttaaagcttaaaataggtggtaaatttgaagtatgagtgtgttcacgagaaacataggcttttcaaaaaaatttttattcaaggcaaagcaaggaacatcttgagatatgtctcaagaatataaagatgtattattttaagccaaggagctgaaatatatctcagtttataaattcaggtatattctttttgtctccatggcaaccataacttttgaaccaaaaaaaattgtttttacatctttatgctgaaaatgtgtttagattaggaatatggtcgggctgaatttgctgttgctccctaaccaaatccacctcttgttttccttgtgagtccatggctaaatcaaagctgcccctgagaagagacttaatccaagcctgattgtactagtggcatcacttagaagtaggctttccctcttcctagtagatctcaatgttttataattccttaaaacagctgaaaattgggacaacatactttacgcaatgaacagtagttaaataggaaataaactagttccatataagtatacacctagagttttaattacctttataatgtttcttaaaagtgaaacttagatacaattgtgattggatacttagatactaagtgaaacttagtgtaacaattttgatctgttaaattggattttacatgtacatttgaatgccagaatttctaaataaatcccctggttaggaaattttaaaagtcaaagcttgttttcttcaaccactaccttctacattggttgacttagaccgtaagctttttaagtttctcattgtaatttaccttctcatgcagattgctgatgttttattaaaccttatttttacaaaaatgaccat

SEQ ID NO: 7646 - protein, 39 aa, Homo sapiens
MSLIQILKPSEKKAKYQYGGLNSGRPVTPPRTANPPKKR

SEQ ID NO: 7647 - DNA, 4990 bp, Homo sapiens
ggcggcgcgcaagggacgtgcggagtgagtggcgctgcgggtggggccgtcggcggcgctggtgagctttgcggagctgggcggtgccgaggaggaggaggtggcggcctgggtctgacgcggccctgttcgagggggcctctcttgtttatttatttattttccgtgggtgcctccgagtgtgcgcgcgctctcgctacccggcggggagggggtggggggagggcccgggaaaagggggagttggagccggggtcgaaacgccgcgtgacttgtaggtgagagaacgccgagccgtcgccgcagcctccgccgccgagaagcccttgttcccgctgctgggaaggagagtctgtgccgacaagatggcggacggggagctgaacgtggacagcctcatcacccggctgctggaggtacgaggatgtcgtccaggaaagattgtgcagatgactgaagcagaagttcgaggcttatgtatcaagtctcgggagatctttctcagccagcctattcttttggaattggaagcaccgctgaaaatttgtggagatattcatggacaatatacagatttactgagattatttgaatatggaggtttcccaccagaagccaactatcttttcttaggagattatgtggacagaggaaagcagtctttggaaaccatttgtttgctattggcttataaaatcaaatatccagagaacttctttctcttaagaggaaaccatgagtgtgctagcatcaatcgcatttatggattctatgatgaatgcaaacgaagatttaatattaaattgtggaagaccttcactgattgttttaactgtctgcctatagcagccattgtggatgagaagatcttctgttgtcatggaggattgtcaccagacctgcaatctatggagcagattcggagaattatgagacctactgatgtccctgatacaggtttgctctgtgatttgctatggtctgatccagataaggatgtgcaaggctggggagaaaatgatcgtggtgtttcctttacttttggagctgatgtagtcagtaaatttctgaatcgtcatgatttagatttgatttgtcgagctcatcaggtggtggaagatggatatgaattttttgctaaacgacagttggtaaccttattttcagccccaaattactgtggcgagtttgataatgctggtggaatgatgagtgtggatgaaactttgatgtgttcatttcagatattgaaaccatctgaaaagaaagctaaataccagtatggtggactgaattctggacgtcctgtcactccacctcgaacagctaatccgccgaagaaaaggtgaagaaaggaattctgtaaagaaaccatcagatttgttaaggacatacttcataatatataagtgtgcactgtaaaaccatccagccatttgacaccctttatgatgtcacacctttaacttaaggagacgggtaaaggatcttaaatttttttctaatagaaagatgtgctacactgtattgtaataagtatactctgttatagtcaacaaagttaaatccaaattcaaaattatccattaaagttacatcttcatgtatcacaatttttaaagttgaaaagcatcccagttaaactagatgtgatagttaaaccagatgaaagcatgatgatccatctgtgtaatgtggttttagtgttgcttggttgtttaattattttgagcttgttttgtttttgtttgttttcactagaataatggcaaatacttctaatttttttccctaaacatttttaaaagtgaaatatgggaagagctttacagacattcaccaactattattttcccttgtttatctacttagatatctgtttaatcttactaagaaaactttcgcctcattacattaaaaaggaattttagagattgattgttttaaaaaaaaatacgcacattgtccaatccagtgattttaatcatacagtttgactgggcaaactttacagctgatagtgaatattttgctttatacaggaattgacactgatttggatttgtgcactctaatttttaacttattgatgctctattgtgcagtagcatttcatttaagataaggctcatatagtattacccaactagttggtaatgtgattatgtggtaccttggctttaggttttcattcgcacggaacaccttttggcatgcttaacttcctggtaacaccttcacctgcattggttttctttttcttttttctttctttttttttttttttttttttttgagttgttgtttgtttttagatccacagtacatgagaatccttttttgacaagccttggaaagctgacactgtctctttttcctccctctatacgaaggatgtatttaaatgaatgctggtcagtgggacattttgtcaactatgggtattgggtgcttaactgtctaatattgccatgtgaatgttgtatacgattgtaaggcttatgtcactaaagatttttattctgattttttcataatcaaaggtcatatgatactgtatagacaagctttgtagtgaagtatagtagcaataatttctgtacctgatcaagtttattgcagcctttcttttcctatttcttttttttaagggttagtattaacaaatggcaatgagtagaaaagttaacatgaagattttagaaggagagaacttacaggacacagatttgtgattctttgactgtgacactattggatgtgattctaaaagcttttattgagcattgtcaaatttgtaagcttcatagggatggacatcatatctataatgcccttctatatgtgctaccatagatgtgacatttttgaccttaatatcgtctttgaaaatgttaaattgagaaacctgttaacttacattttatgaattggcacattgtattacttactgcaagagatatttcattttcagcacagtgcaaaagttctttaaaatgcatatgtctttttttctaattccgttttgttttaaagcacattttaaatgtagttttctcatttagtaaaagttgtctaattgatatgaagcctgactgattttttttttccttacagtgagacatttaagcacacattttattcacatagatactatgtccttgacatattgaaatgattcttttctgaaagtattcatgatctgcatatgatgtattaggttaggtcacaaaggttttatctgaggtgatttaaataacttcctgattggagtgtgtaagctgagcgatttctaataaaattttagttgtacacttttagtagtcatagtgaagcaggtctagaaaataagcctttggcagggaaaaagggcaatgttgattaatctcagtattaaaccacattaatctgtatcccattgtctggcttttgtaaattcatccaggtcaagactaagtatgttggttaataggaatccttttttttttttttaaagactaaatgtgaaaaaataatcactacttaagctaattaatattggtcattaaatttaaaggatggaaatttatcatgtttaaaaattattcaagcactcttaaaaccacttaaacagcctccagtcataaaaatgtgttctttacaaatatttgcttggcaacacgacttgaaataaataaaactttgtttcttaggagaaaatgattctgtaattccagtgtcactaatttatattgttctttcctctgatttttttcaggttagtgatttttttgtatacaatttaatccaaatgttatgacattcagaaatcatgaaacacagtagatatctgttataatgtggtgtatcacatggattataaagcaaagttatggtcgatttctattcttgaaagaatcaactacagtgaatcctttgcatttgaagccttaacatgcattgctttaattttgcccagggacaaattttaataatcagcaagactggtttgtgcaaagcgttgagtcatcaggtatttagagcctagccagctacccagtatccatgctgccatatcccttcattgtaaaaagtacctaaacattcgtgaaatgattttttttagctgaaaaatgctggcaagaagaattttaaagcttaaaataggtggtaaatttgaagtatgagtgtgttcacgagaaacataggcttttcaaaaaaatttttattcaaggcaaagcaaggaacatcttgagatatgtctcaagaatataaagatgtattattttaagccaaggagctgaaatatatctcagtttataaattcaggtatattctttttgtctccatggcaaccataacttttgaaccaaaaaaaattgtttttacatctttatgctgaaaatgtgtttagattaggaatatggtcgggctgaatttgctgttgctccctaaccaaatccacctcttgttttccttgtgagtccatggctaaatcaaagctgcccctgagaagagacttaatccaagcctgattgtactagtggcatcacttagaagtaggctttccctcttcctagtagatctcaatgttttataattccttaaaacagctgaaaattgggacaacatactttacgcaatgaacagtagttaaataggaaataaactagttccatataagtatacacctagagttttaattacctttataatgtttcttaaaagtgaaacttagatacaattgtgattggatacttagatactaagtgaaacttagtgtaacaattttgatctgttaaattggattttacatgtacatttgaatgccagaatttctaaataaatcccctggttaggaaattttaaaagtcaaagcttgttttcttcaaccactaccttctacattggttgacttagaccgtaagctttttaagtttctcattgtaatttaccttctcatgcagattgctgatgttttattaaaccttatttttacaaaaatgaccat

SEQ ID NO: 7648 - protein, 327 aa, Homo sapiens; identical to SEQ ID NO: 492

SEQ ID NO: 7649 - DNA, 792 bp, Homo sapiens
gcgggtggggccgtcggcggcgctggtgagctttgcggagctgggcggtgccgaggaggaggaggtggcggcctgggtctgacgcggccctgttcgagggggcctctcttgtttatttatttattttccgtgggtgcctccgagtgtgcgcgcgctctcgctacccggcggggagggggtggggggagggcccgggaaaagggggagttggagccggggtcgaaacgccgcgtgacttgtaggtgagagaacgccgagccgtcgccgcagcctccgccgccgagaagcccttgttcccgctgctgggaaggagagtctgtgccgacaagatggcggacggggagctgaacgtggacagcctcatcacccggctgctggaggtacgaggatgtcgtccaggaaagattgtgcagatgactgaagcagaagttcgaggcttatgtatcaagtctcgggagatctttctcagccagcctattcttttggaattggaagcaccgctgaaaatttgtggtatgtaaatgggtaaagttggaaacaactcttttgaatcatgtttttcctcccatgtttaagatctagagaaaacattttttgaaatttttgtataaaacagatcagtaggctttactaaataaaagtgtataaaaattgaaacttataaaaatgacaagttacagacaagatgaaaatacttgctatatatcaacagataaaaggagttctatttataatatataaagagttcttataaataagagaaaggcgatacagtataaaaataacatagga

SEQ ID NO: 7650 - protein, 63 aa, Homo sapiens
MADGELNVDSLITRLLEVRGCRPGKIVQMTEAEVRGLCIKSREIFLSQPILLELEAPLKICGM

SEQ ID NO: 7651 - DNA, 985 bp, Homo sapiens
gcgggtggggccgtcggcggcgctggtgagctttgcggagctgggcggtgccgaggaggaggaggtggcggcctgggtctgacgcggccctgttcgagggggcctctcttgtttatttatttattttccgtgggtgcctccgagtgtgcgcgcgctctcgctacccggcggggagggggtggggggagggcccgggaaaagggggagttggagccggggtcgaaacgccgcgtgacttgtaggtgagagaacgccgagccgtcgccgcagcctccgccgccgagaagcccttgttcccgctgctgggaaggagagtctgtgccgacaagatggcggacggggagctgaacgtggacagcctcatcacccggctgctggaggtacgaggatgtcgtccaggaaagattgtgcagatgactgaagcagaagttcgaggcttatgtatcaagtctcgggagatctttctcagccagcctattcttttggaattggaagcaccgctgaaaatttgtggagatattcatggacaatatacagatttactgagattatttgaatatggaggtttcccaccagaagccaactatcttttcttaggagattatgtggacagaggaaagcagtctttggaaaccatttgtttgctattggcttataaaatcaaatatccagagaacttctttctcttaagaggaaaccatgagtgtgctagcatcaatcgcatttatggattctatgatgaatgcaaacgaagatttaatattaaattgtggaagaccttcactgattgttttaactgtctgcctatagcagccattgtggatgagaagatcttctgttgtcatggaggtagactagtaaatttgccttacagattttttttttcttctattattcggaaaatacctataataatcaagaggctgtgggaaaacaaagcagtgcttgtatgaaaactcaagtgattaaaactgttttaaacatg

SEQ ID NO: 7652 - protein, 207 aa, Homo sapiens
MADGELNVDSLITRLLEVRGCRPGKIVQMTEAEVRGLCIKSREIFLSQPILLELEAPLKICGDIHGQYTDLLRLFEYGGFPPEANYLFLGDYVDRGKQSLETICLLLAYKIKYPENFFLLRGNHECASINRIYGFYDECKRRFNIKLWKTFTDCFNCLPIAAIVDEKIFCCHGGRLVNLPYRFFFSSIIRKIPIIIKRLWENKAVLV

SEQ ID NO: 7653 - DNA, 3051 bp, Homo sapiens
gcgggtggggccgtcggcggcgctggtgagctttgcggagctgggcggtgccgaggaggaggaggtggcggcctgggtctgacgcggccctgttcgagggggcctctcttgtttatttatttattttccgtgggtgcctccgagtgtgcgcgcgctctcgctacccggcggggagggggtggggggagggcccgggaaaagggggagttggagccggggtcgaaacgccgcgtgacttgtaggtgagagaacgccgagccgtcgccgcagcctccgccgccgagaagcccttgttcccgctgctgggaaggagagtctgtgccgacaagatggcggacggggagctgaacgtggacagcctcatcacccggctgctggaggtacgaggatgtcgtccaggaaagattgtgcagatgactgaagcagaagttcgaggcttatgtatcaagtctcgggagatctttctcagccagcctattcttttggaattggaagcaccgctgaaaatttgtggagatattcatggacaatatacagatttactgagattatttgaatatggaggtttcccaccagaagccaactatcttttcttaggagattatgtggacagaggaaagcagtctttggaaaccatttgtttgctattggcttataaaatcaaatatccagagaacttctttctcttaagaggaaaccatgagtgtgctagcatcaatcgcatttatggattctatgatgaatgcaaacgaagatttaatattaaattgtggaagaccttcactgattgttttaactgtctgcctatagcagccattgtggatgagaagatcttctgttgtcatggaggattgtcaccagacctgcaatctatggagcagattcggagaattatgagacctactgatgtccctgatacaggtttgctctgtgatttgctatggtctgatccagataaggatgtgcaaggctggggagaaaatgatcgtggtgtttcctttacttttggagctgatgtagtcagtaaatttctgaatcgtcatgatttagatttgatttgtcgagctcatcaggtggtggaagatggatatgaattttttgctaaacgacagttggtaaccttattttcagccccaaattactgtggcgagtttgataatgctggtggaatgatgagtgtggatgaaactttgatgtgttcatttcagatattgaaaccatctgaaaagaaagctaaataccagtatggtggactgaattctggacgtcctgtcactccacctcgaacagctaatccgccgaagaaaaggtgaagaaaggaattctgtaaagaaaccatcagatttgttaaggacatacttcataatatataagtgtgcactgtaaaaccatccagccatttgacaccctttatgatgtcacacctttaacttaaggagacgggtaaaggatcttaaatttttttctaatagaaagatgtgctacactgtattgtaataagtatactctgttatagtcaacaaagttaaatccaaattcaaaattatccattaaagttacatcttcatgtatcacaatttttaaagttgaaaagcatcccagttaaactagatgtgatagttaaaccagatgaaagcatgatgatccatctgtgtaatgtggttttagtgttgcttggttgtttaattattttgagcttgttttgtttttgtttgttttcactagaataatggcaaatacttctaatttttttccctaaacatttttaaaagtgaaatatgggaagagctttacagacattcaccaactattattttcccttgtttatctacttagatatctgtttaatcttactaagaaaactttcgcctcattacattaaaaaggaattttagagattgattgttttaaaaaaaaatacgcacattgtccaatccagtgattttaatcatacagtttgactgggcaaactttacagctgatagtgaatattttgctttatacaggaattgacactgatttggatttgtgcactctaatttttaacttattgatgctctattgtgcagtagcatttcatttaagataaggctcatatagtattacccaactagttggtaatgtgattatgtggtaccttggctttaggttttcattcgcacggaacaccttttggcatgcttaacttcctggtaacaccttcacctgcattggttttctttttcttttttctttctttttttttttttttttttttttgagttgttgtttgtttttagatccacagtacatgagaatccttttttgacaagccttggaaagctgacactgtctctttttcctccctctatacgaaggatgtatttaaatgaatgctggtcagtgggacattttgtcaactatgggtattgggtgcttaactgtctaatattgccatgtgaatgttgtatacgattgtaaggcttatgtcactaaagatttttattctgattttttcataatcaaaggtcatatgatactgtatagacaagctttgtagtgaagtatagtagcaataatttctgtacctgatcaagtttattgcagcctttcttttcctatttcttttttttaagggttagtattaacaaatggcaatgagtagaaaagttaacatgaagattttagaaggagagaacttacaggacacagatttgtgattctttgactgtgacactattggatgtgattctaaaagcttttattgagcattgtcaaatttgtaagcttcatagggatggacatcatatctataatgcccttctatatgtgctaccatagatgtgacatttttgaccttaatatcgtctttgaaaatgttaaattgagaaacctgttaacttacattttatgaattggcacattgtattacttactgcaagagatatttcattttcagcacagtgcaaaagttctttaaaatgcatatgtctttttttctaattccgttttgttttaaagcacattttaaatgtagttttctcatttagtaaaagttgtctaattgatatg

SEQ ID NO: 7654 - protein, 327 aa, Homo sapiens; identical to SEQ ID NO: 492

SEQ ID NO: 7655 - DNA, 3672 bp, Homo sapiens
gcgggtggggccgtcggcggcgctggtgagctttgcggagctgggcggtgccgaggaggaggaggtggcggcctgggtctgacgcggccctgttcgagggggcctctcttgtttatttatttattttccgtgggtgcctccgagtgtgcgcgcgctctcgctacccggcggggagggggtggggggagggcccgggaaaagggggagttggagccggggtcgaaacgccgcgtgacttgtaggtgagagaacgccgagccgtcgccgcagcctccgccgccgagaagcccttgttcccgctgctgggaaggagagtctgtgccgacaagatggcggacggggagctgaacgtggacagcctcatcacccggctgctggaggtacgaggatgtcgtccaggaaagattgtgcagatgactgaagcagaagttcgaggcttatgtatcaagtctcgggagatctttctcagccagcctattcttttggaattggaagcaccgctgaaaatttgtggagatattcatggacaatatacagatttactgagattatttgaatatggaggtttcccaccagaagccaactatcttttcttaggagattatgtggacagaggaaagcagtctttggaaaccatttgtttgctattggcttataaaatcaaatatccagagaacttctttctcttaagaggaaaccatgagtgtgctagcatcaatcgcatttatggattctatgatgaatgcaaacgaagatttaatattaaattgtggaagaccttcactgattgttttaactgtctgcctatagcagccattgtggatgagaagatcttctgttgtcatggaggattgtcaccagacctgcaatctatggagcagattcggagaattatgagacctactgatgtccctgatacaggtttgctctgtgatttgctatggtctgatccagataaggatgtgcaaggctggggagaaaatgatcgtggtgtttcctttacttttggagctgatgtagtcagtaaatttctgaatcgtcatgatttagatttgatttgtcgagctcatcaggtggtggaagatggatatgaattttttgctaaacgacagttggtaaccttattttcagccccaaattactgtggcgagtttgataatgctggtggaatgatgagtgtggatgaaactttgatgtgttcatttcagatattgaaaccatctgaaaagaaagctaaataccagtatggtggactgaattctggacgtcctgtcactccacctcgaacagctaatccgccgaagaaaaggtgaagaaaggaattctgtaaagaaaccatcagatttgttaaggacatacttcataatatataagtgtgcactgtaaaaccatccagccatttgacaccctttatgatgtcacacctttaacttaaggagacgggtaaaggatcttaaatttttttctaatagaaagatgtgctacactgtattgtaataagtatactctgttatagtcaacaaagttaaatccaaattcaaaattatccattaaagttacatcttcatgtatcacaatttttaaagttgaaaagcatcccagttaaactagatgtgatagttaaaccagatgaaagcatgatgatccatctgtgtaatgtggttttagtgttgcttggttgtttaattattttgagcttgttttgtttttgtttgttttcactagaataatggcaaatacttctaatttttttccctaaacatttttaaaagtgaaatatgggaagagctttacagacattcaccaactattattttcccttgtttatctacttagatatctgtttaatcttactaagaaaactttcgcctcattacattaaaaaggaattttagagattgattgttttaaaaaaaaatacgcacattgtccaatccagtgattttaatcatacagtttgactgggcaaactttacagctgatagtgaatattttgctttatacaggaattgacactgatttggatttgtgcactctaatttttaacttattgatgctctattgtgcagtagcatttcatttaagataaggctcatatagtattacccaactagttggtaatgtgattatgtggtaccttggctttaggttttcattcgcacggaacaccttttggcatgcttaacttcctggtaacaccttcacctgcattggttttctttttcttttttctttctttttttttttttttttttttttgagttgttgtttgtttttagatccacagtacatgagaatccttttttgacaagccttggaaagctgacactgtctctttttcctccctctatacgaaggatgtatttaaatgaatgctggtcagtgggacattttgtcaactatgggtattgggtgcttaactgtctaatattgccatgtgaatgttgtatacgattgtaaggcttatgtcactaaagatttttattctgattttttcataatcaaaggtcatatgatactgtatagacaagctttgtagtgaagtatagtagcaataatttctgtacctgatcaagtttattgcagcctttcttttcctatttcttttttttaagggttagtattaacaaatggcaatgagtagaaaagttaacatgaagattttagaaggagagaacttacaggacacagatttgtgattctttgactgtgacactattggatgtgattctaaaagcttttattgagcattgtcaaatttgtaagcttcatagggatggacatcatatctataatgcccttctatatgtgctaccatagatgtgacatttttgaccttaatatcgtctttgaaaatgttaaattgagaaacctgttaacttacattttatgaattggcacattgtattacttactgcaagagatatttcattttcagcacagtgcaaaagttctttaaaatgcatatgtctttttttctaattccgttttgttttaaagcacattttaaatgtagttttctcatttagtaaaagttgtctaattgatatgaagcctgactgattttttttttccttacagtgagacatttaagcacacattttattcacatagatactatgtccttgacatattgaaatgattcttttctgaaagtattcatgatctgcatatgatgtattaggttaggtcacaaaggttttatctgaggtgatttaaataacttcctgattggagtgtgtaagctgagcgatttctaataaaattttagttgtacacttttagtagtcatagtgaagcaggtctagaaaataagcctttggcagggaaaaagggcaatgttgattaatctcagtattaaaccacattaatctgtatcccattgtctggcttttgtaaattcatccaggtcaagactaagtatgttggttaataggaatccttttttttttttttaaagactaaatgtgaaaaaataatcactacttaagctaattaatattggtcattaaatttaaaggatggaaatttatcatgtttaaaaattattcaagcactcttaaaaccacttaaacagcctccagtcataaaaatgtgttctttacaaatatttgcttggcaacacgacttgaaataaataaaactttgtttcttaggagaaaatgattctgt

SEQ ID NO: 7656 - protein, 327 aa, Homo sapiens; identical to SEQ ID NO: 492

SEQ ID NO: 7657 - DNA, 2846 bp, Homo sapiens
gcgggtggggccgtcggcggcgctggtgagctttgcggagctgggcggtgccgaggaggaggaggtggcggcctgggtctgacgcggccctgttcgagggggcctctcttgtttatttatttattttccgtgggtgcctccgagtgtgcgcgcgctctcgctacccggcggggagggggtggggggagggcccgggaaaagggggagttggagccggggtcgaaacgccgcgtgacttgtaggtgagagaacgccgagccgtcgccgcagcctccgccgccgagaagcccttgttcccgctgctgggaaggagagtctgtgccgacaagatggcggacggggagctgaacgtggacagcctcatcacccggctgctggagagatattgaaaccatctgaaaagaaagctaaataccagtatggtggactgaattctggacgtcctgtcactccacctcgaacagctaatccgccgaagaaaaggtgaagaaaggaattctgtaaagaaaccatcagatttgttaaggacatacttcataatatataagtgtgcactgtaaaaccatccagccatttgacaccctttatgatgtcacacctttaacttaaggagacgggtaaaggatcttaaatttttttctaatagaaagatgtgctacactgtattgtaataagtatactctgttatagtcaacaaagttaaatccaaattcaaaattatccattaaagttacatcttcatgtatcacaatttttaaagttgaaaagcatcccagttaaactagatgtgatagttaaaccagatgaaagcatgatgatccatctgtgtaatgtggttttagtgttgcttggttgtttaattattttgagcttgttttgtttttgtttgttttcactagaataatggcaaatacttctaatttttttccctaaacatttttaaaagtgaaatatgggaagagctttacagacattcaccaactattattttcccttgtttatctacttagatatctgtttaatcttactaagaaaactttcgcctcattacattaaaaaggaattttagagattgattgttttaaaaaaaaatacgcacattgtccaatccagtgattttaatcatacagtttgactgggcaaactttacagctgatagtgaatattttgctttatacaggaattgacactgatttggatttgtgcactctaatttttaacttattgatgctctattgtgcagtagcatttcatttaagataaggctcatatagtattacccaactagttggtaatgtgattatgtggtaccttggctttaggttttcattcgcacggaacaccttttggcatgcttaacttcctggtaacaccttcacctgcattggttttctttttcttttttctttctttttttttttttttttttttttgagttgttgtttgtttttagatccacagtacatgagaatccttttttgacaagccttggaaagctgacactgtctctttttcctccctctatacgaaggatgtatttaaatgaatgctggtcagtgggacattttgtcaactatgggtattgggtgcttaactgtctaatattgccatgtgaatgttgtatacgattgtaaggcttatgtcactaaagatttttattctgattttttcataatcaaaggtcatatgatactgtatagacaagctttgtagtgaagtatagtagcaataatttctgtacctgatcaagtttattgcagcctttcttttcctatttcttttttttaagggttagtattaacaaatggcaatgagtagaaaagttaacatgaagattttagaaggagagaacttacaggacacagatttgtgattctttgactgtgacactattggatgtgattctaaaagcttttattgagcattgtcaaatttgtaagcttcatagggatggacatcatatctataatgcccttctatatgtgctaccatagatgtgacatttttgaccttaatatcgtctttgaaaatgttaaattgagaaacctgttaacttacattttatgaattggcacattgtattacttactgcaagagatatttcattttcagcacagtgcaaaagttctttaaaatgcatatgtctttttttctaattccgttttgttttaaagcacattttaaatgtagttttctcatttagtaaaagttgtctaattgatatgaagcctgactgattttttttttccttacagtgagacatttaagcacacattttattcacatagatactatgtccttgacatattgaaatgattcttttctgaaagtattcatgatctgcatatgatgtattaggttaggtcacaaaggttttatctgaggtgatttaaataacttcctgattggagtgtgtaagctgagcgatttctaataaaattttagttgtacacttttagtagtcatagtgaagcaggtctagaaaataagcctttggcagggaaaaagggcaatgttgattaatctcagtattaaaccacattaatctgtatcccattgtctggcttttgtaaattcatccaggtcaagactaagtatgttggttaataggaatccttttttttttttttaaagactaaatgtgaaaaaataatcactacttaagctaattaatattggtcattaaatttaaaggatggaaatttatcatgtttaaaaattattcaagcactcttaaaaccacttaaacagcctccagtcataaaaatgtgttctttacaaatatttgcttggcaacacgacttgaaataaataaaactttgtttcttaggagaaaatgattctgt

SEQ ID NO: 7658 - protein, 38 aa, Homo sapiens
MDIISIMPFYMCYHRCDIFDLNIVFENVKLRNLLTYIL

SEQ ID NO: 7659 - DNA, 4810 bp, Homo sapiens
gcgggtggggccgtcggcggcgctggtgagctttgcggagctgggcggtgccgaggaggaggaggtggcggcctgggtctgacgcggccctgttcgagggggcctctcttgtttatttatttattttccgtgggtgcctccgagtgtgcgcgcgctctcgctacccggcggggagggggtggggggagggcccgggaaaagggggagttggagccggggtcgaaacgccgcgtgacttgtaggtgagagaacgccgagccgtcgccgcagcctccgccgccgagaagcccttgttcccgctgctgggaaggagagtctgtgccgacaagatggcggacggggagctgaacgtggacagcctcatcacccggctgctggaggtacgaggatgtcgtccaggaaagattgtgcagatgactgaagcagaagttcgaggcttatgtatcaagtctcgggagatctttctcagccagcctattcttttggaattggaagcaccgctgaaaatttgtggagatattcatggacaatatacagatttactgagattatttgaatatggaggtttcccaccagaagccaactatcttttcttaggagattatgtggacagaggaaagcagtctttggaaaccatttgtttgctattggcttataaaatcaaatatccagagaacttctttctcttaagaggaaaccatgagtgtgctagcatcaatcgcatttatggattctatgatgaatgcaaacgaagatttaatattaaattgtggaagaccttcactgattgttttaactgtctgcctatagcagccattgtggatgagaagatcttctgttgtcatggaggattgtcaccagacctgcaatctatggagcagattcggagaattatgagacctactgatgtccctgatacaggtttgctctgtgatttgctatggtctgatccagataaggatgtgcaaggctggggagaaaatgatcgtggtgtttcctttacttttggagctgatgtagtcagtaaatttctgaatcgtcatgatttagatttgatttgtcgagctcatcaggtggtggaagatggatatgaattttttgctaaacgacagttggtaaccttattttcagccccaaattactgtggcgagtttgataatgctggtggaatgatgagtgtggatgaaactttgatgtgttcatttcagatattgaaaccatctgaaaagaaagctaaataccagtatggtggactgaattctggacgtcctgtcactccacctcgaacagctaatccgccgaagaaaaggtgaagaaaggaattctgtaaagaaaccatcagatttgttaaggacatacttcataatatataagtgtgcactgtaaaaccatccagccatttgacaccctttatgatgtcacacctttaacttaaggagacgggtaaaggatcttaaatttttttctaatagaaagatgtgctacactgtattgtaataagtatactctgttatagtcaacaaagttaaatccaaattcaaaattatccattaaagttacatcttcatgtatcacaatttttaaagttgaaaagcatcccagttaaactagatgtgatagttaaaccagatgaaagcatgatgatccatctgtgtaatgtggttttagtgttgcttggttgtttaattattttgagcttgttttgtttttgtttgttttcactagaataatggcaaatacttctaatttttttccctaaacatttttaaaagtgaaatatgggaagagctttacagacattcaccaactattattttcccttgtttatctacttagatatctgtttaatcttactaagaaaactttcgcctcattacattaaaaaggaattttagagattgattgttttaaaaaaaaatacgcacattgtccaatccagtgattttaatcatacagtttgactgggcaaactttacagctgatagtgaatattttgctttatacaggaattgacactgatttggatttgtgcactctaatttttaacttattgatgctctattgtgcagtagcatttcatttaagataaggctcatatagtattacccaactagttggtaatgtgattatgtggtaccttggctttaggttttcattcgcacggaacaccttttggcatgcttaacttcctggtaacaccttcacctgcattggttttctttttcttttttctttctttttttttttttttttttttttgagttgttgtttgtttttagatccacagtacatgagaatccttttttgacaagccttggaaagctgacactgtctctttttcctccctctatacgaaggatgtatttaaatgaatgctggtcagtgggacattttgtcaactatgggtattgggtgcttaactgtctaatattgccatgtgaatgttgtatacgattgtaaggcttatgtcactaaagatttttattctgattttttcataatcaaaggtcatatgatactgtatagacaagctttgtagtgaagtatagtagcaataatttctgtacctgatcaagtttattgcagcctttcttttcctatttcttttttttaagggttagtattaacaaatggcaatgagtagaaaagttaacatgaagattttagaaggagagaacttacaggacacagatttgtgattctttgactgtgacactattggatgtgattctaaaagcttttattgagcattgtcaaatttgtaagcttcatagggatggacatcatatctataatgcccttctatatgtgctaccatagatgtgacatttttgaccttaatatcgtctttgaaaatgttaaattgagaaacctgttaacttacattttatgaattggcacattgtattacttactgcaagagatatttcattttcagcacagtgcaaaagttctttaaaatgcatatgtctttttttctaattccgttttgttttaaagcacattttaaatgtagttttctcatttagtaaaagttgtctaattgatatgaagcctgactgattttttttttccttacagtgagacatttaagcacacattttattcacatagatactatgtccttgacatattgaaatgattcttttctgaaagtattcatgatctgcatatgatgtattaggttaggtcacaaaggttttatctgaggtgatttaaataacttcctgattggagtgtgtaagctgagcgatttctaataaaattttagttgtacacttttagtagtcatagtgaagcaggtctagaaaataagcctttggcagggaaaaagggcaatgttgattaatctcagtattaaaccacattaatctgtatcccattgtctggcttttgtaaattcatccaggtcaagactaagtatgttggttaataggaatccttttttttttttttaaagactaaatgtgaaaaaataatcactacttaagctaattaatattggtcattaaatttaaaggatggaaatttatcatgtttaaaaattattcaagcactcttaaaaccacttaaacagcctccagtcataaaaatgtgttctttacaaatatttgcttggcaacacgacttgaaataaataaaactttgtttcttaggagaaaatgattctgtaattccagtgtcactaatttatattgttctttcctctgatttttttcaggttagtgatttttttgtatacaatttaatccaaatgttatgacattcagaaatcatgaaacacagtagatatctgttataatgtggtgtatcacatggattataaagcaaagttatggtcgatttctattcttgaaagaatcaactacagtgaatcctttgcatttgaagccttaacatgcattgctttaattttgcccagggacaaattttaataatcagcaagactggtttgtgcaaagcgttgagtcatcaggtatttagagcctagccagctacccagtatccatgctgccatatcccttcattgtaaaaagtacctaaacattcgtgaaatgattttttttagctgaaaaatgctggcaagaagaattttaaagcttaaaataggtggtaaatttgaagtatgagtgtgttcacgagaaacataggcttttcaaaaaaatttttattcaaggcaaagcaaggaacatcttgagatatgtctcaagaatataaagatgtattattttaagccaaggagctgaaatatatctcagtttataaattcaggtatattctttttgtctccatggcaaccataacttttgaaccaaaaaaaattgtttttacatctttatgctgaaaatgtgtttagattaggaatatggtcgggctgaatttgctgttgctccctaaccaaatccacctcttgttttccttgtgagtccatggctaaatcaaagctgcccctgagaagagacttaatccaagcctgattgtactagtggcatcacttagaagtaggctttccctcttcctagtagatctcaatgttttataattccttaaaacagctgaaaattgggacaacatactttacgcaatgaacagtagttaaataggaaataaactagttccatataagtatacacctagagttttaattacctttataatgtttcttaaaagtgaaacttagatacaattgtgattggatacttagatactaagtgaaacttagtgtaacaattttgatctgttaaattggattttacatgtacatttgaatgccagaatttctaaataaatcccctggttaggaaatttt

SEQ ID NO: 7660 - protein, 327 aa, Homo sapiens; identical to SEQ ID NO: 492

SEQ ID NO: 7661 - DNA, 3541 bp, Homo sapiens
ggcgctggtgagctttgcggagctgggcggtgccgaggaggaggaggtggcggcctgggtctgacgcggccctgttcgagggggcctctcttgtttatttatttattttccgtgagagaacgccgagccgtcgccgcagcctccgccgccgagaagcccttgttcccgctgctgggaaggagagtctgtgccgacaagatggcggacggggagctgaacgtggacagcctcatcacccggctgctggaggtacgaggatgtcgtccaggaaagattgtgcagatgactgaagcagaagttcgaggcttatgtatcaagtctcgggagatctttctcagccagcctattcttttggaattggaagcaccgctgaaaatttgtggagatattcatggacaatatacagatttactgagattatttgaatatggaggtttcccaccagaagccaactatcttttcttaggagattatgtggacagaggaaagcagtctttggaaaccatttgtttgctattggcttataaaatcaaatatccagagaacttctttctcttaagaggaaaccatgagtgtgctagcatcaatcgcatttatggattctatgatgaatgcaaacgaagatttaatattaaattgtggaagaccttcactgattgttttaactgtctgcctatagcagccattgtggatgagaagatcttctgttgtcatggaggattgtcaccagacctgcaatctatggagcagattcggagaattatgagacctactgatgtccctgatacaggtttgctctgtgatttgctatggtctgatccagataaggatgtgcaaggctggggagaaaatgatcgtggtgtttcctttacttttggagctgatgtagtcagtaaatttctgaatcgtcatgatttagatttgatttgtcgagctcatcaggtggtggaagatggatatgaattttttgctaaacgacagttggtaaccttattttcagccccaaattactgtggcgagtttgataatgctggtggaatgatgagtgtggatgaaactttgatgtgttcatttcagatattgaaaccatctgaaaagaaagctaaataccagtatggtggactgaattctggacgtcctgtcactccacctcgaacagctaatccgccgaagaaaaggtgaagaaaggaattctgtaaagaaaccatcagatttgttaaggacatacttcataatatataagtgtgcactgtaaaaccatccagccatttgacaccctttatgatgtcacacctttaacttaaggagacgggtaaaggatcttaaatttttttctaatagaaagatgtgctacactgtattgtaataagtatactctgttatagtcaacaaagttaaatccaaattcaaaattatccattaaagttacatcttcatgtatcacaatttttaaagttgaaaagcatcccagttaaactagatgtgatagttaaaccagatgaaagcatgatgatccatctgtgtaatgtggttttagtgttgcttggttgtttaattattttgagcttgttttgtttttgtttgttttcactagaataatggcaaatacttctaatttttttccctaaacatttttaaaagtgaaatatgggaagagctttacagacattcaccaactattattttcccttgtttatctacttagatatctgtttaatcttactaagaaaactttcgcctcattacattaaaaaggaattttagagattgattgttttaaaaaaaaatacgcacattgtccaatccagtgattttaatcatacagtttgactgggcaaactttacagctgatagtgaatattttgctttatacaggaattgacactgatttggatttgtgcactctaatttttaacttattgatgctctattgtgcagtagcatttcatttaagataaggctcatatagtattacccaactagttggtaatgtgattatgtggtaccttggctttaggttttcattcgcacggaacaccttttggcatgcttaacttcctggtaacaccttcacctgcattggttttctttttcttttttctttctttttttttttttttttttttttgagttgttgtttgtttttagatccacagtacatgagaatccttttttgacaagccttggaaagctgacactgtctctttttcctccctctatacgaaggatgtatttaaatgaatgctggtcagtgggacattttgtcaactatgggtattgggtgcttaactgtctaatattgccatgtgaatgttgtatacgattgtaaggcttatgtcactaaagatttttattctgattttttcataatcaaaggtcatatgatactgtatagacaagctttgtagtgaagtatagtagcaataatttctgtacctgatcaagtttattgcagcctttcttttcctatttcttttttttaagggttagtattaacaaatggcaatgagtagaaaagttaacatgaagattttagaaggagagaacttacaggacacagatttgtgattctttgactgtgacactattggatgtgattctaaaagcttttattgagcattgtcaaatttgtaagcttcatagggatggacatcatatctataatgcccttctatatgtgctaccatagatgtgacatttttgaccttaatatcgtctttgaaaatgttaaattgagaaacctgttaacttacattttatgaattggcacattgtattacttactgcaagagatatttcattttcagcacagtgcaaaagttctttaaaatgcatatgtctttttttctaattccgttttgttttaaagcacattttaaatgtagttttctcatttagtaaaagttgtctaattgatatgaagcctgactgattttttttttccttacagtgagacatttaagcacacattttattcacatagatactatgtccttgacatattgaaatgattcttttctgaaagtattcatgatctgcatatgatgtattaggttaggtcacaaaggttttatctgaggtgatttaaataacttcctgattggagtgtgtaagctgagcgatttctaataaaattttagttgtacacttttagtagtcatagtgaagcaggtctagaaaataagcctttggcagggaaaaagggcaatgttgattaatctcagtattaaaccacattaatctgtatcccattgtctggcttttgtaaattcatccaggtcaagactaagtatgttggttaataggaatccttttttttttttttaaagactaaatgtgaaaaaataatcactacttaagctaattaatattggtcattaaatttaaaggatggaaatttatcatgtttaaaaattattcaagcactcttaaaaccacttaaacagcctccagtcataaaaatgtgttctttacaaatatttgcttggcaacacgacttgaaataaataaaactttgtttcttaggagaaaatgattctgt

SEQ ID NO: 7662 - protein, 327 aa, Homo sapiens; identical to SEQ ID NO: 492

SEQ ID NO: 7663 - DNA, 938 bp, Homo sapiens
gggcggtgccgaggaggaggaggtggcggcctgggtgagagaacgccgagccgtcgccgcagcctccgccgccgagaagcccttgttcccgctgctgggaaggagagtctgtgccgacaagatggcggacggggagctgaacgtggacagcctcatcacccggcttgtctgcctatagcagccattgtggatgagaagatcttctgttgtcatggaggattgtcaccagacctgcaatctatggagcagattcggagaattatgagacctactgatgtccctgatacaggtttgctctgtgatttgctatggtctgatccagataaggatgtgcaaggctggggagaaaatgatcgtggtgtttcctttacttttggagctgatgtagtcagtaaatttctgaatcgtcatgatttagatttgatttgtcgagctcatcaggtggtggaagatggatatgaattttttgctaaacgacagttggtaaccttattttcagccccaaattactgtggcgagtttgataatgctggtggaatgatgagtgtggatgaaactttgatgtgttcatttcagatattgaaaccatctgaaaagaaagctaaataccagtatggtggactgaattctggacgtcctgtcactccacctcgaacagctaatccgccgaagaaaaggtgaagaaaggaattctgtaaagaaaccatcagatttgttaaggacatacttcataatatataagtgtgcactgtaaaaccatccagccatttgacaccctttatgatgtcacacctttaacttaaggagacgggtaaaggatcttaaatttttttctaatagaaagatgtgctacactgtattgtaataagtatactctgttatagtcaacaaagttaaatccaaattcaaaattatccattaaagttacatcttcatgt

SEQ ID NO: 7664 - protein, 146 aa, Homo sapiens
MEQIRRIMRPTDVPDTGLLCDLLWSDPDKDVQGWGENDRGVSFTFGADVVSKFLNRHDLDLICRAHQVVEDGYEFFAKRQLVTLFSAPNYCGEFDNAGGMMSVDETLMCSFQILKPSEKKAKYQYGGLNSGRPVTPPRTANPPKKR

SEQ ID NO: 7665 - DNA, 2419 bp, Homo sapiens
gggcggtgccgaggaggaggaggtggcggcctgggtgagagaacgccgagccgtcgccgcagcctccgccgccgagaagcccttgttcccgctgctgggaaggagagtctgtgccgacaagatggcggacggggagctgaacgtggacagcctcatcacccggcttgtctgcctatagcagccattgtggatgagaagatcttctgttgtcatggaggattgtcaccagacctgcaatctatggagcagattcggagaattatgagacctactgatgtccctgatacaggtttgctctgtgatttgctatggtctgatccagataaggatgtgcaaggctggggagaaaatgatcgtggtgtttcctttacttttggagctgatgtagtcagtaaatttctgaatcgtcatgatttagatttgatttgtcgagctcatcaggtggtggaagatggatatgaattttttgctaaacgacagttggtaaccttattttcagccccaaattactgtggcgagtttgataatgctggtggaatgatgagtgtggatgaaactttgatgtgttcatttcagatattgaaaccatctgaaaagaaagctaaataccagtatggtggactgaattctggacgtcctgtcactccacctcgaacagctaatccgccgaagaaaaggtgaagaaaggaattctgtaaagaaaccatcagatttgttaaggacatacttcataatatataagtgtgcactgtaaaaccatccagccatttgacaccctttatgatgtcacacctttaacttaaggagacgggtaaaggatcttaaatttttttctaatagaaagatgtgctacactgtattgtaataagtatactctgttatagtcaacaaagttaaatccaaattcaaaattatccattaaagttacatcttcatgtatcacaatttttaaagttgaaaagcatcccagttaaactagatgtgatagttaaaccagatgaaagcatgatgatccatctgtgtaatgtggttttagtgttgcttggttgtttaattattttgagcttgttttgtttttgtttgttttcactagaataatggcaaatacttctaatttttttccctaaacatttttaaaagtgaaatatgggaagagctttacagacattcaccaactattattttcccttgtttatctacttagatatctgtttaatcttactaagaaaactttcgcctcattacattaaaaaggaattttagagattgattgttttaaaaaaaaatacgcacattgtccaatccagtgattttaatcatacagtttgactgggcaaactttacagctgatagtgaatattttgctttatacaggaattgacactgatttggatttgtgcactctaatttttaacttattgatgctctattgtgcagtagcatttcatttaagataaggctcatatagtattacccaactagttggtaatgtgattatgtggtaccttggctttaggttttcattcgcacggaacaccttttggcatgcttaacttcctggtaacaccttcacctgcattggttttctttttcttttttctttctttttttttttttttttttttttgagttgttgtttgtttttagatccacagtacatgagaatccttttttgacaagccttggaaagctgacactgtctctttttcctccctctatacgaaggatgtatttaaatgaatgctggtcagtgggacattttgtcaactatgggtattgggtgcttaactgtctaatattgccatgtgaatgttgtatacgattgtaaggcttatgtcactaaagatttttattctgattttttcataatcaaaggtcatatgatactgtatagacaagctttgtagtgaagtatagtagcaataatttctgtacctgatcaagtttattgcagcctttcttttcctatttcttttttttaagggttagtattaacaaatggcaatgagtagaaaagttaacatgaagattttagaaggagagaacttacaggacacagatttgtgattctttgactgtgacactattggatgtgattctaaaagcttttattgagcattgtcaaatttgtaagcttcatagggatggacatcatatctataatgcccttctatatgtgctaccatagatgtgacatttttgaccttaatatcgtctttgaaaatgttaaattgagaaacctgttaacttacattttatgaattggcacattgtattacttactgcaagagatatttcattttcagcacagtgcaaaagttctttaaaatgcatatgtctttttttctaattccgttttgttttaaagcacattttaaatgtagttttctcatttagtaaaagttgtctaattgatatg

SEQ ID NO: 7666 - protein, 146 aa, Homo sapiens; identical to SEQ ID NO: 7664

SEQ ID NO: 7667 - DNA, 3040 bp, Homo sapiens
gggcggtgccgaggaggaggaggtggcggcctgggtgagagaacgccgagccgtcgccgcagcctccgccgccgagaagcccttgttcccgctgctgggaaggagagtctgtgccgacaagatggcggacggggagctgaacgtggacagcctcatcacccggcttgtctgcctatagcagccattgtggatgagaagatcttctgttgtcatggaggattgtcaccagacctgcaatctatggagcagattcggagaattatgagacctactgatgtccctgatacaggtttgctctgtgatttgctatggtctgatccagataaggatgtgcaaggctggggagaaaatgatcgtggtgtttcctttacttttggagctgatgtagtcagtaaatttctgaatcgtcatgatttagatttgatttgtcgagctcatcaggtggtggaagatggatatgaattttttgctaaacgacagttggtaaccttattttcagccccaaattactgtggcgagtttgataatgctggtggaatgatgagtgtggatgaaactttgatgtgttcatttcagatattgaaaccatctgaaaagaaagctaaataccagtatggtggactgaattctggacgtcctgtcactccacctcgaacagctaatccgccgaagaaaaggtgaagaaaggaattctgtaaagaaaccatcagatttgttaaggacatacttcataatatataagtgtgcactgtaaaaccatccagccatttgacaccctttatgatgtcacacctttaacttaaggagacgggtaaaggatcttaaatttttttctaatagaaagatgtgctacactgtattgtaataagtatactctgttatagtcaacaaagttaaatccaaattcaaaattatccattaaagttacatcttcatgtatcacaatttttaaagttgaaaagcatcccagttaaactagatgtgatagttaaaccagatgaaagcatgatgatccatctgtgtaatgtggttttagtgttgcttggttgtttaattattttgagcttgttttgtttttgtttgttttcactagaataatggcaaatacttctaatttttttccctaaacatttttaaaagtgaaatatgggaagagctttacagacattcaccaactattattttcccttgtttatctacttagatatctgtttaatcttactaagaaaactttcgcctcattacattaaaaaggaattttagagattgattgttttaaaaaaaaatacgcacattgtccaatccagtgattttaatcatacagtttgactgggcaaactttacagctgatagtgaatattttgctttatacaggaattgacactgatttggatttgtgcactctaatttttaacttattgatgctctattgtgcagtagcatttcatttaagataaggctcatatagtattacccaactagttggtaatgtgattatgtggtaccttggctttaggttttcattcgcacggaacaccttttggcatgcttaacttcctggtaacaccttcacctgcattggttttctttttcttttttctttctttttttttttttttttttttttgagttgttgtttgtttttagatccacagtacatgagaatccttttttgacaagccttggaaagctgacactgtctctttttcctccctctatacgaaggatgtatttaaatgaatgctggtcagtgggacattttgtcaactatgggtattgggtgcttaactgtctaatattgccatgtgaatgttgtatacgattgtaaggcttatgtcactaaagatttttattctgattttttcataatcaaaggtcatatgatactgtatagacaagctttgtagtgaagtatagtagcaataatttctgtacctgatcaagtttattgcagcctttcttttcctatttcttttttttaagggttagtattaacaaatggcaatgagtagaaaagttaacatgaagattttagaaggagagaacttacaggacacagatttgtgattctttgactgtgacactattggatgtgattctaaaagcttttattgagcattgtcaaatttgtaagcttcatagggatggacatcatatctataatgcccttctatatgtgctaccatagatgtgacatttttgaccttaatatcgtctttgaaaatgttaaattgagaaacctgttaacttacattttatgaattggcacattgtattacttactgcaagagatatttcattttcagcacagtgcaaaagttctttaaaatgcatatgtctttttttctaattccgttttgttttaaagcacattttaaatgtagttttctcatttagtaaaagttgtctaattgatatgaagcctgactgattttttttttccttacagtgagacatttaagcacacattttattcacatagatactatgtccttgacatattgaaatgattcttttctgaaagtattcatgatctgcatatgatgtattaggttaggtcacaaaggttttatctgaggtgatttaaataacttcctgattggagtgtgtaagctgagcgatttctaataaaattttagttgtacacttttagtagtcatagtgaagcaggtctagaaaataagcctttggcagggaaaaagggcaatgttgattaatctcagtattaaaccacattaatctgtatcccattgtctggcttttgtaaattcatccaggtcaagactaagtatgttggttaataggaatccttttttttttttttaaagactaaatgtgaaaaaataatcactacttaagctaattaatattggtcattaaatttaaaggatggaaatttatcatgtttaaaaattattcaagcactcttaaaaccacttaaacagcctccagtcataaaaatgtgttctttacaaatatttgcttggcaacacgacttgaaataaataaaactttgtttcttaggagaaaatgattctgt

SEQ ID NO: 7668 - protein, 146 aa, Homo sapiens; identical to SEQ ID NO: 7664

SEQ ID NO: 7669 - DNA, 4178 bp, Homo sapiens
gggcggtgccgaggaggaggaggtggcggcctgggtgagagaacgccgagccgtcgccgcagcctccgccgccgagaagcccttgttcccgctgctgggaaggagagtctgtgccgacaagatggcggacggggagctgaacgtggacagcctcatcacccggcttgtctgcctatagcagccattgtggatgagaagatcttctgttgtcatggaggattgtcaccagacctgcaatctatggagcagattcggagaattatgagacctactgatgtccctgatacaggtttgctctgtgatttgctatggtctgatccagataaggatgtgcaaggctggggagaaaatgatcgtggtgtttcctttacttttggagctgatgtagtcagtaaatttctgaatcgtcatgatttagatttgatttgtcgagctcatcaggtggtggaagatggatatgaattttttgctaaacgacagttggtaaccttattttcagccccaaattactgtggcgagtttgataatgctggtggaatgatgagtgtggatgaaactttgatgtgttcatttcagatattgaaaccatctgaaaagaaagctaaataccagtatggtggactgaattctggacgtcctgtcactccacctcgaacagctaatccgccgaagaaaaggtgaagaaaggaattctgtaaagaaaccatcagatttgttaaggacatacttcataatatataagtgtgcactgtaaaaccatccagccatttgacaccctttatgatgtcacacctttaacttaaggagacgggtaaaggatcttaaatttttttctaatagaaagatgtgctacactgtattgtaataagtatactctgttatagtcaacaaagttaaatccaaattcaaaattatccattaaagttacatcttcatgtatcacaatttttaaagttgaaaagcatcccagttaaactagatgtgatagttaaaccagatgaaagcatgatgatccatctgtgtaatgtggttttagtgttgcttggttgtttaattattttgagcttgttttgtttttgtttgttttcactagaataatggcaaatacttctaatttttttccctaaacatttttaaaagtgaaatatgggaagagctttacagacattcaccaactattattttcccttgtttatctacttagatatctgtttaatcttactaagaaaactttcgcctcattacattaaaaaggaattttagagattgattgttttaaaaaaaaatacgcacattgtccaatccagtgattttaatcatacagtttgactgggcaaactttacagctgatagtgaatattttgctttatacaggaattgacactgatttggatttgtgcactctaatttttaacttattgatgctctattgtgcagtagcatttcatttaagataaggctcatatagtattacccaactagttggtaatgtgattatgtggtaccttggctttaggttttcattcgcacggaacaccttttggcatgcttaacttcctggtaacaccttcacctgcattggttttctttttcttttttctttctttttttttttttttttttttttgagttgttgtttgtttttagatccacagtacatgagaatccttttttgacaagccttggaaagctgacactgtctctttttcctccctctatacgaaggatgtatttaaatgaatgctggtcagtgggacattttgtcaactatgggtattgggtgcttaactgtctaatattgccatgtgaatgttgtatacgattgtaaggcttatgtcactaaagatttttattctgattttttcataatcaaaggtcatatgatactgtatagacaagctttgtagtgaagtatagtagcaataatttctgtacctgatcaagtttattgcagcctttcttttcctatttcttttttttaagggttagtattaacaaatggcaatgagtagaaaagttaacatgaagattttagaaggagagaacttacaggacacagatttgtgattctttgactgtgacactattggatgtgattctaaaagcttttattgagcattgtcaaatttgtaagcttcatagggatggacatcatatctataatgcccttctatatgtgctaccatagatgtgacatttttgaccttaatatcgtctttgaaaatgttaaattgagaaacctgttaacttacattttatgaattggcacattgtattacttactgcaagagatatttcattttcagcacagtgcaaaagttctttaaaatgcatatgtctttttttctaattccgttttgttttaaagcacattttaaatgtagttttctcatttagtaaaagttgtctaattgatatgaagcctgactgattttttttttccttacagtgagacatttaagcacacattttattcacatagatactatgtccttgacatattgaaatgattcttttctgaaagtattcatgatctgcatatgatgtattaggttaggtcacaaaggttttatctgaggtgatttaaataacttcctgattggagtgtgtaagctgagcgatttctaataaaattttagttgtacacttttagtagtcatagtgaagcaggtctagaaaataagcctttggcagggaaaaagggcaatgttgattaatctcagtattaaaccacattaatctgtatcccattgtctggcttttgtaaattcatccaggtcaagactaagtatgttggttaataggaatccttttttttttttttaaagactaaatgtgaaaaaataatcactacttaagctaattaatattggtcattaaatttaaaggatggaaatttatcatgtttaaaaattattcaagcactcttaaaaccacttaaacagcctccagtcataaaaatgtgttctttacaaatatttgcttggcaacacgacttgaaataaataaaactttgtttcttaggagaaaatgattctgtaattccagtgtcactaatttatattgttctttcctctgatttttttcaggttagtgatttttttgtatacaatttaatccaaatgttatgacattcagaaatcatgaaacacagtagatatctgttataatgtggtgtatcacatggattataaagcaaagttatggtcgatttctattcttgaaagaatcaactacagtgaatcctttgcatttgaagccttaacatgcattgctttaattttgcccagggacaaattttaataatcagcaagactggtttgtgcaaagcgttgagtcatcaggtatttagagcctagccagctacccagtatccatgctgccatatcccttcattgtaaaaagtacctaaacattcgtgaaatgattttttttagctgaaaaatgctggcaagaagaattttaaagcttaaaataggtggtaaatttgaagtatgagtgtgttcacgagaaacataggcttttcaaaaaaatttttattcaaggcaaagcaaggaacatcttgagatatgtctcaagaatataaagatgtattattttaagccaaggagctgaaatatatctcagtttataaattcaggtatattctttttgtctccatggcaaccataacttttgaaccaaaaaaaattgtttttacatctttatgctgaaaatgtgtttagattaggaatatggtcgggctgaatttgctgttgctccctaaccaaatccacctcttgttttccttgtgagtccatggctaaatcaaagctgcccctgagaagagacttaatccaagcctgattgtactagtggcatcacttagaagtaggctttccctcttcctagtagatctcaatgttttataattccttaaaacagctgaaaattgggacaacatactttacgcaatgaacagtagttaaataggaaataaactagttccatataagtatacacctagagttttaattacctttataatgtttcttaaaagtgaaacttagatacaattgtgattggatacttagatactaagtgaaacttagtgtaacaattttgatctgttaaattggattttacatgtacatttgaatgccagaatttctaaataaatcccctggttaggaaatttt

SEQ ID NO: 7670 - protein, 146 aa, Homo sapiens; identical to SEQ ID NO: 7664

SEQ ID NO: 7671 - DNA, 4322 bp, Homo sapiens
gggcggtgccgaggaggaggaggtggcggcctgggtgagagaacgccgagccgtcgccgcagcctccgccgccgagaagcccttgttcccgctgctgggaaggagagtctgtgccgacaagatggcggacggggagctgaacgtggacagcctcatcacccggcttgtctgcctatagcagccattgtggatgagaagatcttctgttgtcatggaggattgtcaccagacctgcaatctatggagcagattcggagaattatgagacctactgatgtccctgatacaggtttgctctgtgatttgctatggtctgatccagataaggatgtgcaaggctggggagaaaatgatcgtggtgtttcctttacttttggagctgatgtagtcagtaaatttctgaatcgtcatgatttagatttgatttgtcgagctcatcaggtggtggaagatggatatgaattttttgctaaacgacagttggtaaccttattttcagccccaaattactgtggcgagtttgataatgctggtggaatgatgagtgtggatgaaactttgatgtgttcatttcagatattgaaaccatctgaaaagaaagctaaataccagtatggtggactgaattctggacgtcctgtcactccacctcgaacagctaatccgccgaagaaaaggtgaagaaaggaattctgtaaagaaaccatcagatttgttaaggacatacttcataatatataagtgtgcactgtaaaaccatccagccatttgacaccctttatgatgtcacacctttaacttaaggagacgggtaaaggatcttaaatttttttctaatagaaagatgtgctacactgtattgtaataagtatactctgttatagtcaacaaagttaaatccaaattcaaaattatccattaaagttacatcttcatgtatcacaatttttaaagttgaaaagcatcccagttaaactagatgtgatagttaaaccagatgaaagcatgatgatccatctgtgtaatgtggttttagtgttgcttggttgtttaattattttgagcttgttttgtttttgtttgttttcactagaataatggcaaatacttctaatttttttccctaaacatttttaaaagtgaaatatgggaagagctttacagacattcaccaactattattttcccttgtttatctacttagatatctgtttaatcttactaagaaaactttcgcctcattacattaaaaaggaattttagagattgattgttttaaaaaaaaatacgcacattgtccaatccagtgattttaatcatacagtttgactgggcaaactttacagctgatagtgaatattttgctttatacaggaattgacactgatttggatttgtgcactctaatttttaacttattgatgctctattgtgcagtagcatttcatttaagataaggctcatatagtattacccaactagttggtaatgtgattatgtggtaccttggctttaggttttcattcgcacggaacaccttttggcatgcttaacttcctggtaacaccttcacctgcattggttttctttttcttttttctttctttttttttttttttttttttttgagttgttgtttgtttttagatccacagtacatgagaatccttttttgacaagccttggaaagctgacactgtctctttttcctccctctatacgaaggatgtatttaaatgaatgctggtcagtgggacattttgtcaactatgggtattgggtgcttaactgtctaatattgccatgtgaatgttgtatacgattgtaaggcttatgtcactaaagatttttattctgattttttcataatcaaaggtcatatgatactgtatagacaagctttgtagtgaagtatagtagcaataatttctgtacctgatcaagtttattgcagcctttcttttcctatttcttttttttaagggttagtattaacaaatggcaatgagtagaaaagttaacatgaagattttagaaggagagaacttacaggacacagatttgtgattctttgactgtgacactattggatgtgattctaaaagcttttattgagcattgtcaaatttgtaagcttcatagggatggacatcatatctataatgcccttctatatgtgctaccatagatgtgacatttttgaccttaatatcgtctttgaaaatgttaaattgagaaacctgttaacttacattttatgaattggcacattgtattacttactgcaagagatatttcattttcagcacagtgcaaaagttctttaaaatgcatatgtctttttttctaattccgttttgttttaaagcacattttaaatgtagttttctcatttagtaaaagttgtctaattgatatgaagcctgactgattttttttttccttacagtgagacatttaagcacacattttattcacatagatactatgtccttgacatattgaaatgattcttttctgaaagtattcatgatctgcatatgatgtattaggttaggtcacaaaggttttatctgaggtgatttaaataacttcctgattggagtgtgtaagctgagcgatttctaataaaattttagttgtacacttttagtagtcatagtgaagcaggtctagaaaataagcctttggcagggaaaaagggcaatgttgattaatctcagtattaaaccacattaatctgtatcccattgtctggcttttgtaaattcatccaggtcaagactaagtatgttggttaataggaatccttttttttttttttaaagactaaatgtgaaaaaataatcactacttaagctaattaatattggtcattaaatttaaaggatggaaatttatcatgtttaaaaattattcaagcactcttaaaaccacttaaacagcctccagtcataaaaatgtgttctttacaaatatttgcttggcaacacgacttgaaataaataaaactttgtttcttaggagaaaatgattctgtaattccagtgtcactaatttatattgttctttcctctgatttttttcaggttagtgatttttttgtatacaatttaatccaaatgttatgacattcagaaatcatgaaacacagtagatatctgttataatgtggtgtatcacatggattataaagcaaagttatggtcgatttctattcttgaaagaatcaactacagtgaatcctttgcatttgaagccttaacatgcattgctttaattttgcccagggacaaattttaataatcagcaagactggtttgtgcaaagcgttgagtcatcaggtatttagagcctagccagctacccagtatccatgctgccatatcccttcattgtaaaaagtacctaaacattcgtgaaatgattttttttagctgaaaaatgctggcaagaagaattttaaagcttaaaataggtggtaaatttgaagtatgagtgtgttcacgagaaacataggcttttcaaaaaaatttttattcaaggcaaagcaaggaacatcttgagatatgtctcaagaatataaagatgtattattttaagccaaggagctgaaatatatctcagtttataaattcaggtatattctttttgtctccatggcaaccataacttttgaaccaaaaaaaattgtttttacatctttatgctgaaaatgtgtttagattaggaatatggtcgggctgaatttgctgttgctccctaaccaaatccacctcttgttttccttgtgagtccatggctaaatcaaagctgcccctgagaagagacttaatccaagcctgattgtactagtggcatcacttagaagtaggctttccctcttcctagtagatctcaatgttttataattccttaaaacagctgaaaattgggacaacatactttacgcaatgaacagtagttaaataggaaataaactagttccatataagtatacacctagagttttaattacctttataatgtttcttaaaagtgaaacttagatacaattgtgattggatacttagatactaagtgaaacttagtgtaacaattttgatctgttaaattggattttacatgtacatttgaatgccagaatttctaaataaatcccctggttaggaaattttaaaagtcaaagcttgttttcttcaaccactaccttctacattggttgacttagaccgtaagctttttaagtttctcattgtaatttaccttctcatgcagattgctgatgttttattaaaccttatttttacaaaaatgaccat

SEQ ID NO: 7672 - protein, 146 aa, Homo sapiens; identical to SEQ ID NO: 7664

SEQ ID NO: 7673 - DNA, 1964 bp, Homo sapiens
ctgcctatagcagccattgtggatgagaagatcttctgttgtcatggaggattgtcaccagacctgcaatctatggagcagattcggagaattatgagacctactgatgtccctgatacagatattgaaaccatctgaaaagaaagctaaataccagtatggtggactgaattctggacgtcctgtcactccacctcgaacagctaatccgccgaagaaaaggtgaagaaaggaattctgtaaagaaaccatcagatttgttaaggacatacttcataatatataagtgtgcactgtaaaaccatccagccatttgacaccctttatgatgtcacacctttaacttaaggagacgggtaaaggatcttaaatttttttctaatagaaagatgtgctacactgtattgtaataagtatactctgttatagtcaacaaagttaaatccaaattcaaaattatccattaaagttacatcttcatgtatcacaatttttaaagttgaaaagcatcccagttaaactagatgtgatagttaaaccagatgaaagcatgatgatccatctgtgtaatgtggttttagtgttgcttggttgtttaattattttgagcttgttttgtttttgtttgttttcactagaataatggcaaatacttctaatttttttccctaaacatttttaaaagtgaaatatgggaagagctttacagacattcaccaactattattttcccttgtttatctacttagatatctgtttaatcttactaagaaaactttcgcctcattacattaaaaaggaattttagagattgattgttttaaaaaaaaatacgcacattgtccaatccagtgattttaatcatacagtttgactgggcaaactttacagctgatagtgaatattttgctttatacaggaattgacactgatttggatttgtgcactctaatttttaacttattgatgctctattgtgcagtagcatttcatttaagataaggctcatatagtattacccaactagttggtaatgtgattatgtggtaccttggctttaggttttcattcgcacggaacaccttttggcatgcttaacttcctggtaacaccttcacctgcattggttttctttttcttttttctttctttttttttttttttttttttttgagttgttgtttgtttttagatccacagtacatgagaatccttttttgacaagccttggaaagctgacactgtctctttttcctccctctatacgaaggatgtatttaaatgaatgctggtcagtgggacattttgtcaactatgggtattgggtgcttaactgtctaatattgccatgtgaatgttgtatacgattgtaaggcttatgtcactaaagatttttattctgattttttcataatcaaaggtcatatgatactgtatagacaagctttgtagtgaagtatagtagcaataatttctgtacctgatcaagtttattgcagcctttcttttcctatttcttttttttaagggttagtattaacaaatggcaatgagtagaaaagttaacatgaagattttagaaggagagaacttacaggacacagatttgtgattctttgactgtgacactattggatgtgattctaaaagcttttattgagcattgtcaaatttgtaagcttcatagggatggacatcatatctataatgcccttctatatgtgctaccatagatgtgacatttttgaccttaatatcgtctttgaaaatgttaaattgagaaacctgttaacttacattttatgaattggcacattgtattacttactgcaagagatatttcattttcagcacagtgcaaaagttctttaaaatgcatatgtctttttttctaattccgttttgttttaaagcacattttaaatgtagttttctcatttagtaaaagttgtctaattgatatg

SEQ ID NO: 7674 - protein, 39 aa, Homo sapiens; identical to SEQ ID NO: 7646

SEQ ID NO: 7675 - DNA, 2585 bp, Homo sapiens
ctgcctatagcagccattgtggatgagaagatcttctgttgtcatggaggattgtcaccagacctgcaatctatggagcagattcggagaattatgagacctactgatgtccctgatacagatattgaaaccatctgaaaagaaagctaaataccagtatggtggactgaattctggacgtcctgtcactccacctcgaacagctaatccgccgaagaaaaggtgaagaaaggaattctgtaaagaaaccatcagatttgttaaggacatacttcataatatataagtgtgcactgtaaaaccatccagccatttgacaccctttatgatgtcacacctttaacttaaggagacgggtaaaggatcttaaatttttttctaatagaaagatgtgctacactgtattgtaataagtatactctgttatagtcaacaaagttaaatccaaattcaaaattatccattaaagttacatcttcatgtatcacaatttttaaagttgaaaagcatcccagttaaactagatgtgatagttaaaccagatgaaagcatgatgatccatctgtgtaatgtggttttagtgttgcttggttgtttaattattttgagcttgttttgtttttgtttgttttcactagaataatggcaaatacttctaatttttttccctaaacatttttaaaagtgaaatatgggaagagctttacagacattcaccaactattattttcccttgtttatctacttagatatctgtttaatcttactaagaaaactttcgcctcattacattaaaaaggaattttagagattgattgttttaaaaaaaaatacgcacattgtccaatccagtgattttaatcatacagtttgactgggcaaactttacagctgatagtgaatattttgctttatacaggaattgacactgatttggatttgtgcactctaatttttaacttattgatgctctattgtgcagtagcatttcatttaagataaggctcatatagtattacccaactagttggtaatgtgattatgtggtaccttggctttaggttttcattcgcacggaacaccttttggcatgcttaacttcctggtaacaccttcacctgcattggttttctttttcttttttctttctttttttttttttttttttttttgagttgttgtttgtttttagatccacagtacatgagaatccttttttgacaagccttggaaagctgacactgtctctttttcctccctctatacgaaggatgtatttaaatgaatgctggtcagtgggacattttgtcaactatgggtattgggtgcttaactgtctaatattgccatgtgaatgttgtatacgattgtaaggcttatgtcactaaagatttttattctgattttttcataatcaaaggtcatatgatactgtatagacaagctttgtagtgaagtatagtagcaataatttctgtacctgatcaagtttattgcagcctttcttttcctatttcttttttttaagggttagtattaacaaatggcaatgagtagaaaagttaacatgaagattttagaaggagagaacttacaggacacagatttgtgattctttgactgtgacactattggatgtgattctaaaagcttttattgagcattgtcaaatttgtaagcttcatagggatggacatcatatctataatgcccttctatatgtgctaccatagatgtgacatttttgaccttaatatcgtctttgaaaatgttaaattgagaaacctgttaacttacattttatgaattggcacattgtattacttactgcaagagatatttcattttcagcacagtgcaaaagttctttaaaatgcatatgtctttttttctaattccgttttgttttaaagcacattttaaatgtagttttctcatttagtaaaagttgtctaattgatatgaagcctgactgattttttttttccttacagtgagacatttaagcacacattttattcacatagatactatgtccttgacatattgaaatgattcttttctgaaagtattcatgatctgcatatgatgtattaggttaggtcacaaaggttttatctgaggtgatttaaataacttcctgattggagtgtgtaagctgagcgatttctaataaaattttagttgtacacttttagtagtcatagtgaagcaggtctagaaaataagcctttggcagggaaaaagggcaatgttgattaatctcagtattaaaccacattaatctgtatcccattgtctggcttttgtaaattcatccaggtcaagactaagtatgttggttaataggaatccttttttttttttttaaagactaaatgtgaaaaaataatcactacttaagctaattaatattggtcattaaatttaaaggatggaaatttatcatgtttaaaaattattcaagcactcttaaaaccacttaaacagcctccagtcataaaaatgtgttctttacaaatatttgcttggcaacacgacttgaaataaataaaactttgtttcttaggagaaaatgattctgt

SEQ ID NO: 7676 - protein, 39 aa, Homo sapiens; identical to SEQ ID NO: 7646

SEQ ID NO: 7677 - DNA, 3723 bp, Homo sapiens
ctgcctatagcagccattgtggatgagaagatcttctgttgtcatggaggattgtcaccagacctgcaatctatggagcagattcggagaattatgagacctactgatgtccctgatacagatattgaaaccatctgaaaagaaagctaaataccagtatggtggactgaattctggacgtcctgtcactccacctcgaacagctaatccgccgaagaaaaggtgaagaaaggaattctgtaaagaaaccatcagatttgttaaggacatacttcataatatataagtgtgcactgtaaaaccatccagccatttgacaccctttatgatgtcacacctttaacttaaggagacgggtaaaggatcttaaatttttttctaatagaaagatgtgctacactgtattgtaataagtatactctgttatagtcaacaaagttaaatccaaattcaaaattatccattaaagttacatcttcatgtatcacaatttttaaagttgaaaagcatcccagttaaactagatgtgatagttaaaccagatgaaagcatgatgatccatctgtgtaatgtggttttagtgttgcttggttgtttaattattttgagcttgttttgtttttgtttgttttcactagaataatggcaaatacttctaatttttttccctaaacatttttaaaagtgaaatatgggaagagctttacagacattcaccaactattattttcccttgtttatctacttagatatctgtttaatcttactaagaaaactttcgcctcattacattaaaaaggaattttagagattgattgttttaaaaaaaaatacgcacattgtccaatccagtgattttaatcatacagtttgactgggcaaactttacagctgatagtgaatattttgctttatacaggaattgacactgatttggatttgtgcactctaatttttaacttattgatgctctattgtgcagtagcatttcatttaagataaggctcatatagtattacccaactagttggtaatgtgattatgtggtaccttggctttaggttttcattcgcacggaacaccttttggcatgcttaacttcctggtaacaccttcacctgcattggttttctttttcttttttctttctttttttttttttttttttttttgagttgttgtttgtttttagatccacagtacatgagaatccttttttgacaagccttggaaagctgacactgtctctttttcctccctctatacgaaggatgtatttaaatgaatgctggtcagtgggacattttgtcaactatgggtattgggtgcttaactgtctaatattgccatgtgaatgttgtatacgattgtaaggcttatgtcactaaagatttttattctgattttttcataatcaaaggtcatatgatactgtatagacaagctttgtagtgaagtatagtagcaataatttctgtacctgatcaagtttattgcagcctttcttttcctatttcttttttttaagggttagtattaacaaatggcaatgagtagaaaagttaacatgaagattttagaaggagagaacttacaggacacagatttgtgattctttgactgtgacactattggatgtgattctaaaagcttttattgagcattgtcaaatttgtaagcttcatagggatggacatcatatctataatgcccttctatatgtgctaccatagatgtgacatttttgaccttaatatcgtctttgaaaatgttaaattgagaaacctgttaacttacattttatgaattggcacattgtattacttactgcaagagatatttcattttcagcacagtgcaaaagttctttaaaatgcatatgtctttttttctaattccgttttgttttaaagcacattttaaatgtagttttctcatttagtaaaagttgtctaattgatatgaagcctgactgattttttttttccttacagtgagacatttaagcacacattttattcacatagatactatgtccttgacatattgaaatgattcttttctgaaagtattcatgatctgcatatgatgtattaggttaggtcacaaaggttttatctgaggtgatttaaataacttcctgattggagtgtgtaagctgagcgatttctaataaaattttagttgtacacttttagtagtcatagtgaagcaggtctagaaaataagcctttggcagggaaaaagggcaatgttgattaatctcagtattaaaccacattaatctgtatcccattgtctggcttttgtaaattcatccaggtcaagactaagtatgttggttaataggaatccttttttttttttttaaagactaaatgtgaaaaaataatcactacttaagctaattaatattggtcattaaatttaaaggatggaaatttatcatgtttaaaaattattcaagcactcttaaaaccacttaaacagcctccagtcataaaaatgtgttctttacaaatatttgcttggcaacacgacttgaaataaataaaactttgtttcttaggagaaaatgattctgtaattccagtgtcactaatttatattgttctttcctctgatttttttcaggttagtgatttttttgtatacaatttaatccaaatgttatgacattcagaaatcatgaaacacagtagatatctgttataatgtggtgtatcacatggattataaagcaaagttatggtcgatttctattcttgaaagaatcaactacagtgaatcctttgcatttgaagccttaacatgcattgctttaattttgcccagggacaaattttaataatcagcaagactggtttgtgcaaagcgttgagtcatcaggtatttagagcctagccagctacccagtatccatgctgccatatcccttcattgtaaaaagtacctaaacattcgtgaaatgattttttttagctgaaaaatgctggcaagaagaattttaaagcttaaaataggtggtaaatttgaagtatgagtgtgttcacgagaaacataggcttttcaaaaaaatttttattcaaggcaaagcaaggaacatcttgagatatgtctcaagaatataaagatgtattattttaagccaaggagctgaaatatatctcagtttataaattcaggtatattctttttgtctccatggcaaccataacttttgaaccaaaaaaaattgtttttacatctttatgctgaaaatgtgtttagattaggaatatggtcgggctgaatttgctgttgctccctaaccaaatccacctcttgttttccttgtgagtccatggctaaatcaaagctgcccctgagaagagacttaatccaagcctgattgtactagtggcatcacttagaagtaggctttccctcttcctagtagatctcaatgttttataattccttaaaacagctgaaaattgggacaacatactttacgcaatgaacagtagttaaataggaaataaactagttccatataagtatacacctagagttttaattacctttataatgtttcttaaaagtgaaacttagatacaattgtgattggatacttagatactaagtgaaacttagtgtaacaattttgatctgttaaattggattttacatgtacatttgaatgccagaatttctaaataaatcccctggttaggaaatttt

SEQ ID NO: 7678 - protein, 39 aa, Homo sapiens; identical to SEQ ID NO: 7646

SEQ ID NO: 7679 - DNA, 2389 bp, Homo sapiens
caagaattctaggcttcatataatatatttgctttagtattaacaataaaataataaaataatctttggcagattggtaggttactctgtatggcttatgaaataagcttgaagttttttgaaagtttatttgaaaaattaatgtatatgtctaacacctagctagtagatagtgtatgatctgaccatcttgaagagttaaaaacctgttgctaagatacatttatgaaacagataattgagtaataaaaggtatttaatatgtcagaacttattaagacactatgagaagtcaggaggaggaaagactgggtacatgtgtgtatggaggcatgggttttagaggataaataggctttggagaagttaaaaggacttgagacactctttgttgtctagtttagggaatgtgtaagaactggcctgactagaaggtcaagtacatgctgggaaatgatggaatcagattatggagatttgactattgagcaacggagtttgttgagtgatttaataaccgtattgggtttttgtacagggaagtaatttaatggaaatagtgtaagaaaattagtttttcatcaatatacgggaagaattaaagtggaaaaacgctgaaaagatagatgcacttgcctaggcccgaggattgtcaccagacctgcaatctatggagcagattcggagaattatgagacctactgatgtccctgatacaggtttgctctgtgatttgctatggtctgatccagataaggatgtgcaaggctggggagaaaatgatcgtggtgtttcctttacttttggagctgatgtagtcagtaaatttctgaatcgtcatgatttagatttgatttgtcgagctcatcaggtggtggaagatggatatgaattttttgctaaacgacagttggtaaccttattttcagccccaaattactgtggcgagtttgataatgctggtggaatgatgagtgtggatgaaactttgatgtgttcatttcagatattgaaaccatctgaaaagaaagctaaataccagtatggtggactgaattctggacgtcctgtcactccacctcgaacagctaatccgccgaagaaaagtccttccttcagaagggaaatttctgagggtcaggaaggggaatctgtacctcactccttgaacaccaaggaaggaatattgggaaaccaaaatgaggcacaatcagatgtgttgtgagacaccacctactgtcactgtttatgtaaaatcagggtcaaatagatcacatcagcctaaaaagcccattactctgaagcgtcctatttgtaaagataattggcaagcatttgaaaaaaatacacataataacaacaaatctaaacgccccaaaggaccttgtctggttatacagcgtcaggatatgactgctttctttaaattatttgatgacgatttaattcaagatttcttgtggatggactgctgctgtaaaattgcagacaagtatcttttggctatgacctttgtttatttcaagagggctaaatttactataagtgagcataccaggataaatttctttattgctctgtatctggctaatacagttgaagaagatgaagaagaaaccaagtacgaaatttttccatgggctttagggaaaaactggagaaaattgttccctaatttcttaaagttaagggaccagctctgggatagaattgactatagggctattgtaagcaggcgatgttgtgaggaggttatggccattgcaccaacccattatatctggcaaagagaacgttctgttcatcacagtggagctgtcagaaactacaacagagatgaagttcagctgccccggggacctagtgccacaccagtagattgttcactctgtggtaaaaaaagaagatatgttagactgggattgtcttcatcatcatctttatccagtcatacagcaggggtgacagaaaaacattctcaggactcatacaactcactgtcaatggacataataggtgatccttctcaagcttatactggttctgaaggtatgatttagtaatatgccagaattagatttatgcatgttgtttactgagctctagtcagtcctttctggcggggatacataataatttatatactccaacaatatgagttaaattaatcttgaaactttctcccctttcagttactttttgtcttgtgtccatatttgttttgtggtgacccacctaaacagatttttaatgtgacctatgttaagttgaaaactaatgcaccataagcctcagtattttaagagcctgaatcatttttttgaaatgtttattttattcaaaagggtttcaagaagaaaataaatttacttgtaatctcaccttccaa

SEQ ID NO: 7680 - protein, 286 aa, Homo sapiens
MRHNQMCCETPPTVTVYVKSGSNRSHQPKKPITLKRPICKDNWQAFEKNTHNNNKSKRPKGPCLVIQRQDMTAFFKLFDDDLIQDFLWMDCCCKIADKYLLAMTFVYFKRAKFTISEHTRINFFIALYLANTVEEDEEETKYEIFPWALGKNWRKLFPNFLKLRDQLWDRIDYRAIVSRRCCEEVMAIAPTHYIWQRERSVHHSGAVRNYNRDEVQLPRGPSATPVDCSLCGKKRRYVRLGLSSSSSLSSHTAGVTEKHSQDSYNSLSMDIIGDPSQAYTGSEGMI

SEQ ID NO: 7681 - DNA, 640 bp, Homo sapiens
actatgatgtttatggattatttaaaattcttaaaactgacttaactctttaaaaattatcttcttgtgctgggattataggcacgagccacctcgcccggcctgacaaatagttttttaaatcagtaaaactgtgtttatgattttgataaatatgccttctattaaataacaaggcagaattgctaagtttcctaactaaaatgacccctgataatcagtttttttcagccatagatcttcattcactggtcttttcaaaaataaatgatgatttttaaaaatcaggtttctgaactacgctagtttgcatggtcttttgttttccagaaactgccaaaatccttctattgtgcttattttcaaataattgtctctaaaattctagaaatattccctttaaaaaagaaaatttgaaagaatgaacaagtaagcaaactaaaaaaccaagaactaaaaacatggagtccatgaccagcctgggcaacacagtgaaacacgaaaccctgtctctacaaaaaaatacaaaaaactggctgggcaccgtggctcacgcctgaagtcccagcattttgggaggctgaggcgagtggatcacctgaggtcaggagttcgaggccagcctgaaaaacatggagaa

SEQ ID NO: 7682 - protein, 32 aa, Homo sapiens
MESMTSLGNTVKHETLSLQKNTKNWLGTVAHA

SEQ ID NO: 7683 - DNA, 6127 bp, Homo sapiens
atggcgggggcctggctcaggtgggggctcctgctctgggcagggctcctcgcgtcctcggcgcacggccggctgcggaggatcacctacgtggtgcacccgggccccggcctggcagccggcgccttgcccctgagcgggcccccgcgttcgcggacattcaacgtcgcgctcaacgccaggtacagccgcagctcggcggctgccggcgcccccagccgtgcctcccccggggtcccctcggagaggacccggcgcacgagcaagccgggcggcgcggccctgcaggggctcagaccgccgccgccgccgccgccggagcctgcgcgtcccgcggtccccggcgggcagctccaccccaatcccggcggccacccggcagccgccccgttcaccaaacaaggcaggcaagttgtgcgctccaaggtgccgcaggagacccagagcggcggaggctctaggctgcaggttcaccagaagcagcagctgcagggggtcaatgtctgtggagggcggtgctgtcatggctggagtaaggcccctggctcccagaggtgcaccaaacctagctgtgttccgccatgtcagaatggagggatgtgtctccggccacaactctgtgtgtgtaaaccagggaccaagggcaaagcctgtgaaacaatagctgcccaggacacctcgtcaccagtctttggagggcagagtcctggggctgcttcctcgtggggccctcctgagcaagcagcaaagcatacttcatctaagaaggcagacactctaccaagagtcagccctgtggcccagatgaccttaaccctcaagccgaagccttcagtgggactcccccagcagatacattctcaagtgactcctctttcttcccagagtgtggtgattcaccatggccagacccaggaatacgtgctcaagcccaagtactttccagcccagaaggggatttcaggagagcagtccactgaaggttctttccctttaagatatgtgcaggatcaagttgcggcaccttttcagctgagtaaccacactggccgcatcaaggtggtctttactccgagcatctgtaaagtgacctgcaccaagggcagctgtcagaacagctgtgagaaggggaacaccaccactctcattagtgagaatggtcatgctgccgacaccctgacggccacgaacttccgagtggtaatttgccatcttccatgtatgaatggtggccagtgcagttcaagggacaaatgtcagtgccctccaaatttcacaggaaaactttgtcagatcccagtccatggtgccagcgtgcctaaactttatcagcattcccagcagccaggcaaggcgttggggacgcatgtcatccattcaacacataccttgcctctgaccgtgactagccagcaaggagtcaaagtgaaatttcctcctaacatagtcaatatccatgtgaaacatcctcctgaagcttccgtccagatacatcaggtttcaagaattgatggcccaacaggccagaagacaaaagaagctcaaccaggccaatcccaagtctcgtaccaagggcttcctgtccagaagacccagaccatacattccacatactcccaccagcaggtcattcctcacgtctaccccgtggctgctaagacacagcttggccggtgcttccaggaaaccattgggtcacagtgtggcaaagcgctccctggcctttcaaagcaagaggactgctgtggaactgtgggtacctcctggggctttaacaaatgccagaaatgccccaagaaaccatcttatcatggatacaaccaaatgatggaatgcctaccgggttataagcgggttaacaacaccttttgccaagatattaatgaatgtcagctacaaggtgtatgccctaatggtgagtgtttgaataccatgggcagctatcgatgtacctgcaaaataggatttgggccggatcctaccttttcaagttgtgttcctgatccccctgtgatctcggaagagaaagggccctgttaccgacttgtcagttctggaagacagtgtatgcaccctctgtctgttcacctcaccaagcagctctgctgttgtagtgtgggcaaggcctggggcccacactgtgagaaatgtccccttccaggcacagctgcttttaaggaaatctgtcctggtggaatgggttatacggtttctggcgttcatagacgcaggccaatccatcaccatgtaggtaaaggacctgtatttgtcaagccaaagaacactcaacctgttgctaaaagtactcatcctccacctctcccagccaaggaagagccagtggaggccctgaccttctcccgggaacacgggccaggagtggcggagccagaagtggcaactgcaccccctgaaaaggaaataccttcattggatcaagagaaaaccaaacttgagcctggtcaaccccagctgtctccaggcatttccactattcatctgcatccacagtttccagtagtgattgaaaaaacatcacctcctgtgcctgttgaagtagctcctgaagcttctacgtctagtgccagccaagtgattgctcctactcaagtgacagaaatcaatgaatgtactgtgaaccctgatatctgtggagcaggacactgcattaacctaccagtgagatatacctgtatatgctacgagggctacaggttcagtgaacaacagaggaaatgtgtggatattgatgagtgtactcaggtccaacacctctgctcccagggccgctgtgaaaacaccgagggaagtttcttgtgcatttgcccagcaggatttatggccagtgaggagggtactaactgcatagatgttgacgaatgcctgaggccggacgtctgtggggaggggcactgtgtcaatactgtgggggccttccggtgtgaatactgtgacagcgggtaccgcatgactcagagaggccgttgtgaggatattgatgaatgtttgaatccaagcacttgtccagatgagcagtgtgtgaattctcctggatcttaccagtgcgttccctgcacagaaggattccgaggctggaatggacagtgccttgatgtggacgagtgcctggaaccaaacgtctgcgcaaatggtgattgttccaaccttgaaggctcctacatgtgttcatgccacaaaggctatacccggactccggaccacaagcactgtagagatattgatgaatgtcagcaagggaatctatgtgtaaacgggcagtgcaaaaataccgagggctccttcaggtgcacctgtggacaggggtaccagctgtcggcagctaaagaccagtgtgaagacattgatgaatgccagcaccgtcatctctgtgctcatgggcagtgcaggaacactgagggctcttttcaatgtgtgtgtgaccagggttacagagcatctgggcttggagaccactgtgaagatatcaatgaatgcttggaggacaagagtgtttgccagagaggagactgcattaatactgcagggtcctatgattgtacttgtccggatggatttcagctagatgacaataaaacatgtcaagatattaatgaatgtgaacatccagggctctgtggtccgcaaggggagtgcctaaacacagagggttctttccattgtgtctgccagcagggtttctcaatctctgcagatggccgtacgtgtgaagatattgatgaatgtgtaaacaacactgtttgtgacagtcacgggttttgtgacaatacagctggctccttccgctgcctctgttatcagggctttcaagccccacaggatgggcaagggtgtgtggatgtgaatgaatgtgaactgctcagtggggtgtgtggtgaagccttctgtgaaaacgtggaagggtccttcctgtgcgtgtgtgctgatgaaaaccaagagtacagccccatgactgggcagtgccgctcccggacctccacagatttagatgtagatgtagatcaacccaaagaagaaaagaaagaatgctactataatctcaatgacgccagtctctgtgataatgtgttggcccccaatgtcacgaaacaagaatgctgctgtacatcaggcgtgggatggggagataactgcgaaatcttcccctgcccggtcttgggaactgctgagttcactgaaatgtgtcccaaagggaaaggttttgtgcctgctggagaatcatcttctgaagctggtggtgagaactataaagatgcagatgaatgcctactttttggacaagaaatctgcaaaaatggtttctgtttgaacactcggcctgggtatgaatgctactgtaagcaagggacgtactatgatcctgtgaaactgcagtgctttgatatggatgaatgtcaagaccccagtagttgtattgatggccagtgtgttaatacagagggctcttacaactgcttctgtactcaccccatggtcctggatgcgtcagaaaaaagatgtatacgaccggctgagtcaaacgaacaaatagaagaaactgatgtctaccaagatttgtgctgggaacatctgagtgatgaatacgtgtgtagccggcctcttgtgggcaagcagacaacgtacactgagtgctgctgtctgtatggagaggcctggggcatgcagtgtgccctctgccccctgaaggattcagatgactatgctcagctgtgtaacatccccgtgacgggacgccggcagccatatggacgggacgccttggttgacttcagtgaacagtatactccagaagccgatccctacttcatccaagaccgttttctaaatagctttgaggagttacaggctgaggaatgcggcatcctcaatggatgtgaaaatggtcgctgtgtgagggtccaggaaggttacacctgcgattgctttgatgggtatcacttggatacggccaagatgacctgtgtcgatgtaaatgaatgcgatgagttgaacaaccggatgtctctctgcaagaatgccaagtgcattaacaccgatggttcctacaagtgtttgtgtctgccaggctacgtgccttctgacaagccaaactactgcactccgttgaataccgccttgaatttagagaaagacagtgacctggagtgaaacagaatctacataacctaagcccatatactctgcactgtgtaaaggaaaagggagaaatgtattatacttgagacattgcacctaccccggaaggctggaaatacagaaacagcatggaattgcaagtcctctgaagacaatgagaggatttaggatgagcccgataggtgtggcagaccaaatggacatttctctaaaaaaccagtatatatagtctgttcatatgtaaaattcaatggaagagaggtggaacagtgctgttattttaaacagaaggttgtattattatgttgttttgtttttttactattgcttgattaaatttggcatttaaatagtggtggaaatattttatataattttcattttttggttgtgcagttccttggctactgtttttcttttacttcagttttttaaaaatctcaaatgaaaaagtcttcgatacaatattgttaagctgtattataagtattgttacacagggttatgcaattcccggcctggagcatttttgaaattcaaattgtctgtcctgtggagcaggcagtgattttgttccaaaactttgtatacacatttggagaaaagtactttatattttcagtgttttgtctgattttaatgtccgttcttagccaagctgctagcaggtgttaattggatccctttccttcactgaaatggaagagtttataagcttacgttagtattgtaatatgtaaagtaagcccaacaaaaatttttaaaaatttgatgatccccaatatatctaccattgtatgttaaataaatcaccatttttgtagaaaaaattctacctgagagtaattgtcaatgagtacatgtgtataagttgtatcccactctccccacttttatcttttccagtggtcttctgttaatgtagtgtcttttacaagttaatcattaaatttgttagatcttgttatgggct

SEQ ID NO: 7684 - protein, 1721 aa, Homo sapiens
MAGAWLRWGLLLWAGLLASSAHGRLRRITYVVHPGPGLAAGALPLSGPPRSRTFNVALNARYSRSSAAAGAPSRASPGVPSERTRRTSKPGGAALQGLRPPPPPPPEPARPAVPGGQLHPNPGGHPAAAPFTKQGRQVVRSKVPQETQSGGGSRLQVHQKQQLQGVNVCGGRCCHGWSKAPGSQRCTKPSCVPPCQNGGMCLRPQLCVCKPGTKGKACETIAAQDTSSPVFGGQSPGAASSWGPPEQAAKHTSSKKADTLPRVSPVAQMTLTLKPKPSVGLPQQIHSQVTPLSSQSVVIHHGQTQEYVLKPKYFPAQKGISGEQSTEGSFPLRYVQDQVAAPFQLSNHTGRIKVVFTPSICKVTCTKGSCQNSCEKGNTTTLISENGHAADTLTATNFRVVICHLPCMNGGQCSSRDKCQCPPNFTGKLCQIPVHGASVPKLYQHSQQPGKALGTHVIHSTHTLPLTVTSQQGVKVKFPPNIVNIHVKHPPEASVQIHQVSRIDGPTGQKTKEAQPGQSQVSYQGLPVQKTQTIHSTYSHQQVIPHVYPVAAKTQLGRCFQETIGSQCGKALPGLSKQEDCCGTVGTSWGFNKCQKCPKKPSYHGYNQMMECLPGYKRVNNTFCQDINECQLQGVCPNGECLNTMGSYRCTCKIGFGPDPTFSSCVPDPPVISEEKGPCYRLVSSGRQCMHPLSVHLTKQLCCCSVGKAWGPHCEKCPLPGTAAFKEICPGGMGYTVSGVHRRRPIHHHVGKGPVFVKPKNTQPVAKSTHPPPLPAKEEPVEALTFSREHGPGVAEPEVATAPPEKEIPSLDQEKTKLEPGQPQLSPGISTIHLHPQFPVVIEKTSPPVPVEVAPEASTSSASQVIAPTQVTEINECTVNPDICGAGHCINLPVRYTCICYEGYRFSEQQRKCVDIDECTQVQHLCSQGRCENTEGSFLCICPAGFMASEEGTNCIDVDECLRPDVCGEGHCVNTVGAFRCEYCDSGYRMTQRGRCEDIDECLNPSTCPDEQCVNSPGSYQCVPCTEGFRGWNGQCLDVDECLEPNVCANGDCSNLEGSYMCSCHKGYTRTPDHKHCRDIDECQQGNLCVNGQCKNTEGSFRCTCGQGYQLSAAKDQCEDIDECQHRHLCAHGQCRNTEGSFQCVCDQGYRASGLGDHCEDINECLEDKSVCQRGDCINTAGSYDCTCPDGFQLDDNKTCQDINECEHPGLCGPQGECLNTEGSFHCVCQQGFSISADGRTCEDIDECVNNTVCDSHGFCDNTAGSFRCLCYQGFQAPQDGQGCVDVNECELLSGVCGEAFCENVEGSFLCVCADENQEYSPMTGQCRSRTSTDLDVDVDQPKEEKKECYYNLNDASLCDNVLAPNVTKQECCCTSGVGWGDNCEIFPCPVLGTAEFTEMCPKGKGFVPAGESSSEAGGENYKDADECLLFGQEICKNGFCLNTRPGYECYCKQGTYYDPVKLQCFDMDECQDPSSCIDGQCVNTEGSYNCFCTHPMVLDASEKRCIRPAESNEQIEETDVYQDLCWEHLSDEYVCSRPLVGKQTTYTECCCLYGEAWGMQCALCPLKDSDDYAQLCNIPVTGRRQPYGRDALVDFSEQYTPEADPYFIQDRFLNSFEELQAEECGILNGCENGRCVRVQEGYTCDCFDGYHLDTAKMTCVDVNECDELNNRMSLCKNAKCINTDGSYKCLCLPGYVPSDKPNYCTPLNTALNLEKDSDLE

SEQ ID NO: 7685 - DNA, 4755 bp, Homo sapiens
actccagtgactcgacttcaaatgtggttttggagtgcatcccagagttctgtttgctaagcttcctactcctgtttcagagacaccactgaatacagagcagcgagcactgaaggcttccctctttccttaaacctgtcgggttgtgggctctctcttttcccctcttgctcctttcttttctttttttctgtttttttaaaccttccaaggcaagttcatggatactaagctgatgtgtttgttgttctttttctccctgcctccgctcctagtgagtaaccacactggccgcatcaaggtggtctttactccgagcatctgtaaagtgacctgcaccaagggcagctgtcagaacagctgtgagaaggggaacaccaccactctcattagtgagaatggtcatgctgccgacaccctgacggccacgaacttccgagtggtaatttgccatcttccatgtatgaatggtggccagtgcagttcaagggacaaatgtcagtgccctccaaatttcacaggaaaactttgtcagatcccagtccatggtgccagcgtgcctaaactttatcagcattcccagcagccaggcaaggcgttggggacgcatgtcatccattcaacacataccttgcctctgaccgtgactagccagcaaggagtcaaagtgaaatttcctcctaacatagtcaatatccatgtgaaacatcctcctgaagcttccgtccagatacatcaggtttcaagaattgatggcccaacaggccagaagacaaaagaagctcaaccaggccaatcccaagtctcgtaccaagggcttcctgtccagaagacccagaccatacattccacatactcccaccagcaggtcattcctcacgtctaccccgtggctgctaagacacagcttggccggtgcttccaggaaaccattgggtcacagtgtggcaaagcgctccctggcctttcaaagcaagaggactgctgtggaactgtgggtacctcctggggctttaacaaatgccagaaatgccccaagaaaccatcttatcatggatacaaccaaatgatggaatgcctaccgggttataagcgggttaacaacaccttttgccaagatattaatgaatgtcagctacaaggtgtatgccctaatggtgagtgtttgaataccatgggcagctatcgatgtacctgcaaaataggatttgggccggatcctaccttttcaagttgtgttcctgatccccctgtgatctcggaagagaaagggccctgttaccgacttgtcagttctggaagacagtgtatgcaccctctgtctgttcacctcaccaagcagctctgctgttgtagtgtgggcaaggcctggggcccacactgtgagaaatgtccccttccaggcacagctgcttttaaggaaatctgtcctggtggaatgggttatacggtttctggcgttcatagacgcaggccaatccatcaccatgtaggtaaaggacctgtatttgtcaagccaaagaacactcaacctgttgctaaaagtactcatcctccacctctcccagccaaggaagagccagtggaggccctgaccttctcccgggaacacgggccaggagtggcggagccagaagtggcaactgcaccccctgaaaaggaaataccttcattggatcaagagaaaaccaaacttgagcctggtcaaccccagctgtctccaggcatttccactattcatctgcatccacagtttccagtagtgattgaaaaaacatcacctcctgtgcctgttgaagtagctcctgaagcttctacgtctagtgccagccaagtgattgctcctactcaagtgacagaaatcaatgaatgtactgtgaaccctgatatctgtggagcaggacactgcattaacctaccagtgagatatacctgtatatgctacgagggctacaggttcagtgaacaacagaggaaatgtgtggatattgatgagtgtactcaggtccaacacctctgctcccagggccgctgtgaaaacaccgagggaagtttcttgtgcatttgcccagcaggatttatggccagtgaggagggtactaactgcatagatgttgacgaatgcctgaggccggacgtctgtggggaggggcactgtgtcaatactgtgggggccttccggtgtgaatactgtgacagcgggtaccgcatgactcagagaggccgttgtgaggatattgatgaatgtttgaatccaagcacttgtccagatgagcagtgtgtgaattctcctggatcttaccagtgcgttccctgcacagaaggattccgaggctggaatggacagtgccttgatgtggacgagtgcctggaaccaaacgtctgcgcaaatggtgattgttccaaccttgaaggctcctacatgtgttcatgccacaaaggctatacccggactccggaccacaagcactgtagagatattgatgaatgtcagcaagggaatctatgtgtaaacgggcagtgcaaaaataccgagggctccttcaggtgcacctgtggacaggggtaccagctgtcggcagctaaagaccagtgtgaagacattgatgaatgccagcaccgtcatctctgtgctcatgggcagtgcaggaacactgagggctcttttcaatgtgtgtgtgaccagggttacagagcatctgggcttggagaccactgtgaagatatcaatgaatgcttggaggacaagagtgtttgccagagaggagactgcattaatactgcagggtcctatgattgtacttgtccggatggatttcagctagatgacaataaaacatgtcaagatattaatgaatgtgaacatccagggctctgtggtccgcaaggggagtgcctaaacacagagggttctttccattgtgtctgccagcagggtttctcaatctctgcagatggccgtacgtgtgaagatattgatgaatgtgtaaacaacactgtttgtgacagtcacgggttttgtgacaatacagctggctccttccgctgcctctgttatcagggctttcaagccccacaggatgggcaagggtgtgtggatgtgaatgaatgtgaactgctcagtggggtgtgtggtgaagccttctgtgaaaacgtggaagggtccttcctgtgcgtgtgtgctgatgaaaaccaagagtacagccccatgactgggcagtgccgctcccggacctccacagatttagatgtagatgtagatcaacccaaagaagaaaagaaagaatgctactataatctcaatgacgccagtctctgtgataatgtgttggcccccaatgtcacgaaacaagaatgctgctgtacatcaggcgtgggatggggagataactgcgaaatcttcccctgcccggtcttgggaactgctgagttcactgaaatgtgtcccaaagggaaaggttttgtgcctgctggagaatcatcttctgaagctggtggtgagaactataaagatgcagatgaatgcctactttttggacaagaaatctgcaaaaatggtttctgtttgaacactcggcctgggtatgaatgctactgtaagcaagggacgtactatgatcctgtgaaactgcagtgctttgatatggatgaatgtcaagaccccagtagttgtattgatggccagtgtgttaatacagagggctcttacaactgcttctgtactcaccccatggtcctggatgcgtcagaaaaaagatgtatacgaccggctgagtcaaacgaacaaatagaagaaactgatgtctaccaagatttgtgctgggaacatctgagtgatgaatacgtgtgtagccggcctcttgtgggcaagcagacaacgtacactgagtgctgctgtctgtatggagaggcctggggcatgcagtgtgccctctgccccctgaaggattcagatgactatgctcagctgtgtaacatccccgtgacgggacgccggcagccatatggacgggacgccttggttgacttcagtgaacagtatactccagaagccgatccctacttcatccaagaccgttttctaaatagctttgaggagttacaggctgaggaatgcggcatcctcaatggatgtgaaaatggtcgctgtgtgagggtccaggaaggttacacctgcgattgctttgatgggtatcacttggatacggccaagatgacctgtgtcgatgtaaatgaatgcgatgagttgaacaaccggatgtctctctgcaagaatgccaagtgcattaacaccgatggttcctacaagtgtttgtgtctgccaggctacgtgccttctgacaagccaaactactgcactccgttgaataccgccttgaatttagagaaagacagtgacctggagtgaaacagaatctacataacctaagcccatatactctgcactgtgtaaaggaaaagggagaaatgtattatacttgagacattgcacctaccccggaaggctggaaatacagaaacagcatggaattgcaagtcctctgaagacaatgagaggatttaggatgagcccgataggtgtggcagaccaaatggacatttctctaaaaaaccagtatatatagtctgttcatatgtaaaattcaatggaagagaggtggaacagtgctgttattttaaacagaaggttgtattattatgttgttttgtttttttactattgcttgattaaatttggcatttaaatagtggtgg

SEQ ID NO: 7686 - protein, 1395 aa, Homo sapiens
MDTKLMCLLFFFSLPPLLVSNHTGRIKVVFTPSICKVTCTKGSCQNSCEKGNTTTLISENGHAADTLTATNFRVVICHLPCMNGGQCSSRDKCQCPPNFTGKLCQIPVHGASVPKLYQHSQQPGKALGTHVIHSTHTLPLTVTSQQGVKVKFPPNIVNIHVKHPPEASVQIHQVSRIDGPTGQKTKEAQPGQSQVSYQGLPVQKTQTIHSTYSHQQVIPHVYPVAAKTQLGRCFQETIGSQCGKALPGLSKQEDCCGTVGTSWGFNKCQKCPKKPSYHGYNQMMECLPGYKRVNNTFCQDINECQLQGVCPNGECLNTMGSYRCTCKIGFGPDPTFSSCVPDPPVISEEKGPCYRLVSSGRQCMHPLSVHLTKQLCCCSVGKAWGPHCEKCPLPGTAAFKEICPGGMGYTVSGVHRRRPIHHHVGKGPVFVKPKNTQPVAKSTHPPPLPAKEEPVEALTFSREHGPGVAEPEVATAPPEKEIPSLDQEKTKLEPGQPQLSPGISTIHLHPQFPVVIEKTSPPVPVEVAPEASTSSASQVIAPTQVTEINECTVNPDICGAGHCINLPVRYTCICYEGYRFSEQQRKCVDIDECTQVQHLCSQGRCENTEGSFLCICPAGFMASEEGTNCIDVDECLRPDVCGEGHCVNTVGAFRCEYCDSGYRMTQRGRCEDIDECLNPSTCPDEQCVNSPGSYQCVPCTEGFRGWNGQCLDVDECLEPNVCANGDCSNLEGSYMCSCHKGYTRTPDHKHCRDIDECQQGNLCVNGQCKNTEGSFRCTCGQGYQLSAAKDQCEDIDECQHRHLCAHGQCRNTEGSFQCVCDQGYRASGLGDHCEDINECLEDKSVCQRGDCINTAGSYDCTCPDGFQLDDNKTCQDINECEHPGLCGPQGECLNTEGSFHCVCQQGFSISADGRTCEDIDECVNNTVCDSHGFCDNTAGSFRCLCYQGFQAPQDGQGCVDVNECELLSGVCGEAFCENVEGSFLCVCADENQEYSPMTGQCRSRTSTDLDVDVDQPKEEKKECYYNLNDASLCDNVLAPNVTKQECCCTSGVGWGDNCEIFPCPVLGTAEFTEMCPKGKGFVPAGESSSEAGGENYKDADECLLFGQEICKNGFCLNTRPGYECYCKQGTYYDPVKLQCFDMDECQDPSSCIDGQCVNTEGSYNCFCTHPMVLDASEKRCIRPAESNEQIEETDVYQDLCWEHLSDEYVCSRPLVGKQTTYTECCCLYGEAWGMQCALCPLKDSDDYAQLCNIPVTGRRQPYGRDALVDFSEQYTPEADPYFIQDRFLNSFEELQAEECGILNGCENGRCVRVQEGYTCDCFDGYHLDTAKMTCVDVNECDELNNRMSLCKNAKCINTDGSYKCLCLPGYVPSDKPNYCTPLNTALNLEKDSDLE

SEQ ID NO: 7687 - DNA, 5235 bp, Homo sapiens
actccagtgactcgacttcaaatgtggttttggagtgcatcccagagttctgtttgctaagcttcctactcctgtttcagagacaccactgaatacagagcagcgagcactgaaggcttccctctttccttaaacctgtcgggttgtgggctctctcttttcccctcttgctcctttcttttctttttttctgtttttttaaaccttccaaggcaagttcatggatactaagctgatgtgtttgttgttctttttctccctgcctccgctcctagtgagtaaccacactggccgcatcaaggtggtctttactccgagcatctgtaaagtgacctgcaccaagggcagctgtcagaacagctgtgagaaggggaacaccaccactctcattagtgagaatggtcatgctgccgacaccctgacggccacgaacttccgagtggtaatttgccatcttccatgtatgaatggtggccagtgcagttcaagggacaaatgtcagtgccctccaaatttcacaggaaaactttgtcagatcccagtccatggtgccagcgtgcctaaactttatcagcattcccagcagccaggcaaggcgttggggacgcatgtcatccattcaacacataccttgcctctgaccgtgactagccagcaaggagtcaaagtgaaatttcctcctaacatagtcaatatccatgtgaaacatcctcctgaagcttccgtccagatacatcaggtttcaagaattgatggcccaacaggccagaagacaaaagaagctcaaccaggccaatcccaagtctcgtaccaagggcttcctgtccagaagacccagaccatacattccacatactcccaccagcaggtcattcctcacgtctaccccgtggctgctaagacacagcttggccggtgcttccaggaaaccattgggtcacagtgtggcaaagcgctccctggcctttcaaagcaagaggactgctgtggaactgtgggtacctcctggggctttaacaaatgccagaaatgccccaagaaaccatcttatcatggatacaaccaaatgatggaatgcctaccgggttataagcgggttaacaacaccttttgccaagatattaatgaatgtcagctacaaggtgtatgccctaatggtgagtgtttgaataccatgggcagctatcgatgtacctgcaaaataggatttgggccggatcctaccttttcaagttgtgttcctgatccccctgtgatctcggaagagaaagggccctgttaccgacttgtcagttctggaagacagtgtatgcaccctctgtctgttcacctcaccaagcagctctgctgttgtagtgtgggcaaggcctggggcccacactgtgagaaatgtccccttccaggcacagctgcttttaaggaaatctgtcctggtggaatgggttatacggtttctggcgttcatagacgcaggccaatccatcaccatgtaggtaaaggacctgtatttgtcaagccaaagaacactcaacctgttgctaaaagtactcatcctccacctctcccagccaaggaagagccagtggaggccctgaccttctcccgggaacacgggccaggagtggcggagccagaagtggcaactgcaccccctgaaaaggaaataccttcattggatcaagagaaaaccaaacttgagcctggtcaaccccagctgtctccaggcatttccactattcatctgcatccacagtttccagtagtgattgaaaaaacatcacctcctgtgcctgttgaagtagctcctgaagcttctacgtctagtgccagccaagtgattgctcctactcaagtgacagaaatcaatgaatgtactgtgaaccctgatatctgtggagcaggacactgcattaacctaccagtgagatatacctgtatatgctacgagggctacaggttcagtgaacaacagaggaaatgtgtggatattgatgagtgtactcaggtccaacacctctgctcccagggccgctgtgaaaacaccgagggaagtttcttgtgcatttgcccagcaggatttatggccagtgaggagggtactaactgcatagatgttgacgaatgcctgaggccggacgtctgtggggaggggcactgtgtcaatactgtgggggccttccggtgtgaatactgtgacagcgggtaccgcatgactcagagaggccgttgtgaggatattgatgaatgtttgaatccaagcacttgtccagatgagcagtgtgtgaattctcctggatcttaccagtgcgttccctgcacagaaggattccgaggctggaatggacagtgccttgatgtggacgagtgcctggaaccaaacgtctgcgcaaatggtgattgttccaaccttgaaggctcctacatgtgttcatgccacaaaggctatacccggactccggaccacaagcactgtagagatattgatgaatgtcagcaagggaatctatgtgtaaacgggcagtgcaaaaataccgagggctccttcaggtgcacctgtggacaggggtaccagctgtcggcagctaaagaccagtgtgaagacattgatgaatgccagcaccgtcatctctgtgctcatgggcagtgcaggaacactgagggctcttttcaatgtgtgtgtgaccagggttacagagcatctgggcttggagaccactgtgaagatatcaatgaatgcttggaggacaagagtgtttgccagagaggagactgcattaatactgcagggtcctatgattgtacttgtccggatggatttcagctagatgacaataaaacatgtcaagatattaatgaatgtgaacatccagggctctgtggtccgcaaggggagtgcctaaacacagagggttctttccattgtgtctgccagcagggtttctcaatctctgcagatggccgtacgtgtgaagatattgatgaatgtgtaaacaacactgtttgtgacagtcacgggttttgtgacaatacagctggctccttccgctgcctctgttatcagggctttcaagccccacaggatgggcaagggtgtgtggatgtgaatgaatgtgaactgctcagtggggtgtgtggtgaagccttctgtgaaaacgtggaagggtccttcctgtgcgtgtgtgctgatgaaaaccaagagtacagccccatgactgggcagtgccgctcccggacctccacagatttagatgtagatgtagatcaacccaaagaagaaaagaaagaatgctactataatctcaatgacgccagtctctgtgataatgtgttggcccccaatgtcacgaaacaagaatgctgctgtacatcaggcgtgggatggggagataactgcgaaatcttcccctgcccggtcttgggaactgctgagttcactgaaatgtgtcccaaagggaaaggttttgtgcctgctggagaatcatcttctgaagctggtggtgagaactataaagatgcagatgaatgcctactttttggacaagaaatctgcaaaaatggtttctgtttgaacactcggcctgggtatgaatgctactgtaagcaagggacgtactatgatcctgtgaaactgcagtgctttgatatggatgaatgtcaagaccccagtagttgtattgatggccagtgtgttaatacagagggctcttacaactgcttctgtactcaccccatggtcctggatgcgtcagaaaaaagatgtatacgaccggctgagtcaaacgaacaaatagaagaaactgatgtctaccaagatttgtgctgggaacatctgagtgatgaatacgtgtgtagccggcctcttgtgggcaagcagacaacgtacactgagtgctgctgtctgtatggagaggcctggggcatgcagtgtgccctctgccccctgaaggattcagatgactatgctcagctgtgtaacatccccgtgacgggacgccggcagccatatggacgggacgccttggttgacttcagtgaacagtatactccagaagccgatccctacttcatccaagaccgttttctaaatagctttgaggagttacaggctgaggaatgcggcatcctcaatggatgtgaaaatggtcgctgtgtgagggtccaggaaggttacacctgcgattgctttgatgggtatcacttggatacggccaagatgacctgtgtcgatgtaaatgaatgcgatgagttgaacaaccggatgtctctctgcaagaatgccaagtgcattaacaccgatggttcctacaagtgtttgtgtctgccaggctacgtgccttctgacaagccaaactactgcactccgttgaataccgccttgaatttagagaaagacagtgacctggagtgaaacagaatctacataacctaagcccatatactctgcactgtgtaaaggaaaagggagaaatgtattatacttgagacattgcacctaccccggaaggctggaaatacagaaacagcatggaattgcaagtcctctgaagacaatgagaggatttaggatgagcccgataggtgtggcagaccaaatggacatttctctaaaaaaccagtatatatagtctgttcatatgtaaaattcaatggaagagaggtggaacagtgctgttattttaaacagaaggttgtattattatgttgttttgtttttttactattgcttgattaaatttggcatttaaatagtggtggaaatattttatataattttcattttttggttgtgcagttccttggctactgtttttcttttacttcagttttttaaaaatctcaaatgaaaaagtcttcgatacaatattgttaagctgtattataagtattgttacacagggttatgcaattcccggcctggagcatttttgaaattcaaattgtctgtcctgtggagcaggcagtgattttgttccaaaactttgtatacacatttggagaaaagtactttatattttcagtgttttgtctgattttaatgtccgttcttagccaagctgctagcaggtgttaattggatccctttccttcactgaaatggaagagtttataagcttacgttagtattgtaatatgtaaagtaagcccaacaaaaatttttaaaaatttgatgatccccaatatatctaccattgtatgttaaataaatcaccatttttgtagaaaaaattctacctg

SEQ ID NO: 7688 - protein, 1395 aa, Homo sapiens; identical to SEQ ID NO: 7686

SEQ ID NO: 7689 - DNA, 5369 bp, Homo sapiens
actccagtgactcgacttcaaatgtggttttggagtgcatcccagagttctgtttgctaagcttcctactcctgtttcagagacaccactgaatacagagcagcgagcactgaaggcttccctctttccttaaacctgtcgggttgtgggctctctcttttcccctcttgctcctttcttttctttttttctgtttttttaaaccttccaaggcaagttcatggatactaagctgatgtgtttgttgttctttttctccctgcctccgctcctagtgagtaaccacactggccgcatcaaggtggtctttactccgagcatctgtaaagtgacctgcaccaagggcagctgtcagaacagctgtgagaaggggaacaccaccactctcattagtgagaatggtcatgctgccgacaccctgacggccacgaacttccgagtggtaatttgccatcttccatgtatgaatggtggccagtgcagttcaagggacaaatgtcagtgccctccaaatttcacaggaaaactttgtcagatcccagtccatggtgccagcgtgcctaaactttatcagcattcccagcagccaggcaaggcgttggggacgcatgtcatccattcaacacataccttgcctctgaccgtgactagccagcaaggagtcaaagtgaaatttcctcctaacatagtcaatatccatgtgaaacatcctcctgaagcttccgtccagatacatcaggtttcaagaattgatggcccaacaggccagaagacaaaagaagctcaaccaggccaatcccaagtctcgtaccaagggcttcctgtccagaagacccagaccatacattccacatactcccaccagcaggtcattcctcacgtctaccccgtggctgctaagacacagcttggccggtgcttccaggaaaccattgggtcacagtgtggcaaagcgctccctggcctttcaaagcaagaggactgctgtggaactgtgggtacctcctggggctttaacaaatgccagaaatgccccaagaaaccatcttatcatggatacaaccaaatgatggaatgcctaccgggttataagcgggttaacaacaccttttgccaagatattaatgaatgtcagctacaaggtgtatgccctaatggtgagtgtttgaataccatgggcagctatcgatgtacctgcaaaataggatttgggccggatcctaccttttcaagttgtgttcctgatccccctgtgatctcggaagagaaagggccctgttaccgacttgtcagttctggaagacagtgtatgcaccctctgtctgttcacctcaccaagcagctctgctgttgtagtgtgggcaaggcctggggcccacactgtgagaaatgtccccttccaggcacagctgcttttaaggaaatctgtcctggtggaatgggttatacggtttctggcgttcatagacgcaggccaatccatcaccatgtaggtaaaggacctgtatttgtcaagccaaagaacactcaacctgttgctaaaagtactcatcctccacctctcccagccaaggaagagccagtggaggccctgaccttctcccgggaacacgggccaggagtggcggagccagaagtggcaactgcaccccctgaaaaggaaataccttcattggatcaagagaaaaccaaacttgagcctggtcaaccccagctgtctccaggcatttccactattcatctgcatccacagtttccagtagtgattgaaaaaacatcacctcctgtgcctgttgaagtagctcctgaagcttctacgtctagtgccagccaagtgattgctcctactcaagtgacagaaatcaatgaatgtactgtgaaccctgatatctgtggagcaggacactgcattaacctaccagtgagatatacctgtatatgctacgagggctacaggttcagtgaacaacagaggaaatgtgtggatattgatgagtgtactcaggtccaacacctctgctcccagggccgctgtgaaaacaccgagggaagtttcttgtgcatttgcccagcaggatttatggccagtgaggagggtactaactgcatagatgttgacgaatgcctgaggccggacgtctgtggggaggggcactgtgtcaatactgtgggggccttccggtgtgaatactgtgacagcgggtaccgcatgactcagagaggccgttgtgaggatattgatgaatgtttgaatccaagcacttgtccagatgagcagtgtgtgaattctcctggatcttaccagtgcgttccctgcacagaaggattccgaggctggaatggacagtgccttgatgtggacgagtgcctggaaccaaacgtctgcgcaaatggtgattgttccaaccttgaaggctcctacatgtgttcatgccacaaaggctatacccggactccggaccacaagcactgtagagatattgatgaatgtcagcaagggaatctatgtgtaaacgggcagtgcaaaaataccgagggctccttcaggtgcacctgtggacaggggtaccagctgtcggcagctaaagaccagtgtgaagacattgatgaatgccagcaccgtcatctctgtgctcatgggcagtgcaggaacactgagggctcttttcaatgtgtgtgtgaccagggttacagagcatctgggcttggagaccactgtgaagatatcaatgaatgcttggaggacaagagtgtttgccagagaggagactgcattaatactgcagggtcctatgattgtacttgtccggatggatttcagctagatgacaataaaacatgtcaagatattaatgaatgtgaacatccagggctctgtggtccgcaaggggagtgcctaaacacagagggttctttccattgtgtctgccagcagggtttctcaatctctgcagatggccgtacgtgtgaagatattgatgaatgtgtaaacaacactgtttgtgacagtcacgggttttgtgacaatacagctggctccttccgctgcctctgttatcagggctttcaagccccacaggatgggcaagggtgtgtggatgtgaatgaatgtgaactgctcagtggggtgtgtggtgaagccttctgtgaaaacgtggaagggtccttcctgtgcgtgtgtgctgatgaaaaccaagagtacagccccatgactgggcagtgccgctcccggacctccacagatttagatgtagatgtagatcaacccaaagaagaaaagaaagaatgctactataatctcaatgacgccagtctctgtgataatgtgttggcccccaatgtcacgaaacaagaatgctgctgtacatcaggcgtgggatggggagataactgcgaaatcttcccctgcccggtcttgggaactgctgagttcactgaaatgtgtcccaaagggaaaggttttgtgcctgctggagaatcatcttctgaagctggtggtgagaactataaagatgcagatgaatgcctactttttggacaagaaatctgcaaaaatggtttctgtttgaacactcggcctgggtatgaatgctactgtaagcaagggacgtactatgatcctgtgaaactgcagtgctttgatatggatgaatgtcaagaccccagtagttgtattgatggccagtgtgttaatacagagggctcttacaactgcttctgtactcaccccatggtcctggatgcgtcagaaaaaagatgtatacgaccggctgagtcaaacgaacaaatagaagaaactgatgtctaccaagatttgtgctgggaacatctgagtgatgaatacgtgtgtagccggcctcttgtgggcaagcagacaacgtacactgagtgctgctgtctgtatggagaggcctggggcatgcagtgtgccctctgccccctgaaggattcagatgactatgctcagctgtgtaacatccccgtgacgggacgccggcagccatatggacgggacgccttggttgacttcagtgaacagtatactccagaagccgatccctacttcatccaagaccgttttctaaatagctttgaggagttacaggctgaggaatgcggcatcctcaatggatgtgaaaatggtcgctgtgtgagggtccaggaaggttacacctgcgattgctttgatgggtatcacttggatacggccaagatgacctgtgtcgatgtaaatgaatgcgatgagttgaacaaccggatgtctctctgcaagaatgccaagtgcattaacaccgatggttcctacaagtgtttgtgtctgccaggctacgtgccttctgacaagccaaactactgcactccgttgaataccgccttgaatttagagaaagacagtgacctggagtgaaacagaatctacataacctaagcccatatactctgcactgtgtaaaggaaaagggagaaatgtattatacttgagacattgcacctaccccggaaggctggaaatacagaaacagcatggaattgcaagtcctctgaagacaatgagaggatttaggatgagcccgataggtgtggcagaccaaatggacatttctctaaaaaaccagtatatatagtctgttcatatgtaaaattcaatggaagagaggtggaacagtgctgttattttaaacagaaggttgtattattatgttgttttgtttttttactattgcttgattaaatttggcatttaaatagtggtggaaatattttatataattttcattttttggttgtgcagttccttggctactgtttttcttttacttcagttttttaaaaatctcaaatgaaaaagtcttcgatacaatattgttaagctgtattataagtattgttacacagggttatgcaattcccggcctggagcatttttgaaattcaaattgtctgtcctgtggagcaggcagtgattttgttccaaaactttgtatacacatttggagaaaagtactttatattttcagtgttttgtctgattttaatgtccgttcttagccaagctgctagcaggtgttaattggatccctttccttcactgaaatggaagagtttataagcttacgttagtattgtaatatgtaaagtaagcccaacaaaaatttttaaaaatttgatgatccccaatatatctaccattgtatgttaaataaatcaccatttttgtagaaaaaattctacctgagagtaattgtcaatgagtacatgtgtataagttgtatcccactctccccacttttatcttttccagtggtcttctgttaatgtagtgtcttttacaagttaatcattaaatttgttagatcttgttatgggct

SEQ ID NO: 7690 - protein, 1395 aa, Homo sapiens; identical to SEQ ID NO: 7686

SEQ ID NO: 7691 - DNA, 621 bp, Homo sapiens
gcgggtggcggcgaacgcggagagcacgccatgaaggcctcgggcacactacgagagtacaaagtagtgggtcgctgcctgcccacccccaaatgccacacaccacccctctaccgcatgcgaatctttgcgcctaatcatgtcgtcgccaagtcccgcttctggtacttcgtatctcagttaaagaagatgaagaagtcttcaggggagattgtctactgtgggcaggtgtttgagaagttccccttgcgggtgaagaacttcgggatctggctgcgctatgactcccggagcggcacccacaacatgtaccgggaataccgggacctgaccaccgcaggcgctgtcacccggtgctaccgagacatgagcgcccggcacggcggccgggcccactccattcagatcatgaaggtggaggagatcgcggccagcaagtgccgccggccggctgtcaagcagttccacgactccaagatcaagttcccgctgccccaccgggtcctgcgccgtcagcacaagccacgcttcaccaccaagaggcccaacaccttcttctaggtgcagggccctcgcccgggtgtgccccaaataaactcaggaacgccccagaaaaaaaaa

SEQ ID NO: 7692 - protein, 176 aa, Homo sapiens [sequence omitted]

SEQ ID NO: 7693 - DNA, 2211 bp, Homo sapiens
gtgggcatgtcttagggaagcccctctgtatgagttcccttatctgtgcctgcagcatgcagcatgatttttttttttttttttttttttgagacagagtctcactctgtcgcccaggctggagtgcagtggcgtggtctcggctcaccgcaaactccgcctcctgggttcacaccattctcctgcctcaatctcccaagtagctgggactacaggcacccaccaccacgcccagctaattttttttttttttgtattttttagtagagatggggtttcgccatgttagccaggatggtctggatctcctgacctcgtgatccgcccgcctgtgcctcccaaagtgttgggattacaggcgtgagccactgtgcccagcctccagcatgatttttttaggccgttcttttgtttgaaagaattcaactaaggatccactctgcctgcctgaccggtttcttcctttcttctctctcatcgggtcccgagttcccatgactgcagcttccagaagagcagagctttggtatcctactcacagcgccaaaactgcaggggccaaggaaagatacaaaattcttgtgtgcagcctcttttggactccagctcttgttctctcgctgaatcccaccgccaccccttcaagtcatcggctgtgattcacctgtgggtttctgaaggctagaagcttccacaatgagccaggaaacaagttctgattggctgggaacagacctctgctccaagattcagggctggcagtattccttctgttctggtggctcgatcttcattgctttcctctggacttgtaagttattccaacaaaccccagctgctctgcagtgaaatgttccaaataattaatatttctgcaggaattaccttgtaaaagatatgtgcttttaagtatttggttattgtgcaaatgtttttgactaccttttgtggccaattttctccttcagcgggctcatgtataattttagataaaagtacaaggaaattatgattccataatcataagtctactttcagcaatacacgtatcttcagagaatctcagcctccctgcagcatcctcctggtgcacagaaaaactgctgaattctggcaagatactcaaaggattctgacgggtgaccatctcaggccggagatatgcccaaccaactggaaaagcagagacagccatggacagatctgctgacgctaaagtttatagacagctgaggtgcaacccatataatcacccagatgttattaggccatgatcattctgtagtaagctacctcccttctgtgtttcctctcacctgacagcctattgtgggcactttcaaggccccactgtgtccaaatcacaccaccaccaaagctcacagaagcacgctggtagatttctcctctttggtggtttcccatgaccagccaagggaaatacccaacaatcattctcagtgtgcacagatttaccttcagcttttttggttatattgtcattattattttctttgtccagtgggagagttaaggggcctgctatggactgaactctgtccccctcaaattcatatgttgaagccccaaccttcaacatgactatatttgaaaacagtccctttatggaggtaaagttaaatgagatcataagagtggggcccttgttcgatagaactggtgtccttacaagaagaggaagaggctgagtgcagtggctcaagcctataatcccagcactttgggaagctgaggcaggaggtacgcttgggcccaggagttcaagaccagcttgggcaacataacaagaccctatctctacagaaaaaaattaaaaattaaccaggtgtgatggcatgtgcttgtggtaccagctactcaggaggctgagatgggtggatggcttgagcctgggaggtcaaggttgcagtgagctgtgatagcactgcactccagcctgggtaacagagcaagaccctgtccctccccacaccaccccaactccccccaaaaaggaagagataccagagtgcactctctcgatctctctctctctcttccacgtgaggacacagaagaaaaaaaaaaaagcccatctgcaaggcaggaagacggccttcaacagcaacgaaatcagtcagcaccttggtttggactgcttggtctccagaacgagggaaaataaattaaaataaatgtctgtagaattaa

SEQ ID NO: 7694 - protein, 54 aa, Homo sapiens
MTAASRRAELWYPTHSAKTAGAKERYKILVCSLFWTPALVLSLNPTATPSSHRL

SEQ ID NO: 7695 - DNA, 802 bp, Homo sapiens
agagatggggtttcgccatgttagccaggatggtctggatctcctgacctcgtgatccgcccgcctgtgcctcccaaagtgttgggattacaggcgtgagccactgtgcccagcctccagcatgatttttttaggccgttcttttgtttgaaagaattcaactaaggatccactctgcctgcctgaccggtttcttcctttcttctctctcatcgggtcccgagttcccatgactgcagcttccagaagagcagagctttggtatcctactcacagcgccaaaactgcaggggccaagaaacaccctgttgcccaggctggagtgcagtgatgcaatcatagctcacaatggcctcgaactcctgggctcaagccatcctcccgtgtcagactcccaagtagctgggattacagagacggagtcttgctctgtcacccaggctggagtgcagtggtgcgatcgcagctctctgtaacctctgtctccctggttcaagtgattcttctgcctcagcctcccaagtagctgggattacagaaactcctcctacccatggaatctgccagcagttggattcttgactatctttaggacttttcctaatctcaccttctccatctgtgaaatggaaataatcaaaggctcaacaatccttctgtgaaagaggcatattttgtggtgctatgtgctgatcttccacacagccaaatggaggcagaggtcacagaggaactagaaggatggaaaactgcaggagagtctcgttgccatcactcagtcaatcaaccagttttggatacc

SEQ ID NO: 7696 - protein, 33 aa, Homo sapiens
MTAASRRAELWYPTHSAKTAGAKKHPVAQAGVQ

SEQ ID NO: 7697 - DNA, 2010 bp, Homo sapiens
ggatctcctgacctcgtgatccgcccgcctgtgcctcccaaagtgttgggattacaggcgtgagccactgtgcccagcctccagcatgatttttttaggccgttcttttgtttgaaagaattcaactaaggatccactctgcctgcctgaccggtttcttcctttcttctctctcatcgggtcccgagttcccatgactgcagcttccagaagagcagagctttggtatcctactcacagcgccaaaactgcaggggccaagatgcaaatcttccgcacaaaagacagctttgcagggctgcttctgtttgcaggccctctgaacagccatctcaaaacatgtcaaagaagtatatcttggggaaagatacaaaattcttgtgtgcagcctcttttggactccagctcttgttctctcgctgaatcccaccgccaccccttcaagtcatcggctgtgattcacctgtgggtttctgaaggctagaagcttccacaatgagccaggaaacaagttctgattggctgggaacagacctctgctccaagattcagggctggcagtattccttctgttctggtggctcgatcttcattgctttcctctggacttgtaagttattccaacaaaccccagctgctctgcagtgaaatgttccaaataattaatatttctgcaggaattaccttgtaaaagatatgtgcttttaagtatttggttattgtgcaaatgtttttgactaccttttgtggccaattttctccttcagcgggctcatgtataattttagataaaagtacaaggaaattatgattccataatcataagtctactttcagcaatacacgtatcttcagagaatctcagcctccctgcagcatcctcctggtgcacagaaaaactgctgaattctggcaagatactcaaaggattctgacgggtgaccatctcaggccggagatatgcccaaccaactggaaaagcagagacagccatggacagatctgctgacgctaaagtttatagacagctgaggtgcaacccatataatcacccagatgttattaggccatgatcattctgtagtaagctacctcccttctgtgtttcctctcacctgacagcctattgtgggcactttcaaggccccactgtgtccaaatcacaccaccaccaaagctcacagaagcacgctggtagatttctcctctttggtggtttcccatgaccagccaagggaaatacccaacaatcattctcagtgtgcacagatttaccttcagcttttttggttatattgtcattattattttctttgtccagtgggagagttaaggggcctgctatggactgaactctgtccccctcaaattcatatgttgaagccccaaccttcaacatgactatatttgaaaacagtccctttatggaggtaaagttaaatgagatcataagagtggggcccttgttcgatagaactggtgtccttacaagaagaggaagaggctgagtgcagtggctcaagcctataatcccagcactttgggaagctgaggcaggaggtacgcttgggcccaggagttcaagaccagcttgggcaacataacaagaccctatctctacagaaaaaaattaaaaattaaccaggtgtgatggcatgtgcttgtggtaccagctactcaggaggctgagatgggtggatggcttgagcctgggaggtcaaggttgcagtgagctgtgatagcactgcactccagcctgggtaacagagcaagaccctgtccctccccacaccaccccaactccccccaaaaaggaagagataccagagtgcactctctcgatctctctctctctcttccacgtgaggacacagaagaaaaaaaaaaaagcccatctgcaaggcaggaagacggccttcaacagcaacgaaatcagtcagcaccttggtttggactgcttggtctccagaacgagggaaaataaattaaaataaatgtctgtagaattaa

SEQ ID NO: 7698 - protein, 96 aa, Homo sapiens; identical to SEQ ID NO: 508

SEQ ID NO: 7699 - DNA, 540 bp, Homo sapiens
attacttttccagctcgaatgaggtataattgacaaataaaagttgtattcatttaagatatacaagtttatgatctgatatacatgtacattgtgaaataatcaccacaatcaagctaattcaagctaattaacatatacattacttcacatcattgcaattctcttcttgttcttgttgttcttctctgtgtgtgtgtcttactattggacaggggaaaaattcaaaactaagtgcagggaagtcgagctcaaatgaagggatcagtggttttacaataaacctggaattagcaggaaaggttggagtaaataagtgtaaaatgtgtagcagttcctcttgcaaatcatgctctgcacattctgcacatgtatcccagaaccttctggttcaatgttgacatggataacggcttccactaacttttccttgaacctgtggtcaggccactgcactgcatcccaggtggcagagggagaccagcaggtttgtgaagagaggcacaaggacataaacagctcaggatgggtatcaagcaa

SEQ ID NO: 7700 - protein, 62 aa, Homo sapiens
MLCTFCTCIPEPSGSMLTWITASTNFSLNLWSGHCTASQVAEGDQQVCEERHKDINSSGWVS

SEQ ID NO: 7701 - DNA, 2183 bp, Homo sapiens
agaatgtctctgaaatgagatgagtggaaaatgccttaaacaggtggatgtggaacaggtcggggactttaaggacttcagtggaggaggggtgggttggggaagggaaacaaatgaagatgtcttagaagtcactgcaatttatatggaatctgttcaacgccgacactgaaccatatgagaagacgtttgaaactattgctttgctgaaaacatctgactgccaggctaggatgtgacacttaagggacttaccaatttgggattcttccaggagctgaaaactgattgcaaatatgaaacagatttcactacaggacttgaaccctacattaaaaaacaacaagctccccaaaataattgaaaaagatcttcaccaaagagtagctgcaatgtgaatggcaggatatgaagcaagtaagagagctatcactgccaaaggctactgactaatggtgaaaagattatcttaagcttggaattaagtgatgaaagggaccttcgaaattatcaactctaaatacttctttacaggaaaattgaaagcagttaagaacctgccccctaccgtggagttcttggtgccgtgagttggagttcttggtgcctgggtgcgtccccaaggccactggtcttcagatctttcttacttgagaagaacgcctccgcctcctggctctcccaccagtggtattgccaccaccacacaccagcataaagcacagattgctgcccagctccttggagaggggccagtgcatttgtcaggaattgaaaagttttggagccagttcgaggactttctcctgcacaaagtgttggctggaagcatgattatctcacacagagcgttggaattacttcatgatgatttcaaagaaaattttcttctctaaacactcttatcccaagggcatcctaaagttcctctggaatgcattgggtgggagagaaagttctatgtcaactcttctggcagagggaaaagctgaccgaggaagtcaaaatgaaagaaagaagcagacaggactgaggctccctgagatgcagaaactgaggcacagagcaaggggctaggattcttgactttcttctgcagaacactgaaacatgcctcctctttcctggccccaccaagcagagtttaggcttcaagaagactgaatgcatctgtacagagcacaatcccttctccaagaaggaaaccatggggcttatcaagaaaggcgtacactgaagagactggaaagtgaagatgcactatttgtcaagatgtgccacagcagaagcaagttgtgttggcagtaggaaacaagataaagagaagaactcaaagaattgagagaaggctttgaacatgatgatggagaaataacactcttgggagaaatgaagatactttctcctccctggtttacctgagtttccagcacccagtgataagaaaggatggcattagtgatgtgtacacctgcagtgatagcttcacctttctaaagcagatgccgtggtagacattttgccagccctcctttcactatacacacagcttggtgtacgctggcagacttttgacctaatttcttaaccctcaaatattccaagacagaacaaagcacacaacaaaaccagaatgaggccgggcaaagtggctcatgcccgtaatcccagcactttgggaggctaaggggtgggcagatcacttgaggtcaggagtttgagaccagcctaggcaacatggtgaaacccagtctctactgaaaatacaaaaatcagccgggtgtggtggcaaatgcctgtaatcccagctactggggaggctgagacacaagaatcacttgaacccaggagggggagtttgcagtgagccgagattgtgccactgcatgccagtctgaacaacagagcaagactctgtcacaaaaacaaacaaaaaactgaatgaatggaagcagataagtgcagagagaaacactgatttaccttcagaaagataaaaaagtagtatattgatatacttgtatattgctatctactagtatagcttcagttggtgtatgagtatagaactattgggttgttctttatgtgattactccttcccagttttagtaaagtattccaatttgagggaaattctttcatttgtcaataaaataaaaagaggtaagttttaaaatctg

SEQ ID NO: 7702 - protein, 70 aa, Homo sapiens
MMISKKIFFSKHSYPKGILKFLWNALGGRESSMSTLLAEGKADRGSQNERKKQTGLRLPEMQKLRHRARG

SEQ ID NO: 7703 - DNA, 3861 bp, Homo sapiens
atgtatgaaagctttgaccagttcatctggtcagatgtacgaaccagttgccgtcttcaatgtttgcgtgtcacagctgtgaccattgtaactaatagcaatgttgcaggaaaattgaaagcagttaagaacctgccccctaccgtggagttcttggtgcctggtattgccaccaccacacaccagcataaagcacagattgctgcccagctccttggagaggggccagtgcatttgtcaggaattgaaaagttttggagccagttcgaggactttctcctgcacaaagtgttggctggaagcatggttgatacattgatgagctacgaaaagcaagagggaacatgcccatctactaagaggagaagagagcctaaaacatacacattcactaaggaagagaaagccaaatgtgaggtaacagacactcacagggctacacctacaactggtcaatttaaaaatgttaaaactaaacttggcagcagatatcatccttctaccacctctatgcttgtgcccttcagcttcctcctttgtcttcatgcctctagaaggacagtgactatgtctcctaaagacagcactgattatcacacattatctcacacagagcgttggaattacttcatgatgatttcaaagaaaattttcttctctaaacactcttatcccaagggcatcctaaagttcctctggaatgcattgggtgggagagaaagttctatgtcaactcttctggcagagggaaaagctgaccgaggaagtcaaaatgaaagaaagaagcagacaggactgaggctccctgagatgcagaaactgaggcacagagcaaggatgtgccacagcagaagcaagttgtgttggcagtaggaaacaagataaagagaagaactcaaagaattgagagaaggctttgaacatgatgatggagaaataacactcttgggagaaatgaagatactttctcctccctggtttacctgagtttccagcacccagtgataagaaaggatggcattagtgatgtgtacacctgcagtgatagcttcacctttctaaagcagatgccgtggtagacattttgccagccctcctttcactatacacacagcttggtgtacgctggcagacttttgacctaatttcttaaccctcaaatattccaagacagaacaaagcacacaacaaaaccagaatgaggccgggcaaagtggctcatgcccgtaatcccagcactttgggaggctaaggggtgggcagatcacttgaggtcaggagtttgagaccagcctaggcaacatggtgaaacccagtctctactgaaaatacaaaaatcagccgggtgtggtggcaaatgcctgtaatcccagctactggggaggctgagacacaagaatcacttgaacccaggagggggagtttgcagtgagccgagattgtgccactgcatgccagtctgaacaacagagcaagactctgtcacaaaaacaaacaaaaaactgaatgaatggaagcagataagtgcagagagaaacactgatttaccttcagaaagataaaaaagtagtatattgatatacttgtatattgctatctactagtatagcttcagttggtgtatgagtatagaactattgggttgttctttatgtgattactccttcccagttttagtaaagtattccaatttgagggaaattctttcatttgtcaataaaataaaaagaggtaagttttaaaatctgtatagttcttccttcatgctagttgcctctctttttgatatttcttctataaaaatcttttcttacattcagttttcattgtatagatcatgaaggaaccatagtgattatcaaagatcagccgataagttcaaggcagagttccacctttccccatgaagcccttccagacttgtttacatgtaacacccttgaaggcaagactcatgtctatgctatctttgctgctatttggcacgtattaggtgtaagggcaattagaccatatcaattaatgatcagtaagaatggataaagtagatgtttttgtgagcctctcaaagaagatgtatagaatattttggaaatgggcccaatttgtttctaaaggaaaatttactttcaaattaaaaaaaaaaaatcactcaaatgagattttgggggatttcatatgattaactctttacattatcttgtggtaattatacagaaatctgtatttatgtaaacacagtaaatgcatcataacactagaataagtatacaaatactgcatgtcaaattaggttataatcactttcaagggacgtgatttcctagctaaacagattcgtttacattttgcaaaataaaaaataagtgaaaataactatataaaatcaggcttacagctggacagatcttcttggcaatggtccagacactgagtagggaaaagcccctccagctgaggaacgttcaggacgctcaggacgactttgcaggcgcggccgggagagaggccatttttggggttgccttgactgtgcaccctgttcctggctacctatggggagataagctgcattcacatatcagatgagactctttttgtgagaggtctggggtgggatgtgggaagtggagtgaaaacctgcttagtaggggaggaaaaaaacaagcaatccaacacttcacctttaggtaataaacataatagaaaaagtcaggaattctctaactaaaaagcagacagtggaagctagcatcggactcactgaattttagaatcagggtctgtgtaccatggattatctggccctgcccttgtcactggatgagaagattctggctatagggcaagaagcagtgcttggaccgagatccagaatgttaccctcaaatctgaagcttatttatgagataaataaagctcatattttcaagagagataattattttaaaacttctcatttcaatgtgtaccttaaaaaaataaatacattttgggccaggtgcgatggttcatgcctgtaatcccagcactttgggaggccgaggtgggcagatcatgaggtcagtttgagaccagcctggccaacatagtgaaactccgtctctactaaaaataaaaataaaaaaattagctgggcatagtggcacgtacctgtagtcccagctacttaggaggctgaagcaggagaatcgcttgaacccatgaggcagaggttgtggtgagcccaaattgcgccactgcactccagcctgggcaacagagcaagactccatctcaaaaaaccaatcaaccaaccaaccaacaaaaaacatttcacatctccctgacgtagccaacattttctccaacattctcttattttgatggcagaagggcataactgtaaatctcagtttttatatggtattgtataatatagtggcatcctttgcggccagttgattgtgaagagcagtttgcctttacttagcttccatgaacattagctttaaatgctcattgacattaatgagagccagtttgctaaatctgtgtctccttcatgttcatttgctacttagttttgttgattccaagaagtcactaatttttttaaatcatagattctgatttcgaggtagcttcatttttctagtgttgagtaaaatgtgtgtgtgtgtgtgctttagtttaattaatactaatttttattcaaaatatatttgttgagcacttactctctgctgtggctgggcatacattactttctttccacagtccgttggttgaattgtcctgagcaggggttgacaaatgatggcctgtgagccaaatctaccccactgcctgtttttgtaaataaagctttatcagaacata

SEQ ID NO: 7704 - protein, 290 aa, Homo sapiens [sequence omitted]

SEQ ID NO: 7705 - DNA, 504 bp, Homo sapiens
gaattgaaaagttttggagccagttcgaggactttctcctgcacaaagtgttggctggaagcatgaagcaataacacatggtttgccaaagaatctgcattgaataatactggtggtgaccacaagaacatgcctctctgactgcaaggaacaagagtgacccagggtttcagctgctgccttggaaattcatcacagtgcaagtctatgcttcccacgggctgctcccagcctgtgaataagcctggcatctttgttgaggcaggcctatttctggagatgcaggatcctccgatgggcgaatttggctctaggactgcttgatggccttgacagactttccttagaaatgcatggcaatttagggttcctccacccttccctctttctctccttcacctagggtcggacttgcatcatggcctgaaagctccaccagcctctcctgccctcctcctcattttctttcacaggcatatcctctaataaatttcttgcacattg

SEQ ID NO: 7706 - protein, 38 aa, Homo sapiens
MLPTGCSQPVNKPGIFVEAGLFLEMQDPPMGEFGSRTA

SEQ ID NO: 7707 - DNA, 571 bp, Homo sapiens
caagggataagcagggagcacttctggctgtgcataagagaggagtgtttttatttgtgtttgtcaaggatgaacttatgagcaaactacaaaaggacattgcctctttaacggaggctctggcttgtgttcctgggagcttcgcagcgtttgttcgtaaagcagcatgaaagagttgattttcattttatgttgtgcttgtgaggcattagcatgatgttctaacacttgtaaatgaatacagctctcgcctaatctgtcattttaatgccttatagattttatttcactcgatgttgtaccagattctcaataataataatcaactgctttgttgttctcttgcagaaattaaatttctgcagtgagtgtgcaactaataaaagatgttgcttgaggaaacaaaaaataaatatgatgaatcataaaagttgggtggggggagaagggaagttgctcctagatgaaagacaattactgaaccagtgtggttttcctcggattctctaacaagtacaagaccaaaaagaagccaaaaacctcttaattgtgtatactgaaagaaaaagaa

SEQ ID NO: 7708 - protein, 80 aa, Homo sapiens
MPYRFYFTRCCTRFSIIIINCFVVLLQKLNFCSECATNKRCCLRKQKINMMNHKSWVGGEGKLLLDERQLLNQCGFPRIL

SEQ ID NO: 7709 - DNA, 536 bp, Homo sapiens
cataagggttaatattattattgatttccttaagtctttccaacatccacgactgtgcattaatcagtagctaaaaagaccagaaaagacagaaaaatttaactactttgttccctaattcaaatttcttcaagaagtccttctaaagatatggaactcctgcatttttcataaaacagtggttagatcaatttccgtgtaagcaatgaatcatctttatacttcacaaaagatggggagcaaagtttgacttaccaaagaaaggctgactgattagtctctgggtgaacagtctggtgggaagaccacagattcctgacccctgcacaggtttaacatgaagccctccaaggaacctttcagaactgcagcaatgacttacggtggcttcagagtggggtggttggatgaatctgaggatgtggaacccgtggatatggagggctgactcaatgccttgatgagcttgaagataagtatatacccccgaaaccaccaccacaaacaatgccataaacttaaccactgcctctaaa

SEQ ID NO: 7710 - protein, 36 aa, Homo sapiens
MKPSKEPFRTAAMTYGGFRVGWLDESEDVEPVDMEG

SEQ ID NO: 7711 - DNA, 2001 bp, Homo sapiens
tgtaatgatgggagggaggatgcaaggcaggacttacgggtcctagccagctgtgctgcacctggtccgtgaggcagtgtggagtccaccgaaacgaccctcaagcctgatgccagttccagaagcccagtcggcaactctgccaccttacactcctctccccgtggaactgcctgggggtgctggcatggggacatgagggatgtctgacaggagaaacaagcatttcaagagtgtgtggttggcttcgctgtcctttggggggaggaactggaatcagtcaacaggcccgactcccagttccagcctgaacactggtcagctgaagacaacgctgccaccttcatctcttccctgcctgtcctgcttacaacagttgcaagaagtttatacccacattaagcccccagaggcaggctggcagccagccttcgccactggtgcagagaactgagtcaaccacccggtgttcctggctgctccccctgagaagctttcccaccctgttccctgagtcgagagtcttggctgggcacctgctgcactgtggacgtgcggacgcggcctccagaagggggaagggagccctggctggcttctctgagacgtgttgagtggcttgccattgaagactgtttcctcactcaggcagctgcatgccccaagtgagtgacttcctctctctggactcagtttctgaatctgtagacaaagagggtggaccagatggtcttggaggtgccttccaggtcacatctctcctgtttctaacagcaggtggaagcaggtgaggagggcagtcgggcagagaggaatggagaggaattcccccacagaggctcttgggaaccacacaattccccattctggtgccacctgcttcaaggatgtgagtgagagcagtgctggccttgaagcctacatcggtgggtagtctagcctccctagatgtgtccttaggtgtcatgggatccatatctggatcatcaaggagacctcacttaggcttctcttgacttaccaggaaaggctaagtcttgcttcgggcaggcagctgcctctggggcccgggcctgtggccccaggggaaagaattgttgccccaagatgctcatgcaatgttgtgtgactgtggcaaggctgtgccattttagctgggatcaacacgctaatgggcacaggtccagggggagtgcaggtgccttcctgggtgcaaagtggccctcatccccatagcacacaatgtctgcacagctgaggctggaagggactggctgagggccgtgctggtgtgggcagatccctggaagatcacctgggccatctcctcattctaaagatgagaagaacgaggcttggagaggatgagtgtcttgttgagggttgcacagcaagttggggacacagctgcaggaaatccaagtctcctgattcctagcccatgatattttctctcccaccaagttgaaaggctgaggtgatgggaggcctggcataccacagatggaaacttgcatcgttgcccccggggctcagatgattctctaaaaatgtgtctgaggaagtgagagtgcagggcctctcctcacacgttggagctgtaagtagggcacgtgctttcagctccaggcaggactggagaaggttatggaagggcagccaaccaagaagcacttatttaagcatttttatgtgcctagccctgagctaggcatagtagggcataaaggagctttgaaggaccctcccaacacagcaatttcactgcagctggtgagcaaatttaactcacaaatcaattacaaaaacaacctcatgcaagctactgtttgtgtaataaaatgtaagaacatatatttgtatttgcgtaaaggaaatctggaaggatataaaaagataataaaagtgttaactaaacagttacgtgatggggtgggggtgagatttttgtcctttgtaccttttaattacaaaattattttgaactatgtgaatgcattt

SEQ ID NO: 7712 - protein, 83 aa, Homo sapiens
MSDRRNKHFKSVWLASLSFGGRNWNQSTGPTPSSSLNTGQLKTTLPPSSLPCLSCLQQLQEVYTHIKPPEAGWQPAFATGAEN

SEQ ID NO: 7713 - DNA, 698 bp, Homo sapiens
gttatttttaaggacattattccaagagagaaaaaggtcttaagtccactgcacctgacagagtattcttttgttcctagaaggctggtttctcttgacatctctgccctcattaaaaaagcatatcacagttgtcacctttatgttttcagtcatgcagtttcaagccccaaaacagaatgttgtcatttatttttcttctgaagaaatggcaccctgctcacatgcatgcatgctcaacgccaaaaatccgagaggacattcctgtagcacctctctaattcagagcacctggcaagtctgagttagcgagttgtctcaaccaggggatagtaaaggctattttatgtcttccacgtatattcactaactaggtaataatcacttgccattagcacatgaaaattgtgcgtaagtggtgctgctgaagagctagaaaacagtttgttctcaggtaggtaaatggtccctcctgcagtcttgttcacactgttaatttgctgagcaaaccctttcctcaaggactgtgcaaacaccggtttcgggctccatgttaaggaagctcacaggcagtcctctgcccccttgagacgacaattcatcttccaccacaacaaagccattttgccacaccattgtctcccttcttcgtctttgtcaaagtacctcaccagtgaaagaaaagtgacctctgcttc

SEQ ID NO: 7714 - protein, 53 aa, Homo sapiens
MFSVMQFQAPKQNVVIYFSSEEMAPCSHACMLNAKNPRGHSCSTSLIQSTWQV

SEQ ID NO: 7715 - DNA, 3942 bp, Homo sapiens
gcttaaaaaaaagccatgacggctctcccacaattcatcttccctgcgccatctttgtattatttctaatttattttggatgtcaaaaggcactgatgaagatattttctctggagtctccttctttctaacccggctctcccgatgtgaaccgagccgtcgtccgcccgccgccgccgccgccgccgccgccgcccgccccgcagcccaccatgtctcgccgcaagcaaggcaaaccccagcacttaagcaaacgggaattctcgcccgagcctcttgaagccattcttacagatgatgaaccagaccacggcccgttgggagctccagaaggggatcatgacctcctcacctgtgggcagtgccagatgaacttcccattgggggacattcttatttttatcgagcacaaacggaaacaatgcaatggcagcctctgcttagaaaaagctgtggataagccaccttccccttcaccaatcgagatgaaaaaagcatccaatcccgtggaggttggcatccaggtcacgccagaggatgacgattgtttatcaacgtcatctagaggaatttgccccaaacaggaacacatagcagataaacttctgcactggaggggcctctcctcccctcgttctgcacatggagctctaatccccacgcctgggatgagtgcagaatatgccccgcagggtatttgtaaagatgagcccagcagctacacatgtacaacttgcaaacagccattcaccagtgcatggtttctcttgcaacacgcacagaacactcatggattaagaatctacttagaaagcgaacacggaagtcccctgaccccgcgggttggtatcccttcaggactaggtgcagaatgtccttcccagccacctctccatgggattcatattgcagacaataacccctttaacctgctaagaataccaggatcagtatcgagagaggcttccggcctggcagaagggcgctttccacccactccccccctgtttagtccaccaccgagacatcacttggacccccaccgcatagagcgcctgggggcggaagagatggccctggccacccatcacccgagtgcctttgacagggtgctgcggttgaatccaatggctatggagcctcccgccatggatttctctaggagacttagagagctggcagggaacacgtctagcccaccgctgtccccaggccggcccagccctatgcaaaggttactgcaaccattccagccaggtagcaagccgcccttcctggcgacgccccccctccctcctctgcaatccgcccctcctccctcccagcccccggtcaagtccaagtcatgcgagttctgcggcaagacgttcaaatttcagagcaacctggtggtgcaccggcgcagccacacgggcgagaagccctacaagtgcaacctgtgcgaccacgcgtgcacccaggccagcaagctgaagcgccacatgaagacgcacatgcacaaatcgtcccccatgacggtcaagtccgacgacggtctctccaccgccagctccccggaacccggcaccagcgacttggtgggcagcgccagcagcgcgctcaagtccgtggtggccaagttcaagagcgagaacgaccccaacctgatcccggagaacggggacgaggaggaagaggaggacgacgaggaagaggaagaagaggaggaagaggaggaggaggagctgacggagagcgagagggtggactacggcttcgggctgagcctggaggcggcgcgccaccacgagaacagctcgcggggcgcggtcgtgggcgtgggcgacgagagccgcgccctgcccgacgtcatgcagggcatggtgctcagctccatgcagcacttcagcgaggccttccaccaggtcctgggcgagaagcataagcgcggccacctggccgaggccgagggccacagggacacttgcgacgaagactcggtggccggcgagtcggaccgcatagacgatggcactgttaatggccgcggctgctccccgggcgagtcggcctcggggggcctgtccaaaaagctgctgctgggcagccccagctcgctgagccccttctctaagcgcatcaagctcgagaaggagttcgacctgcccccggccgcgatgcccaacacggagaacgtgtactcgcagtggctcgccggctacgcggcctccaggcagctcaaagatcccttccttagcttcggagactccagacaatcgccttttgcctcctcgtcggagcactcctcggagaacgggagtttgcgcttctccacaccgcccggggagctggacggagggatctcggggcgcagcggcacgggaagtggagggagcacgccccatattagtggtccgggcccgggcaggcccagctcaaaagagggcagacgcagcgacacttgttcttcacacacccccattcggcgtagtacccagagagctcaagatgtgtggcagttttcggatggaagctcgagagcccttaagttctgagaaaatttgaagcccccaggggtggggtggacgcgtgccgcccagtcgacgtcagcgtggtctgtcatcctgctagtttgtgatgttttctgacagtagcctccaagaagccgttgtgcgaagacagagtcctgcagagtccttccagcctaggcctgcagcgccattttatttatattttttaataaaaagtaaaaacaaaaaaacagacccacattggaacagtgaatcagtcccatagagagggcccgtggaccatcgctgtcatgagtgatgccctggcccttctgaaaccagccaacctaattacctgtattgtggaaatgcgcatgagtccccaaccccttgtttctatacattctatgttgtcttttaaaaagtgtgcttaacattgacacaataaatgttggagctttaggtggtgtttgcttgttctttaatttttaatgcttataagacaatgaggctgcttatgattttgtacttctgtacctgtttcctacagacacccatcgggtgggtaggaggaacagatttgagaaatgggcaggagatgtaggaggggaactaggttaccgcttatcagatggcataaattttcaaggagaatcaaaatgcaaaacttgggaataaatcatagcaatatcataattaatgtagtagtaatattgctgtttattaatgctgaagtgtggttttcctaactgtctgacttataatttgcataccattaaataatgcataatatggcacgccgaatcctgtttttcaaatatatgcttttggtggctaccatgcaggatttgaatttgtcttttaatttagcttaggaaagaacatcactgggcgagcggtaaatcctaaagaaggtgataaatgtcagtagtttcttattaaatattctaattttaggttcccaaaccttcaggaaatatatcttaatgcagacaaacaaacataaaacttctttagtacttacatcaggaaatttggggcagattttagaggggggaaattataggaggaaagaagttcacatcagaacagacaatcacagcaatgctctattccttagaaattagtgccacaaataagttacatctacaaacaggtggtaaaaattctttctggcccagttaatttgcacagaacttttctcagtttggtattttttactgcttggagatccagaagagaattagaaacaacatagcaaattaaaataggtttgtcaataatagagctcagacacctgtgtgctgtagattcacatacaggccgtgaacctaagtggggaaaatcctacctatccaccttctggctagattacctagcttagtgaaaagatagccaaataattggcatgtgaattatttcctgcttattcataataaataatgactgtcta

SEQ ID NO: 7716 - protein, 773 aa, Homo sapiens; identical to SEQ ID NO: 514

SEQ ID NO: 7717 - DNA, 2342 bp, Homo sapiens
gcttaaaaaaaagccatgacggctctcccacaattcatcttccctgcgccatctttgtattatttctaatttattttggatgtcaaaaggcactgatgaagatattttctctggagtctccttctttctaacccggctctcccgatgtgaaccgagccgtcgtccgcccgccgccgccgccgccgccgccgccgcccgccccgcagcccaccatgtctcgccgcaagcaaggcaaaccccagcacttaagcaaacgggaattctcgcccgagcctcttgaagccattcttacagatgatgaaccagaccacggcccgttgggagctccagaaggggatcatgacctcctcacctgtgggcagtgccagatgaacttcccattgggggacattcttatttttatcgagcacaaacggaaacaatgcaatggcagcctctgcttagaaaaagctgtggataagccaccttccccttcaccaatcgagatgaaaaaagcatccaatcccgtggaggttggcatccaggtcacgccagaggatgacgattgtttatcaacgtcatctagaggaatttgccccaaacaggaacacatagcagataaacttctgcactggaggggcctctcctcccctcgttctgcacatggagctctaatccccacgcctgggatgagtgcagaatatgccccgcagggtatttgtaaagatgagcccagcagctacacatgtacaacttgcaaacagccattcaccagtgcatggtttctcttgcaacacgcacagaacactcatggattaagaatctacttagaaagcgaacacggaagtcccctgaccccgcgggttcttcacacacccccattcggcgtagtacccagagagctcaagatgtgtggcagttttcggatggaagctcgagagcccttaagttctgagaaaatttgaagcccccaggggtggggtggacgcgtgccgcccagtcgacgtcagcgtggtctgtcatcctgctagtttgtgatgttttctgacagtagcctccaagaagccgttgtgcgaagacagagtcctgcagagtccttccagcctaggcctgcagcgccattttatttatattttttaataaaaagtaaaaacaaaaaaacagacccacattggaacagtgaatcagtcccatagagagggcccgtggaccatcgctgtcatgagtgatgccctggcccttctgaaaccagccaacctaattacctgtattgtggaaatgcgcatgagtccccaaccccttgtttctatacattctatgttgtcttttaaaaagtgtgcttaacattgacacaataaatgttggagctttaggtggtgtttgcttgttctttaatttttaatgcttataagacaatgaggctgcttatgattttgtacttctgtacctgtttcctacagacacccatcgggtgggtaggaggaacagatttgagaaatgggcaggagatgtaggaggggaactaggttaccgcttatcagatggcataaattttcaaggagaatcaaaatgcaaaacttgggaataaatcatagcaatatcataattaatgtagtagtaatattgctgtttattaatgctgaagtgtggttttcctaactgtctgacttataatttgcataccattaaataatgcataatatggcacgccgaatcctgtttttcaaatatatgcttttggtggctaccatgcaggatttgaatttgtcttttaatttagcttaggaaagaacatcactgggcgagcggtaaatcctaaagaaggtgataaatgtcagtagtttcttattaaatattctaattttaggttcccaaaccttcaggaaatatatcttaatgcagacaaacaaacataaaacttctttagtacttacatcaggaaatttggggcagattttagaggggggaaattataggaggaaagaagttcacatcagaacagacaatcacagcaatgctctattccttagaaattagtgccacaaataagttacatctacaaacaggtggtaaaaattctttctggcccagttaatttgcacagaacttttctcagtttggtattttttactgcttggagatccagaagagaattagaaacaacatagcaaattaaaataggtttgtcaataatagagctcagacacctgtgtgctgtagattcacatacaggccgtgaacctaagtggggaaaatcctacctatccaccttctggctagattacctagcttagtgaaaagatagccaaataattggcatgtgaattatttcctgcttattcataataaataatgactgtcta

SEQ ID NO: 7718 - protein, 243 aa, Homo sapiens; identical to SEQ ID NO: 520

SEQ ID NO: 7719 - DNA, 3103 bp, Homo sapiens
tgacgttcaagttcgcagggacgtcacgtccgcacttgaacttgcagctcaggggggcttttgccatttttttcatctctctctctctctctccctctatctctcttctctctctctccctctttttttttttttttttttttttttttttgcttaaaaaaaagccatgacggctctcccacaattcatcttccctgcgccatctttgtattatttctaatttattttggatgtcaaaaggcactgatgaagatattttctctggagtctccttctttctaacccggctctcccgatgtgaaccgagccgtcgtccgcccgccgccgccgccgccgccgccgccgcccgccccgcagcccaccatgtctcgccgcaagcaaggcaaaccccagcacttaagcaaacgggaattctcgcccgagcctcttgaagccattcttacagatgatgaaccagaccacggcccgttgggagctccagaaggggatcatgacctcctcacctgtgggcagtgccagatgaacttcccattgggggacattcttatttttatcgagcacaaacggaaacaatgcaatggcagcctctgcttagaaaaagctgtggataagccaccttccccttcaccaatcgagatgaaaaaagcatccaatcccgtggaggttggcatccaggtcacgccagaggatgacgattgtttatcaacgtcatctagaggaatttgccccaaacaggaacacatagcagataaacttctgcactggaggggcctctcctcccctcgttctgcacatggagctctaatccccacgcctgggatgagtgcagaatatgccccgcagggtatttgtaaagatgagcccagcagctacacatgtacaacttgcaaacagccattcaccagtgcatggtttctcttgcaacacgcacagaacactcatggattaagaatctacttagaaagcgaacacggaagtcccctgaccccgcgggttggtatcccttcaggactaggtgcagaatgtccttcccagccacctctccatgggattcatattgcagacaataacccctttaacctgctaagaataccaggatcagtatcgagagaggcttccggcctggcagaagggcgctttccacccactccccccctgtttagtccaccaccgagacatcacttggacccccaccgcatagagcgcctgggggcggaagagatggccctggccacccatcacccgagtgcctttgacagggtgctgcggttgaatccaatggctatggagcctcccgccatggatttctctaggagacttagagagctggcagggaacacgtctagcccaccgctgtccccaggccggcccagccctatgcaaaggttactgcaaccattccagccaggtagcaagccgcccttcctggcgacgccccccctccctcctctgcaatccgcccctcctccctcccagcccccggtcaagtccaagtcatgcgagttctgcggcaagacgttcaaatttcagagcaacctggtggtgcaccggcgcagccacacgggcgagaagccctacaagtgcaacctgtgcgaccacgcgtgcacccaggccagcaagctgaagcgccacatgaagacgcacatgcacaaatcgtcccccatgacggtcaagtccgacgacggtctctccaccgccagctccccggaacccggcaccagcgacttggtgggcagcgccagcagcgcgctcaagtccgtggtggccaagttcaagagcgagaacgaccccaacctgatcccggagaacggggacgaggaggaagaggaggacgacgaggaagaggaagaagaggaggaagaggaggaggaggagctgacggagagcgagagggtggactacggcttcgggctgagcctggaggcggcgcgccaccacgagaacagctcgcggggcgcggtcgtgggcgtgggcgacgagagccgcgccctgcccgacgtcatgcagggcatggtgctcagctccatgcagcacttcagcgaggccttccaccaggtcctgggcgagaagcataagcgcggccacctggccgaggccgagggccacagggacacttgcgacgaagactcggtggccggcgagtcggaccgcatagacgatggcactgttaatggccgcggctgctccccgggcgagtcggcctcggggggcctgtccaaaaagctgctgctgggcagccccagctcgctgagccccttctctaagcgcatcaagctcgagaaggagttcgacctgcccccggccgcgatgcccaacacggagaacgtgtactcgcagtggctcgccggctacgcggcctccaggcagctcaaagatcccttccttagcttcggagactccagacaatcgccttttgcctcctcgtcggagcactcctcggagaacgggagtttgcgcttctccacaccgcccggggagctggacggagggatctcggggcgcagcggcacgggaagtggagggagcacgccccatattagtggtccgggcccgggcaggcccagctcaaaagagggcagacgcagcgacacttgttcttcacacacccccattcggcgtagtacccagagagctcaagatgtgtggcagttttcggatggaagctcgagagcccttaagttctgagaaaatttgaagcccccaggggtggggtggacgcgtgccgcccagtcgacgtcagcgtggtctgtcatcctgctagtttgtgatgttttctgacagtagcctccaagaagccgttgtgcgaagacagagtcctgcagagtccttccagcctaggcctgcagcgccattttatttatattttttaataaaaagtaaaaacaaaaaaacagacccacattggaacagtgaatcagtcccatagagagggcccgtggaccatcgctgtcatgagtgatgccctggcccttctgaaaccagccaacctaattacctgtattgtggaaatgcgcatgagtccccaaccccttgtttctatacattctatgttgtcttttaaaaagtgtgcttaacattgacacaataaatgttggagctttag

SEQ ID NO: 7720 - protein, 773 aa, Homo sapiens; identical to SEQ ID NO: 514

SEQ ID NO: 7721 - DNA, 977 bp, Homo sapiens
caatcttctgggaaagagaagaatgttcccctccagttctgggcatattgaaggagcacggagctgttgggaaaagttgcaatgctaacatagacctccactgagagaatttcagaatcatttggtagttgagaagcgcctacttcatgcggaggccccgtgggaggagtggaagagttggcctcagcactggcgagtatcggatgggagctctgctcacttgataaacttctgcactggaggggcctctcctcccctcgttctgcacatggagctctaatccccacgcctgggatgagtgcagaatatgccccgcagggtatttgtaaagatgagcccagcagctacacatgtacaacttgcaaacagccattcaccagtgcatggtttctcttgcaacacgcacagaacactcatggattaagaatctacttagaaagcgaacacggaagtcccctgaccccgcgggttcttcacacacccccattcggcgtagtacccagagagctcaagatgtgtggcagttttcggatggaagctcgagagcccttaagttctgagaaaatttgaagcccccaggggtggggtggacgcgtgccgcccagtcgacgtcagcgtggtctgtcatcctgctagtttgtgatgttttctgacagtagcctccaagaagccgttgtgcgaagacagagtcctgcagagtccttccagcctaggcctgcagcgccattttatttatattttttaataaaaagtaaaaacaaaaaaacagacccacattggaacagtgaatcagtcccatagagagggcccgtggaccatcgctgtcatgagtgatgccctggcccttctgaaaccagccaacctaattacctgtattgtggaaatgcgcatgagtccccaaccccttgtttctatacattctatgttgtcttttaaaaagtgtgcttaacattgacacaataaatgttggagcttta

SEQ ID NO: 7722 - protein, 91 aa, Homo sapiens
MSAEYAPQGICKDEPSSYTCTTCKQPFTSAWFLLQHAQNTHGLRIYLESEHGSPLTPRVLHTPPFGVVPRELKMCGSFRMEAREPLSSEKI

SEQ ID NO: 7723 - DNA, 1021 bp, Homo sapiens
gacgcggcgcgcggcggtgtgaagttacagcccggccagccgagcctcttgaagccattcttacagatgatgaaccagaccacggcccgttgggagctccagaaggggatcatgacctcctcacctgtgggcagtgccagatgaacttcccattgggggacattcttatttttatcgagcacaaacggaaacaatgcaatggcagcctctgcttagaaaaagctgtggataagccaccttccccttcaccaatcgagatgaaaaaagcatccaatcccgtggaggttggcatccaggtcacgccagaggatgacgattgtttatcaacgtcatctagaggaatttgccccaaacaggaacacatagcaggtaaagatgagcccagcagctacacatgtacaacttgcaaacagccattcaccagtgcatggtttctcttgcaacacgcacagaacactcatggattaagaatctacttagaaagcgaacacggaagtcccctgaccccgcgggttcttcacacacccccattcggcgtagtacccagagagctcaagatgtgtggcagttttcggatggaagctcgagagcccttaagttctgagaaaatttgaagcccccaggggtggggtggacgcgtgccgcccagtcgacgtcagcgtggtctgtcatcctgctagtttgtgatgttttctgacagtagcctccaagaagccgttgtgcgaagacagagtcctgcagagtccttccagcctaggcctgcagcgccattttatttatattttttaataaaaagtaaaaacaaaaaaacagacccacattggaacagtgaatcagtcccatagagagggcccgtggaccatcgctgtcatgagtgatgccctggcccttctgaaaccagccaacctaattacctgtattgtggaaatgcgcatgagtccccaaccccttgtttctatacattctatgttgtcttttaaaaagtgtgcttaacattgacacaataaatgttggagcttta

SEQ ID NO: 7724 - protein, 157 aa, Homo sapiens
MNFPLGDILIFIEHKRKQCNGSLCLEKAVDKPPSPSPIEMKKASNPVEVGIQVTPEDDDCLSTSSRGICPKQEHIAGKDEPSSYTCTTCKQPFTSAWFLLQHAQNTHGLRIYLESEHGSPLTPRVLHTPPFGVVPRELKMCGSFRMEAREPLSSEKI

SEQ ID NO: 7725 - DNA, 1351 bp, Homo sapiens
gcttaaaaaaaagccatgacggctctcccacaattcatcttccctgcgccatctttgtattatttctaatttattttggatgtcaaaaggcactgatgaagatattttctctggagtctccttctttctaacccggctctcccgatgtgaaccgagccgtcgtccgcccgccgccgccgccgccgccgccgccgcccgccccgcagcccaccatgtctcgccgcaagcaaggcaaaccccagcacttaagcaaacgggaattctcgcccgagcctcttgaagccattcttacagatgatgaaccagaccacggcccgttgggagctccagaaggggatcatgacctcctcacctgtgggcagtgccagatgaacttcccattgggggacattcttatttttatcgagcacaaacggaaacaatgcaatggcagcctctgcttagaaaaagctgtggataagccaccttccccttcaccaatcgagatgaaaaaagcatccaatcccgtggaggttggcatccaggtcacgccagaggatgacgattgtttatcaacgtcatctagaggaatttgccccaaacaggaacacatagcagataaacttctgcactggaggggcctctcctcccctcgttctgcacatggagctctaatccccacgcctgggatgagtgcagaatatgccccgcagggtatttgtaaagatgagcccagcagctacacatgtacaacttgcaaacagccattcaccagtgcatggtttctcttgcaacacgcacagaacactcatggattaagaatctacttagaaagcgaacacggaagtcccctgaccccgcgggttcttcacacacccccattcggcgtagtacccagagagctcaagatgtgtggcagttttcggatggaagctcgagagcccttaagttctgagaaaatttgaagcccccaggggtggggtggacgcgtgccgcccagtcgacgtcagcgtggtctgtcatcctgctagtttgtgatgttttctgacagtagcctccaagaagccgttgtgcgaagacagagtcctgcagagtccttccagcctaggcctgcagcgccattttatttatattttttaataaaaagtaaaaacaaaaaaacagacccacattggaacagtgaatcagtcccatagagagggcccgtggaccatcgctgtcatgagtgatgccctggcccttctgaaaccagccaacctaattacctgtattgtggaaatgcgcatgagtccccaaccccttgtttctatacattctatgttgtcttttaaaaagtgtgcttaacattgacacaataaatgttggagcttta

SEQ ID NO: 7726 - protein, 243 aa, Homo sapiens; identical to SEQ ID NO: 520

SEQ ID NO: 7727 - DNA, 5386 bp, Homo sapiens
agttcaaatgaaatccccacagcagagagcttttgggtctagcagtggagcgataaacttctgcactggaggggcctctcctcccctcgttctgcacatggagctctaatccccacgcctgggatgagtgcagaatatgccccgcagggtatttgtaaagatgagcccagcagctacacatgtacaacttgcaaacagccattcaccagtgcatggtttctcttgcaacacgcacagaacactcatggattaagaatctacttagaaagcgaacacggaagtcccctgaccccgcgggttggtatcccttcaggactaggtgcagaatgtccttcccagccacctctccatgggattcatattgcagacaataacccctttaacctgctaagaataccaggatcagtatcgagagaggcttccggcctggcagaagggcgctttccacccactccccccctgtttagtccaccaccgagacatcacttggacccccaccgcatagagcgcctgggggcggaagagatggccctggccacccatcacccgagtgcctttgacagggtgctgcggttgaatccaatggctatggagcctcccgccatggatttctctaggagacttagagagctggcagggaacacgtctagcccaccgctgtccccaggccggcccagccctatgcaaaggttactgcaaccattccagccaggtagcaagccgcccttcctggcgacgccccccctccctcctctgcaatccgcccctcctccctcccagcccccggtcaagtccaagtcatgcgagttctgcggcaagacgttcaaatttcagagcaacctggtggtgcaccggcgcagccacacgggcgagaagccctacaagtgcaacctgtgcgaccacgcgtgcacccaggccagcaagctgaagcgccacatgaagacgcacatgcacaaatcgtcccccatgacggtcaagtccgacgacggtctctccaccgccagctccccggaacccggcaccagcgacttggtgggcagcgccagcagcgcgctcaagtccgtggtggccaagttcaagagcgagaacgaccccaacctgatcccggagaacggggacgaggaggaagaggaggacgacgaggaagaggaagaagaggaggaagaggaggaggaggagctgacggagagcgagagggtggactacggcttcgggctgagcctggaggcggcgcgccaccacgagaacagctcgcggggcgcggtcgtgggcgtgggcgacgagagccgcgccctgcccgacgtcatgcagggcatggtgctcagctccatgcagcacttcagcgaggccttccaccaggtcctgggcgagaagcataagcgcggccacctggccgaggccgagggccacagggacacttgcgacgaagactcggtggccggcgagtcggaccgcatagacgatggcactgttaatggccgcggctgctccccgggcgagtcggcctcggggggcctgtccaaaaagctgctgctgggcagccccagctcgctgagccccttctctaagcgcatcaagctcgagaaggagttcgacctgcccccggccgcgatgcccaacacggagaacgtgtactcgcagtggctcgccggctacgcggcctccaggcagctcaaagatcccttccttagcttcggagactccagacaatcgccttttgcctcctcgtcggagcactcctcggagaacgggagtttgcgcttctccacaccgcccggggagctggacggagggatctcggggcgcagcggcacgggaagtggagggagcacgccccatattagtggtccgggcccgggcaggcccagctcaaaagagggcagacgcagcgacacttgtgagtactgtgggaaagtcttcaagaactgtagcaatctcactgtccacaggagaagccacacgggcgaaaggccttataaatgcgagctgtgcaactatgcctgtgcccagagtagcaagctcaccaggcacatgaaaacgcatggccaggtggggaaggacgtttacaaatgtgaaatttgtaagatgccttttagcgtgtacagtaccctggagaaacacatgaaaaaatggcacagtgatcgagtgttgaataatgatataaaaactgaatagaggtatattaatacccctccctcactcccacctgacaccccctttttcaccactccccttccccatcgccctccagccccactccctgtaggatttttttctagtcccatgtgatttaaacaaacaaacaaacaaacagaagtaacgaagctaagaatatgagagtgcttgtcaccagcacacctgttttttttctttttctttttcttttttctttttccttttttttttttttcctttatgttctcaccgtttgaatgcatgatctgtatggggcaatactattgcattttacgcaaactttgagcctttctcttgtgcaataatttacatgttgtgtatgtttttttttaaacttagacagcatgtatggtatgttatggctattttaaattgtccctaattcgttgctgagcaaacatgttgctgtttccagttccgttctgagagaaaaagagagagagagagaaaaagaccatgctgcatacattctgtaatacatatcatgtacagttttattttataacgtgaggaggaaaaacagtctttggattaaccctctatagacagaatagatagcactgaaaaaaaatctctatgagctaaatgtctgtctctaaagggttaaatgtatcaattggaaaggaagaaaaaaggccttgaattgacaaattaacagaaaaacagaacaagtttattctatcatttggttttaaaatatgagtgccttggatctattaaaaccacatcgatggttctttctacttgttataaacttgtagcttaattcagcattgggtgaggtaataaaccttaggaactagcatataattctatattgtatttctcacaacaatggctacctaaaaagatgacccattatgtcctagttaatcatcatttttcctttagtttaattttataaacaaaactgattataccagtataaaagctactttgctcctggtgagagcttaaaagaaatgggctgttttgcccaaagttttattttttttaaacaatgattaaattgaatgtgtaatgtgcaaaagccctggaacgcaattaaatacactagtaaggagttcattttatgaagatatttgctttaataatgtctttttaaaaatactggcaccaaaagaaatagatccagatctacttggttgtcaagtggacaatcaaatgataaactttaagaccttgtataccatattgaaaggaagaggctgacaataaggtttgacagaggggaacagaagaaaataatatgatttattagcacaacgtggtactatttgccatttaaaactagaacaggtatataagctaatattgatacaatgatgattaactatgaattcttaagacttgcatttaaatgtgacattcttaaaaaaagaagagaaagaattttaagagtagcagtatatatgtctgtgctccctaaaagttgtacttcatttcttttccatacactgtgtgctatttgtgttaacatggaagaggattcattgtttttatttttatttttttaattttttcttttttattaagctagcatctgccccagttggtgttcaaatagcacttgactctgcctgtgatatctgtatcttttctctaatcagagatacagaggttgagtataaaataaacctgctcagataggacaattaagtgcactgtacaattttcccagtttacaggtctatacttaagggaaaagttgcaagaatgctgaaaaaaaattgaacacaatctcattgaggagcattttttaaaaactaaaaaaaaaaaaactttgccagccatttacttgactattgagcttacttacttggacgcaacattgcaagcgctgtgaatggaaacagaatacacttaacatagaaatgaatgattgctttcgcttctacagtgcaaggatttttttgtacaaaacttttttaaatataaatgttaagaaaaattttttttaaaaaacacttcattatgtttaggggggaactgcattttagggttccattgtcttggtggtgttacaagacttgttatccatttaaaaatggtagtggaaattctatgccttggatacacaccgctcttcaggttgtaaaaaaaaaaaacatacattggggaaaggtttaagattatatagtacttaaatataggaaaatgcacactcatgttgattcctatgctaaaatacatttatggtcttttttctgtatttctagaatggtatttgaattaaatgttcatctagtgttaggcactatagtatttatattgaagcttgtatttttaactgttgcttgttctcttaaaaggtatcaatgtaccttttttggtagtggaaaaaaaaaagacaggctgccacagtatatttttttaatttggcaggataatatagtgcaaattatttgtatgcttcaaaaaaaaaaaaaagagagaaacaaaaaagtgtgacattacagatgagaagccatataatggcggtttgggggagcctgctagaatgtcacatggatggctgtcataggggttgtacatatccttttttgttcctttttcctgctgccatactgtatgcagtactgcaagctaataacgttggtttgttatgtagtgtgctttttgtccctttccttctatcaccctacattccagcatcttaccttcatatgcagtaaaagaaagaaagaaaaaaaaaggaaaaaaaaaaaaaaaccaatgttttgcagtttttttcattgccaaaaactaaatggtgctttatatttagattggaaagaatttcatatgcaaagcatattaaagagaaagcccgctttagtcaatacttttttgtaaatggcaatgcagaatattttgttattggccttttctattcctgtaatgaaagctgtttgtcgtaacttgaaattttatcttttactatgggagtcactatttattattgcttatgtgccctgttcaaaacagaggcacttaatttgatcttttatttttctttgtttttatttttttttttatttagatgaccaaaggtcattacaacctggctttttattgtatttgtttctggtctttgttaagttctattggaaaaaccactgtctgtgtttttttggcagttgtctgcattaacctgttcatacacccattttgtccctttattgaaaaaataaaaaaaattaaagtacac

SEQ ID NO: 7728 - protein, 683 aa, Homo sapiens
MSAEYAPQGICKDEPSSYTCTTCKQPFTSAWFLLQHAQNTHGLRIYLESEHGSPLTPRVGIPSGLGAECPSQPPLHGIHIADNNPFNLLRIPGSVSREASGLAEGRFPPTPPLFSPPPRHHLDPHRIERLGAEEMALATHHPSAFDRVLRLNPMAMEPPAMDFSRRLRELAGNTSSPPLSPGRPSPMQRLLQPFQPGSKPPFLATPPLPPLQSAPPPSQPPVKSKSCEFCGKTFKFQSNLVVHRRSHTGEKPYKCNLCDHACTQASKLKRHMKTHMHKSSPMTVKSDDGLSTASSPEPGTSDLVGSASSALKSVVAKFKSENDPNLIPENGDEEEEEDDEEEEEEEEEEEEELTESERVDYGFGLSLEAARHHENSSRGAVVGVGDESRALPDVMQGMVLSSMQHFSEAFHQVLGEKHKRGHLAEAEGHRDTCDEDSVAGESDRIDDGTVNGRGCSPGESASGGLSKKLLLGSPSSLSPFSKRIKLEKEFDLPPAAMPNTENVYSQWLAGYAASRQLKDPFLSFGDSRQSPFASSSEHSSENGSLRFSTPPGELDGGISGRSGTGSGGSTPHISGPGPGRPSSKEGRRSDTCEYCGKVFKNCSNLTVHRRSHTGERPYKCELCNYACAQSSKLTRHMKTHGQVGKDVYKCEICKMPFSVYSTLEKHMKKWHSDRVLNNDIKTE

SEQ ID NO: 7729 - DNA, 5829 bp, Homo sapiens
gcttaaaaaaaagccatgacggctctcccacaattcatcttccctgcgccatctttgtattatttctaatttattttggatgtcaaaaggcactgatgaagatattttctctggagtctccttctttctaacccggctctcccgatgtgaaccgagccgtcgtccgcccgccgccgccgccgccgccgccgccgcccgccccgcagcccaccatgtctcgccgcaagcaaggcaaaccccagcacttaagcaaacgggaattctcgcccgagcctcttgaagccattcttacagatgatgaaccagaccacggcccgttgggagctccagaaggggatcatgacctcctcacctgtgggcagtgccagatgaacttcccattgggggacattcttatttttatcgagcacaaacggaaacaatgcaatggcagcctctgcttagaaaaagctgtggataagccaccttccccttcaccaatcgagatgaaaaaagcatccaatcccgtggaggttggcatccaggtcacgccagaggatgacgattgtttatcaacgtcatctagaggaatttgccccaaacaggaacacatagcaggtaaagatgagcccagcagctacacatgtacaacttgcaaacagccattcaccagtgcatggtttctcttgcaacacgcacagaacactcatggattaagaatctacttagaaagcgaacacggaagtcccctgaccccgcgggttggtatcccttcaggactaggtgcagaatgtccttcccagccacctctccatgggattcatattgcagacaataacccctttaacctgctaagaataccaggatcagtatcgagagaggcttccggcctggcagaagggcgctttccacccactccccccctgtttagtccaccaccgagacatcacttggacccccaccgcatagagcgcctgggggcggaagagatggccctggccacccatcacccgagtgcctttgacagggtgctgcggttgaatccaatggctatggagcctcccgccatggatttctctaggagacttagagagctggcagggaacacgtctagcccaccgctgtccccaggccggcccagccctatgcaaaggttactgcaaccattccagccaggtagcaagccgcccttcctggcgacgccccccctccctcctctgcaatccgcccctcctccctcccagcccccggtcaagtccaagtcatgcgagttctgcggcaagacgttcaaatttcagagcaacctggtggtgcaccggcgcagccacacgggcgagaagccctacaagtgcaacctgtgcgaccacgcgtgcacccaggccagcaagctgaagcgccacatgaagacgcacatgcacaaatcgtcccccatgacggtcaagtccgacgacggtctctccaccgccagctccccggaacccggcaccagcgacttggtgggcagcgccagcagcgcgctcaagtccgtggtggccaagttcaagagcgagaacgaccccaacctgatcccggagaacggggacgaggaggaagaggaggacgacgaggaagaggaagaagaggaggaagaggaggaggaggagctgacggagagcgagagggtggactacggcttcgggctgagcctggaggcggcgcgccaccacgagaacagctcgcggggcgcggtcgtgggcgtgggcgacgagagccgcgccctgcccgacgtcatgcagggcatggtgctcagctccatgcagcacttcagcgaggccttccaccaggtcctgggcgagaagcataagcgcggccacctggccgaggccgagggccacagggacacttgcgacgaagactcggtggccggcgagtcggaccgcatagacgatggcactgttaatggccgcggctgctccccgggcgagtcggcctcggggggcctgtccaaaaagctgctgctgggcagccccagctcgctgagccccttctctaagcgcatcaagctcgagaaggagttcgacctgcccccggccgcgatgcccaacacggagaacgtgtactcgcagtggctcgccggctacgcggcctccaggcagctcaaagatcccttccttagcttcggagactccagacaatcgccttttgcctcctcgtcggagcactcctcggagaacgggagtttgcgcttctccacaccgcccggggagctggacggagggatctcggggcgcagcggcacgggaagtggagggagcacgccccatattagtggtccgggcccgggcaggcccagctcaaaagagggcagacgcagcgacacttgtgagtactgtgggaaagtcttcaagaactgtagcaatctcactgtccacaggagaagccacacgggcgaaaggccttataaatgcgagctgtgcaactatgcctgtgcccagagtagcaagctcaccaggcacatgaaaacgcatggccaggtggggaaggacgtttacaaatgtgaaatttgtaagatgccttttagcgtgtacagtaccctggagaaacacatgaaaaaatggcacagtgatcgagtgttgaataatgatataaaaactgaatagaggtatattaatacccctccctcactcccacctgacaccccctttttcaccactccccttccccatcgccctccagccccactccctgtaggatttttttctagtcccatgtgatttaaacaaacaaacaaacaaacagaagtaacgaagctaagaatatgagagtgcttgtcaccagcacacctgttttttttctttttctttttcttttttctttttccttttttttttttttcctttatgttctcaccgtttgaatgcatgatctgtatggggcaatactattgcattttacgcaaactttgagcctttctcttgtgcaataatttacatgttgtgtatgtttttttttaaacttagacagcatgtatggtatgttatggctattttaaattgtccctaattcgttgctgagcaaacatgttgctgtttccagttccgttctgagagaaaaagagagagagagagaaaaagaccatgctgcatacattctgtaatacatatcatgtacagttttattttataacgtgaggaggaaaaacagtctttggattaaccctctatagacagaatagatagcactgaaaaaaaatctctatgagctaaatgtctgtctctaaagggttaaatgtatcaattggaaaggaagaaaaaaggccttgaattgacaaattaacagaaaaacagaacaagtttattctatcatttggttttaaaatatgagtgccttggatctattaaaaccacatcgatggttctttctacttgttataaacttgtagcttaattcagcattgggtgaggtaataaaccttaggaactagcatataattctatattgtatttctcacaacaatggctacctaaaaagatgacccattatgtcctagttaatcatcatttttcctttagtttaattttataaacaaaactgattataccagtataaaagctactttgctcctggtgagagcttaaaagaaatgggctgttttgcccaaagttttattttttttaaacaatgattaaattgaatgtgtaatgtgcaaaagccctggaacgcaattaaatacactagtaaggagttcattttatgaagatatttgctttaataatgtctttttaaaaatactggcaccaaaagaaatagatccagatctacttggttgtcaagtggacaatcaaatgataaactttaagaccttgtataccatattgaaaggaagaggctgacaataaggtttgacagaggggaacagaagaaaataatatgatttattagcacaacgtggtactatttgccatttaaaactagaacaggtatataagctaatattgatacaatgatgattaactatgaattcttaagacttgcatttaaatgtgacattcttaaaaaaagaagagaaagaattttaagagtagcagtatatatgtctgtgctccctaaaagttgtacttcatttcttttccatacactgtgtgctatttgtgttaacatggaagaggattcattgtttttatttttatttttttaattttttcttttttattaagctagcatctgccccagttggtgttcaaatagcacttgactctgcctgtgatatctgtatcttttctctaatcagagatacagaggttgagtataaaataaacctgctcagataggacaattaagtgcactgtacaattttcccagtttacaggtctatacttaagggaaaagttgcaagaatgctgaaaaaaaattgaacacaatctcattgaggagcattttttaaaaactaaaaaaaaaaaaactttgccagccatttacttgactattgagcttacttacttggacgcaacattgcaagcgctgtgaatggaaacagaatacacttaacatagaaatgaatgattgctttcgcttctacagtgcaaggatttttttgtacaaaacttttttaaatataaatgttaagaaaaattttttttaaaaaacacttcattatgtttaggggggaactgcattttagggttccattgtcttggtggtgttacaagacttgttatccatttaaaaatggtagtggaaattctatgccttggatacacaccgctcttcaggttgtaaaaaaaaaaaacatacattggggaaaggtttaagattatatagtacttaaatataggaaaatgcacactcatgttgattcctatgctaaaatacatttatggtcttttttctgtatttctagaatggtatttgaattaaatgttcatctagtgttaggcactatagtatttatattgaagcttgtatttttaactgttgcttgttctcttaaaaggtatcaatgtaccttttttggtagtggaaaaaaaaaagacaggctgccacagtatatttttttaatttggcaggataatatagtgcaaattatttgtatgcttcaaaaaaaaaaaaaagagagaaacaaaaaagtgtgacattacagatgagaagccatataatggcggtttgggggagcctgctagaatgtcacatggatggctgtcataggggttgtacatatccttttttgttcctttttcctgctgccatactgtatgcagtactgcaagctaataacgttggtttgttatgtagtgtgctttttgtccctttccttctatcaccctacattccagcatcttaccttcatatgcagtaaaagaaagaaagaaaaaaaaaggaaaaaaaaaaaaaaaccaatgttttgcagtttttttcattgccaaaaactaaatggtgctttatatttagattggaaagaatttcatatgcaaagcatattaaagagaaagcccgctttagtcaatacttttttgtaaatggcaatgcagaatattttgttattggccttttctattcctgtaatgaaagctgtttgtcgtaacttgaaattttatcttttactatgggagtcactatttattattgcttatgtgccctgttcaaaacagaggcacttaatttgatcttttatttttctttgtttttatttttttttttatttagatgaccaaaggtcattacaacctggctttttattgtatttgtttctggtctttgttaagttctattggaaaaaccactgtctgtgtttttttggcagttgtctgcattaacctgttcatacacccattttgtccctttattgaaaaaataaaaaaaattaaagtacac

SEQ ID NO: 7730 - protein, 801 aa, Homo sapiens
MSRRKQGKPQHLSKREFSPEPLEAILTDDEPDHGPLGAPEGDHDLLTCGQCQMNFPLGDILIFIEHKRKQCNGSLCLEKAVDKPPSPSPIEMKKASNPVEVGIQVTPEDDDCLSTSSRGICPKQEHIAGKDEPSSYTCTTCKQPFTSAWFLLQHAQNTHGLRIYLESEHGSPLTPRVGIPSGLGAECPSQPPLHGIHIADNNPFNLLRIPGSVSREASGLAEGRFPPTPPLFSPPPRHHLDPHRIERLGAEEMALATHHPSAFDRVLRLNPMAMEPPAMDFSRRLRELAGNTSSPPLSPGRPSPMQRLLQPFQPGSKPPFLATPPLPPLQSAPPPSQPPVKSKSCEFCGKTFKFQSNLVVHRRSHTGEKPYKCNLCDHACTQASKLKRHMKTHMHKSSPMTVKSDDGLSTASSPEPGTSDLVGSASSALKSVVAKFKSENDPNLIPENGDEEEEEDDEEEEEEEEEEEEELTESERVDYGFGLSLEAARHHENSSRGAVVGVGDESRALPDVMQGMVLSSMQHFSEAFHQVLGEKHKRGHLAEAEGHRDTCDEDSVAGESDRIDDGTVNGRGCSPGESASGGLSKKLLLGSPSSLSPFSKRIKLEKEFDLPPAAMPNTENVYSQWLAGYAASRQLKDPFLSFGDSRQSPFASSSEHSSENGSLRFSTPPGELDGGISGRSGTGSGGSTPHISGPGPGRPSSKEGRRSDTCEYCGKVFKNCSNLTVHRRSHTGERPYKCELCNYACAQSSKLTRHMKTHGQVGKDVYKCEICKMPFSVYSTLEKHMKKWHSDRVLNNDIKTE

SEQ ID NO: 7731 - DNA, 5947 bp, Homo sapiens
ttttttttttttttttgcttaaaaaaaagccatgacggctctcccacaattcatcttccctgcgccatctttgtattatttctaatttattttggatgtcaaaaggcactgatgaagatattttctctggagtctccttctttctaacccggctctcccgatgtgaaccgagccgtcgtccgcccgccgccgccgccgccgccgccgccgcccgccccgcagcccaccatgtctcgccgcaagcaaggcaaaccccagcacttaagcaaacgggaattctcgcccgagcctcttgaagccattcttacagatgatgaaccagaccacggcccgttgggagctccagaaggggatcatgacctcctcacctgtgggcagtgccagatgaacttcccattgggggacattcttatttttatcgagcacaaacggaaacaatgcaatggcagcctctgcttagaaaaagctgtggataagccaccttccccttcaccaatcgagatgaaaaaagcatccaatcccgtggaggttggcatccaggtcacgccagaggatgacgattgtttatcaacgtcatctagaggaatttgccccaaacaggaacacatagcagataaacttctgcactggaggggcctctcctcccctcgttctgcacatggagctctaatccccacgcctgggatgagtgcagaatatgccccgcagggtatttgtaaagatgagcccagcagctacacatgtacaacttgcaaacagccattcaccagtgcatggtttctcttgcaacacgcacagaacactcatggattaagaatctacttagaaagcgaacacggaagtcccctgaccccgcgggttggtatcccttcaggactaggtgcagaatgtccttcccagccacctctccatgggattcatattgcagacaataacccctttaacctgctaagaataccaggatcagtatcgagagaggcttccggcctggcagaagggcgctttccacccactccccccctgtttagtccaccaccgagacatcacttggacccccaccgcatagagcgcctgggggcggaagagatggccctggccacccatcacccgagtgcctttgacagggtgctgcggttgaatccaatggctatggagcctcccgccatggatttctctaggagacttagagagctggcagggaacacgtctagcccaccgctgtccccaggccggcccagccctatgcaaaggttactgcaaccattccagccaggtagcaagccgcccttcctggcgacgccccccctccctcctctgcaatccgcccctcctccctcccagcccccggtcaagtccaagtcatgcgagttctgcggcaagacgttcaaatttcagagcaacctggtggtgcaccggcgcagccacacgggcgagaagccctacaagtgcaacctgtgcgaccacgcgtgcacccaggccagcaagctgaagcgccacatgaagacgcacatgcacaaatcgtcccccatgacggtcaagtccgacgacggtctctccaccgccagctccccggaacccggcaccagcgacttggtgggcagcgccagcagcgcgctcaagtccgtggtggccaagttcaagagcgagaacgaccccaacctgatcccggagaacggggacgaggaggaagaggaggacgacgaggaagaggaagaagaggaggaagaggaggaggaggagctgacggagagcgagagggtggactacggcttcgggctgagcctggaggcggcgcgccaccacgagaacagctcgcggggcgcggtcgtgggcgtgggcgacgagagccgcgccctgcccgacgtcatgcagggcatggtgctcagctccatgcagcacttcagcgaggccttccaccaggtcctgggcgagaagcataagcgcggccacctggccgaggccgagggccacagggacacttgcgacgaagactcggtggccggcgagtcggaccgcatagacgatggcactgttaatggccgcggctgctccccgggcgagtcggcctcggggggcctgtccaaaaagctgctgctgggcagccccagctcgctgagccccttctctaagcgcatcaagctcgagaaggagttcgacctgcccccggccgcgatgcccaacacggagaacgtgtactcgcagtggctcgccggctacgcggcctccaggcagctcaaagatcccttccttagcttcggagactccagacaatcgccttttgcctcctcgtcggagcactcctcggagaacgggagtttgcgcttctccacaccgcccggggagctggacggagggatctcggggcgcagcggcacgggaagtggagggagcacgccccatattagtggtccgggcccgggcaggcccagctcaaaagagggcagacgcagcgacacttgtgagtactgtgggaaagtcttcaagaactgtagcaatctcactgtccacaggagaagccacacgggcgaaaggccttataaatgcgagctgtgcaactatgcctgtgcccagagtagcaagctcaccaggcacatgaaaacgcatggccaggtggggaaggacgtttacaaatgtgaaatttgtaagatgccttttagcgtgtacagtaccctggagaaacacatgaaaaaatggcacagtgatcgagtgttgaataatgatataaaaactgaatagaggtatattaatacccctccctcactcccacctgacaccccctttttcaccactccccttccccatcgccctccagccccactccctgtaggatttttttctagtcccatgtgatttaaacaaacaaacaaacaaacagaagtaacgaagctaagaatatgagagtgcttgtcaccagcacacctgttttttttctttttctttttcttttttctttttccttttttttttttttcctttatgttctcaccgtttgaatgcatgatctgtatggggcaatactattgcattttacgcaaactttgagcctttctcttgtgcaataatttacatgttgtgtatgtttttttttaaacttagacagcatgtatggtatgttatggctattttaaattgtccctaattcgttgctgagcaaacatgttgctgtttccagttccgttctgagagaaaaagagagagagagagaaaaagaccatgctgcatacattctgtaatacatatcatgtacagttttattttataacgtgaggaggaaaaacagtctttggattaaccctctatagacagaatagatagcactgaaaaaaaatctctatgagctaaatgtctgtctctaaagggttaaatgtatcaattggaaaggaagaaaaaaggccttgaattgacaaattaacagaaaaacagaacaagtttattctatcatttggttttaaaatatgagtgccttggatctattaaaaccacatcgatggttctttctacttgttataaacttgtagcttaattcagcattgggtgaggtaataaaccttaggaactagcatataattctatattgtatttctcacaacaatggctacctaaaaagatgacccattatgtcctagttaatcatcatttttcctttagtttaattttataaacaaaactgattataccagtataaaagctactttgctcctggtgagagcttaaaagaaatgggctgttttgcccaaagttttattttttttaaacaatgattaaattgaatgtgtaatgtgcaaaagccctggaacgcaattaaatacactagtaaggagttcattttatgaagatatttgctttaataatgtctttttaaaaatactggcaccaaaagaaatagatccagatctacttggttgtcaagtggacaatcaaatgataaactttaagaccttgtataccatattgaaaggaagaggctgacaataaggtttgacagaggggaacagaagaaaataatatgatttattagcacaacgtggtactatttgccatttaaaactagaacaggtatataagctaatattgatacaatgatgattaactatgaattcttaagacttgcatttaaatgtgacattcttaaaaaaagaagagaaagaattttaagagtagcagtatatatgtctgtgctccctaaaagttgtacttcatttcttttccatacactgtgtgctatttgtgttaacatggaagaggattcattgtttttatttttatttttttaattttttcttttttattaagctagcatctgccccagttggtgttcaaatagcacttgactctgcctgtgatatctgtatcttttctctaatcagagatacagaggttgagtataaaataaacctgctcagataggacaattaagtgcactgtacaattttcccagtttacaggtctatacttaagggaaaagttgcaagaatgctgaaaaaaaattgaacacaatctcattgaggagcattttttaaaaactaaaaaaaaaaaaactttgccagccatttacttgactattgagcttacttacttggacgcaacattgcaagcgctgtgaatggaaacagaatacacttaacatagaaatgaatgattgctttcgcttctacagtgcaaggatttttttgtacaaaacttttttaaatataaatgttaagaaaaattttttttaaaaaacacttcattatgtttaggggggaactgcattttagggttccattgtcttggtggtgttacaagacttgttatccatttaaaaatggtagtggaaattctatgccttggatacacaccgctcttcaggttgtaaaaaaaaaaaacatacattggggaaaggtttaagattatatagtacttaaatataggaaaatgcacactcatgttgattcctatgctaaaatacatttatggtcttttttctgtatttctagaatggtatttgaattaaatgttcatctagtgttaggcactatagtatttatattgaagcttgtatttttaactgttgcttgttctcttaaaaggtatcaatgtaccttttttggtagtggaaaaaaaaaagacaggctgccacagtatatttttttaatttggcaggataatatagtgcaaattatttgtatgcttcaaaaaaaaaaaaaagagagaaacaaaaaagtgtgacattacagatgagaagccatataatggcggtttgggggagcctgctagaatgtcacatggatggctgtcataggggttgtacatatccttttttgttcctttttcctgctgccatactgtatgcagtactgcaagctaataacgttggtttgttatgtagtgtgctttttgtccctttccttctatcaccctacattccagcatcttaccttcatatgcagtaaaagaaagaaagaaaaaaaaaggaaaaaaaaaaaaaaaccaatgttttgcagtttttttcattgccaaaaactaaatggtgctttatatttagattggaaagaatttcatatgcaaagcatattaaagagaaagcccgctttagtcaatacttttttgtaaatggcaatgcagaatattttgttattggccttttctattcctgtaatgaaagctgtttgtcgtaacttgaaattttatcttttactatgggagtcactatttattattgcttatgtgccctgttcaaaacagaggcacttaatttgatcttttatttttctttgtttttatttttttttttatttagatgaccaaaggtcattacaacctggctttttattgtatttgtttctggtctttgttaagttctattggaaaaaccactgtctgtgtttttttggcagttgtctgcattaacctgttcatacacccattttgtccctttattgaaaaaataaaaaaaattaaagtacac

SEQ ID NO: 7732 - protein, 835 aa, Homo sapiens; identical to SEQ ID NO: 516

SEQ ID NO: 7733 - DNA, 1162 bp, Homo sapiens
gacagcagaggaccccagttgttgaggactaaagagagagaagatgagaaagaagatgctggaaacagaggttggagaaagagaggcaaggaagtagaaaggaggaaaaggggaagagaggaggcagggggagagagggttggaattcgagctattttcagctgaatgtgagtgcagatttcatcaggcttctgggctacagggaaactgactgtgtgcggaccttgcgtgtaacttcctgtgaagcagccgtggtgactgcattttctgacactgtcagagtctggacaaccctgccagctcctagaagggcaacccaacaactgtcacagacgaagcatcaaaagcatgagctgtcgatagtgacctgcatttgcagaaaatctgagggctttctaattaacagaggagctctaaattagagtaaagctgttcgacaagacccctcatacgcgataaacttctgcactggaggggcctctcctcccctcgttctgcacatggagctctaatccccacgcctgggatgagtgcagaatatgccccgcagggtatttgtaaagatgagcccagcagctacacatgtacaacttgcaaacagccattcaccagtgcatggtttctcttgcaacacgcacagaacactcatggattaagaatctacttagaaagcgaacacggaagtcccctgaccccgcgggttggtatcccttcaggactaggtgcagaatgtccttcccagccacctctccatgggattcatattgcagacaataacccctttaacctgctaagaataccaggatcagtatcgagagaggcttccggcctggcagaagggcgctttccacccactccccccctgtttagtccaccaccgagacatcacttggacccccaccgcatagagcgcctgggggcggaagagatggccctggccacccatcacccgagtgcctttgacagggtgctgcggttgaatccaatggctatggagcctcccgccatggatttctctaggagacttagagagctggcagggaacacgtctagcccaccgctgtccccaggccggcccagccctatgcaaaggttactgcaaccattccagccaggtagcaagccgcccttcctggcgacgccccccctccctcctctgcaa

SEQ ID NO: 7734 - protein, 211 aa, Homo sapiens
MSAEYAPQGICKDEPSSYTCTTCKQPFTSAWFLLQHAQNTHGLRIYLESEHGSPLTPRVGIPSGLGAECPSQPPLHGIHIADNNPFNLLRIPGSVSREASGLAEGRFPPTPPLFSPPPRHHLDPHRIERLGAEEMALATHHPSAFDRVLRLNPMAMEPPAMDFSRRLRELAGNTSSPPLSPGRPSPMQRLLQPFQPGSKPPFLATPPLPPL

SEQ ID NO: 7735 - DNA, 893 bp, Homo sapiens
tctgggcatattgaaggagcacggagctgttgggaaaagttgcaatgctaacatagacctccactgagagaatttcagaatcatttggtagttgagaagcgcctacttcatgcggaggccccgtgggaggagtggaagagttggcctcagcactggcgagtatcggatgggagctctgctcacttgataaacttctgcactggaggggcctctcctcccctcgttctgcacatggagctctaatccccacgcctgggatgagtgcagaatatgccccgcagggtatttgtaaagatgagcccagcagctacacatgtacaacttgcaaacagccattcaccagtgcatggtttctcttgcaacacgcacagaacactcatggattaagaatctacttagaaagcgaacacggaagtcccctgaccccgcgggttggtatcccttcaggactaggtgcagaatgtccttcccagccacctctccatgggattcatattgcagacaataacccctttaacctgctaagaataccaggatcagtatcgagagaggcttccggcctggcagaagggcgctttccacccactccccccctgtttagtccaccaccgagacatcacttggacccccaccgcatagagcgcctgggggcggaagagatggccctggccacccatcacccgagtgcctttgacagggtgctgcggttgaatccaatggctatggagcctcccgccatggatttctctaggagacttagagagctggcagggaacacgtctagcccaccgctgtccccaggccggcccagccctatgcaaaggttactgcaaccattccagccaggtagcaagccgcccttcctggcgacgccccccctccctcctctgcaa

SEQ ID NO: 7736 - protein, 211 aa, Homo sapiens; identical to SEQ ID NO: 7734

SEQ ID NO: 7737 - DNA, 1190 bp, Homo sapiens
agccttggctattatagtgtattaagacatcaggttcctcctttggaggagggaaggctacagaactacaaacctttctaacaatgctttaggtttcttctttagatagatggctggcacctaaaggacttgggcctgggtttggctgactcttttatcttttagatcaagtaagttttctcattcagctgctgctctgagctacaatgtgtcctcccctcatcaccaaagtatatcctggtctccaggctccctgggctcccagtgtctccctcaaggtacacgagtgccctggtggtgaaaacaaggtgctaactaacggtttccgatttttgagagcctgtgattttggtgtttgcctttgctgttgaataacctgtgctgtattattgatgttcatctttggtttatgagtttatcactggttaacaagcagaatcagaacagtgtaactgatattctgattaaaacgaatgtttaatgaaagaaaataaattgtgatggaaaatgaacagtgtgtaagaaacataactataattttaacctccgagggacctagcactgccctaccgtgacttccatccataccatgctaaaagcatgcttcagtttaaagttgttaatattcagctgggaaacagtatccagaacacaaataaattattaagtgcatgaactttttaggcagtaagatgaactgatggggtccatctgtgagatccaggggctttttatttgtgtgtgtcgagcgattctgccctctccgacttcacagcctttggtctccggccaactgcatgcataattgattccacacgcactatcattttcttgatgtaattgctttactaagatatgatgaaatctaatggataatttgctatttgaaaatggtcaaaaaaaatccccttcattccttctctctttctctcctctctctctcccccaaactttacaagaaagggatcctaacaaggtaaaaagtaaacaatttagtcatcacaagccttattattcagtctatccaggagttttgccatgtcggtttatttaacttccaggaatgtaaacactgacacagccctagaagcagcaagaaagattacagtattagagttaaaaacgtgagcatggaggagctgtgctttatactctgctataataacactttacattgaaacataatggta

SEQ ID NO: 7738 - protein, 61 aa, Homo sapiens
MDNLLFENGQKKSPSFLLSFSPLSLPQTLQERDPNKVKSKQFSHHKPYYSVYPGVLPCRFI

SEQ ID NO: 7739 - DNA, 1506 bp, Homo sapiens
gcttaaaaaaaagccatgacggctctcccacaattcatcttccctgcgccatctttgtattatttctaatttattttggatgtcaaaaggcactgatgaagatattttctctggagtctccttctttctaacccggctctcccgatgtgaaccgagccgtcgtccgcccgccgccgccgccgccgccgccgccgcccgccccgcagcccaccatgtctcgccgcaagcaaggcaaaccccagcacttaagcaaacgggaattctcgcccgagcctcttgaagccattcttacagatgatgaaccagaccacggcccgttgggagctccagaaggggatcatgacctcctcacctgtgggcagtgccagatgaacttcccattgggggacattcttatttttatcgagcacaaacggaaacaatgcaatggcagcctctgcttagaaaaagctgtggataagccaccttccccttcaccaatcgagatgaaaaaagcatccaatcccgtggaggttggcatccaggtcacgccagaggatgacgattgtttatcaacgtcatctagaggaatttgccccaaacaggaacacatagcagctcagactgaactggaggatgtatttgtgtaccttatggtgtaattgtaaatgagactataaattatagtatgctattatgactacttatttttcttttctctttatttatgtgattctgaataaaaacgactgacttctgaagtgaattttcagcatggcagttaaaacaaaaaaacaccactaccacaaaaaacaatatactggtgaacattttacttaccttcaaaatccagagagtagagaatattgttttctaataagtacctaggattttcatagggagcctatgtttgtgaggccactatccaaagactaatgttcatgaaactgggagtcctatatacaagctgtatttgtaaataagacagagaaaggttgtgaactggcagcttggatgttttgtcaaagtacaatgtcagagaaactctttctaagacaaattgtaaatagaactgtcacagtgattgcatgattgagccgcagaagtgtcctacaattgttggcattgtcaggacttttgaaagcttaattaaacacagtggcccgcatggctgctaaacttactaaggaaagccaaaaggaaaaaaaaaatatatctaaaatgtagaagatcctaaagatcccaaacttcttcagacattacccttgtggtgacacagaaaagatgcattgtgcattttcctagtcatcttttataaataatgttttgagaataggtccacgtgatatgaagatcatcctgtgtgtgatgtggagattgtgttagtttttctgtctcctgctgttacagacagttaatgtaaaaatggccttttattggaaacacaaatatgtattcacttcaagaacaggagcagagggggacaaagtttccctcccgttctctgtgtttattctgtgaaagctt

SEQ ID NO: 7740 - protein, 142 aa, Homo sapiens
MSRRKQGKPQHLSKREFSPEPLEAILTDDEPDHGPLGAPEGDHDLLTCGQCQMNFPLGDILIFIEHKRKQCNGSLCLEKAVDKPPSPSPIEMKKASNPVEVGIQVTPEDDDCLSTSSRGICPKQEHIAAQTELEDVFVYLMV

SEQ ID NO: 7741 - DNA, 408 bp, Homo sapiens
tgaacctcaactctaccaactgtgaattctacattcagcaaacttagtttaatctgtgaagactaagtcattctcacatttctgggaattaaggaaatctaaaattaatgcatccatcattcaattctatgagctcccagttcgcctcgtcgccatgcctcggaaaattgaggaaatcaaggattttctgctcacagtccgatgaaaggatgccaaatccgtcaagatcaagaaaaataaggacaatgtgaagtttaaagtttgacacagcaaatacctttacaccctggtcatcactgacaaagagaaggcagataaactgtagtccctgccccctggtttggcagtgaaggaactaaaatgaaccagacacactgatttgtgctgtattaaaatactaaaaatcct

SEQ ID NO: 7742 - protein, 47 aa, Homo sapiens
MHPSFNSMSSQFASSPCLGKLRKSRIFCSQSDERMPNPSRSRKIRTM

SEQ ID NO: 7743 - DNA, 632 bp, Homo sapiens
cagtggactcgggttataattaccaacagaggagagaataactataagttattttgatgtaaaaagcatattatcctaagccaacataataacacagtttttatgaagcacaataattactttgaagactcacagaagtgcatttttctaaaagaaggagattctcatacagaaacagattaacagaaacagaaacagcaacactagagaacagcaaaatagtaacatttcaaatagtaacatttcaagaaaatatatacaccttcacagtatgtggtggtatccacttactgtctactgcctccataactcctaaagtcttctgaagatttattaatgctttgaatatatgagccaccgtttcttttcacagccttttcacaactgggaattctttagagaaaggcaatcttacctcatttacttacttcatcagtaatgccattactatgcctacctaagaagaaaatatatcatgtggcagaggactagaaagaaaaaacaacaacaaaaggctgtgaagatttgatcatatgcctacgtgtgtggtgaatacaatatttctttaatcgcaatcaggaatataaatcttattttgatgctatgacataataaagtgcattattttcctg

SEQ ID NO: 7744 - protein, 66 aa, Homo sapiens
RLTEVHFSKRRRFSYRNRLTETETATLENSKIVTFQIVTFQENIYTFTVCGGIHLLSTASITPKVF

SEQ ID NO: 7745 - DNA, 1006 bp, Homo sapiens
acttatctttagagacacatttatatcagaaaatttaacttgatgattaaaaaaattggtgaaatacgtgtagacttttgtaactggattatagtttcatctaagaactcactaaaaatatattgaacttcaggaagagatttttaaatggctttggtaagccatttaaaagccttattttcccaaacgaattagtgttggtgtgtggatgaggaactttgctgttattctgtgagcattacctgataagaactaatcagatgacagatggaatctgaagcttgttctgatgaatttttgaggctggaatgcaatggcgtgattatagctcaatgcatcttcatctccctgggctcaagcaatcttccaagctcagcctcccaagtagctggaactacaggtaggaccaactccactttgaactaggtcctgttgaaaaggctgttcataaaccttaccagccagtagctcctgtcctttcttgatggatgcagaagatgaaacatcctggctagaaaacaaaatggccatgattttgaagagatgaagtttcaggacaactctgcactctgaaacattctgaaacagaaatggaaggtgtgtgtgctgcatcagagcaatgagctagagcaacattagagaattagcaacatagagaagtgaggtgaggtgtaaaggaaggacagtcatctttgatcagctgttcttggcccaaacctgccatatcctaacctctggttttcataaatgtgtgaagtttgaaggcattttggcaaaaatctcaactcccgtaatcacatgaaatgctgtttcttctccaagggcaggaaattcaaaggctacatatgtagggttgcccagtgggaatctgagactctagaaactacatcctgcttttgcatatatcaagattattttggtgccaaaaagtaggtattaaataataaattgagttaattgtaagtaaaacaaagttaattttggtgtttggcatgaccattgaacc

SEQ ID NO: 7746 - protein, 52 aa, Homo sapiens [sequence omitted]

SEQ ID NO: 7747 - DNA, 1102 bp, Homo sapiens
aagagataccagaagggaaactgggaagctggaggagaaggggagaggaccatgccttccctagacaaaagacaaagccttttgcttctgctataaataggacaccctcaggaaagctggagcttctaattcttccagtgatggaactcagcatatgtctgaggagcagagaattcagaagctcccatgggcctcccacagctggaatctaaaacaaccacagaagtctcagaaaagagaatataaaagcatacaacaaaataaaggactcataagagtacagggatcacatacatgaagttgaacaatgttcggttttaattcttcacaattatcatttgtaagattgtaggcattggccatggaaccccaagtctccagccatctccagttctctgcaggcactgaatgtatgtgctaaggcaagccatctgcagctgctgcttgaagggaggtacagatacaacagttggaaaccttggtcaccacagcagaggtgtggggccaatccacaatgcagttggagcatgttaacttatggatgaaatgacagagaagacacagctgcttcagcgctctctccatgcttgcaggaaaccatctaccaccactcaggtttccagcggagcccatccgagcagcacagctgccactgggtaccacaacccatgttgcagccacgtggctggcccagaagcagcagggaatgaaggctcactcacctcgggatcctcttcgtaatgccagttgtcggttctaactgaggtgcgaggggagttggtgggcaagtggcagttggcttagaattacaatcaggagaaaggaatgttcttttgctaatgaaagaggagaaattggcaatgttccagtcccaagtctaggcctcgggaggcttgcattttgccaaattatgatccccttctcagctgctgctctttcagcatggacgctatcacaaacacatggaaaatggccttccctagttaatcccagccaaaccaaacccaggtgcaaactagagccacacagccaaacccaccctacaccaaccattcccagctgaactgtatccatgagaataaattattgtggtttttcaggc

SEQ ID NO: 7748 - protein, 67 aa, Homo sapiens
MDEMTEKTQLLQRSLHACRKPSTTTQVSSGAHPSSTAATGYHNPCCSHVAGPEAAGNEGSLTSGSSS

SEQ ID NO: 7749 - DNA, 1178 bp, Homo sapiens
ggggctaggcgtggccgacctcacactctccttgggcaggacctgctgcagctgctctcggggttggaggggaggttcctaggtcaatggagttgtgtacctaggaggattatggctgcctctgctgagtcatgcagattgtcaggaagtgtgagaaagccagcagtcaccggcctcacccagccaccctgccgccattaacagcactaggcaggcagtgcgcagagctgagaacttgccccaggttacccgcctcccagctgctaaacaaaagggaggcttttcagctggttcaaattgttacaaagttcagctagagatttgcttttacctgcggcgttttccccataccactggctgccctcccgaagaattcctgtgatgccaggcaggaatggcctggttggagaccagctagctcccagggcctttcccgctgcttcctctacccctgtatttcgctgggctctctaaatggattcagctccagaggaggaaaaccttgagaccctgagactttcagaaacttattcacagttaccaaagctgaaaatgtttgtggcagggagtgggacatccggcttcagagcaggaactttcattgcaccagtgatgaaaaagagaatgaaatgtgggtgacgttgagaaaggcaagaagatttttgttcagaagtgtgcccagtgcctaaaagggaggcaagcacaagactgggcctaacctccatggtctctttgggctgaagactggtcaggccattggattctcttacaaagatgccagtaagaacaaagagatcacctggggagaggatacagtgatggagcatttgcagaatcccaagaactacatccctggaacaaaaatgatctttgctggcattcagaagaaggcagaaagggcagacttgatagcttatctcaaaaaaagctactcatgagtaataattggccactgccttatttattacaaaacagaaatgtctcatgacttttctatgtgtaccatactttaatagatctcatacaccagaattcagatcatgaatgactgacagaatattttactgggcaatcctgatttaaaactaagactggcttgtggttaaatgaatgtgttcagtttttgaattttaatagtaattccaattcagtaaatgctatcactgtttaccccttct

SEQ ID NO: 7750 - protein, 54 aa, Homo sapiens
MDSAPEEENLETLRLSETYSQLPKLKMFVAGSGTSGFRAGTFIAPVMKKRMKCG

SEQ ID NO: 7751 - DNA, 3775 bp, Homo sapiens
gctgaaggaagctacaatcatccaagtgggaagtaatgtctaccgatgttctgatttaagtgaatgaaggtcttctttccacctcgggaaatcttgagggttatgtaacagcagctttgaaaggcttgtgagatgtactttgtgctagtccatctcaaatcttcaccggctgtaccaagaacagaaaaaaaaaggaatttgagacgggatctcagcatgtttgccaggatggtctcagtctcttgacctcgtgatccgcctaccttggcctcccaaagtgttggaattacaggtgtgagccactgcgcccagccatcagaggtgactacacttgtcaacacaagcaacaaaggcccatctggtaaaaagaaagggaggtcaaagaaagcccatgtactagctgcctctgtagagcaagccactcagaatttcctggaaaagggtgaacagatcgctaaggagagtcaagatctcaaagaagagttggtggctgctgtagaggatgtgcgcaaacaaggtgagacgatgcggatcgcctcctccgagtttgcagatgacccttgctcgtcggtaaagcgcggcaccatggtacgggcggcaagggctttgctctccgcggtgacacgcttactcatcctggcggacatggcagatgtcatgagacttttatcccatctgaaaattgtggaagaggccctggaagctgtcaaaaatgctacaaatgagcaagaccttgcaaaccgttttaaagagtttgggaaagagatggtgaaacttaactatgtagcagcaagaagacaacaggagctgaaggatcctcactgtcgggatgagatggcagccgcccgaggggctctgaagaagaatgccacaatgctgtacacggcctctcaagcatttctccgccacccagatgtcgccgctacgagagccaaccgagattatgtgttcaaacaagtccaggaggccatcgccggcatctccaatgctgctcaagctacctcgcccactgacgaagccaagggccacacgggcatcggcgagctggctgcggctcttaatgagtttgacaataagattatcctggaccccatgacgttcagcgaggccaggttccggccgtccctggaggagaggctggagagcagcatcatcagcggcgcagcgctgatggccgactcctcctgcacgcgagacgaccggcgcgagaggatcgtggcggagtgcaacgccgtgcggcaggcgctccaggacctgctcagcgagtacatgaataatagcttcggaaagcagtgatggatcacatatctgactctttcctggaaaccaatgttcctttgctagttctcattgaggctgcaaagagcggaaatgaaaaggaagtgaaagaatatgcccaagttttccgtgagcatgccaacaaactggtagaggttgccaatttggcctgttccatctccaacaatgaagaaggggtgaaattagttcggatggcagccacccagattgacagcctgtgtccccaggtcatcaatgccgctctgacactggctgcccggccacagagcaaagttgctcaggataacatggacgtcttcaaagaccagtgggagaagcaggtccgagtgttgacagaggccgtggatgacatcacctcagtggatgacttcctctctgtctcagaaaatcacatcttggaggatgtgaacaagtgtgtgatagccctccaagagggcgatgtggacactctggaccggactgcaggggccatcaggggccgggcagctcgagtcatacacatcatcaatgctgagatggagaactatgaagctggggtttatactgagaaggtgttggaagctacaaaattgctttctgaaacagtgatgccacgcttcgctgaacaagtagaggttgccattgaagccctgagtgccaacgttcctcaaccgtttgaggagaatgagttcatcgatgcctctcgcctggtgtatgatggcgttcgggacatcagaaaggctgtgctgatgatcaggaccccagaagaactagaggatgattctgactttgagcaggaagattatgatgtgcgtagcaggacaagtgttcagactgaggatgaccagctcattgcagggcagagcgcacgggccatcatggcgcaactaccgcaggaggagaaggcaaaaatagctgagcaggtggagatattccatcaagagaaaagcaagctggatgcagaagtggccaaatgggacgacagcggcaatgatatcattgtactggccaagcagatgtgtatgatcatgatggaaatgacagacttcacaagaggcaaaggcccattgaaaaatacatctgatgtcattaatgctgccaagaaaattgccgaagcaggttctcgaatggacaaattagctcgtgctgtggctgatcagtgtcctgattcagcatgtaagcaggatttattagcctaccttcaacgaattgccttgtattgccatcagcttaatatctgcagcaaggtgaaggcagaagtgcagaatctgggaggagagctcattgtgtcagggctggacagtgccacatcgcttatccaggcagctaaaaacctgatgaatgctgttgtcctcacggtgaaagcatcctatgtggcctcaaccaaataccagaaggtctatgggacagcagctgtcaactcacctgttgtgtcttggaagatgaaggctccagagaagaagccccttgtgaagagagaaaagcctgaagaattccagacacgagttcgacgaggttctcagaagaaacacatttcgcctgtacaggctttaagtgaattcaaagcaatggattccttctaggacgataggttttaacaagaaagctttttctttcttttctttctttctttttctttttaattccatttttgtatgcatacctgccagctcgtatgcctctggcatggggaaattaagggaacagtgtctgtttgcatgtaagatgagatgagatcaatactactgatccatctgtagcctgggaaggagacaggacattcctgtactaaggtggcacagagctgtcctttgcaacattctcataaaattgggcacagagttcgcattggcgcaatatttatgggagtgggagggatggggaaaataaacttaactctacaaaagcaaactctaatgcatgcaagaatcattaggttggcaggtatatgcataagtgaaaaatctggaagtgtaatggtagaacataaaacttgtattgcttctgtttcagtgcaaaaatgtactagccaatacgcttaagtgtgtggcccatgaattgaacaatttaaccttgaagtctatatccgtgatattatgtcgatttttaactgaggggaaattaactagtccagcctaaaatgcttcttttaatctgcattctgtttcctcttctagttgtgccattactagtgatcatgtttttttcccccctttaatgaaaacaataaacatctatttgagacaattaaaatccttctgggggcactggaagcacaatacggtgaccaatcttgctttcatttttttttctttttaatttgaaccatgattttgctagaaatagaaggcccagtggtggaatattagagggaaggaaactgacaacgtgtgaaagttagaggcaaatacataggtgtagcttggagtgctggtatctaatataccattgtattcactaactaactcaaaataaacacatttaatcttgacatctc

SEQ ID NO: 7752 - protein, 521 aa, Homo sapiens
MDHISDSFLETNVPLLVLIEAAKSGNEKEVKEYAQVFREHANKLVEVANLACSISNNEEGVKLVRMAATQIDSLCPQVINAALTLAARPQSKVAQDNMDVFKDQWEKQVRVLTEAVDDITSVDDFLSVSENHILEDVNKCVIALQEGDVDTLDRTAGAIRGRAARVIHIINAEMENYEAGVYTEKVLEATKLLSETVMPRFAEQVEVAIEALSANVPQPFEENEFIDASRLVYDGVRDIRKAVLMIRTPEELEDDSDFEQEDYDVRSRTSVQTEDDQLIAGQSARAIMAQLPQEEKAKIAEQVEIFHQEKSKLDAEVAKWDDSGNDIIVLAKQMCMIMMEMTDFTRGKGPLKNTSDVINAAKKIAEAGSRMDKLARAVADQCPDSACKQDLLAYLQRIALYCHQLNICSKVKAEVQNLGGELIVSGLDSATSLIQAAKNLMNAVVLTVKASYVASTKYQKVYGTAAVNSPVVSWKMKAPEKKPLVKREKPEEFQTRVRRGSQKKHISPVQALSEFKAMDSF

SEQ ID NO: 7753 - DNA, 3850 bp, Homo sapiens
gctgaaggaagctacaatcatccaagtgggaagtaatgtctaccgatgttctgatttaagtgaatgaaggtcttctttccacctcgggaaatcttgagggttatgtaacagcagctttgaaaggcttgtgagatgtactttgtgctagtccatctcaaatcttcaccggctgtaccaagaacagaaaaaaaaaggaatttgagacgggatctcagcatgtttgccaggatggtctcagtctcttgacctcgtgatccgcctaccttggcctcccaaagtgttggaattacaggtgtgagccactgcgcccagccatcagaggtgactacacttgtcaacacaagcaacaaaggcccatctggtaaaaagaaagggaggtcaaagaaagcccatgtactagctgcctctgtagagcaagccactcagaatttcctggaaaagggtgaacagatcgctaaggagagtcaagatctcaaagaagagttggtggctgctgtagaggatgtgcgcaaacaaggtgagacgatgcggatcgcctcctccgagtttgcagatgacccttgctcgtcggtaaagcgcggcaccatggtacgggcggcaagggctttgctctccgcggtgacacgcttactcatcctggcggacatggcagatgtcatgagacttttatcccatctgaaaattgtggaagaggccctggaagctgtcaaaaatgctacaaatgagcaagaccttgcaaaccgttttaaagagtttgggaaagagatggtgaaacttaactatgtagcagcaagaagacaacaggagctgaaggatcctcactgtcgggatgagatggcagccgcccgaggggctctgaagaagaatgccacaatgctgtacacggcctctcaagcatttctccgccacccagatgtcgccgctacgagagccaaccgagattatgtgttcaaacaagtccaggaggccatcgccggcatctccaatgctgctcaagctacctcgcccactgacgaagccaagggccacacgggcatcggcgagctggctgcggctcttaatgagtttgacaataagattatcctggaccccatgacgttcagcgaggccaggttccggccgtccctggaggagaggctggagagcagcatcatcagcggcgcagcgctgatggccgactcctcctgcacgcgagacgaccggcgcgagaggatcgtggcggagtgcaacgccgtgcggcaggcgctccaggacctgctcagcgagtacatgaataatagcttcggaaagcagtgatggatcacatatctgactctttcctggaaaccaatgttcctttgctagttctcattgaggctgcaaagagcggaaatgaaaaggaagtgaaagaatatgcccaagttttccgtgagcatgccaacaaactggtagaggttgccaatttggcctgttccatctccaacaatgaagaaggggtgaaattagttcggatggcagccacccagattgacagcctgtgtccccaggtcatcaatgccgctctgacactggctgcccggccacagagcaaagttgctcaggataacatggacgtcttcaaagaccagtgggagaagcaggtccgagtgttgacagaggccgtggatgacatcacctcagtggatgacttcctctctgtctcagaaaatcacatcttggaggatgtgaacaagtgtgtgatagccctccaagagggcgatgtggacactctggaccggactgcaggggccatcaggggccgggcagctcgagtcatacacatcatcaatgctgagatggagaactatgaagctggggtttatactgagaaggtgttggaagctacaaaattgctttctgaaacagtgatgccacgcttcgctgaacaagtagaggttgccattgaagccctgagtgccaacgttcctcaaccgtttgaggagaatgagttcatcgatgcctctcgcctggtgtatgatggcgttcgggacatcagaaaggctgtgctgatgatcaggaccccagaagaactagaggatgattctgactttgagcaggaagattatgatgtgcgtagcaggacaagtgttcagactgaggatgaccagctcattgcagggcagagcgcacgggccatcatggcgcaactaccgcaggaggagaaggcaaaaatagctgagcaggtggagatattccatcaagagaaaagcaagctggatgcagaagtggccaaatgggacgacagcggcaatgatatcattgtactggccaagcagatgtgtatgatcatgatggaaatgacagacttcacaagaggcaaaggcccattgaaaaatacatctgatgtcattaatgctgccaagaaaattgccgaagcaggttctcgaatggacaaattagctcgtgctgtggctgatcagtgtcctgattcagcatgtaagcaggatttattagcctaccttcaacgaattgccttgtattgccatcagcttaatatctgcagcaaggtgaaggcagaagtgcagaatctgggaggagagctcattgtgtcagggctggacagtgccacatcgcttatccaggcagctaaaaacctgatgaatgctgttgtcctcacggtgaaagcatcctatgtggcctcaaccaaataccagaaggtctatgggacagcagctgtcaactcacctgttgtgtcttggaagatgaaggctccagagaagaagccccttgtgaagagagaaaagcctgaagaattccagacacgagttcgacgaggttctcagaagaaacacatttcgcctgtacaggctttaagtgaattcaaagcaatggattccttctaggacgataggttttaacaagaaagctttttctttcttttctttctttctttttctttttaattccatttttgtatgcatacctgccagctcgtatgcctctggcatggggaaattaagggaacagtgtctgtttgcatgtaagatgagatgagatcaatactactgatccatctgtagcctgggaaggagacaggacattcctgtactaaggtggcacagagctgtcctttgcaacattctcataaaattgggcacagagttcgcattggcgcaatatttatgggagtgggagggatggggaaaataaacttaactctacaaaagcaaactctaatgcatgcaagaatcattaggttggcaggtatatgcataagtgaaaaatctggaagtgtaatggtagaacataaaacttgtattgcttctgtttcagtgcaaaaatgtactagccaatacgcttaagtgtgtggcccatgaattgaacaatttaaccttgaagtctatatccgtgatattatgtcgatttttaactgaggggaaattaactagtccagcctaaaatgcttcttttaatctgcattctgtttcctcttctagttgtgccattactagtgatcatgtttttttcccccctttaatgaaaacaataaacatctatttgagacaattaaaatccttctgggggcactggaagcacaatacggtgaccaatcttgctttcatttttttttctttttaatttgaaccatgattttgctagaaatagaaggcccagtggtggaatattagagggaaggaaactgacaacgtgtgaaagttagaggcaaatacataggtgtagcttggagtgctggtatctaatataccattgtattcactaactaactcaaaataaacacatttaatcttgacatctcaagtatgttttcttttttaattttttaagtatgtacttaataaagattagagcatcatcttcctgaaaattcatt

SEQ ID NO: 7754 - protein, 521 aa, Homo sapiens; identical to SEQ ID NO: 7752

SEQ ID NO: 7755 - DNA, 550 bp, Homo sapiens
gagacgggatctcagcatgtttgccaggatggtctcagtctcttgacctcgtgatccgcctaccttggcctcccaaagtgttggaattacaggtgtgagccactgcgcccagccatcagaacaaaatatacagctggatgtttgtcacaattctaatgtccctgcaaagatgagatgcatgaatcacacagcaatctcatcaaaaagccctagcactacctctcagtatcttcatatccttcaccgcagcaactttgctttgtacactctgtctcctgccaagagagcccagggaaggtaatgtctcctggatcgtatgaaatgtttctgtaacggtcactgtaactcacaccttgatttttaccaggtcgctggcaagtgcgatggattgtaattgctgcacattcatgagggcttctcaaggttacccggtgagggttaatgttcagttcatccaccagacttatgaggcggaagagaaaatctctattagttattctgcagcattaacaaaaaattagagaacatagtctgtgctcttaaaagaagc

SEQ ID NO: 7756 - protein, 43 aa, Homo sapiens
MRCMNHTAISSKSPSTTSQYLHILHRSNFALYTLSPAKRAQGR

SEQ ID NO: 7757 - DNA, 751 bp, Homo sapiens
taagaagtgccctccaccatgattgtgtgaccttccccagccacctggaactaacaaaatatacagctggatgtttgtcacaattctaatgtccctgcaaagatgagatgcatgaatcacacagcaatctcatcaaaaaggaatttctggaaggcataggagaagagaatcctggaaaaagcaagaagcaggaagataagaggcaaagaagaagagagccccacccactggggcaagctggggccccagatgatgaaactgtggcccagaaagtttaagggatgtgtcaaatgtcacacagctcacagatccagggacatggcttaaatccagatatcttgattctaacttcagttgaggaagagaaagagtgctgccccacgctgcctgatttacaacgtgaagtgaaatctttgaaaagaaaaataagacaatgtcactcaagctcttatctgaggatttcctgggtttgaagacagagctcaaactcatacaaggggtcatctgagtctgcagataggcttgctttatgctgctccgtcagatctcttctaaagattagtgcgcaattctggacattacattttaatggtaacatggattcaactaaagggtaagcaaaggacaccgacaggaatagggagggtgccatttatagagaaaagactgagaggtccatattgttattttacctgaaagatataataaacagaggatgctgtttatcatgagtagatgctgatgagaaaat

SEQ ID NO: 7758 - protein, 56 aa, Homo sapiens; identical to SEQ ID NO: 4390

SEQ ID NO: 7759 - DNA, 734 bp, Homo sapiens
cagagttgcttgtgattaaataaccccaactgacgtggaaatcaaataaagcaacaaagaactgctttttcaactaacaaaatatacagctggatgtttgtcacaattctaatgtccctgcaaagatgagatgcatgaatcacacagcaatctcatcaaaaaggaatttctggaaggcataggagaagagaatcctggaaaaagcaagaagcaggaagataagaggcaaagaagaagagagccccacccactggggcaagctggggccccagatgatgaaactgtggcccagaaagtttaagggatgtgtcaaatgtcacacagctcacagatccagggacatggcttaaatccagatatcttgattctaacttcagttgaggaagagaaagagtgctgccccacgctgcctgatttacaacgtgaagtgaaatctttgaaaagaaaaataagacaatgtcactcaagctcttatctgaggatttcctgggtttgaagacagagctcaaactcatacaaggggtcatctgagtctgcagataggcttgctttatgctgctccgtcagatctcttctaaagattagtgcgcaattctggacattacattttaatggtaacatggattcaactaaagggtaagcaaaggacaccgacaggaatagggagggtgccatttatagagaaaagactgagaggtccatattgttattttacctgaaagatataataaaca

SEQ ID NO: 7760 - protein, 56 aa, Homo sapiens; identical to SEQ ID NO: 4390

SEQ ID NO: 7761 - DNA, 835 bp, Homo sapiens
atgtcaccacctacctgctttatctctttgtcacattttcatctctttctacttcaactttcctttgattcatccccaaaagctttcccctaggccacttggcagtattccctcactagtcaaaatctggtgggtctttcttgagtgagctctcagagctgacctccttttttaagacatctatttgcatgcaggtggccatcgatgacatcaatggttttgcagtattgagccacattttggattttacctagaagatgtgcagaatataaatgttttcatgagaacaaaatatacagctggatgtttgtcacaattctaatgtccctgcaaagatgagatgcatgaatcacacagcaatctcatcaaaaagatgatgaaactgtggcccagaaagtttaagggatgtgtcaaatgtcacacagctcacagatccagggacatggcttaaatccagatatcttgattctaacttcagttgaggaagagaaagagtgctgccccacgctgcctgatttacaacgtgaagtgaaatctttgaaaagaaaaataagacaatgtcactcaagctcttatctgaggatttcctgggtttgaagacagagctcaaactcatacaaggggtcatctgagtctgcagataggcttgctttatgctgctccgtcagatctcttctaaagattagtgcgcaattctggacattacattttaatggtaacatggattcaactaaagggtaagcaaaggacaccgacaggaatagggagggtgccatttatagagaaaagactgagaggtccatattgttattttacctgaaagatataataaaca

SEQ ID NO: 7762 - protein, 36 aa, Homo sapiens
MHESHSNLIKKMMKLWPRKFKGCVKCHTAHRSRDMA

SEQ ID NO: 7763 - DNA, 545 bp, Homo sapiens
aagtctcagagccagcactcaggatgagtgccaatggaagcctgtccttggagtccagaatgaacgtcagaagcaacccagccacagcaggagactgtccatgaatgtcatctggctgaacctaaagtttccttagacacatgaatgaacacagtcatgctgtcaggaagaggaaaaggaagactgataaataaacgttcaatttaagccaatccagtatctatactgtagacctcagtgaaggctggaagactaatccaacacaatctgacatcctgattctttccaatcacctttatgttccaccctctcacctctggatttagatgcactccttcaaggaccatgggttctgcaacagtaccccctctccattgttccagctctgactcagatgggccctccttgatggcactcccagcagcacagccttagcactgcatgacttcggcaacttcacctatcattctgaaatgggaccccaaaagtttggaaatccggacgctaacagtggaaaggctgttggagccacttgttacacaggt

SEQ ID NO: 7764 - protein, 45 aa, Homo sapiens [sequence omitted]

SEQ ID NO: 7765 - DNA, 1161 bp, Homo sapiens
agaccagctagactgagtgatagggcaagactccatatctaacaaataaataaataaacagaaaaataaactttgaataaagccacaacagataatttggtaaatgtgatgtcatggcatgtcatggattagcagtaacccattttccatgggtaataaggtcatcattatattcaaactgtacaagctacctaacccaagaatcacatcactgaattaacaagacaaaaacaaaaacaaaggagagtaccttattgttttaaaacaatagactgtaatttagaggtctaattcaggagccttgttacattgtattgagtctgagagaagtaaaataaaaagtacaccacagattagtaattgctgacagtggctgcttcatcaagttcttggaaaacaaaagtgacaaaacggtgtaatcagagcccagaagaacactcagtgcttccctgctagggtagctagtttagacagtgctgaaaccatgacgaagaaggcctgcagcttgtcctagaaccatgcaagagggaccattgaagctgaaggtggattgctgttgggtggaaaggatgtagtcactcaaaaatgctgccagaagaagagcaagagaaaagaacaatagcttctcccgtgagacaatctcatccctccactagtgtcttctcttggaatgatctattgtgctctgagtgggtagaaaacatgatggcaagtgtatggtgctgaatcaaggtaaaagaggaaatgattatgtactcacagagggtggaacataaaggtgattggaaagaatcaggatgtcagattgtgttggattagtcttccagccttcactgaggtctacagtatagatactggattggcttaaattgaacgttctgcaaataagagaaggtatattcttgtccaagaggatgtggtatctacatataggaggaaagatatacgtgtacatgtggtggctgaaccatttgattgtggatcaggatacataagcagcaagttcaaagactgaaggaacaaggaatatcagctcataaagatgagaaagaatcagagcaagaactctggcaactcaaaagccaaggtgtcttcttacctccaaacaaccatattatttcgttagcaacgattcttaaccagactgagattgctgaagta

SEQ ID NO: 7766 - protein, 46 aa, Homo sapiens
MLPEEEQEKRTIASPVRQSHPSTSVFSWNDLLCSEWVENMMASVWC

SEQ ID NO: 7767 - DNA, 3848 bp, Homo sapiens
gagcggcttcgcttccagccccgagtgaggcggagacccaggcgggcgggcagagcaggcggcaccgcacctcggccagaggcggctgcagcagctgctgcccttgtccctgccgccgcctctccagtcccttctgtgattaccactccagctgctgggaacgggcgagaaagaggaggaggcgagaaactcccaccgacccacagagggagcatgacttcggcaacttcacctatcattctgaaatgggaccccaaaagtttggaaatccggacgctaacagtggaaaggctgttggagccacttgttacacaggtgactacacttgtcaacacaagcaacaaaggcccatctggtaaaaagaaagggaggtcaaagaaagcccatgtactagctgcctctgtagagcaagccactcagaatttcctggaaaagggtgaacagatcgctaaggagagtcaagatctcaaagaagagttggtggctgctgtagaggatgtgcgcaaacaaggtgagacgatgcggatcgcctcctccgagtttgcagatgacccttgctcgtcggtaaagcgcggcaccatggtacgggcggcaagggctttgctctccgcggtgacacgcttactcatcctggcggacatggcagatgtcatgagacttttatcccatctgaaaattgtggaagaggccctggaagctgtcaaaaatgctacaaatgagcaagaccttgcaaaccgttttaaagagtttgggaaagagatggtgaaacttaactatgtagcagcaagaagacaacaggagctgaaggatcctcactgtcgggatgagatggcagccgcccgaggggctctgaagaagaatgccacaatgctgtacacggcctctcaagcatttctccgccacccagatgtcgccgctacgagagccaaccgagattatgtgttcaaacaagtccaggaggccatcgccggcatctccaatgctgctcaagctacctcgcccactgacgaagccaagggccacacgggcatcggcgagctggctgcggctcttaatgagtttgacaataagattatcctggaccccatgacgttcagcgaggccaggttccggccgtccctggaggagaggctggagagcagcatcatcagcggcgcagcgctgatggccgactcctcctgcacgcgagacgaccggcgcgagaggatcgtggcggagtgcaacgccgtgcggcaggcgctccaggacctgctcagcgagtacatgaataatactggaaggaaagaaaaaggagatcctctcaacattgcgattgataagatgactaagaaaacaagagatctaaggagacagcttcggaaagcagtgatggatcacatatctgactctttcctggaaaccaatgttcctttgctagttctcattgaggctgcaaagagcggaaatgaaaaggaagtgaaagaatatgcccaagttttccgtgagcatgccaacaaactggtagaggttgccaatttggcctgttccatctccaacaatgaagaaggggtgaaattagttcggatggcagccacccagattgacagcctgtgtccccaggtcatcaatgccgctctgacactggctgcccggccacagagcaaagttgctcaggataacatggacgtcttcaaagaccagtgggagaagcaggtccgagtgttgacagaggccgtggatgacatcacctcagtggatgacttcctctctgtctcagaaaatcacatcttggaggatgtgaacaagtgtgtgatagccctccaagagggcgatgtggacactctggaccggactgcaggggccatcaggggccgggcagctcgagtcatacacatcatcaatgctgagatggagaactatgaagctggggtttatactgagaaggtgttggaagctacaaaattgctttctgaaacagtgatgccacgcttcgctgaacaagtagaggttgccattgaagccctgagtgccaacgttcctcaaccgtttgaggagaatgagttcatcgatgcctctcgcctggtgtatgatggcgttcgggacatcagaaaggctgtgctgatgatcaggaccccagaagaactagaggatgattctgactttgagcaggaagattatgatgtgcgtagcaggacaagtgttcagactgaggatgaccagctcattgcagggcagagcgcacgggccatcatggcgcaactaccgcaggaggagaaggcaaaaatagctgagcaggtggagatattccatcaagagaaaagcaagctggatgcagaagtggccaaatgggacgacagcggcaatgatatcattgtactggccaagcagatgtgtatgatcatgatggaaatgacagacttcacaagaggcaaaggcccattgaaaaatacatctgatgtcattaatgctgccaagaaaattgccgaagcaggttctcgaatggacaaattagctcgtgctgtggctgatcagtgtcctgattcagcatgtaagcaggatttattagcctaccttcaacgaattgccttgtattgccatcagcttaatatctgcagcaaggtgaaggcagaagtgcagaatctgggaggagagctcattgtgtcagggctggacagtgccacatcgcttatccaggcagctaaaaacctgatgaatgctgttgtcctcacggtgaaagcatcctatgtggcctcaaccaaataccagaaggtctatgggacagcagctgtcaactcacctgttgtgtcttggaagatgaaggctccagagaagaagccccttgtgaagagagaaaagcctgaagaattccagacacgagttcgacgaggttctcagaagaaacacatttcgcctgtacaggctttaagtgaattcaaagcaatggattccttctaggacgataggttttaacaagaaagctttttctttcttttctttctttctttttctttttaattccatttttgtatgcatacctgccagctcgtatgcctctggcatggggaaattaagggaacagtgtctgtttgcatgtaagatgagatgagatcaatactactgatccatctgtagcctgggaaggagacaggacattcctgtactaaggtggcacagagctgtcctttgcaacattctcataaaattgggcacagagttcgcattggcgcaatatttatgggagtgggagggatggggaaaataaacttaactctacaaaagcaaactctaatgcatgcaagaatcattaggttggcaggtatatgcataagtgaaaaatctggaagtgtaatggtagaacataaaacttgtattgcttctgtttcagtgcaaaaatgtactagccaatacgcttaagtgtgtggcccatgaattgaacaatttaaccttgaagtctatatccgtgatattatgtcgatttttaactgaggggaaattaactagtccagcctaaaatgcttcttttaatctgcattctgtttcctcttctagttgtgccattactagtgatcatgtttttttcccccctttaatgaaaacaataaacatctatttgagacaattaaaatccttctgggggcactggaagcacaatacggtgaccaatcttgctttcatttttttttctttttaatttgaaccatgattttgctagaaatagaaggcccagtggtggaatattagagggaaggaaactgacaacgtgtgaaagttagaggcaaatacataggtgtagcttggagtgctggtatctaatataccattgtattcactaactaactcaaaataaacacatttaatcttgacatctc

SEQ ID NO: 7768 - protein, 906 aa, Homo sapiens
MTSATSPIILKWDPKSLEIRTLTVERLLEPLVTQVTTLVNTSNKGPSGKKKGRSKKAHVLAASVEQATQNFLEKGEQIAKESQDLKEELVAAVEDVRKQGETMRIASSEFADDPCSSVKRGTMVRAARALLSAVTRLLILADMADVMRLLSHLKIVEEALEAVKNATNEQDLANRFKEFGKEMVKLNYVAARRQQELKDPHCRDEMAAARGALKKNATMLYTASQAFLRHPDVAATRANRDYVFKQVQEAIAGISNAAQATSPTDEAKGHTGIGELAAALNEFDNKIILDPMTFSEARFRPSLEERLESSIISGAALMADSSCTRDDRRERIVAECNAVRQALQDLLSEYMNNTGRKEKGDPLNIAIDKMTKKTRDLRRQLRKAVMDHISDSFLETNVPLLVLIEAAKSGNEKEVKEYAQVFREHANKLVEVANLACSISNNEEGVKLVRMAATQIDSLCPQVINAALTLAARPQSKVAQDNMDVFKDQWEKQVRVLTEAVDDITSVDDFLSVSENHILEDVNKCVIALQEGDVDTLDRTAGAIRGRAARVIHIINAEMENYEAGVYTEKVLEATKLLSETVMPRFAEQVEVAIEALSANVPQPFEENEFIDASRLVYDGVRDIRKAVLMIRTPEELEDDSDFEQEDYDVRSRTSVQTEDDQLIAGQSARAIMAQLPQEEKAKIAEQVEIFHQEKSKLDAEVAKWDDSGNDIIVLAKQMCMIMMEMTDFTRGKGPLKNTSDVINAAKKIAEAGSRMDKLARAVADQCPDSACKQDLLAYLQRIALYCHQLNICSKVKAEVQNLGGELIVSGLDSATSLIQAAKNLMNAVVLTVKASYVASTKYQKVYGTAAVNSPVVSWKMKAPEKKPLVKREKPEEFQTRVRRGSQKKHISPVQALSEFKAMDSF

SEQ ID NO: 7769 - DNA, 3987 bp, Homo sapiens
gcttcgcttccagccccgagtgaggcggagacccaggcgggcgggcagagcaggcggcaccgcacctcggccagaggcggctgcagcagctgctgcccttgtccctgccgccgcctctccagtcccttctgtgattaccactccagctgctgggaacgggcgagaaagaggaggaggcgagaaactcccaccgacccacagagggagcatgacttcggcaacttcacctatcattctgaaatgggaccccaaaagtttggaaatccggacgctaacagtggaaaggctgttggagccacttgttacacaggtgactacacttgtcaacacaagcaacaaaggcccatctggtaaaaagaaagggaggtcaaagaaagcccatgtactagctgcctctgtagagcaagccactcagaatttcctggaaaagggtgaacagatcgctaaggagagtcaagatctcaaagaagagttggtggctgctgtagaggatgtgcgcaaacaaggtgagacgatgcggatcgcctcctccgagtttgcagatgacccttgctcgtcggtaaagcgcggcaccatggtacgggcggcaagggctttgctctccgcggtgacacgcttactcatcctggcggacatggcagatgtcatgagacttttatcccatctgaaaattgtggaagaggccctggaagctgtcaaaaatgctacaaatgagcaagaccttgcaaaccgttttaaagagtttgggaaagagatggtgaaacttaactatgtagcagcaagaagacaacaggagctgaaggatcctcactgtcgggatgagatggcagccgcccgaggggctctgaagaagaatgccacaatgctgtacacggcctctcaagcatttctccgccacccagatgtcgccgctacgagagccaaccgagattatgtgttcaaacaagtccaggaggccatcgccggcatctccaatgctgctcaagctacctcgcccactgacgaagccaagggccacacgggcatcggcgagctggctgcggctcttaatgagtttgacaataagattatcctggaccccatgacgttcagcgaggccaggttccggccgtccctggaggagaggctggagagcagcatcatcagcggcgcagcgctgatggccgactcctcctgcacgcgagacgaccggcgcgagaggatcgtggcggagtgcaacgccgtgcggcaggcgctccaggacctgctcagcgagtacatgaataatactggaaggaaagaaaaaggagatcctctcaacattgcgattgataagatgactaagaaaacaagagatctaaggagacagcttcggaaagcagtgatggatcacatatctgactctttcctggaaaccaatgttcctttgctagttctcattgaggctgcaaagagcggaaatgaaaaggaagtgaaagaatatgcccaagttttccgtgagcatgccaacaaactggtagaggttgccaatttggcctgttccatctccaacaatgaagaaggggtgaaattagttcggatggcagccacccagattgacagcctgtgtccccaggtcatcaatgccgctctgacactggctgcccggccacagagcaaagttgctcaggataacatggacgtcttcaaagaccagtgggagaagcaggtccgagtgttgacagaggccgtggatgacatcacctcagtggatgacttcctctctgtctcagaaaatcacatcttggaggatgtgaacaagtgtgtgatagccctccaagagggcgatgtggacactctggaccggactgcaggggccatcaggggccgggcagctcgagtcatacacatcatcaatgctgagatggagaactatgaagctggggtttatactgagaaggtgttggaagctacaaaattgctttctgaaacagtgatgccacgcttcgctgaacaagtagaggttgccattgaagccctgagtgccaacgttcctcaaccgtttgaggagaatgagttcatcgatgcctctcgcctggtgtatgatggcgttcgggacatcagaaaggctgtgctgatgatcaggaccccagaagaactagaggatgattctgactttgagcaggaagattatgatgtgcgtagcaggacaagtgttcagactgaggatgaccagctcattgcagggcagagcgcacgggccatcatggcgcaactaccgcaggaggagaaggcaaaaatagctgagcaggtggagatattccatcaagagaaaagcaagctggatgcagaagtggccaaatgggacgacagcggcaatgatatcattgtactggccaagcagatgtgtatgatcatgatggaaatgacagacttcacaagaggcaaaggcccattgaaaaatacatctgatgtcattaatgctgccaagaaaattgccgaagcaggttctcgaatggacaaattagctcgtgctgtggctgatcagtgtcctgattcagcatgtaagcaggatttattagcctaccttcaacgaattgccttgtattgccatcagcttaatatctgcagcaaggtgaaggcagaagtgcagaatctgggaggagagctcattgtgtcagggacaggagttcagagcactttcactaccttttatgaggtagattgtgatgtcatagatgggggcagggctagtcaactttctacccacctcccaacctgtgctgagggagctccgatcgggagtggaagcagtgattcctccatgctggacagtgccacatcgcttatccaggcagctaaaaacctgatgaatgctgttgtcctcacggtgaaagcatcctatgtggcctcaaccaaataccagaaggtctatgggacagcagctgtcaactcacctgttgtgtcttggaagatgaaggctccagagaagaagccccttgtgaagagagaaaagcctgaagaattccagacacgagttcgacgaggttctcagaagaaacacatttcgcctgtacaggctttaagtgaattcaaagcaatggattccttctaggacgataggttttaacaagaaagctttttctttcttttctttctttctttttctttttaattccatttttgtatgcatacctgccagctcgtatgcctctggcatggggaaattaagggaacagtgtctgtttgcatgtaagatgagatgagatcaatactactgatccatctgtagcctgggaaggagacaggacattcctgtactaaggtggcacagagctgtcctttgcaacattctcataaaattgggcacagagttcgcattggcgcaatatttatgggagtgggagggatggggaaaataaacttaactctacaaaagcaaactctaatgcatgcaagaatcattaggttggcaggtatatgcataagtgaaaaatctggaagtgtaatggtagaacataaaacttgtattgcttctgtttcagtgcaaaaatgtactagccaatacgcttaagtgtgtggcccatgaattgaacaatttaaccttgaagtctatatccgtgatattatgtcgatttttaactgaggggaaattaactagtccagcctaaaatgcttcttttaatctgcattctgtttcctcttctagttgtgccattactagtgatcatgtttttttcccccctttaatgaaaacaataaacatctatttgagacaattaaaatccttctgggggcactggaagcacaatacggtgaccaatcttgctttcatttttttttctttttaatttgaaccatgattttgctagaaatagaaggcccagtggtggaatattagagggaaggaaactgacaacgtgtgaaagttagaggcaaatacataggtgtagcttggagtgctggtatctaatataccattgtattcactaactaactcaaaataaacacatttaatcttgacatctc

SEQ ID NO: 7770 - protein, 954 aa, Homo sapiens
MTSATSPIILKWDPKSLEIRTLTVERLLEPLVTQVTTLVNTSNKGPSGKKKGRSKKAHVLAASVEQATQNFLEKGEQIAKESQDLKEELVAAVEDVRKQGETMRIASSEFADDPCSSVKRGTMVRAARALLSAVTRLLILADMADVMRLLSHLKIVEEALEAVKNATNEQDLANRFKEFGKEMVKLNYVAARRQQELKDPHCRDEMAAARGALKKNATMLYTASQAFLRHPDVAATRANRDYVFKQVQEAIAGISNAAQATSPTDEAKGHTGIGELAAALNEFDNKIILDPMTFSEARFRPSLEERLESSIISGAALMADSSCTRDDRRERIVAECNAVRQALQDLLSEYMNNTGRKEKGDPLNIAIDKMTKKTRDLRRQLRKAVMDHISDSFLETNVPLLVLIEAAKSGNEKEVKEYAQVFREHANKLVEVANLACSISNNEEGVKLVRMAATQIDSLCPQVINAALTLAARPQSKVAQDNMDVFKDQWEKQVRVLTEAVDDITSVDDFLSVSENHILEDVNKCVIALQEGDVDTLDRTAGAIRGRAARVIHIINAEMENYEAGVYTEKVLEATKLLSETVMPRFAEQVEVAIEALSANVPQPFEENEFIDASRLVYDGVRDIRKAVLMIRTPEELEDDSDFEQEDYDVRSRTSVQTEDDQLIAGQSARAIMAQLPQEEKAKIAEQVEIFHQEKSKLDAEVAKWDDSGNDIIVLAKQMCMIMMEMTDFTRGKGPLKNTSDVINAAKKIAEAGSRMDKLARAVADQCPDSACKQDLLAYLQRIALYCHQLNICSKVKAEVQNLGGELIVSGTGVQSTFTTFYEVDCDVIDGGRASQLSTHLPTCAEGAPIGSGSSDSSMLDSATSLIQAAKNLMNAVVLTVKASYVASTKYQKVYGTAAVNSPVVSWKMKAPEKKPLVKREKPEEFQTRVRRGSQKKHISPVQALSEFKAMDSF

SEQ ID NO: 7771 - DNA, 4044 bp, Homo sapiens
gcttcgcttccagccccgagtgaggcggagacccaggcgggcgggcagagcaggcggcaccgcacctcggccagaggcggctgcagcagctgctgcccttgtccctgccgccgcctctccagtcccttctgtgattaccactccagctgctgggaacgggcgagaaagaggaggaggcgagaaactcccaccgacccacagagggagcatgacttcggcaacttcacctatcattctgaaatgggaccccaaaagtttggaaatccggacgctaacagtggaaaggctgttggagccacttgttacacaggtgactacacttgtcaacacaagcaacaaaggcccatctggtaaaaagaaagggaggtcaaagaaagcccatgtactagctgcctctgtagagcaagccactcagaatttcctggaaaagggtgaacagatcgctaaggagagtcaagatctcaaagaagagttggtggctgctgtagaggatgtgcgcaaacaaggtgagacgatgcggatcgcctcctccgagtttgcagatgacccttgctcgtcggtaaagcgcggcaccatggtacgggcggcaagggctttgctctccgcggtgacacgcttactcatcctggcggacatggcagatgtcatgagacttttatcccatctgaaaattgtggaagaggccctggaagctgtcaaaaatgctacaaatgagcaagaccttgcaaaccgttttaaagagtttgggaaagagatggtgaaacttaactatgtagcagcaagaagacaacaggagctgaaggatcctcactgtcgggatgagatggcagccgcccgaggggctctgaagaagaatgccacaatgctgtacacggcctctcaagcatttctccgccacccagatgtcgccgctacgagagccaaccgagattatgtgttcaaacaagtccaggaggccatcgccggcatctccaatgctgctcaagctacctcgcccactgacgaagccaagggccacacgggcatcggcgagctggctgcggctcttaatgagtttgacaataagattatcctggaccccatgacgttcagcgaggccaggttccggccgtccctggaggagaggctggagagcagcatcatcagcggcgcagcgctgatggccgactcctcctgcacgcgagacgaccggcgcgagaggatcgtggcggagtgcaacgccgtgcggcaggcgctccaggacctgctcagcgagtacatgaataatactggaaggaaagaaaaaggagatcctctcaacattgcgattgataagatgactaagaaaacaagagatctaaggagacagcttcggaaagcagtgatggatcacatatctgactctttcctggaaaccaatgttcctttgctagttctcattgaggctgcaaagagcggaaatgaaaaggaagtgaaagaatatgcccaagttttccgtgagcatgccaacaaactggtagaggttgccaatttggcctgttccatctccaacaatgaagaaggggtgaaattagttcggatggcagccacccagattgacagcctgtgtccccaggtcatcaatgccgctctgacactggctgcccggccacagagcaaagttgctcaggataacatggacgtcttcaaagaccagtgggagaagcaggtccgagtgttgacagaggccgtggatgacatcacctcagtggatgacttcctctctgtctcagaaaatcacatcttggaggatgtgaacaagtgtgtgatagccctccaagagggcgatgtggacactctggaccggactgcaggggccatcaggggccgggcagctcgagtcatacacatcatcaatgctgagatggagaactatgaagctggggtttatactgagaaggtgttggaagctacaaaattgctttctgaaacagtgatgccacgcttcgctgaacaagtagaggttgccattgaagccctgagtgccaacgttcctcaaccgtttgaggagaatgagttcatcgatgcctctcgcctggtgtatgatggcgttcgggacatcagaaaggctgtgctgatgatcaggaccccagaagaactagaggatgattctgactttgagcaggaagattatgatgtgcgtagcaggacaagtgttcagactgaggatgaccagctcattgcagggcagagcgcacgggccatcatggcgcaactaccgcaggaggagaaggcaaaaatagctgagcaggtggagatattccatcaagagaaaagcaagctggatgcagaagtggccaaatgggacgacagcggcaatgatatcattgtactggccaagcagatgtgtatgatcatgatggaaatgacagacttcacaagaggcaaaggcccattgaaaaatacatctgatgtcattaatgctgccaagaaaattgccgaagcaggttctcgaatggacaaattagctcgtgctgtggctgatcagtgtcctgattcagcatgtaagcaggatttattagcctaccttcaacgaattgccttgtattgccatcagcttaatatctgcagcaaggtgaaggcagaagtgcagaatctgggaggagagctcattgtgtcagggacaggagttcagagcactttcactaccttttatgaggtagattgtgatgtcatagatgggggcagggctagtcaactttctacccacctcccaacctgtgctgagggagctccgatcgggagtggaagcagtgattcctccatgctggacagtgccacatcgcttatccaggcagctaaaaacctgatgaatgctgttgtcctcacggtgaaagcatcctatgtggcctcaaccaaataccagaaggtctatgggacagcagctgtcaactcacctgttgtgtcttggaagatgaaggctccagagaagaagccccttgtgaagagagaaaagcctgaagaattccagacacgagttcgacgaggttctcagaagaaacacatttcgcctgtacaggctttaagtgaattcaaagcaatggattccttctaggacgataggttttaacaagaaagctttttctttcttttctttctttctttttctttttaattccatttttgtatgcatacctgccagctcgtatgcctctggcatggggaaattaagggaacagtgtctgtttgcatgtaagatgagatgagatcaatactactgatccatctgtagcctgggaaggagacaggacattcctgtactaaggtggcacagagctgtcctttgcaacattctcataaaattgggcacagagttcgcattggcgcaatatttatgggagtgggagggatggggaaaataaacttaactctacaaaagcaaactctaatgcatgcaagaatcattaggttggcaggtatatgcataagtgaaaaatctggaagtgtaatggtagaacataaaacttgtattgcttctgtttcagtgcaaaaatgtactagccaatacgcttaagtgtgtggcccatgaattgaacaatttaaccttgaagtctatatccgtgatattatgtcgatttttaactgaggggaaattaactagtccagcctaaaatgcttcttttaatctgcattctgtttcctcttctagttgtgccattactagtgatcatgtttttttcccccctttaatgaaaacaataaacatctatttgagacaattaaaatccttctgggggcactggaagcacaatacggtgaccaatcttgctttcatttttttttctttttaatttgaaccatgattttgctagaaatagaaggcccagtggtggaatattagagggaaggaaactgacaacgtgtgaaagttagaggcaaatacataggtgtagcttggagtgctggtatctaatataccattgtattcactaactaactcaaaataaacacatttaatcttgacatctcaagtatgttttcttttttaattttttaagtatgtacttaataaagattagagcatca

SEQ ID NO: 7772 - protein, 954 aa, Homo sapiens; identical to SEQ ID NO: 7770

SEQ ID NO: 7773 - DNA, 550 bp, Homo sapiens
ggagacccaggcgggcgggcagagcaggcggcaccgcacctcggccagaggcggctgcagcagctgctgcccttgtccctgccgccgcctctccagtcccttctgtgattaccactccagctgctgggaacgggcgagaaagaggaggaggcgagaaactcccaccgacccacagagggagcatgacttcggcaacttcacctatcattctgaaatgggaccccaaaagtttggaaatccggacgctaacagtggaaaggctgttggagccacttgttacacaggtgactacacttgtcaacacaagcaacaaaggcccatctggtaaaaagaaagggaggtcaaagaaagcccatgtactagctgcctctgtagagcaagccactcagaatttcctggaaaagggtgaacagatcgctaaggagagtcaagatctcaaagaagagttggtggctgctgtagaggatgtgcgcaaacaaggtgagacgatgcggatcgcctcctccgagtttgcagatgacccttgctcgtcggtaaagcgcggcaccat

SEQ ID NO: 7774 - protein, 121 aa, Homo sapiens
MTSATSPIILKWDPKSLEIRTLTVERLLEPLVTQVTTLVNTSNKGPSGKKKGRSKKAHVLAASVEQATQNFLEKGEQIAKESQDLKEELVAAVEDVRKQGETMRIASSEFADDPCSSVKRG

SEQ ID NO: 7775 - DNA, 384 bp, Homo sapiens
taagtggcataccacttattatacaagaggatgtggttgaaacagtctgccccaggaacaaccaataagaaggtgactacacttgtcaacacaagcaacaaaggcccatctggtaaaaagaaagggaggtcaaagaaagcccatgtactagctgcctctgtagagcaagccactcagaatttcctggaaaagggtgaacagatcgctaaggagagtcaagatctcaaagaagagttggtggctgctgtagaggatgtgcgcaaacaaggttggccgactcgtgtatgtgagacctgcttgggctccagctgcggttaaacatgtctgtgggaccagtagcctgactttccaatcagagctttgttgctgtgactgctgctgtgg

SEQ ID NO: 7776 - protein, 95 aa, Homo sapiens
MWLKQSAPGTTNKKVTTLVNTSNKGPSGKKKGRSKKAHVLAASVEQATQNFLEKGEQIAKESQDLKEELVAAVEDVRKQGWPTRVCETCLGSSCG

SEQ ID NO: 7777 - DNA, 8192 bp, Homo sapiens
agcggctccgaggggggcgggtccgggaggctgtgcgtgtcttgtgagagctcttgaaccaagtcagcgctggagtcggctaggcggctggaaacggcggctgccgccggtgactcagggaggcgggaggcgggggaggagctcttcctgcaggcgtggaaaccatggtgctcacgctcggagaaagttggccggtattggtggggaggaggtttctcagtctgtccgcagccgacggcagcgatggcagccacgacagctgggacgtggagcgcgtcgccgagtggccctggctctccgggaccattcgagctgtttcccacaccgacgttaccaagaaggatctgaaggtgtgtgtggaatttgatggggaatcttggaggaaaagaagatggatagaagtctacagccttctaaggagagcatttttagtagaacataatttggttttagctgaacgaaagtcacctgaaatttctgaacgaattgtacagtggcctgcaataacgtacaaacctctgttggacaaagctggtttgggatccataacttctgttcgctttctgggagatcaacaaagagtatttctttctaaagaccttttgaagcctatacaggatgtaaacagtcttcgactttctcttacggataatcagattgtcagtaaagaatttcaagctttgattgtgaagcatttagatgaaagccatcttttaaaaggtgacaaaaacttagttggttcagaagtaaaaatttatagcttggacccatctactcagtggttttcagcaaccgttataaatggaaacccagcatcaaaaactcttcaagtcaactgtgaggagattccagcactgaaaattgttgatccgtcactgattcatgttgaagttgtacacgataaccttgtgacatgtggtaattctgcaagaattggagctgtaaaacgcaagtcttctgagaataatggaaccctggtttccaaacaagcaaaatcttgctctgaggcctctcccagtatgtgtcctgtgcagtctgtacctacaacagtttttaaggagatactgcttggctgtactgcggcaactccacctagtaaggacccaagacagcaaagtactccccaggctgccaactctccacctaaccttggagcaaaaattcctcaaggatgtcataaacaaagtttaccagaggaaatttcttcctgtctaaatacaaagtctgaagctctgagaacaaaaccagatgtctgcaaagcagggttgctctcaaagtcctctcagattggaactggagacttgaaaattctgactgagccaaaaggcagctgtactcagcctaagacaaacactgatcaggaaaacagattggagtctgttccacaagcattgactggccttcctaaggagtgcttacctacaaaggcttcttctaaggcagaattggaaattgccaatcctcctgaactgcagaagcacctagaacatgcaccttccccatcggatgtttcaaatgcaccagaagtgaaagcaggtgtcaatagtgatagccctaataactgttcaggaaaaaaggtagaaccttcagctttagcttgccgatcacagaatttaaaggaatcttcagtaaaagtagataatgaaagctgttgttcaagaagcaacaataaaatccagaatgccccatccaggaagtcggttttgacagacccagctaaactcaaaaagctgcaacagagtggcgaggccttcgtacaggatgattcttgtgtgaacatcgtggcacagttgcctaaatgccgagagtgtcgcttggacagtctccgcaaggataaggagcaacagaaggactcacctgtgttttgccgcttctttcacttcaggaggttacaattcaacaaacatggtgtgttgcgggtagaaggcttcttaacaccaaacaagtatgacaatgaagcaattggcttgtggttacctttaaccaaaaacgttgtggggattgatttggacacagcaaagtacatcttggccaacattggagaccacttctgtcaaatggtgatttctgaaaaggaagctatgtcaactattgagccacacagacaggttgcttggaagcgagctgtcaaaggtgttcgagaaatgtgtgatgtgtgcgacaccaccatcttcaacctgcactgggtgtgtcctcggtgtgggtttggagtatgtgtggactgctaccggatgaagagaaagaattgccaacagggtgagaaccgatttgattctcctccagcccctctacacagttaaatcaagtgtttttgttgatttgtgtttggcgggtttcttgaagcatgtggagacagagtctgtaaagaacagttactacaaatcagttatttgcaggtgctgcttacaagactttctcttggctaaaatgtgtgaagagtcagatacatgaaccagagaacttaatgcccacacagatcattcctggaaaagcactctatgatgttggagacattgttcattctgtaagagcgaaatggggaataaaggcaaactgcccttgttcaaacaggcaattcaaactcttttcaaagccagcctcaaaggaagacctaaaacaggtatttactgcttatgttaaattcaacatctcttgtaattgtcatttgtctgtttttcaaataacccaaggatttctatcagtgcatttgaaaggaacctggggatagctatcaagtggaaagagagagagaaagaattcatacagttcatgtgacagttcagagacccgttctgacttttcacattactttcgtagactctactgtggcctcttgtagtaggttttacatttttgtttcttgaagaagcacaaagttctaaagtagtctacctaataagtagctgtcgaatttgtaaagggtttaaaaaaattttttgtgtattttgcagaattaaaattattaagataagctttaacatttttaaaattactaaatatattttgcctgtgtttatgcagagttgaaggaaatgatgaaatgaacctttagttgcccatcacacaatgtaaaaaatgttaattttctcagtcctcatatgtctctccttggtggcatccctctcctccccaccatcacatgtacgtcttgctgtcccttctccccctcgttccagtaatcagtatgccgcattgtgtttaataatcagaaatttacatttctataaagctgtggtgtcataaggcaggatgggagagcagaagacttgtaatatttggagtcagaactgaatttgagttcttttccttccacgtgctagttgtgttactttggctgaagtgagctggtttctatgtgcttcagcttcctcatcagtaatatagaaataagaagcaatattgatgattgggcatcacagaattacatcacatgtaaagagagggcctggaccacaacaggggtttgaatattttttttcctccttcttatgtatgtataaactcactcttgccagtttttaaaattattttcttctacagcagtcatcttagatttaatttatgggttcttttaagagctcatcacatttttaaagctaagtcaaaatagcattttctctttctctgcatcccatttccttctgaaatcaccgctttacctttcctgcctgcgtcatttattcgtttttaaccatgttttctgtgcctatcctgaattctgggatgagttcataggggagacaggcacaaactggtcattttaaaccagcatggtacatagagtaatagggatatgtaccagcaggggctggtgaaagggtgcggggggtaataccttgctgtgtttaagttgctgacatctctcctaccttttagttattctctactagtgcgggattactgcagctgtggggatacccagggctaactattaggtggttttgttctggatatttatcttacttgttggtcggctattaggagagaagaaaagaaaaggaagctgtcattcttcagcttatgtaaaatcgtcctttaatgcttaacacagacttctttagctggagaaaaaccgactcttggtgcagtgctccagcagaatccctcagtgttggagccagcagctgtgggtggggaagcagcctccaagccagccggcagcatgaagcctgcctgtccagccagcacatctcctctaaactggctggccgacctaaccagcgggaatgtcaacaaggaaaacaaggaaaaacaaccaacaatgccaattttaaagaatgaaatcaaatgccttccacccctcccacctttaagcaaatccagcacagtcctccatacgtttaacagcacaattttgacacccgtaagcaacaacaattctggtttcctccggaatctcttgaattcttctacaggaaagacagaaaatggactcaagaatacaccaaaaatccttgatgacatctttgcctctttggtgcaaaataagacgacttctgatttatctaagaggcctcaaggactaaccatcaagcccagcattctgggctttgacactcctcactattggctttgtgataatcgcttgctgtgcttgcaagaccccaacaataagagcaactggaatgtgtttagggagtgctggaaacaagggcaggtaatgtaggcctcccatcctcctgccctattcagaacccccttctcagttcctttagcagacttctgacaaccccaccccaggctttccccctccttcacctcctgttttattctttattgtttcaggtgaatataatcaggtcaggatgtggccatgggtcttactttttaaagcagatggtcctaagctggacttttccagtcaggtttttgttgcttcctaccagtccctgttgggtttttgacgagggcatccaggcttggtgattcctatggtaaacttcagcagaggaagtgagggtgtgactacaggctgatgggatttgggagatcagacaaaatgtgctacaaaatcatgcacccctcttacctgaatgaaaagcctgtgctgaaggcagttctaggtgggctagggccgcgtggtgtcacatagtccccaggtgcctgcttcaaagggcagtgttgttggatcttaagtgccggttaatatctttaggagaatttctaggcctgcttctgtgctttcttgttttggttctgttttctggatctctggcttctctgtttggccagatagggtctttgctaaaggaacactctgctcttggacaagaatttgggagaattgccaaacagaaagatgtgagtgtttaaccaaaaataaatttccaaaatgtttttctccatccagtgtactaataggatttgctcatttaatcatatatagacaagaaacaaaatgatgggctgaatacagtttatcggcaggctttctttcttgcttgtcaatattttaatgttagactatttcacataaaggttagagcttctgggttgtcttagacggccaaaagatttggcaccctcacacagccagtagtagtgaggggtgtcacaggccatattcctgcttggcaataacaggctcaagtacggtggggtcagtcaccctgtttcactggtgactggtgtcactggacactccttccagcgcttgtcttcttcacagtccgtcttgctgtaagtaatgagatcttactaggagaggtgatcctttctcctagatgcttacccatgtagtttgagagcaagggtgtgtagcagatgaatggtgaaggttggaggtgctttgggagctcagagaactaagccgaaactgtcacatcaccatctgagacggagcaccagctccatggaaatataccaatagcagtgtgaagagggactgccttcgggagtggggacagagctggcagagttcagactaaagttttccttctcttcatttagccagtgatggtgtctggagtgcatcataaattgaactctgaactttggaaacctgaatccttcaggaaagagtttggtgagcaggaagtagacctagttaattgtaggaccaatgaaatcatcacaggagccacagtaggagacttctgggatggatttgaagatgttccaaatcgtttgaaaaatgaaaaagaaccaatggtgttgaaacttaaggactggccaccaggagaagattttagagatatgatgccttccaggtttgatgatctgatggccaacattccactgcccgagtacacaaggcgagatggcaaactgaatttggcctctaggctgccaaactactttgttcggccagatctgggccccaagatgtataatgcttatggattaatcactcctgaagatcggaaatatggaacaacaaatcttcacttagatgtatctgatgcagctaatgtcatggtctatgtgggaattcccaaaggacagtgtgagcaagaagaagaagtccttaagaccatccaagatggagattctgacgaactcacaataaagcgatttattgaaggaaaagagaagccaggagcactgtggcacatatatgctgcaaaggacacggagaagataagggaatttcttaaaaaggtgtgctgcttatggcatgtgtgaacagaggcataaggaatagcaatattatgttactacatgtggtgaactgactggcttggctaggggaattgtcacaacctgaaaagttaaatctgtacctgtcagattgaataggctgaaggtggttgctaaggaacaaggattctaaatgattagggttacacttctaaaaaaagcaggccttgtcttttatgtctgtgttttgtgttagagtgcatttagagatttttgttctctgctttcaagttagaagttagttcatctgatcatctcccagcatatatctgtttttattgccttgagaatctgagcacttcagacgttcatgtatccttggccctgagtgaccatgttctgagtgagttgctaagtttggttttgtccactgtcatgtagcaagtggtcctacttgttactagcaagggttgcagggatttggaagattctaggtttcccctgtagttggcaggtttttttttcagcaagggctatgtgtggaaattctaggcaactagaaagatgagtcgtgttcagttttaaaattgtttggcactgaggctgccggttgcaactcaggtgtctttggctgatattcttcagtcattcatgagtcttggatatgaacattcgtaacctgttagctggccccaagtatgtctttaacaagcatttgtttgaatcaaagtgtttctggctaaggatcatttggctcttccagaaaaccggcttggtcaccatattgttcttttgatattgtcactctgagtctctgctttaccagttactggatcaaggataaacaagtctaatctgcagctgtctttgggactgtttcgtaagtcagattaagtaaaggcaggtttctaataactttaaaacaagttcatttataaggatactgagcctacttatgtttaaaaatctagactaaaatattgtttaaatacagtatttacaaacttatgcagagcctgtcagtcatggtttatgggaactgacatcacattttcttcgtcattcttctgttggttcattcagctgaagtctttgatactactagtcgtcttctgccaatgggggcacttaagttgaagaaggcctgacatttatgaactgccaacactgtttagaggaaaaaaatggcttattgggccttagcatgttactgagttgcataatattttgaatgtattctaggtatcagaagagcaaggtcaagaaaacccagcagaccacgatcctattcatgatcaaagctggtatttagaccgatcattaagaaaacgtcttcatcaagagtatggagttcaaggctgggctattgtacagtttcttggggatgtggtgtttatcccggcaggagctccacatcaggttcataacttatatagctgcatcaaagtggctgaagattttgtttctccagagcatgttaaacactgcttctggcttactcaggaattccgatatctgtcacagactcataccaatcacgaagataaattacaggtgaagaatgttatctaccatgcagtgaaagatgcagttgctatgctgaaagccagtga

SEQ ID NO: 7778 - protein, 711 aa, Homo sapiens
MVLTLGESWPVLVGRRFLSLSAADGSDGSHDSWDVERVAEWPWLSGTIRAVSHTDVTKKDLKVCVEFDGESWRKRRWIEVYSLLRRAFLVEHNLVLAERKSPEISERIVQWPAITYKPLLDKAGLGSITSVRFLGDQQRVFLSKDLLKPIQDVNSLRLSLTDNQIVSKEFQALIVKHLDESHLLKGDKNLVGSEVKIYSLDPSTQWFSATVINGNPASKTLQVNCEEIPALKIVDPSLIHVEVVHDNLVTCGNSARIGAVKRKSSENNGTLVSKQAKSCSEASPSMCPVQSVPTTVFKEILLGCTAATPPSKDPRQQSTPQAANSPPNLGAKIPQGCHKQSLPEEISSCLNTKSEALRTKPDVCKAGLLSKSSQIGTGDLKILTEPKGSCTQPKTNTDQENRLESVPQALTGLPKECLPTKASSKAELEIANPPELQKHLEHAPSPSDVSNAPEVKAGVNSDSPNNCSGKKVEPSALACRSQNLKESSVKVDNESCCSRSNNKIQNAPSRKSVLTDPAKLKKLQQSGEAFVQDDSCVNIVAQLPKCRECRLDSLRKDKEQQKDSPVFCRFFHFRRLQFNKHGVLRVEGFLTPNKYDNEAIGLWLPLTKNVVGIDLDTAKYILANIGDHFCQMVISEKEAMSTIEPHRQVAWKRAVKGVREMCDVCDTTIFNLHWVCPRCGFGVCVDCYRMKRKNCQQGENRFDSPPAPLHS

SEQ ID NO: 7779 - DNA, 4744 bp, Homo sapiens
agcggctccgaggggggcgggtccgggaggctgtgcgtgtcttgtgagagctcttgaaccaagtcagcgctggagtcggctaggcggctggaaacggcggctgccgccggtgactcagggaggcgggaggcgggggaggagctcttcctgcaggcgtggaaaccatggtgctcacgctcggagaaagttggccggtattggtggggaggaggtttctcagtctgtccgcagccgacggcagcgatggcagccacgacagctgggacgtggagcgcgtcgccgagtggccctggctctccgggaccattcgagctgtttcccacaccgacgttaccaagaaggatctgaaggtgtgtgtggaatttgatggggaatcttggaggaaaagaagatggatagaagtctacagccttctaaggagagcatttttagtagaacataatttggttttagctgaacgaaagtcacctgaaatttctgaacgaattgtacagtggcctgcaataacgtacaaacctctgttggacaaagctggtttgggatccataacttctgttcgctttctgggagatcaacaaagagtatttctttctaaagaccttttgaagcctatacaggatgtaaacagtcttcgactttctcttacggataatcagattgtcagtaaagaatttcaagctttgattgtgaagcatttagatgaaagccatcttttaaaaggtgacaaaaacttagttggttcagaagtaaaaatttatagcttggacccatctactcagtggttttcagcaaccgttataaatggaaacccagcatcaaaaactcttcaagtcaactgtgaggagattccagcactgaaaattgttgatccgtcactgattcatgttgaagttgtacacgataaccttgtgacatgtggtaattctgcaagaattggagctgtaaaacgcaagtcttctgagaataatggaaccctggtttccaaacaagcaaaatcttgctctgaggcctctcccagtatgtgtcctgtgcagtctgtacctacaacagtttttaaggagatactgcttggctgtactgcggcaactccacctagtaaggacccaagacagcaaagtactccccaggctgccaactctccacctaaccttggagcaaaaattcctcaaggatgtcataaacaaagtttaccagaggaaatttcttcctgtctaaatacaaagtctgaagctctgagaacaaaaccagatgtctgcaaagcagggttgctctcaaagtcctctcagattggaactggagacttgaaaattctgactgagccaaaaggcagctgtactcagcctaagacaaacactgatcaggaaaacagattggagtctgttccacaagcattgactggccttcctaaggagtgcttacctacaaaggcttcttctaaggcagaattggaaattgccaatcctcctgaactgcagaagcacctagaacatgcaccttccccatcggatgtttcaaatgcaccagaagtgaaagcaggtgtcaatagtgatagccctaataactgttcaggaaaaaaggtagaaccttcagctttagcttgccgatcacagaatttaaaggaatcttcagtaaaagtagataatgaaagctgttgttcaagaagcaacaataaaatccagaatgccccatccaggaagtcggttttgacagacccagctaaactcaaaaagctgcaacagagtggcgaggccttcgtacaggatgattcttgtgtgaacatcgtggcacagttgcctaaatgccgagagtgtcgcttggacagtctccgcaaggataaggagcaacagaaggactcacctgtgttttgccgcttctttcacttcaggaggttacaattcaacaaacatggtgtgttgcgggtagaaggcttcttaacaccaaacaagtatgacaatgaagcaattggcttgtggttacctttaaccaaaaacgttgtggggattgatttggacacagcaaagtacatcttggccaacattggagaccacttctgtcaaatggtgatttctgaaaaggaagctatgtcaactattgagccacacagacaggttgcttggaagcgagctgtcaaaggtgttcgagaaatgtgtgatgtgtgcgacaccaccatcttcaacctgcactgggtgtgtcctcggtgtgggtttggagtatgtgtggactgctaccggatgaagagaaagaattgccaacagggtgctgcttacaagactttctcttggctaaaatgtgtgaagagtcagatacatgaaccagagaacttaatgcccacacagatcattcctggaaaagcactctatgatgttggagacattgttcattctgtaagagcgaaatggggaataaaggcaaactgcccttgttcaaacaggcaattcaaactcttttcaaagccagcctcaaaggaagacctaaaacagacttctttagctggagaaaaaccgactcttggtgcagtgctccagcagaatccctcagtgttggagccagcagctgtgggtggggaagcagcctccaagccagccggcagcatgaagcctgcctgtccagccagcacatctcctctaaactggctggccgacctaaccagcgggaatgtcaacaaggaaaacaaggaaaaacaaccaacaatgccaattttaaagaatgaaatcaaatgccttccacccctcccacctttaagcaaatccagcacagtcctccatacgtttaacagcacaattttgacacccgtaagcaacaacaattctggtttcctccggaatctcttgaattcttctacaggaaagacagaaaatggactcaagaatacaccaaaaatccttgatgacatctttgcctctttggtgcaaaataagacgacttctgatttatctaagaggcctcaaggactaaccatcaagcccagcattctgggctttgacactcctcactattggctttgtgataatcgcttgctgtgcttgcaagaccccaacaataagagcaactggaatgtgtttagggagtgctggaaacaagggcagccagtgatggtgtctggagtgcatcataaattgaactctgaactttggaaacctgaatccttcaggaaagagtttggtgagcaggaagtagacctagttaattgtaggaccaatgaaatcatcacaggagccacagtaggagacttctgggatggatttgaagatgttccaaatcgtttgaaaaatgaaaaagaaccaatggtgttgaaacttaaggactggccaccaggagaagattttagagatatgatgccttccaggtttgatgatctgatggccaacattccactgcccgagtacacaaggcgagatggcaaactgaatttggcctctaggctgccaaactactttgttcggccagatctgggccccaagatgtataatgcttatggattaatcactcctgaagatcggaaatatggaacaacaaatcttcacttagatgtatctgatgcagctaatgtcatggtctatgtgggaattcccaaaggacagtgtgagcaagaagaagaagtccttaagaccatccaagatggagattctgacgaactcacaataaagcgatttattgaaggaaaagagaagccaggagcactgtggcacatatatgctgcaaaggacacggagaagataagggaatttcttaaaaaggtatcagaagagcaaggtcaagaaaacccagcagaccacgatcctattcatgatcaaagctggtatttagaccgatcattaagaaaacgtcttcatcaagagtatggagttcaaggctgggctattgtacagtttcttggggatgtggtgtttatcccggcaggagctccacatcaggttcataacttatatagctgcatcaaagtggctgaagattttgtttctccagagcatgttaaacactgcttctggcttactcaggaattccgatatctgtcacagactcataccaatcacgaagataaattacaggtgaagaatgttatctaccatgcagtgaaagatgcagttgctatgctgaaagccagtgaatccagttttggcaaaccttaatctccctgcacattggaaatgaattacaggcagctgttcaaactcttcaggcaggattcctgtggactttgagattcatgttacctcatcttcttttttaaactgtacccaacttgtgagggtactctgtctaatgtatatttctagtgtttacagacagtaaatgtgtatatgtagtaactatttacagaacatgcatccttaaactgtgacttctcacctagtgcagaacttttaccaggctgtaaaagcaaaacctcgtatcagctctggaacaatacctgcagttattcttcagctgtttggacaacttagattgggtttataactattaggaatcactgcacagtttatttgggttgtgttttgtgtctgagtcccctccctcatcccttagggtccagaagagcaatggaggaagtgacagctaatgttgcagttcttattgtatggcataggactggcattatatagcagaaatcaactactgtacaatttcttggggttaaccatctttagttaaatggaattttaatttaaatgacgctttgctaattttaagtgttaagcattttgcattaaaatattcatataatattttggctcagtttatt

SEQ ID NO: 7780 - protein, 1321 aa, Homo sapiens; identical to SEQ ID NO: 524

SEQ ID NO: 7781 - DNA, 6657 bp, Homo sapiens
agcggctccgaggggggcgggtccgggaggctgtgcgtgtcttgtgagagctcttgaaccaagtcagcgctggagtcggctaggcggctggaaacggcggctgccgccggtgactcagggaggcgggaggcgggggaggagctcttcctgcaggcgtggaaaccatggtgctcacgctcggagaaagttggccggtattggtggggaggaggtttctcagtctgtccgcagccgacggcagcgatggcagccacgacagctgggacgtggagcgcgtcgccgagtggccctggctctccgggaccattcgagctgtttcccacaccgacgttaccaagaaggatctgaaggtgtgtgtggaatttgatggggaatcttggaggaaaagaagatggatagaagtctacagccttctaaggagagcatttttagtagaacataatttggttttagctgaacgaaagtcacctgaaatttctgaacgaattgtacagtggcctgcaataacgtacaaacctctgttggacaaagctggtttgggatccataacttctgttcgctttctgggagatcaacaaagagtatttctttctaaagaccttttgaagcctatacaggatgtaaacagtcttcgactttctcttacggataatcagattgtcagtaaagaatttcaagctttgattgtgaagcatttagatgaaagccatcttttaaaaggtgacaaaaacttagttggttcagaagtaaaaatttatagcttggacccatctactcagtggttttcagcaaccgttataaatggaaacccagcatcaaaaactcttcaagtcaactgtgaggagattccagcactgaaaattgttgatccgtcactgattcatgttgaagttgtacacgataaccttgtgacatgtggtaattctgcaagaattggagctgtaaaacgcaagtcttctgagaataatggaaccctggtttccaaacaagcaaaatcttgctctgaggcctctcccagtatgtgtcctgtgcagtctgtacctacaacagtttttaaggagatactgcttggctgtactgcggcaactccacctagtaaggacccaagacagcaaagtactccccaggctgccaactctccacctaaccttggagcaaaaattcctcaaggatgtcataaacaaagtttaccagaggaaatttcttcctgtctaaatacaaagtctgaagctctgagaacaaaaccagatgtctgcaaagcagggttgctctcaaagtcctctcagattggaactggagacttgaaaattctgactgagccaaaaggcagctgtactcagcctaagacaaacactgatcaggaaaacagattggagtctgttccacaagcattgactggccttcctaaggagtgcttacctacaaaggcttcttctaaggcagaattggaaattgccaatcctcctgaactgcagaagcacctagaacatgcaccttccccatcggatgtttcaaatgcaccagaagtgaaagcaggtgtcaatagtgatagccctaataactgttcaggaaaaaaggtagaaccttcagctttagcttgccgatcacagaatttaaaggaatcttcagtaaaagtagataatgaaagctgttgttcaagaagcaacaataaaatccagaatgccccatccaggaagtcggttttgacagacccagctaaactcaaaaagctgcaacagagtggcgaggccttcgtacaggatgattcttgtgtgaacatcgtggcacagttgcctaaatgccgagagtgtcgcttggacagtctccgcaaggataaggagcaacagaaggactcacctgtgttttgccgcttctttcacttcaggaggttacaattcaacaaacatggtgtgttgcgggtagaaggcttcttaacaccaaacaagtatgacaatgaagcaattggcttgtggttacctttaaccaaaaacgttgtggggattgatttggacacagcaaagtacatcttggccaacattggagaccacttctgtcaaatggtgatttctgaaaaggaagctatgtcaactattgagccacacagacaggttgcttggaagcgagctgtcaaaggtgttcgagaaatgtgtgatgtgtgcgacaccaccatcttcaacctgcactgggtgtgtcctcggtgtgggtttggagtatgtgtggactgctaccggatgaagagaaagaattgccaacagggtgagaaccgatttgattctcctccagcccctctacacagttaaatcaagtgtttttgttgatttgtgtttggcgggtttcttgaagcatgtggagacagagtctgtaaagaacagttactacaaatcagttatttgcaggtgctgcttacaagactttctcttggctaaaatgtgtgaagagtcagatacatgaaccagagaacttaatgcccacacagatcattcctggaaaaggtatttcatgtgctgcagtgattttctttccccttgtcttggttaactcatgggagctggtagttttgttttcctttattactcgttaagtttattttagtgtgtattgtaagttgtccagaaatatattagataattcctccaacacttttcgagtcaagttttgtgggatagttttgtagtagaaaagaaaatgcattttggggaaggcctctggagcaggatgaaaaggagggagtgggaaaagtaatcctgtggggaatgccagcttctgctctgtaatgttgaggttgaaagttcctaatatccttgttcagatgtttgcctctgccctttctttagcactctatgatgttggagacattgttcattctgtaagagcgaaatggggaataaaggcaaactgcccttgttcaaacaggcaattcaaactcttttcaaagccagcctcaaaggaagacctaaaacaggtatttactgcttatgttaaattcaacatctcttgtaattgtcatttgtctgtttttcaaataacccaaggatttctatcagtgcatttgaaaggaacctggggatagctatcaagtggaaagagagagagaaagaattcatacagttcatgtgacagttcagagacccgttctgacttttcacattactttcgtagactctactgtggcctcttgtagtaggttttacatttttgtttcttgaagaagcacaaagttctaaagtagtctacctaataagtagctgtcgaatttgtaaagggtttaaaaaaattttttgtgtattttgcagaattaaaattattaagataagctttaacatttttaaaattactaaatatattttgcctgtgtttatgcagagttgaaggaaatgatgaaatgaacctttagttgcccatcacacaatgtaaaaaatgttaattttctcagtcctcatatgtctctccttggtggcatccctctcctccccaccatcacatgtacgtcttgctgtcccttctccccctcgttccagtaatcagtatgccgcattgtgtttaataatcagaaatttacatttctataaagctgtggtgtcataaggcaggatgggagagcagaagacttgtaatatttggagtcagaactgaatttgagttcttttccttccacgtgctagttgtgttactttggctgaagtgagctggtttctatgtgcttcagcttcctcatcagtaatatagaaataagaagcaatattgatgattgggcatcacagaattacatcacatgtaaagagagggcctggaccacaacaggggtttgaatattttttttcctccttcttatgtatgtataaactcactcttgccagtttttaaaattattttcttctacagcagtcatcttagatttaatttatgggttcttttaagagctcatcacatttttaaagctaagtcaaaatagcattttctctttctctgcatcccatttccttctgaaatcaccgctttacctttcctgcctgcgtcatttattcgtttttaaccatgttttctgtgcctatcctgaattctgggatgagttcataggggagacaggcacaaactggtcattttaaaccagcatggtacatagagtaatagggatatgtaccagcaggggctggtgaaagggtgcggggggtaataccttgctgtgtttaagttgctgacatctctcctaccttttagttattctctactagtgcgggattactgcagctgtggggatacccagggctaactattaggtggttttgttctggatatttatcttacttgttggtcggctattaggagagaagaaaagaaaaggaagctgtcattcttcagcttatgtaaaatcgtcctttaatgcttaacacagacttctttagctggagaaaaaccgactcttggtgcagtgctccagcagaatccctcagtgttggagccagcagctgtgggtggggaagcagcctccaagccagccggcagcatgaagcctgcctgtccagccagcacatctcctctaaactggctggccgacctaaccagcgggaatgtcaacaaggaaaacaaggaaaaacaaccaacaatgccaattttaaagaatgaaatcaaatgccttccacccctcccacctttaagcaaatccagcacagtcctccatacgtttaacagcacaattttgacacccgtaagcaacaacaattctggtttcctccggaatctcttgaattcttctacaggaaagacagaaaatggactcaagaatacaccaaaaatccttgatgacatctttgcctctttggtgcaaaataagacgacttctgatttatctaagaggcctcaaggactaaccatcaagcccagcattctgggctttgacactcctcactattggctttgtgataatcgcttgctgtgcttgcaagaccccaacaataagagcaactggaatgtgtttagggagtgctggaaacaagggcagccagtgatggtgtctggagtgcatcataaattgaactctgaactttggaaacctgaatccttcaggaaagagtttggtgagcaggaagtagacctagttaattgtaggaccaatgaaatcatcacaggagccacagtaggagacttctgggatggatttgaagatgttccaaatcgtttgaaaaatgaaaaagaaccaatggtgttgaaacttaaggactggccaccaggagaagattttagagatatgatgccttccaggtttgatgatctgatggccaacattccactgcccgagtacacaaggcgagatggcaaactgaatttggcctctaggctgccaaactactttgttcggccagatctgggccccaagatgtataatgcttatggattaatcactcctgaagatcggaaatatggaacaacaaatcttcacttagatgtatctgatgcagctaatgtcatggtctatgtgggaattcccaaaggacagtgtgagcaagaagaagaagtccttaagaccatccaagatggagattctgacgaactcacaataaagcgatttattgaaggaaaagagaagccaggagcactgtggcacatatatgctgcaaaggacacggagaagataagggaatttcttaaaaaggtatcagaagagcaaggtcaagaaaacccagcagaccacgatcctattcatgatcaaagctggtatttagaccgatcattaagaaaacgtcttcatcaagagtatggagttcaaggctgggctattgtacagtttcttggggatgtggtgtttatcccggcaggagctccacatcaggttcataacttatatagctgcatcaaagtggctgaagattttgtttctccagagcatgttaaacactgcttctggcttactcaggaattccgatatctgtcacagactcataccaatcacgaagataaattacaggtgaagaatgttatctaccatgcagtgaaagatgcagttgctatgctgaaagccagtgaatccagttttggcaaaccttaatctccctgcacattggaaatgaattacaggcagctgttcaaactcttcaggcaggattcctgtggactttgagattcatgttacctcatcttcttttttaaactgtacccaacttgtgagggtactctgtctaatgtatatttctagtgtttacagacagtaaatgtgtatatgtagtaactatttacagaacatgcatccttaaactgtgacttctcacctagtgcagaacttttaccaggctgtaaaagcaaaacctcgtatcagctctggaacaatacctgcagttattcttcagctgtttggacaacttagattgggtttataactattaggaatcactgcacagtttatttgggttgtgttttgtgtctgagtcccctccctcatcccttagggtccagaagagcaatggaggaagtgacagctaatgttgcagttcttattgtatggcataggactggcattatatagcagaaatcaactactgtacaatttcttggggttaaccatctttagttaaatggaattttaatttaaatgacgctttgctaattttaagtgttaagcattttgcattaaaatattcatataatattttggctcagtttatt

SEQ ID NO: 7782 - protein, 711 aa, Homo sapiens; identical to SEQ ID NO: 7778

SEQ ID NO: 7783 - DNA, 8192 bp, Homo sapiens; identical to SEQ ID NO: 7777

SEQ ID NO: 7784 - protein, 711 aa, Homo sapiens; identical to SEQ ID NO: 7778

SEQ ID NO: 7785 - DNA, 5947 bp, Homo sapiens
agcggctccgaggggggcgggtccgggaggctgtgcgtgtcttgtgagagctcttgaaccaagtcagcgctggagtcggctaggcggctggaaacggcggctgccgccggtgactcagggaggcgggaggcgggggaggagctcttcctgcaggcgtggaaaccatggtgctcacgctcggagaaagttggccggtattggtggggaggaggtttctcagtctgtccgcagccgacggcagcgatggcagccacgacagctgggacgtggagcgcgtcgccgagtggccctggctctccgggaccattcgagctgtttcccacaccgacgttaccaagaaggatctgaaggtgtgtgtggaatttgatggggaatcttggaggaaaagaagatggatagaagtctacagccttctaaggagagcatttttagtagaacataatttggttttagctgaacgaaagtcacctgaaatttctgaacgaattgtacagtggcctgcaataacgtacaaacctctgttggacaaagctggtttgggatccataacttctgttcgctttctgggagatcaacaaagagtatttctttctaaagaccttttgaagcctatacaggatgtaaacagtcttcgactttctcttacggataatcagattgtcagtaaagaatttcaagctttgattgtgaagcatttagatgaaagccatcttttaaaaggtgacaaaaacttagttggttcagaagtaaaaatttatagcttggacccatctactcagtggttttcagcaaccgttataaatggaaacccagcatcaaaaactcttcaagtcaactgtgaggagattccagcactgaaaattgttgatccgtcactgattcatgttgaagttgtacacgataaccttgtgacatgtggtaattctgcaagaattggagctgtaaaacgcaagtcttctgagaataatggaaccctggtttccaaacaagcaaaatcttgctctgaggcctctcccagtatgtgtcctgtgcagtctgtacctacaacagtttttaaggagatactgcttggctgtactgcggcaactccacctagtaaggacccaagacagcaaagtactccccaggctgccaactctccacctaaccttggagcaaaaattcctcaaggatgtcataaacaaagtttaccagaggaaatttcttcctgtctaaatacaaagtctgaagctctgagaacaaaaccagatgtctgcaaagcagggttgctctcaaagtcctctcagattggaactggagacttgaaaattctgactgagccaaaaggcagctgtactcagcctaagacaaacactgatcaggaaaacagattggagtctgttccacaagcattgactggccttcctaaggagtgcttacctacaaaggcttcttctaaggcagaattggaaattgccaatcctcctgaactgcagaagcacctagaacatgcaccttccccatcggatgtttcaaatgcaccagaagtgaaagcaggtgtcaatagtgatagccctaataactgttcaggaaaaaaggtagaaccttcagctttagcttgccgatcacagaatttaaaggaatcttcagtaaaagtagataatgaaagctgttgttcaagaagcaacaataaaatccagaatgccccatccaggaagtcggttttgacagacccagctaaactcaaaaagctgcaacagagtggcgaggccttcgtacaggatgattcttgtgtgaacatcgtggcacagttgcctaaatgccgagagtgtcgcttggacagtctccgcaaggataaggagcaacagaaggactcacctgtgttttgccgcttctttcacttcaggaggttacaattcaacaaacatggtgtgttgcgggtagaaggcttcttaacaccaaacaagtatgacaatgaagcaattggcttgtggttacctttaaccaaaaacgttgtggggattgatttggacacagcaaagtacatcttggccaacattggagaccacttctgtcaaatggtgatttctgaaaaggaagctatgtcaactattgagccacacagacaggttgcttggaagcgagctgtcaaaggtgttcgagaaatgtgtgatgtgtgcgacaccaccatcttcaacctgcactgggtgtgtcctcggtgtgggtttggagtatgtgtggactgctaccggatgaagagaaagaattgccaacagggtgctgcttacaagactttctcttggctaaaatgtgtgaagagtcagatacatgaaccagagaacttaatgcccacacagatcattcctggaaaagcactctatgatgttggagacattgttcattctgtaagagcgaaatggggaataaaggcaaactgcccttgttcaaacaggcaattcaaactcttttcaaagccagcctcaaaggaagacctaaaacagacttctttagctggagaaaaaccgactcttggtgcagtgctccagcagaatccctcagtgttggagccagcagctgtgggtggggaagcagcctccaagccagccggcagcatgaagcctgcctgtccagccagcacatctcctctaaactggctggccgacctaaccagcgggaatgtcaacaaggaaaacaaggaaaaacaaccaacaatgccaattttaaagaatgaaatcaaatgccttccacccctcccacctttaagcaaatccagcacagtcctccatacgtttaacagcacaattttgacacccgtaagcaacaacaattctggtttcctccggaatctcttgaattcttctacaggaaagacagaaaatggactcaagaatacaccaaaaatccttgatgacatctttgcctctttggtgcaaaataagacgacttctgatttatctaagaggcctcaaggactaaccatcaagcccagcattctgggctttgacactcctcactattggctttgtgataatcgcttgctgtgcttgcaagaccccaacaataagagcaactggaatgtgtttagggagtgctggaaacaagggcagccagtgatggtgtctggagtgcatcataaattgaactctgaactttggaaacctgaatccttcaggaaagagtttggtgagcaggaagtagacctagttaattgtaggaccaatgaaatcatcacaggagccacagtaggagacttctgggatggatttgaagatgttccaaatcgtttgaaaaatgaaaaagaaccaatggtgttgaaacttaaggactggccaccaggagaagattttagagatatgatgccttccaggtttgatgatctgatggccaacattccactgcccgagtacacaaggcgagatggcaaactgaatttggcctctaggctgccaaactactttgttcggccagatctgggccccaagatgtataatgcttatggattaatcactcctgaagatcggaaatatggaacaacaaatcttcacttagatgtatctgatgcagctaatgtcatggtctatgtgggaattcccaaaggacagtgtgagcaagaagaagaagtccttaagaccatccaagatggagattctgacgaactcacaataaagcgatttattgaaggaaaagagaagccaggagcactgtggcacatatatgctgcaaaggacacggagaagataagggaatttcttaaaaaggtatcagaagagcaaggtcaagaaaacccagcagaccacgatcctattcatgatcaaagctggtatttagaccgatcattaagaaaacgtcttcatcaagagtatggagttcaaggctgggctattgtacagtttcttggggatgtggtgtttatcccggcaggagctccacatcaggttcataacttatatagctgcatcaaagtggctgaagattttgtttctccagagcatgttaaacactgcttctggcttactcaggaattccgatatctgtcacagactcataccaatcacgaagataaattacaggtgaagaatgttatctaccatgcagtgaaagatgcagttgctatgctgaaagccagtgaatccagttttggcaaaccttaatctccctgcacattggaaatgaattacaggcagctgttcaaactcttcaggcaggattcctgtggactttgagattcatgttacctcatcttcttttttaaactgtacccaacttgtgagggtactctgtctaatgtatatttctagtgtttacagacagtaaatgtgtatatgtagtaactatttacagaacatgcatccttaaactgtgacttctcacctagtgcagaacttttaccaggctgtaaaagcaaaacctcgtatcagctctggaacaatacctgcagttattcttcagctgtttggacaacttagattgggtttataactattaggaatcactgcacagtttatttgggttgtgttttgtgtctgagtcccctccctcatcccttagggtccagaagagcaatggaggaagtgacagctaatgttgcagttcttattgtatggcataggactggcattatatagcagaaatcaactactgtacaatttcttggggttaaccatctttagttaaatggaattttaatttaaatgacgctttgctaattttaagtgttaagcattttgcattaaaatattcatataatattttggctcagtttattggcattatcctctcattgtggtttcaacacaactttcttcaaatgcaggtgtaatggattgctccaagaactcttcttaaaagcaaagaaatcagatgctatagtgattttcttagtgattattacaaagctaacatggaaatttctgctcagccaggtagaaaccctgtcacactttgtcaaggaaacaccaccaattaattaaatttagaaacaggaattaaccaagaaaccaaatagtgccaggctaaatggttctaaaaaggtaagtaatgaaacactttgttttatggcccttcataatgttaagtttatgaaggaaaatgaaattataagttctaggacagtactacctaaaatattcatctctgtgaaggaaaaaaattcacaaagaagcgcctttctttagcccactgattctcctaggccactctttcatttaatttctttaaaaaaaggaattaaacatagaaatcagatagtacatagacaaagcctagaacctgagttttaatttgtgagctgagtaggaggccagaggatccgtattaaatttcagaacccattgtcaaatctaaggtcaaagatttgctctaatgttttcttctaggagttttaaaattttagcccttaaattaagtctttgacctattttgagttaattattaaatatggtgtaaagattcaacttcatttttttgaatatggatatccagttttcccagcaacatttgtcgtcaaacactgttctttcccccattgaatggtcttggcactctagttaaaaatcaattgatcgtagatgggaaagcatattactaggctctcatattccactggtctgtgtatctgtctttatgccagtactgcactgttttgatttctgctactttgtagtaagttttaaaatcaacaactgtgagttctccaactctggtcttctttttcatgattgttttaatcagggtcactggaaattccgtacgaattttgggataggtttttttatttctgcaaaaaacaccatctgggtattaatagagattgcattgaacctgtatgttcctttgggtgtcatcttaacaatctaattcttgcaatccatgagcatgggatgttgtgtttccatttattggtgtcttctttaatgtctttcagcaatgttttgtagttttcagttgcatgagttttgtaccttcatgg

SEQ ID NO: 7786 - protein, 1321 aa, Homo sapiens; identical to SEQ ID NO: 524

SEQ ID NO: 7787 - DNA, 7860 bp, Homo sapiens
agcggctccgaggggggcgggtccgggaggctgtgcgtgtcttgtgagagctcttgaaccaagtcagcgctggagtcggctaggcggctggaaacggcggctgccgccggtgactcagggaggcgggaggcgggggaggagctcttcctgcaggcgtggaaaccatggtgctcacgctcggagaaagttggccggtattggtggggaggaggtttctcagtctgtccgcagccgacggcagcgatggcagccacgacagctgggacgtggagcgcgtcgccgagtggccctggctctccgggaccattcgagctgtttcccacaccgacgttaccaagaaggatctgaaggtgtgtgtggaatttgatggggaatcttggaggaaaagaagatggatagaagtctacagccttctaaggagagcatttttagtagaacataatttggttttagctgaacgaaagtcacctgaaatttctgaacgaattgtacagtggcctgcaataacgtacaaacctctgttggacaaagctggtttgggatccataacttctgttcgctttctgggagatcaacaaagagtatttctttctaaagaccttttgaagcctatacaggatgtaaacagtcttcgactttctcttacggataatcagattgtcagtaaagaatttcaagctttgattgtgaagcatttagatgaaagccatcttttaaaaggtgacaaaaacttagttggttcagaagtaaaaatttatagcttggacccatctactcagtggttttcagcaaccgttataaatggaaacccagcatcaaaaactcttcaagtcaactgtgaggagattccagcactgaaaattgttgatccgtcactgattcatgttgaagttgtacacgataaccttgtgacatgtggtaattctgcaagaattggagctgtaaaacgcaagtcttctgagaataatggaaccctggtttccaaacaagcaaaatcttgctctgaggcctctcccagtatgtgtcctgtgcagtctgtacctacaacagtttttaaggagatactgcttggctgtactgcggcaactccacctagtaaggacccaagacagcaaagtactccccaggctgccaactctccacctaaccttggagcaaaaattcctcaaggatgtcataaacaaagtttaccagaggaaatttcttcctgtctaaatacaaagtctgaagctctgagaacaaaaccagatgtctgcaaagcagggttgctctcaaagtcctctcagattggaactggagacttgaaaattctgactgagccaaaaggcagctgtactcagcctaagacaaacactgatcaggaaaacagattggagtctgttccacaagcattgactggccttcctaaggagtgcttacctacaaaggcttcttctaaggcagaattggaaattgccaatcctcctgaactgcagaagcacctagaacatgcaccttccccatcggatgtttcaaatgcaccagaagtgaaagcaggtgtcaatagtgatagccctaataactgttcaggaaaaaaggtagaaccttcagctttagcttgccgatcacagaatttaaaggaatcttcagtaaaagtagataatgaaagctgttgttcaagaagcaacaataaaatccagaatgccccatccaggaagtcggttttgacagacccagctaaactcaaaaagctgcaacagagtggcgaggccttcgtacaggatgattcttgtgtgaacatcgtggcacagttgcctaaatgccgagagtgtcgcttggacagtctccgcaaggataaggagcaacagaaggactcacctgtgttttgccgcttctttcacttcaggaggttacaattcaacaaacatggtgtgttgcgggtagaaggcttcttaacaccaaacaagtatgacaatgaagcaattggcttgtggttacctttaaccaaaaacgttgtggggattgatttggacacagcaaagtacatcttggccaacattggagaccacttctgtcaaatggtgatttctgaaaaggaagctatgtcaactattgagccacacagacaggttgcttggaagcgagctgtcaaaggtgttcgagaaatgtgtgatgtgtgcgacaccaccatcttcaacctgcactgggtgtgtcctcggtgtgggtttggagtatgtgtggactgctaccggatgaagagaaagaattgccaacagggtgagaaccgatttgattctcctccagcccctctacacagttaaatcaagtgtttttgttgatttgtgtttggcgggtttcttgaagcatgtggagacagagtctgtaaagaacagttactacaaatcagttatttgcaggtgctgcttacaagactttctcttggctaaaatgtgtgaagagtcagatacatgaaccagagaacttaatgcccacacagatcattcctggaaaaggtatttcatgtgctgcagtgattttctttccccttgtcttggttaactcatgggagctggtagttttgttttcctttattactcgttaagtttattttagtgtgtattgtaagttgtccagaaatatattagataattcctccaacacttttcgagtcaagttttgtgggatagttttgtagtagaaaagaaaatgcattttggggaaggcctctggagcaggatgaaaaggagggagtgggaaaagtaatcctgtggggaatgccagcttctgctctgtaatgttgaggttgaaagttcctaatatccttgttcagatgtttgcctctgccctttctttagcactctatgatgttggagacattgttcattctgtaagagcgaaatggggaataaaggcaaactgcccttgttcaaacaggcaattcaaactcttttcaaagccagcctcaaaggaagacctaaaacaggtatttactgcttatgttaaattcaacatctcttgtaattgtcatttgtctgtttttcaaataacccaaggatttctatcagtgcatttgaaaggaacctggggatagctatcaagtggaaagagagagagaaagaattcatacagttcatgtgacagttcagagacccgttctgacttttcacattactttcgtagactctactgtggcctcttgtagtaggttttacatttttgtttcttgaagaagcacaaagttctaaagtagtctacctaataagtagctgtcgaatttgtaaagggtttaaaaaaattttttgtgtattttgcagaattaaaattattaagataagctttaacatttttaaaattactaaatatattttgcctgtgtttatgcagagttgaaggaaatgatgaaatgaacctttagttgcccatcacacaatgtaaaaaatgttaattttctcagtcctcatatgtctctccttggtggcatccctctcctccccaccatcacatgtacgtcttgctgtcccttctccccctcgttccagtaatcagtatgccgcattgtgtttaataatcagaaatttacatttctataaagctgtggtgtcataaggcaggatgggagagcagaagacttgtaatatttggagtcagaactgaatttgagttcttttccttccacgtgctagttgtgttactttggctgaagtgagctggtttctatgtgcttcagcttcctcatcagtaatatagaaataagaagcaatattgatgattgggcatcacagaattacatcacatgtaaagagagggcctggaccacaacaggggtttgaatattttttttcctccttcttatgtatgtataaactcactcttgccagtttttaaaattattttcttctacagcagtcatcttagatttaatttatgggttcttttaagagctcatcacatttttaaagctaagtcaaaatagcattttctctttctctgcatcccatttccttctgaaatcaccgctttacctttcctgcctgcgtcatttattcgtttttaaccatgttttctgtgcctatcctgaattctgggatgagttcataggggagacaggcacaaactggtcattttaaaccagcatggtacatagagtaatagggatatgtaccagcaggggctggtgaaagggtgcggggggtaataccttgctgtgtttaagttgctgacatctctcctaccttttagttattctctactagtgcgggattactgcagctgtggggatacccagggctaactattaggtggttttgttctggatatttatcttacttgttggtcggctattaggagagaagaaaagaaaaggaagctgtcattcttcagcttatgtaaaatcgtcctttaatgcttaacacagacttctttagctggagaaaaaccgactcttggtgcagtgctccagcagaatccctcagtgttggagccagcagctgtgggtggggaagcagcctccaagccagccggcagcatgaagcctgcctgtccagccagcacatctcctctaaactggctggccgacctaaccagcgggaatgtcaacaaggaaaacaaggaaaaacaaccaacaatgccaattttaaagaatgaaatcaaatgccttccacccctcccacctttaagcaaatccagcacagtcctccatacgtttaacagcacaattttgacacccgtaagcaacaacaattctggtttcctccggaatctcttgaattcttctacaggaaagacagaaaatggactcaagaatacaccaaaaatccttgatgacatctttgcctctttggtgcaaaataagacgacttctgatttatctaagaggcctcaaggactaaccatcaagcccagcattctgggctttgacactcctcactattggctttgtgataatcgcttgctgtgcttgcaagaccccaacaataagagcaactggaatgtgtttagggagtgctggaaacaagggcagccagtgatggtgtctggagtgcatcataaattgaactctgaactttggaaacctgaatccttcaggaaagagtttggtgagcaggaagtagacctagttaattgtaggaccaatgaaatcatcacaggagccacagtaggagacttctgggatggatttgaagatgttccaaatcgtttgaaaaatgaaaaagaaccaatggtgttgaaacttaaggactggccaccaggagaagattttagagatatgatgccttccaggtttgatgatctgatggccaacattccactgcccgagtacacaaggcgagatggcaaactgaatttggcctctaggctgccaaactactttgttcggccagatctgggccccaagatgtataatgcttatggattaatcactcctgaagatcggaaatatggaacaacaaatcttcacttagatgtatctgatgcagctaatgtcatggtctatgtgggaattcccaaaggacagtgtgagcaagaagaagaagtccttaagaccatccaagatggagattctgacgaactcacaataaagcgatttattgaaggaaaagagaagccaggagcactgtggcacatatatgctgcaaaggacacggagaagataagggaatttcttaaaaaggtatcagaagagcaaggtcaagaaaacccagcagaccacgatcctattcatgatcaaagctggtatttagaccgatcattaagaaaacgtcttcatcaagagtatggagttcaaggctgggctattgtacagtttcttggggatgtggtgtttatcccggcaggagctccacatcaggttcataacttatatagctgcatcaaagtggctgaagattttgtttctccagagcatgttaaacactgcttctggcttactcaggaattccgatatctgtcacagactcataccaatcacgaagataaattacaggtgaagaatgttatctaccatgcagtgaaagatgcagttgctatgctgaaagccagtgaatccagttttggcaaaccttaatctccctgcacattggaaatgaattacaggcagctgttcaaactcttcaggcaggattcctgtggactttgagattcatgttacctcatcttcttttttaaactgtacccaacttgtgagggtactctgtctaatgtatatttctagtgtttacagacagtaaatgtgtatatgtagtaactatttacagaacatgcatccttaaactgtgacttctcacctagtgcagaacttttaccaggctgtaaaagcaaaacctcgtatcagctctggaacaatacctgcagttattcttcagctgtttggacaacttagattgggtttataactattaggaatcactgcacagtttatttgggttgtgttttgtgtctgagtcccctccctcatcccttagggtccagaagagcaatggaggaagtgacagctaatgttgcagttcttattgtatggcataggactggcattatatagcagaaatcaactactgtacaatttcttggggttaaccatctttagttaaatggaattttaatttaaatgacgctttgctaattttaagtgttaagcattttgcattaaaatattcatataatattttggctcagtttattggcattatcctctcattgtggtttcaacacaactttcttcaaatgcaggtgtaatggattgctccaagaactcttcttaaaagcaaagaaatcagatgctatagtgattttcttagtgattattacaaagctaacatggaaatttctgctcagccaggtagaaaccctgtcacactttgtcaaggaaacaccaccaattaattaaatttagaaacaggaattaaccaagaaaccaaatagtgccaggctaaatggttctaaaaaggtaagtaatgaaacactttgttttatggcccttcataatgttaagtttatgaaggaaaatgaaattataagttctaggacagtactacctaaaatattcatctctgtgaaggaaaaaaattcacaaagaagcgcctttctttagcccactgattctcctaggccactctttcatttaatttctttaaaaaaaggaattaaacatagaaatcagatagtacatagacaaagcctagaacctgagttttaatttgtgagctgagtaggaggccagaggatccgtattaaatttcagaacccattgtcaaatctaaggtcaaagatttgctctaatgttttcttctaggagttttaaaattttagcccttaaattaagtctttgacctattttgagttaattattaaatatggtgtaaagattcaacttcatttttttgaatatggatatccagttttcccagcaacatttgtcgtcaaacactgttctttcccccattgaatggtcttggcactctagttaaaaatcaattgatcgtagatgggaaagcatattactaggctctcatattccactggtctgtgtatctgtctttatgccagtactgcactgttttgatttctgctactttgtagtaagttttaaaatcaacaactgtgagttctccaactctggtcttctttttcatgattgttttaatcagggtcactggaaattccgtacgaattttgggataggtttttttatttctgcaaaaaacaccatctgggtattaatagagattgcattgaacctgtatgttcctttgggtgtcatcttaacaatctaattcttgcaatccatgagcatgggatgttgtgtttccatttattggtgtcttctttaatgtctttcagcaatgttttgtagttttcagttgcatgagttttgtaccttcatgg

SEQ ID NO: 7788 - protein, 711 aa, Homo sapiens; identical to SEQ ID NO: 7778

SEQ ID NO: 7789 - DNA, 4638 bp, Homo sapiens
ctcggctgcggggagaggggagagaaagggaggagctcttcctgcaggcgtggaaaccatggtgctcacgctcggagaaagttggccggtattggtggggaggaggtttctcagtctgtccgcagccgacggcagcgatggcagccacgacagctgggacgtggagcgcgtcgccgagtggccctggctctccgggaccattcgagctgtttcccacaccgacgttaccaagaaggatctgaaggtgtgtgtggaatttgatggggaatcttggaggaaaagaagatggatagaagtctacagccttctaaggagagcatttttagtagaacataatttggttttagctgaacgaaagtcacctgaaatttctgaacgaattgtacagtggcctgcaataacgtacaaacctctgttggacaaagctggtttgggatccataacttctgttcgctttctgggagatcaacaaagagtatttctttctaaagaccttttgaagcctatacaggatgtaaacagtcttcgactttctcttacggataatcagattgtcagtaaagaatttcaagctttgattgtgaagcatttagatgaaagccatcttttaaaaggtgacaaaaacttagttggttcagaagtaaaaatttatagcttggacccatctactcagtggttttcagcaaccgttataaatggaaacccagcatcaaaaactcttcaagtcaactgtgaggagattccagcactgaaaattgttgatccgtcactgattcatgttgaagttgtacacgataaccttgtgacatgtggtaattctgcaagaattggagctgtaaaacgcaagtcttctgagaataatggaaccctggtttccaaacaagcaaaatcttgctctgaggcctctcccagtatgtgtcctgtgcagtctgtacctacaacagtttttaaggagatactgcttggctgtactgcggcaactccacctagtaaggacccaagacagcaaagtactccccaggctgccaactctccacctaaccttggagcaaaaattcctcaaggatgtcataaacaaagtttaccagaggaaatttcttcctgtctaaatacaaagtctgaagctctgagaacaaaaccagatgtctgcaaagcagggttgctctcaaagtcctctcagattggaactggagacttgaaaattctgactgagccaaaaggcagctgtactcagcctaagacaaacactgatcaggaaaacagattggagtctgttccacaagcattgactggccttcctaaggagtgcttacctacaaaggcttcttctaaggcagaattggaaattgccaatcctcctgaactgcagaagcacctagaacatgcaccttccccatcggatgtttcaaatgcaccagaagtgaaagcaggtgtcaatagtgatagccctaataactgttcaggaaaaaaggtagaaccttcagctttagcttgccgatcacagaatttaaaggaatcttcagtaaaagtagataatgaaagctgttgttcaagaagcaacaataaaatccagaatgccccatccaggaagtcggttttgacagacccagctaaactcaaaaagctgcaacagagtggcgaggccttcgtacaggatgattcttgtgtgaacatcgtggcacagttgcctaaatgccgagagtgtcgcttggacagtctccgcaaggataaggagcaacagaaggactcacctgtgttttgccgcttctttcacttcaggaggttacaattcaacaaacatggtgtgttgcgggtagaaggcttcttaacaccaaacaagtatgacaatgaagcaattggcttgtggttacctttaaccaaaaacgttgtggggattgatttggacacagcaaagtacatcttggccaacattggagaccacttctgtcaaatggtgatttctgaaaaggaagctatgtcaactattgagccacacagacaggttgcttggaagcgagctgtcaaaggtgttcgagaaatgtgtgatgtgtgcgacaccaccatcttcaacctgcactgggtgtgtcctcggtgtgggtttggagtatgtgtggactgctaccggatgaagagaaagaattgccaacagggtgctgcttacaagactttctcttggctaaaatgtgtgaagagtcagatacatgaaccagagaacttaatgcccacacagatcattcctggaaaagcactctatgatgttggagacattgttcattctgtaagagcgaaatggggaataaaggcaaactgcccttgttcaaacaggcaattcaaactcttttcaaagccagcctcaaaggaagacctaaaacagacttctttagctggagaaaaaccgactcttggtgcagtgctccagcagaatccctcagtgttggagccagcagctgtgggtggggaagcagcctccaagccagccggcagcatgaagcctgcctgtccagccagcacatctcctctaaactggctggccgacctaaccagcgggaatgtcaacaaggaaaacaaggaaaaacaaccaacaatgccaattttaaagaatgaaatcaaatgccttccacccctcccacctttaagcaaatccagcacagtcctccatacgtttaacagcacaattttgacacccgtaagcaacaacaattctggtttcctccggaatctcttgaattcttctacaggaaagacagaaaatggactcaagaatacaccaaaaatccttgatgacatctttgcctctttggtgcaaaataagacgacttctgatttatctaagaggcctcaaggactaaccatcaagcccagcattctgggctttgacactcctcactattggctttgtgataatcgcttgctgtgcttgcaagaccccaacaataagagcaactggaatgtgtttagggagtgctggaaacaagggcagccagtgatggtgtctggagtgcatcataaattgaactctgaactttggaaacctgaatccttcaggaaagagtttggtgagcaggaagtagacctagttaattgtaggaccaatgaaatcatcacaggagccacagtaggagacttctgggatggatttgaagatgttccaaatcgtttgaaaaatgaaaaagaaccaatggtgttgaaacttaaggactggccaccaggagaagattttagagatatgatgccttccaggtttgatgatctgatggccaacattccactgcccgagtacacaaggcgagatggcaaactgaatttggcctctaggctgccaaactactttgttcggccagatctgggccccaagatgtataatgcttatggattaatcactcctgaagatcggaaatatggaacaacaaatcttcacttagatgtatctgatgcagctaatgtcatggtctatgtgggaattcccaaaggacagtgtgagcaagaagaagaagtccttaagaccatccaagatggagattctgacgaactcacaataaagcgatttattgaaggaaaagagaagccaggagcactgtggcacatatatgctgcaaaggacacggagaagataagggaatttcttaaaaaggtatcagaagagcaaggtcaagaaaacccagcagaccacgatcctattcatgatcaaagctggtatttagaccgatcattaagaaaacgtcttcatcaagagtatggagttcaaggctgggctattgtacagtttcttggggatgtggtgtttatcccggcaggagctccacatcaggttcataacttatatagctgcatcaaagtggctgaagattttgtttctccagagcatgttaaacactgcttctggcttactcaggaattccgatatctgtcacagactcataccaatcacgaagataaattacaggtgaagaatgttatctaccatgcagtgaaagatgcagttgctatgctgaaagccagtgaatccagttttggcaaaccttaatctccctgcacattggaaatgaattacaggcagctgttcaaactcttcaggcaggattcctgtggactttgagattcatgttacctcatcttcttttttaaactgtacccaacttgtgagggtactctgtctaatgtatatttctagtgtttacagacagtaaatgtgtatatgtagtaactatttacagaacatgcatccttaaactgtgacttctcacctagtgcagaacttttaccaggctgtaaaagcaaaacctcgtatcagctctggaacaatacctgcagttattcttcagctgtttggacaacttagattgggtttataactattaggaatcactgcacagtttatttgggttgtgttttgtgtctgagtcccctccctcatcccttagggtccagaagagcaatggaggaagtgacagctaatgttgcagttcttattgtatggcataggactggcattatatagcagaaatcaactactgtacaatttcttggggttaaccatctttagttaaatggaattttaatttaaatgacgctttgctaattttaagtgttaagcattttgcattaaaatattcatataatattttggctcagtttatt

SEQ ID NO: 7790 - protein, 1321 aa, Homo sapiens; identical to SEQ ID NO: 524

SEQ ID NO: 7791 - DNA, 4502 bp, Homo sapiens
agacccggtgggcacaaggcctcttgcctgttcctcacttctcaggtctctgttggtgagtcctccatgtgctgtgggtctgcagtgtgctctctcgaggtcctgtccctcgagcccctcagagactgattaaagcagctgcatggttgggatcttgggcaaacttaagtatataagagcatttttccaataaattgtatagtttatccatgctttatagaaatcctgaagctttaaaggtgggtatctgagaaattttcaaaagaattgcttgcgtggtttaactagcttggcagcgggtctttccccctagacactaatagatggcagtgttactctataaaagcttttcctatgacaaaatggttcccatccagaagcaagcattcagaaggatgaaaataatgatgtgttcattttcaaacaccttatatcttattgtaaacatcattaaagagtggtcttttcaaaggttgtgtgattgagctgtgactcttccatgagagtaagtgcaaaggctctttggagagatcatataatccagcctctcttcagttcctgcaacaccccccattttgcaaatgaggaccaggacttgcggacagtagaaggggcattgacttgttcaggatctccaaggggcagctagtggcaggtctgaaactagtacttagatctcctgatttccaagctagagcccatttccctactcttcccccactcttaactccccatcacccaacagcccctactgtttcagctttttttcccccttaaaagtccatggtgttttgtttcaggatgttttgttgtctagcactcctttccctttgaccattatgtttttacaattttggtttcatctcagtttaccatggtttagagtctggttttatcaatgtacagttacccatgactgggatccagtggactttgggccagtggctgggcagcagttatttccttgctcgttttgcactgtggcactggctggatcagcaggcagccagtcctgctgaggctttgcctcctagtctcctttccttacttttcttgccagctccatcctcttcctattgcccttagtctaaccaccatcttcaagtttgtgtttatcgtttgcttatatttacaattttaacatatatatttgtattcctgcacaatattctttcagtttttagcctgcttttgaacttcatataaatagaatcagattttttatattcatccatgctgtcatatatcatccatgtgttcatttcattcattttatttctattacattaattgcttttttctgaaattttgctttttactatggaactatttttcaaatacagtgaaaacttgagagtctggtagtgactccatataactcatcacccagttatataacagcttttaactttttgccataatcgtttcattgtcttctctctttatgttttttcatcatcctctcaactatcctatgatttcaccctaataccaaacgctttacctactcccaggactgatatttcagcaagctggaaagaaaggaaagtacaacagggctctgggggccctggtcccaagctggagtgaagaaatgtgccctctcaaaagtatagcccctctaaaaccaaagccccaggcaagccagagataaagccttcctccaaaacagtattatggggcgttttcagaggctggcaggttagaaaacagccgctgcttgctcactacaagctgtgcttctccctactgcccagtctaagaagcagagtcctggtgttacaatgggttgcccaaagtgactgcagggtaagcttcaggatgattgttgagcaaggtgagctttctcctgtgagcaaggaattagccacagactgaacactgtgggggacctgtctttctggctcactcctcacccctcctcttttacagttgagagaaccaaggaatgcgttgggcagtattccttcttatactcatgatagccatttgacgttccaggtttatgtgtgtgtgtgggtgggtgctttcccttggactccccatctcgagtggtccttgggctttgtctcttgccccagaactcctaggctgtggcaacaatcaaagcctgagctcacttgatctagcagatgtccttttggcaaatcccagcttcggaagcctgctttaaccacttccatttcctgctgtttttggcttctgagtattccttcttttcttgctagcacatcgattggttaaagaatttttttgcaataatttgatccagaatttttattctcagcagaagagtcaatcagggacctaccatcccccaggtaggtagtggaaagactgtggcagcctttgttgtcttttgtaaaacttaaggcactttgtttttgcaggattaatcactcctgaagatcggaaatatggaacaacaaatcttcacttagatgtatctgatgcagctaatgtcatggtctatgtgggaattcccaaaggacagtgtgagcaagaagaaggtagggtgctgagcataaaaggagggcttactctttgagccagggcttgtggtctgatatctgctttctcttcttgctctagaagtccttaagaccatccaagatggagattctgacgaactcacaataaagcgatttattgaaggaaaagagaagccaggagcactgtggcacatatatgctgcaaaggacacggagaagataagggaatttcttaaaaaggtatcagaagagcaaggtcaagaaaacccagcagaccacgatcctattcatgatcaaagctggtatttagaccgatcattaagaaaacgtcttcatcaagagtatggagttcaaggctgggctattgtacagtttcttggggatgtggtgtttatcccggcaggagctccacatcaggttcataacttatatagctgcatcaaagtggctgaagattttgtttctccagagcatgttaaacactgcttctggcttactcaggaattccgatatctgtcacagactcataccaatcacgaagataaattacaggtaaaaatagcaccaattcctagcattctttggctatggctatggcttcatggcccattcttcaccttataaagagagtcagtgaacttggccatatcgtacttagtacacagtgagtcgaggaacttgctttatatctagtactactatctacttaagtgagggaggaacaagaggaaatctcaccttggtttgatttgatattgtttagaatctataagggactgtccccacagagaaaggccttagtactgaaaatgaatagatgtgacttctgatcttggcccagctgcctgtcggggtcttgaacacagtgcttaaccttcagtgctgcagtgttctcatcactcttaggtagagcagaactgaatctctgagactcaaagaggtctgagggggtggtattttcaaaaggatttcagtaatgaattatgtaacataatttcatgtttggaaaataagggaaaaatgataaaagctgtaccttggaacttgcctctccctgtactcactgtgagtaggtctacgtggtatcaaaacctctaaaagggggaaaatgagttcttgaaatcatgggtttaaaatgtatgtgaaatactggtctgaaggagcccagggaccttttgcaatgttgacatttcatacgaatattgaattttaaattctgagagaaggtaataaaattagtaggaggaagcttattcttagtgacaggttttagatttaaatgtaaaatgcccatattttctcctactatttttaggtgaagaatgttatctaccatgcagtgaaagatgcagttgctatgctgaaagccagtgaatccagttttggcaaaccttaatctccctgcacattggaaatgaattacaggcagctgttcaaactcttcaggcaggattcctgtggactttgagattcatgttacctcatcttcttttttaaactgtacccaacttgtgagggtactctgtctaatgtatatttctagtgtttacagacagtaaatgtgtatatgtagtaactatttacagaacatgcatccttaaactgtgacttctcacctagtgcagaacttttaccaggctgtaaaagcaaaacctcgtatcagctctggaacaatacctgcagttattcttcagctgtttggacaacttagattgggtttataactattaggaatcactgcacagtttatttgggttgtgttttgtgtctgagtcccctccctcatcccttagggtccagaagagcaatggaggaagtgacagctaatgttgcagttcttattgtatggcataggactggcattatatagcagaaatcaactactgtacaatttcttggggttaaccatctttagttaaatggaattttaatttaaatgacgctttgctaattttaagtgttaagcattttgcattaaaatattcatataatattttggctcagtttatt

SEQ ID NO: 7792 - protein, 70 aa, Homo sapiens
MEFKAGLLYSFLGMWCLSRQELHIRFITYIAASKWLKILFLQSMLNTASGLLRNSDICHRLIPITKINYR

SEQ ID NO: 7793 - DNA, 2973 bp, Homo sapiens
ttcccccttaaaagtccatggtgttttgtttcaggatgttttgttgtctagcactcctttccctttgaccattatgtttttacaattttggtttcatctcagtttaccatggtttagagtctggttttatcaatgtacagttacccatgactgggatccagtggactttgggccagtggctgggcagcagttatttccttgctcgttttgcactgtggcactggctggatcagcaggcagccagtcctgctgaggctttgcctcctagtctcctttccttacttttcttgccagctccatcctcttcctattgcccttagtctaaccaccatcttcaagtttgtgtttatcgtttgcttatatttacaattttaacatatatatttgtattcctgcacaatattctttcagtttttagcctgcttttgaacttcatataaatagaatcagattttttatattcatccatgctgtcatatatcatccatgtgttcatttcattcattttatttctattacattaattgcttttttctgaaattttgctttttactatggaactatttttcaaatacagtgaaaacttgagagtctggtagtgactccatataactcatcacccagttatataacagcttttaactttttgccataatcgtttcattgtcttctctctttatgttttttcatcatcctctcaactatcctatgatttcaccctaataccaaacgctttacctactcccaggactgatatttcagcaagctggaaagaaaggaaagtacaacagggctctgggggccctggtcccaagctggagtgaagaaatgtgccctctcaaaagtatagcccctctaaaaccaaagccccaggcaagccagagataaagccttcctccaaaacagtattatggggcgttttcagaggctggcaggttagaaaacagccgctgcttgctcactacaagctgtgcttctccctactgcccagtctaagaagcagagtcctggtgttacaatgggttgcccaaagtgactgcagggtaagcttcaggatgattgttgagcaaggtgagctttctcctgtgagcaaggaattagccacagactgaacactgtgggggacctgtctttctggctcactcctcacccctcctcttttacagttgagagaaccaaggaatgcgttgggcagtattccttcttatactcatgatagccatttgacgttccaggtttatgtgtgtgtgtgggtgggtgctttcccttggactccccatctcgagtggtccttgggctttgtctcttgccccagaactcctaggctgtggcaacaatcaaagcctgagctcacttgatctagcagatgtccttttggcaaatcccagcttcggaagcctgctttaaccacttccatttcctgctgtttttggcttctgagtattccttcttttcttgctagcacatcgattggttaaagaatttttttgcaataatttgatccagaatttttattctcagcagaagagtcaatcagggacctaccatcccccaggtaggtagtggaaagactgtggcagcctttgttgtcttttgtaaaacttaaggcactttgtttttgcaggattaatcactcctgaagatcggaaatatggaacaacaaatcttcacttagatgtatctgatgcagctaatgtcatggtctatgtgggaattcccaaaggacagtgtgagcaagaagaaggtagggtgctgagcataaaaggagggcttactctttgagccagggcttgtggtctgatatctgctttctcttcttgctctagaagtccttaagaccatccaagatggagattctgacgaactcacaataaagcgatttattgaaggaaaagagaagccaggagcactgtggcacatatatgctgcaaaggacacggagaagataagggaatttcttaaaaaggtatcagaagagcaaggtcaagaaaacccagcagaccacgatcctattcatgatcaaagctggtatttagaccgatcattaagaaaacgtcttcatcaagagtatggagttcaaggctgggctattgtacagtttcttggggatgtggtgtttatcccggcaggagctccacatcaggttcataacttatatagctgcatcaaagtggctgaagattttgtttctccagagcatgttaaacactgcttctggcttactcaggaattccgatatctgtcacagactcataccaatcacgaagataaattacaggtgaagaatgttatctaccatgcagtgaaagatgcagttgctatgctgaaagccagtgaatccagttttggcaaaccttaatctccctgcacattggaaatgaattacaggcagctgttcaaactcttcaggcaggattcctgtggactttgagattcatgttacctcatcttcttttttaaactgtacccaacttgtgagggtactctgtctaatgtatatttctagtgtttacagacagtaaatgtgtatatgtagtaactatttacagaacatgcatccttaaactgtgacttctcacctagtgcagaacttttaccaggctgtaaaagcaaaacctcgtatcagctctggaacaatacctgcagttattcttcagctgtttggacaacttagattgggtttataactattaggaatcactgcacagtttatttgggttgtgttttgtgtctgagtcccctccctcatcccttagggtccagaagagcaatggaggaagtgacagctaatgttgcagttcttattgtatggcataggactggcattatatagcagaaatcaactactgtacaatttcttggggttaaccatctttagttaaatggaattttaatttaaatgacgctttgctaattttaagtgttaagcattttgcattaaaatattcatataatattttggctcagtttatt

SEQ ID NO: 7794 - protein, 70 aa, Homo sapiens; identical to SEQ ID NO: 7792

SEQ ID NO: 7795 - DNA, 4176 bp, Homo sapiens
ttcccccttaaaagtccatggtgttttgtttcaggatgttttgttgtctagcactcctttccctttgaccattatgtttttacaattttggtttcatctcagtttaccatggtttagagtctggttttatcaatgtacagttacccatgactgggatccagtggactttgggccagtggctgggcagcagttatttccttgctcgttttgcactgtggcactggctggatcagcaggcagccagtcctgctgaggctttgcctcctagtctcctttccttacttttcttgccagctccatcctcttcctattgcccttagtctaaccaccatcttcaagtttgtgtttatcgtttgcttatatttacaattttaacatatatatttgtattcctgcacaatattctttcagtttttagcctgcttttgaacttcatataaatagaatcagattttttatattcatccatgctgtcatatatcatccatgtgttcatttcattcattttatttctattacattaattgcttttttctgaaattttgctttttactatggaactatttttcaaatacagtgaaaacttgagagtctggtagtgactccatataactcatcacccagttatataacagcttttaactttttgccataatcgtttcattgtcttctctctttatgttttttcatcatcctctcaactatcctatgatttcaccctaataccaaacgctttacctactcccaggactgatatttcagcaagctggaaagaaaggaaagtacaacagggctctgggggccctggtcccaagctggagtgaagaaatgtgccctctcaaaagtatagcccctctaaaaccaaagccccaggcaagccagagataaagccttcctccaaaacagtattatggggcgttttcagaggctggcaggttagaaaacagccgctgcttgctcactacaagctgtgcttctccctactgcccagtctaagaagcagagtcctggtgttacaatgggttgcccaaagtgactgcagggtaagcttcaggatgattgttgagcaaggtgagctttctcctgtgagcaaggaattagccacagactgaacactgtgggggacctgtctttctggctcactcctcacccctcctcttttacagttgagagaaccaaggaatgcgttgggcagtattccttcttatactcatgatagccatttgacgttccaggtttatgtgtgtgtgtgggtgggtgctttcccttggactccccatctcgagtggtccttgggctttgtctcttgccccagaactcctaggctgtggcaacaatcaaagcctgagctcacttgatctagcagatgtccttttggcaaatcccagcttcggaagcctgctttaaccacttccatttcctgctgtttttggcttctgagtattccttcttttcttgctagcacatcgattggttaaagaatttttttgcaataatttgatccagaatttttattctcagcagaagagtcaatcagggacctaccatcccccaggtaggtagtggaaagactgtggcagcctttgttgtcttttgtaaaacttaaggcactttgtttttgcaggattaatcactcctgaagatcggaaatatggaacaacaaatcttcacttagatgtatctgatgcagctaatgtcatggtctatgtgggaattcccaaaggacagtgtgagcaagaagaaggtagggtgctgagcataaaaggagggcttactctttgagccagggcttgtggtctgatatctgctttctcttcttgctctagaagtccttaagaccatccaagatggagattctgacgaactcacaataaagcgatttattgaaggaaaagagaagccaggagcactgtggcacatatatgctgcaaaggacacggagaagataagggaatttcttaaaaaggtatcagaagagcaaggtcaagaaaacccagcagaccacgatcctattcatgatcaaagctggtatttagaccgatcattaagaaaacgtcttcatcaagagtatggagttcaaggctgggctattgtacagtttcttggggatgtggtgtttatcccggcaggagctccacatcaggttcataacttatatagctgcatcaaagtggctgaagattttgtttctccagagcatgttaaacactgcttctggcttactcaggaattccgatatctgtcacagactcataccaatcacgaagataaattacaggtgaagaatgttatctaccatgcagtgaaagatgcagttgctatgctgaaagccagtgaatccagttttggcaaaccttaatctccctgcacattggaaatgaattacaggcagctgttcaaactcttcaggcaggattcctgtggactttgagattcatgttacctcatcttcttttttaaactgtacccaacttgtgagggtactctgtctaatgtatatttctagtgtttacagacagtaaatgtgtatatgtagtaactatttacagaacatgcatccttaaactgtgacttctcacctagtgcagaacttttaccaggctgtaaaagcaaaacctcgtatcagctctggaacaatacctgcagttattcttcagctgtttggacaacttagattgggtttataactattaggaatcactgcacagtttatttgggttgtgttttgtgtctgagtcccctccctcatcccttagggtccagaagagcaatggaggaagtgacagctaatgttgcagttcttattgtatggcataggactggcattatatagcagaaatcaactactgtacaatttcttggggttaaccatctttagttaaatggaattttaatttaaatgacgctttgctaattttaagtgttaagcattttgcattaaaatattcatataatattttggctcagtttattggcattatcctctcattgtggtttcaacacaactttcttcaaatgcaggtgtaatggattgctccaagaactcttcttaaaagcaaagaaatcagatgctatagtgattttcttagtgattattacaaagctaacatggaaatttctgctcagccaggtagaaaccctgtcacactttgtcaaggaaacaccaccaattaattaaatttagaaacaggaattaaccaagaaaccaaatagtgccaggctaaatggttctaaaaaggtaagtaatgaaacactttgttttatggcccttcataatgttaagtttatgaaggaaaatgaaattataagttctaggacagtactacctaaaatattcatctctgtgaaggaaaaaaattcacaaagaagcgcctttctttagcccactgattctcctaggccactctttcatttaatttctttaaaaaaaggaattaaacatagaaatcagatagtacatagacaaagcctagaacctgagttttaatttgtgagctgagtaggaggccagaggatccgtattaaatttcagaacccattgtcaaatctaaggtcaaagatttgctctaatgttttcttctaggagttttaaaattttagcccttaaattaagtctttgacctattttgagttaattattaaatatggtgtaaagattcaacttcatttttttgaatatggatatccagttttcccagcaacatttgtcgtcaaacactgttctttcccccattgaatggtcttggcactctagttaaaaatcaattgatcgtagatgggaaagcatattactaggctctcatattccactggtctgtgtatctgtctttatgccagtactgcactgttttgatttctgctactttgtagtaagttttaaaatcaacaactgtgagttctccaactctggtcttctttttcatgattgttttaatcagggtcactggaaattccgtacgaattttgggataggtttttttatttctgcaaaaaacaccatctgggtattaatagagattgcattgaacctgtatgttcctttgggtgtcatcttaacaatctaattcttgcaatccatgagcatgggatgttgtgtttccatttattggtgtcttctttaatgtctttcagcaatgttttgtagttttcagttgcatgagttttgtaccttcatgg

SEQ ID NO: 7796 - protein, 70 aa, Homo sapiens; identical to SEQ ID NO: 7792

SEQ ID NO: 7797 - DNA, 3175 bp, Homo sapiens
tagtgccgccgctccctactctgggggttgggactacctccttttccgcgggccccgcccaggcggctgcccgtgacctgcctgggcgcggggaactgaaagccggaaggggcaagacgggttcagttcgtcatggggctgtttggaaagacccaggagaagccgcccaaagaactggtcaatgagtggtcattgaagataagaaaggaaatgagagttgttgacaggcaaataagggatatccaaagagaagaagaaaaagtgaaacgatctgtgaaagatgctgccaagaagggccagaaggatgtctgcatagttctggccaaggagatgatcaggtcaaggaaggctgtgagcaagctgtatgcatccaaagcacacatgaactcagtgctcatggggatgaagaaccagctcgcggtcttgcgagtggctggttccctgcagaagagcacagaagtgatgaaggccatgcaaagtcttgtgaagattccagagattcaggccaccatgagggagttgtccaaagaaatgatgaaggctgggatcatagaggagatgttagaggacacttttgaaagcatggacgatcaggaagaaatggaggaagaagcagaaatggaaattgacagaattctctttgaaattacagcaggggccttgggcaaagcacccagtaaagtgactgatgcccttccagagccagaacctccaggagcgatggctgcctcagaggatgaggaggaggaggaagaggctctggaggccatgcagtcccggctggccacactccgcagctaggggctgcctaccccgctgggtgtgcacacactcctctcaagagctgccattttatgtgtctcttgcactacacctctgttgtgaggactaccattttggagaaggttctgtttgtctcttttcattctctgcccaggttttgggatcgcaaagggattgttcttataaaagtggcataaataaatgcatcatttttaggagtatagacagatatatcttattgtggggaggggaaagaaatccatctgctcatgaagcacttctgaaaatataggtgattgcctgaatgtcgaagactctacttttgtctataaaacactatataaatgaattttaataaatttttgctttagcacttggccccattgtagattgccctgtgcagtaaactttcaaggtgtcggctgccccagattgcttcatttgctgggtgtggaaagagttgctatggccaggcatatgggatttggaagctcagcagaagtgacttctgctctgtggttgctgctccccggctttcacagacatggtatggcagccattcttttatctatttaaccaagaggatgctggggaattgtgctgcttgtcctgttggctggtggctgcattatgtcctggggtgtgcatgtgggtctatttagagcttctgtcccttccttcccattgcaagttgcacccagatgagacagctgtagtactaggtctctttcacctctcattgcctgtccctgcttcgagctggttgtcttgtgcgtgggacatgggccttcctatctgtgttttctcaaagtcaggagctgaccaggagcacactaaggtgtggtcatgcatcataaccaacattcactcatctgggacattcttaagatacatttataaatcatttcagcagtagtactttgtatgtgttgagagtttacagagctctttgacatacgcgatcttagtctttacaaataaggaaaacagctcagtttgggaagtatcagagatgggattcaaacccagatcctctggtccaagttgtatgtgcactgaactaatcaggcaggaaaaaagcccagccactgtctcacagattgttttttgtatattgtagcaaaatcctgaaacaatggggtccttccagtctcatcatacaaaatggcaatcttggctgggtgcggtggttcatgcctataatcccagtgctttacaaggctgaggcaggaggctctcttgagaataggagttcaagaccagcctgggcaacatagcaagatcctgtctctccaaaaaaaaaaaaaaaaaaaaaaaaaaatttcatttttgagtccagaggaccctcctattactcttgatttcatcttcagagtgtagttaaaaaattattttaaataattatttttttaaatcagttgtaggttcacagcaaaagtggacaaaaagaaatttctcatatatcccctgccctcacacatgcatagcctcccaccactatcagtatcccacaccagagtggtacatttgttacaatcaataaacctccattgacacatcattatcacccaaagtccatagtttacatgaagattcactctggtgttgtacattgtatgggcttagacaaatgtatgatgatatctacaattatagaatcatacagaatagtttcactgccctaaaacttctctatgcttcacctgttcatccctttcttccctaatcccctggcaaccactttaaaaaaaaaattaggttcagggggtacatgtgcaggtaaactcgtgacaagggggtttgttatacagattatttagtgacccaggtactaagcctagtacccaatagttacttttctggtcctgtcccttttcccaccctccaccctcaggtaggccccagtatgttattcctttgtgtccatgttatttcactcccacttgtgagaacatggaatatttggtttcctgttcctatgttagtttgttaaggataatggcctccagccccatccatgttcctgcaaaggacatgatctttctttggcaaccactttttactgtcgccatagttcttccttttctagaatgtcatattggaatcatatagtatgtagccttttcagactggcttctttcacttaataatatgcaattaaggttcctccatgtcatttcatggcttaatagtgcatttatttttagcactgaataatactccattgtctagatgaatagtttatccattcacctattgaaagacttcttggtggtttccaagttttggcaattatgaataaagctgttgtaaacatctttgtgcaggtttttctatgggcatgtttttaattcatttgaataaataccaagagcttcagtgctggatcata

SEQ ID NO: 7798 - protein, 222 aa, Homo sapiens; identical to SEQ ID NO: 528

SEQ ID NO: 7799 - DNA, 1819 bp, Homo sapiens
caggggccttgggcaaagcacccagtaaagtgactgatgcccttccagagccagaacctccaggagcgatggctgcctcagaggatgaggaggaggaggaagaggctctggaggccatgcagtcccggctggccacactccgcagctaggggctgcctaccccgctgggtgtgcacacactcctctcaagagctgccattttatgtgtctcttgcactacacctctgttgtgaggactaccattttggagaaggttctgtttgtctcttttcattctctgcccaggttttgggatcgcaaagggattgttcttataaaatataggtgattgcctgaatgtcgaagactctacttttgtctataaaacactatataaatgaattttaataaatttttgctttagcacttggccccattgtagattgccctgtgcagtaaactttcaaggtgtcggctgccccagattgcttcatttgctgggtgtggaaagagttgctatggccaggcatatgggatttggaagctcagcagaagtgacttctgctctgtggttgctgctccccggctttcacagacatggtatggcagccattcttttatctatttaaccaagaggatgctggggaattgtgctgcttgtcctgttggctggtggctgcattatgtcctggggtgtgcatgtgggtctatttagagcttctgtcccttccttcccattgcaagttgcacccagatgagacagctgtagtactaggtctctttcacctctcattgcctgtccctgcttcgagctggttgtcttgtgcgtgggacatgggccttcctatctgtgttttctcaaagtcaggagctgaccaggagcacactaaggtgtggtcatgcatcataaccaacattcactcatctgggacattcttaagatacatttataaatcatttcagcagtagtactttgtatgtgttgagagtttacagagctctttgacatacgcgatcttagtctttacaaataaggaaaacagctcagtttgggaagtatcagagatgggattcaaacccagatcctctggtccaagttgtatgtgcactgaactaatcaggcaggaaaaaagcccagccactgtctcacagattgttttttgtatattgtagcaaaatcctgaaacaatggggtccttccagtctcatcatacaaaatggcaatcttggctgggtgcggtggttcatgcctataatcccagtgctttacaaggctgaggcaggaggctctcttgagaataggagttcaagaccagcctgggcaacatagcaagatcctgtctctccaaaaaaaaaaaaaaaaaaaaaaaaaaatttcatttttgagtccagaggaccctcctattactcttgatttcatcttcagagtgtagttaaaaaattattttaaataattatttttttaaatcagttgtaggttcacagcaaaagtggacaaaaagaaatttctcatatatcccctgccctcacacatgcatagcctcccaccactatcagtatcccacaccagagtggtacatttgttacaatcaataaacctccattgacacatcattatcacccaaagtccatagtttacatgaagattcactctggtgttgtacattgtatgggcttagacaaatgtatgatgatatctacaattatagaatcatacagaatagtttcactgccctaaaacttctctatgcttcacctgttcatccctttcttccctaatcccctggcaaccactttaaaaaaaaaattaggttcagggggtacatgtgcaggtaaactc

SEQ ID NO: 7800 - protein, 95 aa, Homo sapiens
MPFQSQNLQERWLPQRMRRRRKRLWRPCSPGWPHSAARGCLPRWVCTHSSQELPFYVSLALHLCCEDYHFGEGSVCLFSFSAQVLGSQRDCSYKI

SEQ ID NO: 7801 - DNA, 2467 bp, Homo sapiens
ggggggccggaggaagagtctttaggagtcggctgtgggacgcgagagctcctggtgccatggctctcgaacaggtcaatgagtggtcattgaagataagaaaggaaatgagagttgttgacaggcaaataagggatatccaaagagaagaagaaaaagtgaaacgatctgtgaaagatgctgccaagaagggccagaaggatgtctgcatagttctggccaaggagatgatcaggtcaaggaaggctgtgagcaagctgtatgcatccaaagcacacatgaactcagtgctcatggggatgaagaaccagctcgcggtcttgcgagtggctggttccctgcagaagagcacagaagtgatgaaggccatgcaaagtcttgtgaagattccagagattcaggccaccatgagggagttgtccaaagaaatgatgaaggctgggatcatagaggagatgttagaggacacttttgaaagcatggacgatcaggaagaaatggaggaagaagcagaaatggaaattgacagaattctctttgaaattacagcaggggccttgggcaaagcacccagtaaagtgactgatgcccttccagagccagaacctccaggagcgatggctgcctcagaggatgaggaggaggaggaagaggctctggaggccatgcagtcccggctggccacactccgcagctaggggctgcctaccccgctgggtgtgcacacactcctctcaagagctgccattttatgtgtctcttgcactacacctctgttgtgaggactaccattttggagaaggttctgtttgtctcttttcattctctgcccaggttttgggatcgcaaagggattgttcttataaaagtggcataaataaatgcatcatttttaggagtatagacagatatatcttattgtggggaggggaaagaaatccatctgctcatgaagcacttctgaaaatataggtgattgcctgaatgtcgaagactctacttttgtctataaaacactatataaatgaattttaataaatttttgctttagcacttggccccattgtagattgccctgtgcagtaaactttcaaggtgtcggctgccccagattgcttcatttgctgggtgtggaaagagttgctatggccaggcatatgggatttggaagctcagcagaagtgacttctgctctgtggttgctgctccccggctttcacagacatggtatggcagccattcttttatctatttaaccaagaggatgctggggaattgtgctgcttgtcctgttggctggtggctgcattatgtcctggggtgtgcatgtgggtctatttagagcttctgtcccttccttcccattgcaagttgcacccagatgagacagctgtagtactaggtctctttcacctctcattgcctgtccctgcttcgagctggttgtcttgtgcgtgggacatgggccttcctatctgtgttttctcaaagtcaggagctgaccaggagcacactaaggtgtggtcatgcatcataaccaacattcactcatctgggacattcttaagatacatttataaatcatttcagcagtagtactttgtatgtgttgagagtttacagagctctttgacatacgcgatcttagtctttacaaataaggaaaacagctcagtttgggaagtatcagagatgggattcaaacccagatcctctggtccaagttgtatgtgcactgaactaatcaggcaggaaaaaagcccagccactgtctcacagattgttttttgtatattgtagcaaaatcctgaaacaatggggtccttccagtctcatcatacaaaatggcaatcttggctgggtgcggtggttcatgcctataatcccagtgctttacaaggctgaggcaggaggctctcttgagaataggagttcaagaccagcctgggcaacatagcaagatcctgtctctccaaaaaaaaaaaaaaaaaaaaaaaaaaatttcatttttgagtccagaggaccctcctattactcttgatttcatcttcagagtgtagttaaaaaattattttaaataattatttttttaaatcagttgtaggttcacagcaaaagtggacaaaaagaaatttctcatatatcccctgccctcacacatgcatagcctcccaccactatcagtatcccacaccagagtggtacatttgttacaatcaataaacctccattgacacatcattatcacccaaagtccatagtttacatgaagattcactctggtgttgtacattgtatgggcttagacaaatgtatgatgatatctacaattatagaatcatacagaatagtttcactgccctaaaacttctctatgcttcacctgttcatccctttcttccctaatcccctggcaaccactttaaaaaaaaaattaggttcagggggtacatgtgcaggtaaactc

SEQ ID NO: 7802 - protein, 212 aa, Homo sapiens
MALEQVNEWSLKIRKEMRVVDRQIRDIQREEEKVKRSVKDAAKKGQKDVCIVLAKEMIRSRKAVSKLYASKAHMNSVLMGMKNQLAVLRVAGSLQKSTEVMKAMQSLVKIPEIQATMRELSKEMMKAGIIEEMLEDTFESMDDQEEMEEEAEMEIDRILFEITAGALGKAPSKVTDALPEPEPPGAMAASEDEEEEEEALEAMQSRLATLRS

SEQ ID NO: 7803 - DNA, 2284 bp, Homo sapiens
ccgcgggccccgcccaggcggctgcccgtgacctgcctgggcgcggggaactgaaagccggaaggggcaagacgggttcagttcgtcatggggctgtttggaaagacccaggagaagccgcccaaagaactgcggtcttgcgagtggctggttccctgcagaagagcacagaagtgatgaaggccatgcaaagtcttgtgaagattccagagattcaggccaccatgagggagttgtccaaagaaatgatgaaggctgggatcatagaggagatgttagaggacacttttgaaagcatggacgatcaggaagaaatggaggaagaagcagaaatggaaattgacagaattctctttgaaattacagcaggggccttgggcaaagcacccagtaaagtgactgatgcccttccagagccagaacctccaggagcgatggctgcctcagaggatgaggaggaggaggaagaggctctggaggccatgcagtcccggctggccacactccgcagctaggggctgcctaccccgctgggtgtgcacacactcctctcaagagctgccattttatgtgtctcttgcactacacctctgttgtgaggactaccattttggagaaggttctgtttgtctcttttcattctctgcccaggttttgggatcgcaaagggattgttcttataaaagtggcataaataaatgcatcatttttaggagtatagacagatatatcttattgtggggaggggaaagaaatccatctgctcatgaagcacttctgaaaatataggtgattgcctgaatgtcgaagactctacttttgtctataaaacactatataaatgaattttaataaatttttgctttagcacttggccccattgtagattgccctgtgcagtaaactttcaaggtgtcggctgccccagattgcttcatttgctgggtgtggaaagagttgctatggccaggcatatgggatttggaagctcagcagaagtgacttctgctctgtggttgctgctccccggctttcacagacatggtatggcagccattcttttatctatttaaccaagaggatgctggggaattgtgctgcttgtcctgttggctggtggctgcattatgtcctggggtgtgcatgtgggtctatttagagcttctgtcccttccttcccattgcaagttgcacccagatgagacagctgtagtactaggtctctttcacctctcattgcctgtccctgcttcgagctggttgtcttgtgcgtgggacatgggccttcctatctgtgttttctcaaagtcaggagctgaccaggagcacactaaggtgtggtcatgcatcataaccaacattcactcatctgggacattcttaagatacatttataaatcatttcagcagtagtactttgtatgtgttgagagtttacagagctctttgacatacgcgatcttagtctttacaaataaggaaaacagctcagtttgggaagtatcagagatgggattcaaacccagatcctctggtccaagttgtatgtgcactgaactaatcaggcaggaaaaaagcccagccactgtctcacagattgttttttgtatattgtagcaaaatcctgaaacaatggggtccttccagtctcatcatacaaaatggcaatcttggctgggtgcggtggttcatgcctataatcccagtgctttacaaggctgaggcaggaggctctcttgagaataggagttcaagaccagcctgggcaacatagcaagatcctgtctctccaaaaaaaaaaaaaaaaaaaaaaaaaaatttcatttttgagtccagaggaccctcctattactcttgatttcatcttcagagtgtagttaaaaaattattttaaataattatttttttaaatcagttgtaggttcacagcaaaagtggacaaaaagaaatttctcatatatcccctgccctcacacatgcatagcctcccaccactatcagtatcccacaccagagtggtacatttgttacaatcaataaacctccattgacacatcattatcacccaaagtccatagtttacatgaagattcactctggtgttgtacattgtatgggcttagacaaatgtatgatgatatctacaattatagaatcatacagaatagtttcactgccctaaaacttctctatgcttcacctgttcatccctttcttccctaatcccctggcaaccactttaaaaaaaaaattaggttcagggggtacatgtgcaggtaaactc

SEQ ID NO: 7804 - protein, 112 aa, Homo sapiens
MKAMQSLVKIPEIQATMRELSKEMMKAGIIEEMLEDTFESMDDQEEMEEEAEMEIDRILFEITAGALGKAPSKVTDALPEPEPPGAMAASEDEEEEEEALEAMQSRLATLRS

SEQ ID NO: 7805 - DNA, 2408 bp, Homo sapiens
ccgcgggccccgcccaggcggctgcccgtgacctgcctgggcgcggggaactgaaagccggaaggggcaagacgggttcagttcgtcatggggctgtttggaaagacccaggagaagccgcccaaagaactggtcaatgagtggtcattgaagataagaaaggaaatgagagttgttgacaggcaaataagggatatccaaagagaagaagaaaaagtgaaacgatctgtgaaagatgctgccaagaagggccagaaggatgtctgcatagttctggccaaggagatgatcaggtcaaggaaggctgccatgcaaagtcttgtgaagattccagagattcaggccaccatgagggagttgtccaaagaaatgatgaaggctgggatcatagaggagatgttagaggacacttttgaaagcatggacgatcaggaagaaatggaggaagaagcagaaatggaaattgacagaattctctttgaaattacagcaggggccttgggcaaagcacccagtaaagtgactgatgcccttccagagccagaacctccaggagcgatggctgcctcagaggatgaggaggaggaggaagaggctctggaggccatgcagtcccggctggccacactccgcagctaggggctgcctaccccgctgggtgtgcacacactcctctcaagagctgccattttatgtgtctcttgcactacacctctgttgtgaggactaccattttggagaaggttctgtttgtctcttttcattctctgcccaggttttgggatcgcaaagggattgttcttataaaagtggcataaataaatgcatcatttttaggagtatagacagatatatcttattgtggggaggggaaagaaatccatctgctcatgaagcacttctgaaaatataggtgattgcctgaatgtcgaagactctacttttgtctataaaacactatataaatgaattttaataaatttttgctttagcacttggccccattgtagattgccctgtgcagtaaactttcaaggtgtcggctgccccagattgcttcatttgctgggtgtggaaagagttgctatggccaggcatatgggatttggaagctcagcagaagtgacttctgctctgtggttgctgctccccggctttcacagacatggtatggcagccattcttttatctatttaaccaagaggatgctggggaattgtgctgcttgtcctgttggctggtggctgcattatgtcctggggtgtgcatgtgggtctatttagagcttctgtcccttccttcccattgcaagttgcacccagatgagacagctgtagtactaggtctctttcacctctcattgcctgtccctgcttcgagctggttgtcttgtgcgtgggacatgggccttcctatctgtgttttctcaaagtcaggagctgaccaggagcacactaaggtgtggtcatgcatcataaccaacattcactcatctgggacattcttaagatacatttataaatcatttcagcagtagtactttgtatgtgttgagagtttacagagctctttgacatacgcgatcttagtctttacaaataaggaaaacagctcagtttgggaagtatcagagatgggattcaaacccagatcctctggtccaagttgtatgtgcactgaactaatcaggcaggaaaaaagcccagccactgtctcacagattgttttttgtatattgtagcaaaatcctgaaacaatggggtccttccagtctcatcatacaaaatggcaatcttggctgggtgcggtggttcatgcctataatcccagtgctttacaaggctgaggcaggaggctctcttgagaataggagttcaagaccagcctgggcaacatagcaagatcctgtctctccaaaaaaaaaaaaaaaaaaaaaaaaaaatttcatttttgagtccagaggaccctcctattactcttgatttcatcttcagagtgtagttaaaaaattattttaaataattatttttttaaatcagttgtaggttcacagcaaaagtggacaaaaagaaatttctcatatatcccctgccctcacacatgcatagcctcccaccactatcagtatcccacaccagagtggtacatttgttacaatcaataaacctccattgacacatcattatcacccaaagtccatagtttacatgaagattcactctggtgttgtacattgtatgggcttagacaaatgtatgatgatatctacaattatagaatcatacagaatagtttcactgccctaaaacttctctatgcttcacctgttcatccctttcttccctaatcccctggcaaccactttaaaaaaaaaattaggttcagggggtacatgtgcaggtaaactc

SEQ ID NO: 7806 - protein, 183 aa, Homo sapiens
MGLFGKTQEKPPKELVNEWSLKIRKEMRVVDRQIRDIQREEEKVKRSVKDAAKKGQKDVCIVLAKEMIRSRKAAMQSLVKIPEIQATMRELSKEMMKAGIIEEMLEDTFESMDDQEEMEEEAEMEIDRILFEITAGALGKAPSKVTDALPEPEPPGAMAASEDEEEEEEALEAMQSRLATLRS

SEQ ID NO: 7807 - DNA, 2464 bp, Homo sapiens
ccgcgggccccgcccaggcggctgcccgtgacctgcctgggcgcggggaactgaaagccggaaggggcaagacgggttcagttcgtcatggggctgtttggaaagacccaggagaagccgcccaaagaactgatatccaaagagaagaagaaaaagtgaaacgatctgtgaaagatgctgccaagaagggccagaaggatgtctgcatagttctggccaaggagatgatcaggtcaaggaaggctgtgagcaagctgtatgcatccaaagcacacatgaactcagtgctcatggggatgaagaaccagctcgcggtcttgcgagtggctggttccctgcagaagagcacagaagtgatgaaggccatgcaaagtcttgtgaagattccagagattcaggccaccatgagggagttgtccaaagaaatgatgaaggctgggatcatagaggagatgttagaggacacttttgaaagcatggacgatcaggaagaaatggaggaagaagcagaaatggaaattgacagaattctctttgaaattacagcaggggccttgggcaaagcacccagtaaagtgactgatgcccttccagagccagaacctccaggagcgatggctgcctcagaggatgaggaggaggaggaagaggctctggaggccatgcagtcccggctggccacactccgcagctaggggctgcctaccccgctgggtgtgcacacactcctctcaagagctgccattttatgtgtctcttgcactacacctctgttgtgaggactaccattttggagaaggttctgtttgtctcttttcattctctgcccaggttttgggatcgcaaagggattgttcttataaaagtggcataaataaatgcatcatttttaggagtatagacagatatatcttattgtggggaggggaaagaaatccatctgctcatgaagcacttctgaaaatataggtgattgcctgaatgtcgaagactctacttttgtctataaaacactatataaatgaattttaataaatttttgctttagcacttggccccattgtagattgccctgtgcagtaaactttcaaggtgtcggctgccccagattgcttcatttgctgggtgtggaaagagttgctatggccaggcatatgggatttggaagctcagcagaagtgacttctgctctgtggttgctgctccccggctttcacagacatggtatggcagccattcttttatctatttaaccaagaggatgctggggaattgtgctgcttgtcctgttggctggtggctgcattatgtcctggggtgtgcatgtgggtctatttagagcttctgtcccttccttcccattgcaagttgcacccagatgagacagctgtagtactaggtctctttcacctctcattgcctgtccctgcttcgagctggttgtcttgtgcgtgggacatgggccttcctatctgtgttttctcaaagtcaggagctgaccaggagcacactaaggtgtggtcatgcatcataaccaacattcactcatctgggacattcttaagatacatttataaatcatttcagcagtagtactttgtatgtgttgagagtttacagagctctttgacatacgcgatcttagtctttacaaataaggaaaacagctcagtttgggaagtatcagagatgggattcaaacccagatcctctggtccaagttgtatgtgcactgaactaatcaggcaggaaaaaagcccagccactgtctcacagattgttttttgtatattgtagcaaaatcctgaaacaatggggtccttccagtctcatcatacaaaatggcaatcttggctgggtgcggtggttcatgcctataatcccagtgctttacaaggctgaggcaggaggctctcttgagaataggagttcaagaccagcctgggcaacatagcaagatcctgtctctccaaaaaaaaaaaaaaaaaaaaaaaaaaatttcatttttgagtccagaggaccctcctattactcttgatttcatcttcagagtgtagttaaaaaattattttaaataattatttttttaaatcagttgtaggttcacagcaaaagtggacaaaaagaaatttctcatatatcccctgccctcacacatgcatagcctcccaccactatcagtatcccacaccagagtggtacatttgttacaatcaataaacctccattgacacatcattatcacccaaagtccatagtttacatgaagattcactctggtgttgtacattgtatgggcttagacaaatgtatgatgatatctacaattatagaatcatacagaatagtttcactgccctaaaacttctctatgcttcacctgttcatccctttcttccctaatcccctggcaaccactttaaaaaaaaaattaggttcagggggtacatgtgcaggtaaactc

SEQ ID NO: 7808 - protein, 156 aa, Homo sapiens; identical to SEQ ID NO: 526

SEQ ID NO: 7809 - DNA, 2426 bp, Homo sapiens
cttttccgcgggccccgcccaggcggctgcccgtgacctgcctgggcgcggggaactgaaagccggaaggggcaagacgggttcagttcgtcatggggctgtttggaaagacccaggagaagccgcccaaagaactgtggagatgtgcctgcttcccctttgccttccaccatggtgtaagtttactgaggcctccccagaagcagaagcctgtacagcccacagaactgtgagctgattaaacctcttttctttataaacaacccagtctcagcggtcttgcgagtggctggttccctgcagaagagcacagaagtgatgaaggccatgcaaagtcttgtgaagattccagagattcaggccaccatgagggagttgtccaaagaaatgatgaaggctgggatcatagaggagatgttagaggacacttttgaaagcatggacgatcaggaagaaatggaggaagaagcagaaatggaaattgacagaattctctttgaaattacagcaggggccttgggcaaagcacccagtaaagtgactgatgcccttccagagccagaacctccaggagcgatggctgcctcagaggatgaggaggaggaggaagaggctctggaggccatgcagtcccggctggccacactccgcagctaggggctgcctaccccgctgggtgtgcacacactcctctcaagagctgccattttatgtgtctcttgcactacacctctgttgtgaggactaccattttggagaaggttctgtttgtctcttttcattctctgcccaggttttgggatcgcaaagggattgttcttataaaagtggcataaataaatgcatcatttttaggagtatagacagatatatcttattgtggggaggggaaagaaatccatctgctcatgaagcacttctgaaaatataggtgattgcctgaatgtcgaagactctacttttgtctataaaacactatataaatgaattttaataaatttttgctttagcacttggccccattgtagattgccctgtgcagtaaactttcaaggtgtcggctgccccagattgcttcatttgctgggtgtggaaagagttgctatggccaggcatatgggatttggaagctcagcagaagtgacttctgctctgtggttgctgctccccggctttcacagacatggtatggcagccattcttttatctatttaaccaagaggatgctggggaattgtgctgcttgtcctgttggctggtggctgcattatgtcctggggtgtgcatgtgggtctatttagagcttctgtcccttccttcccattgcaagttgcacccagatgagacagctgtagtactaggtctctttcacctctcattgcctgtccctgcttcgagctggttgtcttgtgcgtgggacatgggccttcctatctgtgttttctcaaagtcaggagctgaccaggagcacactaaggtgtggtcatgcatcataaccaacattcactcatctgggacattcttaagatacatttataaatcatttcagcagtagtactttgtatgtgttgagagtttacagagctctttgacatacgcgatcttagtctttacaaataaggaaaacagctcagtttgggaagtatcagagatgggattcaaacccagatcctctggtccaagttgtatgtgcactgaactaatcaggcaggaaaaaagcccagccactgtctcacagattgttttttgtatattgtagcaaaatcctgaaacaatggggtccttccagtctcatcatacaaaatggcaatcttggctgggtgcggtggttcatgcctataatcccagtgctttacaaggctgaggcaggaggctctcttgagaataggagttcaagaccagcctgggcaacatagcaagatcctgtctctccaaaaaaaaaaaaaaaaaaaaaaaaaaatttcatttttgagtccagaggaccctcctattactcttgatttcatcttcagagtgtagttaaaaaattattttaaataattatttttttaaatcagttgtaggttcacagcaaaagtggacaaaaagaaatttctcatatatcccctgccctcacacatgcatagcctcccaccactatcagtatcccacaccagagtggtacatttgttacaatcaataaacctccattgacacatcattatcacccaaagtccatagtttacatgaagattcactctggtgttgtacattgtatgggcttagacaaatgtatgatgatatctacaattatagaatcatacagaatagtttcactgccctaaaacttctctatgcttcacctgttcatccctttcttccctaatcccctggcaaccactttaaaaaaaaaattaggttcagggggtacatgtgcaggtaaactc

SEQ ID NO: 7810 - protein, 112 aa, Homo sapiens; identical to SEQ ID NO: 7804

SEQ ID NO: 7811 - DNA, 693 bp, Homo sapiens
tgcaaagtcttgtgaagattccagagattcaggccaccatgagggagttgtccaaagaaatgatgaaggctgggatcatagaggagatgttagaggacacttttgaaagcatggacgatcaggaagaaatggaggaagaagcagaaatggaaattgacagaattctctttgaaattacagcaggggccttgggcaaagcacccagtaaagtgactgatgcccttccagagccagaacctccaggagcgatggctgcctcagaggatgaggaggaggaggaagaggctctggaggccatgcagtcccggctggccacactccgcagctaggggctgcctaccccgctgggtgtgcacacactcctctcaagagctgccattttatgtgtctcttgcactacacctctgttgtgaggactaccattttggagaaggttctgtttgtctcttttcattctctgcccaggttttgggatcgcaaagggattgttcttataaaagtggcataaataaatgcatcatttttaggagtatagacagatatatcttattgtggggaggggaaagaaatccatctgctcatgaagcacttctgaaaatataggtgattgcctgaatgtcgaagactctacttttgtctataaaacactatataaatgaattttaataaatttttgctttagcacttggcccc

SEQ ID NO: 7812 - protein, 96 aa, Homo sapiens
MRELSKEMMKAGIIEEMLEDTFESMDDQEEMEEEAEMEIDRILFEITAGALGKAPSKVTDALPEPEPPGAMAASEDEEEEEEALEAMQSRLATLRS

SEQ ID NO: 7813 - DNA, 1062 bp, Homo sapiens
ggggggccggaggaagagtctttaggagtcggctgtgggacgcgagagctcctggtgccatggctctcgaacaggtcaatgagtggtcattgaagataagaaaggaaatgagagttgttgacaggcaaataagggatatccaaagagaagaagaaaaagtgaaacgatctgtgaaagatgctgccaagaagggccagaaggatgtctgcatagttctggccaaggagatgatcaggtcaaggaaggctgtgagcaagctgtatgcatccaaagcacacatgaactcagtgctcatggggatgaagaaccagctcgcggtcttgcgagtggctggttccctgcagaagagcacagaagtgatgaaggccatgcaaagtcttgtgaagattccagagattcaggccaccatgagggagttgtccaaagaaatgatgaaggctgggatcatagaggagatgttagaggacacttttgaaagcatggacgatcaggaagaaatggaggaagaagcagaaatggaaattgacagaattctctttgaaattacagcaggggccttgggcaaagcacccagtaaagtgactgatgcccttccagagccagaacctccaggagcgatggctgcctcagaggatgaggaggaggaggaagaggctctggaggccatgcagtcccggctggccacactccgcagctaggggctgcctaccccgctgggtgtgcacacactcctctcaagagctgccattttatgtgtctcttgcactacacctctgttgtgaggactaccattttggagaaggttctgtttgtctcttttcattctctgcccaggttttgggatcgcaaagggattgttcttataaaagtggcataaataaatgcatcatttttaggagtatagacagatatatcttattgtggggaggggaaagaaatccatctgctcatgaagcacttctgaaaatataggtgattgcctgaatgtcgaagactctacttttgtctataaaacactatataaatgaattttaataaatttttgctttagcacttggcccc

SEQ ID NO: 7814 - protein, 212 aa, Homo sapiens; identical to SEQ ID NO: 7802

SEQ ID NO: 7815 - DNA, 1059 bp, Homo sapiens
ccgcgggccccgcccaggcggctgcccgtgacctgcctgggcgcggggaactgaaagccggaaggggcaagacgggttcagttcgtcatggggctgtttggaaagacccaggagaagccgcccaaagaactgatatccaaagagaagaagaaaaagtgaaacgatctgtgaaagatgctgccaagaagggccagaaggatgtctgcatagttctggccaaggagatgatcaggtcaaggaaggctgtgagcaagctgtatgcatccaaagcacacatgaactcagtgctcatggggatgaagaaccagctcgcggtcttgcgagtggctggttccctgcagaagagcacagaagtgatgaaggccatgcaaagtcttgtgaagattccagagattcaggccaccatgagggagttgtccaaagaaatgatgaaggctgggatcatagaggagatgttagaggacacttttgaaagcatggacgatcaggaagaaatggaggaagaagcagaaatggaaattgacagaattctctttgaaattacagcaggggccttgggcaaagcacccagtaaagtgactgatgcccttccagagccagaacctccaggagcgatggctgcctcagaggatgaggaggaggaggaagaggctctggaggccatgcagtcccggctggccacactccgcagctaggggctgcctaccccgctgggtgtgcacacactcctctcaagagctgccattttatgtgtctcttgcactacacctctgttgtgaggactaccattttggagaaggttctgtttgtctcttttcattctctgcccaggttttgggatcgcaaagggattgttcttataaaagtggcataaataaatgcatcatttttaggagtatagacagatatatcttattgtggggaggggaaagaaatccatctgctcatgaagcacttctgaaaatataggtgattgcctgaatgtcgaagactctacttttgtctataaaacactatataaatgaattttaataaatttttgctttagcacttggcccc

SEQ ID NO: 7816 - protein, 156 aa, Homo sapiens; identical to SEQ ID NO: 526

SEQ ID NO: 7817 - DNA, 879 bp, Homo sapiens
ccgcgggccccgcccaggcggctgcccgtgacctgcctgggcgcggggaactgaaagccggaaggggcaagacgggttcagttcgtcatggggctgtttggaaagacccaggagaagccgcccaaagaactgcggtcttgcgagtggctggttccctgcagaagagcacagaagtgatgaaggccatgcaaagtcttgtgaagattccagagattcaggccaccatgagggagttgtccaaagaaatgatgaaggctgggatcatagaggagatgttagaggacacttttgaaagcatggacgatcaggaagaaatggaggaagaagcagaaatggaaattgacagaattctctttgaaattacagcaggggccttgggcaaagcacccagtaaagtgactgatgcccttccagagccagaacctccaggagcgatggctgcctcagaggatgaggaggaggaggaagaggctctggaggccatgcagtcccggctggccacactccgcagctaggggctgcctaccccgctgggtgtgcacacactcctctcaagagctgccattttatgtgtctcttgcactacacctctgttgtgaggactaccattttggagaaggttctgtttgtctcttttcattctctgcccaggttttgggatcgcaaagggattgttcttataaaagtggcataaataaatgcatcatttttaggagtatagacagatatatcttattgtggggaggggaaagaaatccatctgctcatgaagcacttctgaaaatataggtgattgcctgaatgtcgaagactctacttttgtctataaaacactatataaatgaattttaataaatttttgctttagcacttggcccc

SEQ ID NO: 7818 - protein, 112 aa, Homo sapiens; identical to SEQ ID NO: 7804

SEQ ID NO: 7819 - DNA, 1021 bp, Homo sapiens
cttttccgcgggccccgcccaggcggctgcccgtgacctgcctgggcgcggggaactgaaagccggaaggggcaagacgggttcagttcgtcatggggctgtttggaaagacccaggagaagccgcccaaagaactgtggagatgtgcctgcttcccctttgccttccaccatggtgtaagtttactgaggcctccccagaagcagaagcctgtacagcccacagaactgtgagctgattaaacctcttttctttataaacaacccagtctcagcggtcttgcgagtggctggttccctgcagaagagcacagaagtgatgaaggccatgcaaagtcttgtgaagattccagagattcaggccaccatgagggagttgtccaaagaaatgatgaaggctgggatcatagaggagatgttagaggacacttttgaaagcatggacgatcaggaagaaatggaggaagaagcagaaatggaaattgacagaattctctttgaaattacagcaggggccttgggcaaagcacccagtaaagtgactgatgcccttccagagccagaacctccaggagcgatggctgcctcagaggatgaggaggaggaggaagaggctctggaggccatgcagtcccggctggccacactccgcagctaggggctgcctaccccgctgggtgtgcacacactcctctcaagagctgccattttatgtgtctcttgcactacacctctgttgtgaggactaccattttggagaaggttctgtttgtctcttttcattctctgcccaggttttgggatcgcaaagggattgttcttataaaagtggcataaataaatgcatcatttttaggagtatagacagatatatcttattgtggggaggggaaagaaatccatctgctcatgaagcacttctgaaaatataggtgattgcctgaatgtcgaagactctacttttgtctataaaacactatataaatgaattttaataaatttttgctttagcacttggcccc

SEQ ID NO: 7820 - protein, 112 aa, Homo sapiens; identical to SEQ ID NO: 7804

SEQ ID NO: 7821 - DNA, 1165 bp, Homo sapiens
tagtgccgccgctccctactctgggggttgggactacctccttttccgcgggccccgcccaggcggctgcccgtgacctgcctgggcgcggggaactgaaagccggaaggggcaagacgggttcagttcgtcatggggctgtttggaaagacccaggagaagccgcccaaagaactggtcaatgagtggtcattgaagataagaaaggaaatgagagttgttgacaggcaaataagggatatccaaagagaagaagaaaaagtgaaacgatctgtgaaagatgctgccaagaagggccagaaggatgtctgcatagttctggccaaggagatgatcaggtcaaggaaggctgtgagcaagctgtatgcatccaaagcacacatgaactcagtgctcatggggatgaagaaccagctcgcggtcttgcgagtggctggttccctgcagaagagcacagaagtgatgaaggccatgcaaagtcttgtgaagattccagagattcaggccaccatgagggagttgtccaaagaaatgatgaaggctgggatcatagaggagatgttagaggacacttttgaaagcatggacgatcaggaagaaatggaggaagaagcagaaatggaaattgacagaattctctttgaaattacagcaggggccttgggcaaagcacccagtaaagtgactgatgcccttccagagccagaacctccaggagcgatggctgcctcagaggatgaggaggaggaggaagaggctctggaggccatgcagtcccggctggccacactccgcagctaggggctgcctaccccgctgggtgtgcacacactcctctcaagagctgccattttatgtgtctcttgcactacacctctgttgtgaggactaccattttggagaaggttctgtttgtctcttttcattctctgcccaggttttgggatcgcaaagggattgttcttataaaagtggcataaataaatgcatcatttttaggagtatagacagatatatcttattgtggggaggggaaagaaatccatctgctcatgaagcacttctgaaaatataggtgattgcctgaatgtcgaagactctacttttgtctataaaacactatataaatgaattttaataaatttttgctttagcacttggcccc

SEQ ID NO: 7822 - protein, 222 aa, Homo sapiens; identical to SEQ ID NO: 528

SEQ ID NO: 7823 - DNA, 614 bp, Homo sapiens
tgcaaagtcttgtgaagattccagagattcaggccaccatgagggagttgtccaaagaaatgatgaaggctgggatcatagaggagatgttagaggacacttttgaaagcatggacgatcaggaagaaatggaggaagaagcagaaatggaaattgacagaattctctttgaaattacagcaggggccttgggcaaagcacccagtaaagtgactgatgcccttccagagccagaacctccaggagcgatggctgcctcagaggatgaggaggaggaggaagaggctctggaggccatgcagtcccggctggccacactccgcagctaggggctgcctaccccgctgggtgtgcacacactcctctcaagagctgccattttatgtgtctcttgcactacacctctgttgtgaggactaccattttggagaaggttctgtttgtctcttttcattctctgcccaggttttgggatcgcaaagggattgttcttataaaagtggcataaataaatgcatcatttttaggagtatagacagatatatcttattgtggggaggggaaagaaatccatctgctcatgaagcacttctgaaaatataggtgattgcctg

SEQ ID NO: 7824 - protein, 96 aa, Homo sapiens; identical to SEQ ID NO: 7812

SEQ ID NO: 7825 - DNA, 983 bp, Homo sapiens
ggggggccggaggaagagtctttaggagtcggctgtgggacgcgagagctcctggtgccatggctctcgaacaggtcaatgagtggtcattgaagataagaaaggaaatgagagttgttgacaggcaaataagggatatccaaagagaagaagaaaaagtgaaacgatctgtgaaagatgctgccaagaagggccagaaggatgtctgcatagttctggccaaggagatgatcaggtcaaggaaggctgtgagcaagctgtatgcatccaaagcacacatgaactcagtgctcatggggatgaagaaccagctcgcggtcttgcgagtggctggttccctgcagaagagcacagaagtgatgaaggccatgcaaagtcttgtgaagattccagagattcaggccaccatgagggagttgtccaaagaaatgatgaaggctgggatcatagaggagatgttagaggacacttttgaaagcatggacgatcaggaagaaatggaggaagaagcagaaatggaaattgacagaattctctttgaaattacagcaggggccttgggcaaagcacccagtaaagtgactgatgcccttccagagccagaacctccaggagcgatggctgcctcagaggatgaggaggaggaggaagaggctctggaggccatgcagtcccggctggccacactccgcagctaggggctgcctaccccgctgggtgtgcacacactcctctcaagagctgccattttatgtgtctcttgcactacacctctgttgtgaggactaccattttggagaaggttctgtttgtctcttttcattctctgcccaggttttgggatcgcaaagggattgttcttataaaagtggcataaataaatgcatcatttttaggagtatagacagatatatcttattgtggggaggggaaagaaatccatctgctcatgaagcacttctgaaaatataggtgattgcctg

SEQ ID NO: 7826 - protein, 212 aa, Homo sapiens; identical to SEQ ID NO: 7802

SEQ ID NO: 7827 - DNA, 980 bp, Homo sapiens
ccgcgggccccgcccaggcggctgcccgtgacctgcctgggcgcggggaactgaaagccggaaggggcaagacgggttcagttcgtcatggggctgtttggaaagacccaggagaagccgcccaaagaactgatatccaaagagaagaagaaaaagtgaaacgatctgtgaaagatgctgccaagaagggccagaaggatgtctgcatagttctggccaaggagatgatcaggtcaaggaaggctgtgagcaagctgtatgcatccaaagcacacatgaactcagtgctcatggggatgaagaaccagctcgcggtcttgcgagtggctggttccctgcagaagagcacagaagtgatgaaggccatgcaaagtcttgtgaagattccagagattcaggccaccatgagggagttgtccaaagaaatgatgaaggctgggatcatagaggagatgttagaggacacttttgaaagcatggacgatcaggaagaaatggaggaagaagcagaaatggaaattgacagaattctctttgaaattacagcaggggccttgggcaaagcacccagtaaagtgactgatgcccttccagagccagaacctccaggagcgatggctgcctcagaggatgaggaggaggaggaagaggctctggaggccatgcagtcccggctggccacactccgcagctaggggctgcctaccccgctgggtgtgcacacactcctctcaagagctgccattttatgtgtctcttgcactacacctctgttgtgaggactaccattttggagaaggttctgtttgtctcttttcattctctgcccaggttttgggatcgcaaagggattgttcttataaaagtggcataaataaatgcatcatttttaggagtatagacagatatatcttattgtggggaggggaaagaaatccatctgctcatgaagcacttctgaaaatataggtgattgcctg

SEQ ID NO: 7828 - protein, 156 aa, Homo sapiens; identical to SEQ ID NO: 526

SEQ ID NO: 7829 - DNA, 942 bp, Homo sapiens
cttttccgcgggccccgcccaggcggctgcccgtgacctgcctgggcgcggggaactgaaagccggaaggggcaagacgggttcagttcgtcatggggctgtttggaaagacccaggagaagccgcccaaagaactgtggagatgtgcctgcttcccctttgccttccaccatggtgtaagtttactgaggcctccccagaagcagaagcctgtacagcccacagaactgtgagctgattaaacctcttttctttataaacaacccagtctcagcggtcttgcgagtggctggttccctgcagaagagcacagaagtgatgaaggccatgcaaagtcttgtgaagattccagagattcaggccaccatgagggagttgtccaaagaaatgatgaaggctgggatcatagaggagatgttagaggacacttttgaaagcatggacgatcaggaagaaatggaggaagaagcagaaatggaaattgacagaattctctttgaaattacagcaggggccttgggcaaagcacccagtaaagtgactgatgcccttccagagccagaacctccaggagcgatggctgcctcagaggatgaggaggaggaggaagaggctctggaggccatgcagtcccggctggccacactccgcagctaggggctgcctaccccgctgggtgtgcacacactcctctcaagagctgccattttatgtgtctcttgcactacacctctgttgtgaggactaccattttggagaaggttctgtttgtctcttttcattctctgcccaggttttgggatcgcaaagggattgttcttataaaagtggcataaataaatgcatcatttttaggagtatagacagatatatcttattgtggggaggggaaagaaatccatctgctcatgaagcacttctgaaaatataggtgattgcctg

SEQ ID NO: 7830 - protein, 112 aa, Homo sapiens; identical to SEQ ID NO: 7804

SEQ ID NO: 7831 - DNA, 1086 bp, Homo sapiens
tagtgccgccgctccctactctgggggttgggactacctccttttccgcgggccccgcccaggcggctgcccgtgacctgcctgggcgcggggaactgaaagccggaaggggcaagacgggttcagttcgtcatggggctgtttggaaagacccaggagaagccgcccaaagaactggtcaatgagtggtcattgaagataagaaaggaaatgagagttgttgacaggcaaataagggatatccaaagagaagaagaaaaagtgaaacgatctgtgaaagatgctgccaagaagggccagaaggatgtctgcatagttctggccaaggagatgatcaggtcaaggaaggctgtgagcaagctgtatgcatccaaagcacacatgaactcagtgctcatggggatgaagaaccagctcgcggtcttgcgagtggctggttccctgcagaagagcacagaagtgatgaaggccatgcaaagtcttgtgaagattccagagattcaggccaccatgagggagttgtccaaagaaatgatgaaggctgggatcatagaggagatgttagaggacacttttgaaagcatggacgatcaggaagaaatggaggaagaagcagaaatggaaattgacagaattctctttgaaattacagcaggggccttgggcaaagcacccagtaaagtgactgatgcccttccagagccagaacctccaggagcgatggctgcctcagaggatgaggaggaggaggaagaggctctggaggccatgcagtcccggctggccacactccgcagctaggggctgcctaccccgctgggtgtgcacacactcctctcaagagctgccattttatgtgtctcttgcactacacctctgttgtgaggactaccattttggagaaggttctgtttgtctcttttcattctctgcccaggttttgggatcgcaaagggattgttcttataaaagtggcataaataaatgcatcatttttaggagtatagacagatatatcttattgtggggaggggaaagaaatccatctgctcatgaagcacttctgaaaatataggtgattgcctg

SEQ ID NO: 7832 - protein, 222 aa, Homo sapiens; identical to SEQ ID NO: 528

SEQ ID NO: 7833 - DNA, 536 bp, Homo sapiens
ccatgcaaagtcttgtgaagattccagagattcaggccaccatgagggagttgtccaaagaaatgatgaaggctgggatcatagaggagatgttagaggacacttttgaaagcatggacgatcaggaagaaatggaggaagaagcagaaatggaaattgacagaattctctttgaaattacagcaggggccttgggcaaagcacccagtaaagtgactgatgcccttccagagccagaacctccaggagcgatggctgcctcagaggatgaggaggaggaggaagaggctctggaggccatgcagtcccggctggccacactccgcagctaggggctgcctaccccgctgggtgtgcacacactcctctcaagagctgccattttatgtgtctcttgcactacacctctgttgtgaggactaccattttggagaaggttctgtttgtctcttttcattctctgcccaggttttgggatcgcaaagggattgttcttataaaagtggcataaataaatgcatcatttttaggagtat

SEQ ID NO: 7834 - protein, 109 aa, Homo sapiens
MQSLVKIPEIQATMRELSKEMMKAGIIEEMLEDTFESMDDQEEMEEEAEMEIDRILFEITAGALGKAPSKVTDALPEPEPPGAMAASEDEEEEEEALEAMQSRLATLRS

SEQ ID NO: 7835 - DNA, 902 bp, Homo sapiens
ggggggccggaggaagagtctttaggagtcggctgtgggacgcgagagctcctggtgccatggctctcgaacaggtcaatgagtggtcattgaagataagaaaggaaatgagagttgttgacaggcaaataagggatatccaaagagaagaagaaaaagtgaaacgatctgtgaaagatgctgccaagaagggccagaaggatgtctgcatagttctggccaaggagatgatcaggtcaaggaaggctgtgagcaagctgtatgcatccaaagcacacatgaactcagtgctcatggggatgaagaaccagctcgcggtcttgcgagtggctggttccctgcagaagagcacagaagtgatgaaggccatgcaaagtcttgtgaagattccagagattcaggccaccatgagggagttgtccaaagaaatgatgaaggctgggatcatagaggagatgttagaggacacttttgaaagcatggacgatcaggaagaaatggaggaagaagcagaaatggaaattgacagaattctctttgaaattacagcaggggccttgggcaaagcacccagtaaagtgactgatgcccttccagagccagaacctccaggagcgatggctgcctcagaggatgaggaggaggaggaagaggctctggaggccatgcagtcccggctggccacactccgcagctaggggctgcctaccccgctgggtgtgcacacactcctctcaagagctgccattttatgtgtctcttgcactacacctctgttgtgaggactaccattttggagaaggttctgtttgtctcttttcattctctgcccaggttttgggatcgcaaagggattgttcttataaaagtggcataaataaatgcatcatttttaggagtat

SEQ ID NO: 7836 - protein, 212 aa, Homo sapiens; identical to SEQ ID NO: 7802

SEQ ID NO: 7837 - DNA, 899 bp, Homo sapiens
ccgcgggccccgcccaggcggctgcccgtgacctgcctgggcgcggggaactgaaagccggaaggggcaagacgggttcagttcgtcatggggctgtttggaaagacccaggagaagccgcccaaagaactgatatccaaagagaagaagaaaaagtgaaacgatctgtgaaagatgctgccaagaagggccagaaggatgtctgcatagttctggccaaggagatgatcaggtcaaggaaggctgtgagcaagctgtatgcatccaaagcacacatgaactcagtgctcatggggatgaagaaccagctcgcggtcttgcgagtggctggttccctgcagaagagcacagaagtgatgaaggccatgcaaagtcttgtgaagattccagagattcaggccaccatgagggagttgtccaaagaaatgatgaaggctgggatcatagaggagatgttagaggacacttttgaaagcatggacgatcaggaagaaatggaggaagaagcagaaatggaaattgacagaattctctttgaaattacagcaggggccttgggcaaagcacccagtaaagtgactgatgcccttccagagccagaacctccaggagcgatggctgcctcagaggatgaggaggaggaggaagaggctctggaggccatgcagtcccggctggccacactccgcagctaggggctgcctaccccgctgggtgtgcacacactcctctcaagagctgccattttatgtgtctcttgcactacacctctgttgtgaggactaccattttggagaaggttctgtttgtctcttttcattctctgcccaggttttgggatcgcaaagggattgttcttataaaagtggcataaataaatgcatcatttttaggagtat

SEQ ID NO: 7838 - protein, 156 aa, Homo sapiens; identical to SEQ ID NO: 526

SEQ ID NO: 7839 - DNA, 861 bp, Homo sapiens
cttttccgcgggccccgcccaggcggctgcccgtgacctgcctgggcgcggggaactgaaagccggaaggggcaagacgggttcagttcgtcatggggctgtttggaaagacccaggagaagccgcccaaagaactgtggagatgtgcctgcttcccctttgccttccaccatggtgtaagtttactgaggcctccccagaagcagaagcctgtacagcccacagaactgtgagctgattaaacctcttttctttataaacaacccagtctcagcggtcttgcgagtggctggttccctgcagaagagcacagaagtgatgaaggccatgcaaagtcttgtgaagattccagagattcaggccaccatgagggagttgtccaaagaaatgatgaaggctgggatcatagaggagatgttagaggacacttttgaaagcatggacgatcaggaagaaatggaggaagaagcagaaatggaaattgacagaattctctttgaaattacagcaggggccttgggcaaagcacccagtaaagtgactgatgcccttccagagccagaacctccaggagcgatggctgcctcagaggatgaggaggaggaggaagaggctctggaggccatgcagtcccggctggccacactccgcagctaggggctgcctaccccgctgggtgtgcacacactcctctcaagagctgccattttatgtgtctcttgcactacacctctgttgtgaggactaccattttggagaaggttctgtttgtctcttttcattctctgcccaggttttgggatcgcaaagggattgttcttataaaagtggcataaataaatgcatcatttttaggagtat

SEQ ID NO: 7840 - protein, 112 aa, Homo sapiens; identical to SEQ ID NO: 7804

SEQ ID NO: 7841 - DNA, 1005 bp, Homo sapiens
tagtgccgccgctccctactctgggggttgggactacctccttttccgcgggccccgcccaggcggctgcccgtgacctgcctgggcgcggggaactgaaagccggaaggggcaagacgggttcagttcgtcatggggctgtttggaaagacccaggagaagccgcccaaagaactggtcaatgagtggtcattgaagataagaaaggaaatgagagttgttgacaggcaaataagggatatccaaagagaagaagaaaaagtgaaacgatctgtgaaagatgctgccaagaagggccagaaggatgtctgcatagttctggccaaggagatgatcaggtcaaggaaggctgtgagcaagctgtatgcatccaaagcacacatgaactcagtgctcatggggatgaagaaccagctcgcggtcttgcgagtggctggttccctgcagaagagcacagaagtgatgaaggccatgcaaagtcttgtgaagattccagagattcaggccaccatgagggagttgtccaaagaaatgatgaaggctgggatcatagaggagatgttagaggacacttttgaaagcatggacgatcaggaagaaatggaggaagaagcagaaatggaaattgacagaattctctttgaaattacagcaggggccttgggcaaagcacccagtaaagtgactgatgcccttccagagccagaacctccaggagcgatggctgcctcagaggatgaggaggaggaggaagaggctctggaggccatgcagtcccggctggccacactccgcagctaggggctgcctaccccgctgggtgtgcacacactcctctcaagagctgccattttatgtgtctcttgcactacacctctgttgtgaggactaccattttggagaaggttctgtttgtctcttttcattctctgcccaggttttgggatcgcaaagggattgttcttataaaagtggcataaataaatgcatcatttttaggagtat

SEQ ID NO: 7842 - protein, 222 aa, Homo sapiens; identical to SEQ ID NO: 528

SEQ ID NO: 7843 - DNA, 2724 bp, Homo sapiens
ctgccacaccttttttcgtttttccttttggaacataggaaatacattttttaaatacctgtcttagtttcttttgtgctgctatagcagaatacctgagactgagtaatttattcagagtagaattttatttcatgcagttctggagtctgggaagttcaagattaaggtgctggcagggttggttgtctggtgagggctgcattttctggagggtaggcatgctgtgttctcacgtggcaggaggaagggcaacggagaacgaactgcctcctgtaggcccttttctaagggcacctaatccattcaggagggtggaacctcatggcctaatcacctcttaaaaactccacctcttaatacttatcacagtggcaacacctgaattttggagaggacgtattcaaaccatagcaaccacctttgtcttgagtttcaagtgtacaacatacaattagtctggccttttaaaaatccacttacctaatccattttggttggttatcaacttgagtgtttttgtaataagttttatttctaagtttatttttgtgtcccctttttcctacaacattgactcttcccttcttgtaccttctaataatcagaaatttatacctttttcagaatacaaatgattcagtgtttaaatacttctctagtcacagttttttccatgtctcccatctgtttacttattttcactaattcagcccaaaaatgtttactgaacacataccatgttcaggtactctctctgggttacagactcaggatgcaaataataatacaacttataatatgtataaggatgtatcaggatgcaaattataaaataataatacaactacaggctcatgtagacatcaggctttataaacaaaactggatggaatttgctttatttttacccttttcttcccacctttatataatcaatagtaatttttaactttttataaaattataaaattttataaatttataaaagtaaatttataaaagtaattataacttttttatcattttaatggcatatgtaatttattgcttatttcagcctcacagattcttggcacttcctctgtcattctactaatattaataaatattttattttcccatttcagtgttaagagaaatgaagtgttctctgcaactagcaaactcccttactcctttagaaaaatcacagtgctatgaatgtcagacaggcatttctctggtcactcttgttttcccttagatgtgaaagcttcctagggtctggattccaccagaagtaaacctgtagtgactcctggtttagccaggaggaaggaagtctgtgtgccggttttagggaacagcttgtatatgacagctctcagaacttcaagtctcatgaaattccaaaacaggtttagatggttgccaactctttgacatgttaaagacattgagggtggggcaatgatcttttgatactaccgtgatttcttataaagaagattgtagtaggcatacaatctcagactacagaaggtttttctctagtaaggaaccacctcacattgacacacatacacatattcactgtatctgtcctagtttctctcatttttctgaggaccaatgataagctggctccatactgaacagatactgtccataggctggtgtgtggggagctctgctcgggtcctgaagccttctctttcctagtgtggcctttacaaggtctggagctctttctcccatttgtgattttcctgggtgtcacagttactccaagctggcttcctttcctaaaagtcaagagtggcttcaggccactctccagattggtcatgtggtgtgcatgctcattgaattcacatcagtagtaacccagatagcatacaatttaggaaagtcaatctcttggtcaactagcacagtaattaatttaaaggcacacaaataacttcgggagtccatctgctactgctgtcatttattggaatggctcataatttggctgtctctctctattccatcctgttgaacaatcctgactgtacacattctctttcagcggtcttgcgagtggctggttccctgcagaagagcacagaagtgatgaaggccatgcaaagtcttgtgaagattccagagattcaggccaccatgagggagttgtccaaagaaatgatgaaggctgggatcatagaggagatgttagaggacacttttgaaagcatggacgatcaggaagaaatggaggaagaagcagaaatggaaattgacagaattctctttgaaattacagcaggtatgaccgtgagatccatcctttctcctctctttttatggccattcttccttcattcactaaattagctagtagctttttctttaggcattaactcccttctacatttttaacgttttacactgtgcagcttatttcttgaaaagtaagcacaatatctataaccatcttttaaaaaacacaattcttaaaatttttagagtttgcatgattttaaaggaagatactgctctcatatactgctgttgggattttaaactggtgtagactttcttgaaagcaatttggccatagccattcaaaagcccttgccttcgccaagtgcgatggctcacgcctgttatcccagcactttgggaggctcaggtgggggatcgcttgagcccaggagtttgagaccagcctgggcaaccatagcaagaccgcatctc

SEQ ID NO: 7844 - protein, 125 aa, Homo sapiens
MAHNLAVSLYSILLNNPDCTHSLSAVLRVAGSLQKSTEVMKAMQSLVKIPEIQATMRELSKEMMKAGIIEEMLEDTFESMDDQEEMEEEAEMEIDRILFEITAGMTVRSILSPLFLWPFFLHSLN

SEQ ID NO: 7845 - DNA, 898 bp, Homo sapiens
ccgcgggccccgcccaggcggctgcccgtgacctgcctgggcgcggggaactgaaagccggaaggggcaagacgggttcagttcgtcatggggctgtttggaaagacccaggagaagccgcccaaagaactggtcaatgagtggtcattgaagataagaaaggaaatgagagttgttgacaggcaaataaggggatccattggagtctttggctgaatactaagctgtgcatgcttagagtgaaatttcaagagactgggcaaagaacaattactaggaacagaacaactaccaggaagctgtaagctgaataattcttagagctaataaaggattgagaagtggttgagctctgatcagacacagaaaagagactttgttgaacctctgggatgttcaatagagacctcagaagagtcacaccttaataataaggatcaggtaggtagtcctagaaaaaaggctaccacaagcccataccaaccaaccaacaagacttaaaagacttcacggctgatttgcaggtaatttgactgcctgccaaagtaaagattaacactgtttaagggaagactacaaaatgcaggcacccaacaatgaaacatatacagtggccagcatccaataagatactattatgaagaagcaggaaaatgtgaccccaaaacaggagaaaagccaggtaatagaaatagatttaaaaaaaaaaaacacccaaaacccccacaaaaaaagatgattgaatttgcagtcaaggatttttaagcagctattataaatatgttgagattaaaggataacttaaacataatgaggagataaatacaaaatacagaaaacaacaaaatggaatttctagagttgaaagatctgaaatgaagtgaaattaaatgaagaa

SEQ ID NO: 7846 - protein, 42 aa, Homo sapiens
MGLFGKTQEKPPKELVNEWSLKIRKEMRVVDRQIRGSIGVFG

SEQ ID NO: 7847 - DNA, 507 bp, Homo sapiens
accaaggagcaaaactgagtaagtttcctgacgaaaataatgagtgtctactgttctagggcctttaacaacaacaacaacaaatttacattaacgcacattatgtgccaggaattgcaagatgcataagattagtttttaaaatgtgcctgctagagctgaacaggtaacgagagttcgaagccgggtccagagctatcttctgtaacattcttctgggtcgagtccctgccccgctacgagactatacgtaacatggacctggaaaagcttaaaaatatgaagaggattgaactggctgccatctgtgcatcttcatttatgaaaacactcctcatagacttaaaacaaatgacagagaacaaattagtcagcttcttctaaaatacagtggtctccccttaccctcagtttcactttctgcagtcaactgcagtccgaaaatactacatacaattagatattcggagagagagacaccacatttacataaatgttatttcagta

SEQ ID NO: 7848 - protein, 42 aa, Homo sapiens
MDLEKLKNMKRIELAAICASSFMKTLLIDLKQMTENKLVSFF

SEQ ID NO: 7849 - DNA, 4583 bp, Homo sapiens
tcttgagtggtagcaataaaaataaaataaaataaagaacaagaggcaataggcgcctgctttgcttgatcttcctaattttctaggtacaacttttttttctctcttttttttgagatggagtcttgctctgttacccaggctggagtgcagtggcataatctcggctcactgcaacctctgcttcccaggttcaagcgattctgctgcctcagcctcccaagtagctaggattacaggtgtgcaccaccacgcccggcaaatttttgttttttttaatagaggcggggtttcgccatgttggccaggctggtcttgaactcctgacctcaaatgatccaccagcctcagcctccaaaagtgctgggattaaaggcatgagccactgtacctggccttctaggtaaaacttataaagtacttttggaccagagaaaaatgtaaagctagggacttactgggtagggaaacgtgtgagcatccttcaaaagagctttcacctattaagtgcatgtccccagattgccttcttcctggttacttcagctgtctgagtatttgaataaattgtatctgcctcaataagaccacttattttcattaaaaagtactatcaaaaccatggttgggtgcagtggttcatgcctgtaattccaacacttgggaggccgaggcagaaggaaccctgaggccaggtatttgaggctgcagtgagccatgattgagccattgcacttcagcctggggaacagagtgagaccctgtcccttaaaaaaaaatgtaatatcaaaaccatttgcttaatgccctaaattgtgtatatgtattcattaagcttcaaacttatgtgataagatgttatgtatgcacgtgtgtctcggtaagtatgaggatggtagtggagtgtcacagaggttatttggcacataaagtgaacttcaagtcacttgtcatcacaatgtgctgtttcttctgctgccctctgacatttgttagacgttctagcacagaggccacagatgaggtggctgcaccacctcttgcgtctcccaaggagttgactgtcagcactcattttacacacccacctgcaacttcacttcctggaggctttgtgagtgtgaaaatggtccttcctcccagaaagagtagaggcccccagagtattatgttgtaattttgaattgtatagtatcagaaatataacatttatgaaaataaacttggcctatataccctggacttaaacagatggtttcatgatgactttagacatttttggctttcctttaacttcccatttagttatttttatggtcttgtttttaatgttttttggtttttactggtatctgcattgaaattctgccttcattaaaggcaggaagattaggagataaagggaaaaggtggtaatgattagaaaggctgacacttataagagaagtcttgacatattttgaaggtcttgctctgtcacccaggctggattgcagtggtgcaacctctactcactgcaacctccacctcacaggttcaagtgattctcatgcttcagccttctgagcagctgggactataggtgcctgccaccatgcctggctaatttttgtatttctagtagagacggggttttgccatgttggccaggctggtcttgaactcttcgactcaagtgatgcatctgcctcggcctcccaacatgttgggattacaggcgtgagccaccacacctggcctctttttcttttcttaagaatcttttgcttttcctaatcctaattgtgtttgaaagctcttgcaaatttgaagtacaagttcaataatgtaaaattcattacattaaagaatgaataagaagaatggtaattcttattgtatgttagagccgttcatgattaagcaaaaagccatagaactagtagtatttattgatttagtcaaagcaccctttaatagaaaacatgtgtttgactcttggctccataattatactttttaaaaagtgaaatttgaacttgttgaacctacatgtgataatttttagtaagctctatttggattattgtttaaaattttcttttcagagcaaagagaaattattccaagggccattttcttcctgtgtaacttaattagagagaagaggccacatggtggagaatgtggctagccttttaatacagttttgactccctccctctctttgtaactgccacagagtgtgggagagtttaatttacgtttcagtgtttcaagtctttttcctattggatagttgctccttctataagaattgtaatgataatgtgatgatacagtaaacaagaactgggaacagaatatctttttttttaagtgaaattatattgttgatgtaaacggttggcttgactccattttaggtaattcaagtttctttttctctatttttgggaataggtcatagcaaatgacagaagtcccttggtgggcaaaattcactgggagaaaatggttaaaaaggtgtcaagatttggaatacgtacaggcacatttaactgttccagtgatcccagatattgcaggagaagaggctgggtccgatccacactcattatgtctgttccacaaacaagtacttcaaaagggaaagtcatgcttaaagaatacagtggacgcaagattgaagtagagcacatttttaaatggataactgctcatgcagcttctcggatcaaaaccatttataatgctgaacacttgaaagaagaatggaataaaagtgatcagtattggttaaaaatatacctatttgcaaaccttgaccagcccccagctttcttctctgcactaagtataaagtttactggaagagttgagtttatttttgttaatgtagaaaattgggacaacaagagttatatgacagatattggcatatataatatgccatcatacatacttagaactcctgaaggaatttacaggtatggaaaccacacaggcgaatttatatcccttcaggccatggattcatttttgcgctcattacaacccgaggtaaatgatctgtttgttttgagcttggttctagttaatcttatggcttggatggacttatttattacacaaggagctaccataaagcgatttgtggttctcataagcactttagggacatataattctctattaattatttcctggctacctgtgttgggctttttacagctaccttacttagatagcttttatgaatatagcttaaaattgttgagatattccaatacaaccacactggcttcatgggtaagggcagactggatgttttactcttcacacccagccctgtttctcagtacataccttggtcatggtttactaattgattactttgagaagaagagaaggcgcaacaacaacaatgatgaagtcaatgccaataacttagaatggttatcaagtctgtgggactggtacaccagctacctcttccacccgattgcttcttttcagaactttcctgtagaatctgattgggacgaagaccctgacttattcttggagcgcttagctttccctgacctttggcttcaccctctgataccaactgattatattaaaaacttaccaatgtggcgatttaaatgtcttggagtccagtctgaagaggaaatgtcggaggggtctcaagatactgaaaatgactcggaaagtgagaacacagacactttgagtagtgagaaggaagtatttgaagataagcaaagcgtacttcacaattctccaggaacagcaagtcactgtgatgctgaggcttgttcatgtgccaataaatattgtcagaccagcccatgtgaaaggaaggggaggtcatatggatcatataacactaatgaagatatggaacctgattggttaacttggcctgctgatatgctgcactgtactgaatgtgttgtttgcctagagaattttgaaaatggatgtttgctaatggggttgccttgtggtcatgtgtttcatcagaattgcattgtgatgtggttggctgggggccgacattgttgccctgtttgccggtggccttcttataaaaaaaagcagccatatgcacaacaccagcccttgtcaaatgatgtcccatcttaaccatgtgcaatttgtcctttataagctttgagtatcttacagcttgcctttttaatgttagtcacaatgtttttgtggtttgaagtttagtttaatgttagtgcagtgacgggaaatacacattatgctaatgttgatgacagaatttatttggttgccttgtgtgttaattgaatgcatacctaattgtaaaatttttttatttacaacattggaaattcagaagttaatgtttttttgtaagcacaaaagaagtattatagaaatttatcctagcaagactttacaagataggatcaaattctaatggaattgagccggtttcttatcctaaatgtttcctccctttttacaatctctgtccagcacctcttggttaaataatgtatgctgtgagacatgaaattaaaacagacctatgaaataaattattttaaaaccagaagatt

SEQ ID NO: 7850 - protein, 546 aa, Homo sapiens
MVKKVSRFGIRTGTFNCSSDPRYCRRRGWVRSTLIMSVPQTSTSKGKVMLKEYSGRKIEVEHIFKWITAHAASRIKTIYNAEHLKEEWNKSDQYWLKIYLFANLDQPPAFFSALSIKFTGRVEFIFVNVENWDNKSYMTDIGIYNMPSYILRTPEGIYRYGNHTGEFISLQAMDSFLRSLQPEVNDLFVLSLVLVNLMAWMDLFITQGATIKRFVVLISTLGTYNSLLIISWLPVLGFLQLPYLDSFYEYSLKLLRYSNTTTLASWVRADWMFYSSHPALFLSTYLGHGLLIDYFEKKRRRNNNNDEVNANNLEWLSSLWDWYTSYLFHPIASFQNFPVESDWDEDPDLFLERLAFPDLWLHPLIPTDYIKNLPMWRFKCLGVQSEEEMSEGSQDTENDSESENTDTLSSEKEVFEDKQSVLHNSPGTASHCDAEACSCANKYCQTSPCERKGRSYGSYNTNEDMEPDWLTWPADMLHCTECVVCLENFENGCLLMGLPCGHVFHQNCIVMWLAGGRHCCPVCRWPSYKKKQPYAQHQPLSNDVPS

SEQ ID NO: 7851 - DNA, 3476 bp, Homo sapiens
ggctccggccgcggccgccgctgatacacggttgtggagggtacggccgcggtctccggaggtggcgggggtgttggggacgggtgctgcgaccggcactgcccatccgagcgggacgggcgctgagtggccgggaggcagccgggtagccgcctggaggagcagtctcggggcctattattggttttttccctccgagaccgattccatctgcagagaccgcgacgccccatcctgggccgggccgcagtgcccgcccgcctgagaggcgccgcccgccagccggcccgagcgaacctggagccgccgccgtgcccgccgctcttctcgcggagcctgggcggtcggcggggcctggggcctgggcttcgggcgcggcgttgcggcggccgctcctccccgcgcagaacacgctgggccccgggcctggcccggccgagcgccgcgccctcctgacccgcggccgcgggagtccggcccccacggcccctcgggccccggcctgccgcccggatccccgcctcctgggcggatctgagttattttttggtctccccctcccccttgagatcgcggcaccggagggccgaccccgccacctgggtcagtgcccgccccgggggaagcgtccctcgttttgttcttccccgcgagctctccccgcgcccctctcctttctgtgcttaatggatgggggttttgagtttttcccctttatttttgtcggctcttgactgggaggcccggcgcgaggctctgcgtctctgcgtccctcgtcgccgcctcgcgcccgcgcggatcccgtcacctgcttccccgccggggatggccggccagtgacggcgccgggtggcccgcgcgtggacacggggccctcgcccaagctgccaccgagccgcggcccccgccctcgacccttctctctcccgtattccgagctctctggaaagagaggaaactccagggaagatgtggctgaagctttttttcttgctcctctatttcctggtcctgttcgtcctggccaggttttttgaggccattgtgtggtatgaaactggcatctttgccacccagctggtggatccggtggcgctgagcttcaagaagctgaagaccattttggagtgccgggggttgggctactcagggttgcccgagaagaaggatgtccgggagctggtggaaaagtcaggtgacttgatggagggtgagctctattctgctctcaaggaagaagaagcatccgaatcggtttctagtaccaatttcagtggtgaaatgcacttctatgagcttgtggaagacacaaaagatggcatctggctggttcaggtcatagcaaatgacagaagtcccttggtgggcaaaattcactgggagaaaatggttaaaaaggtgtcaagatttggaatacgtacaggcacatttaactgttccagtgatcccagatattgcaggagaagaggctgggtccgatccacactcattatgtctgttccacaaacaagtacttcaaaagggaaagtcatgcttaaagaatacagtggacgcaagattgaagtagagcacatttttaaatggataactgctcatgcagcttctcggatcaaaaccatttataatgctgaacacttgaaagaagaatggaataaaagtgatcagtattggttaaaaatatacctatttgcaaaccttgaccagcccccagctttcttctctgcactaagtataaagtttactggaagagttgagtttatttttgttaatgtagaaaattgggacaacaagagttatatgacagatattggcatatataatatgccatcatacatacttagaactcctgaaggaatttacaggtatggaaaccacacaggcgaatttatatcccttcaggccatggattcatttttgcgctcattacaacccgaggtaaatgatctgtttgttttgagcttggttctagttaatcttatggcttggatggacttatttattacacaaggagctaccataaagcgatttgtggttctcataagcactttagggacatataattctctattaattatttcctggctacctgtgttgggctttttacagctaccttacttagatagcttttatgaatatagcttaaaattgttgagatattccaatacaaccacactggcttcatgggtaagggcagactggatgttttactcttcacacccagccctgtttctcagtacataccttggtcatggtttactaattgattactttgagaagaagagaaggcgcaacaacaacaatgatgaagtcaatgccaataacttagaatggttatcaagtctgtgggactggtacaccagctacctcttccacccgattgcttcttttcagaactttcctgtagaatctgattgggacgaagaccctgacttattcttggagcgcttagctttccctgacctttggcttcaccctctgataccaactgattatattaaaaacttaccaatgtggcgatttaaatgtcttggagtccagtctgaagaggaaatgtcggaggggtctcaagatactgaaaatgactcggaaagtgagaacacagacactttgagtagtgagaaggaagtatttgaagataagcaaagcgtacttcacaattctccaggaacagcaagtcactgtgatgctgaggcttgttcatgtgccaataaatattgtcagaccagcccatgtgaaaggaaggggaggtcatatggatcatataacactaatgaagatatggaacctgattggttaacttggcctgctgatatgctgcactgtactgaatgtgttgtttgcctagagaattttgaaaatggatgtttgctaatggggttgccttgtggtcatgtgtttcatcagaattgcattgtgatgtggttggctgggggccgacattgttgccctgtttgccggtggccttcttataaaaaaaagcagccatatgcacaacaccagcccttgtcaaatgatgtcccatcttaaccatgtgcaatttgtcctttataagctttgagtatcttacagcttgcctttttaatgttagtcacaatgtttttgtggtttgaagtttagtttaatgttagtgcagtgacgggaaatacacattatgctaatgttgatgacagaatttatttggttgccttgtgtgttaattgaatgcatacctaattgtaaaatttttttatttacaacattggaaattcagaagttaatgtttttttgtaagcacaaaagaagtattatagaaatttatcctagcaagactttacaagataggatcaaattctaatggaattgagccggtttcttatcctaaatgtttcctccctttttacaatctctgtccagcacctcttggttaaataatgtatgctgtgagacatgaaattaaaacagacctatgaaataaattattttaaaaccagaagatt

SEQ ID NO: 7852 - protein, 685 aa, Homo sapiens; identical to SEQ ID NO: 530

SEQ ID NO: 7853 - DNA, 1654 bp, Homo sapiens
ctcggctccggccgcggccgccgctgatacacggttgtggagggttttttgaggccattgtgtggtatgaaactggcatctttgccacccagctggtggatccggtggcgctgagcttcaagaagctgaagaccattttggagtgccgggggttgggctactcagggttgcccgagaagaaggatgtccgggagctggtggaaaagtcaggtgacttgatggagggtgagctctattctgctctcaaggaagaagaagcatccgaatcggtttctagtaccaatttcagtggtgaaatgcacttctatgagcttgtggaagacacaaaagatggcatctggctggttcagctctgtcagtcagggatccttaaactcttcaaaaccaaatgctagaacacgttgctgaataaataaggccctggcattgaacattgtcttgtacctgccccaggtcatagcaaatgacagaagtcccttggtgggcaaaattcactgggagaaaatggttaaaaaggtgtcaagatttggaatacgtacaggcacatttaactgttccagtgatcccagaactttcctgtagaatctgattgggacgaagaccctgacttattcttggagcgcttagctttccctgacctttggcttcaccctctgataccaactgattatattaaaaacttaccaatgtggcgatttaaatgtcttggagtccagtctgaagaggaaatgtcggaggggtctcaagatactgaaaatgactcggaaagtgagaacacagacactttgagtagtgagaaggaagtatttgaagataagcaaagcgtacttcacaattctccaggaacagcaagtcactgtgatgctgaggcttgttcatgtgccaataaatattgtcagaccagcccatgtgaaaggaaggggaggtcatatggatcatataacactaatgaagatatggaacctgattggttaacttggcctgctgatatgctgcactgtactgaatgtgttgtttgcctagagaattttgaaaatggatgtttgctaatggggttgccttgtggtcatgtgtttcatcagaattgcattgtgatgtggttggctgggggccgacattgttgccctgtttgccggtggccttcttataaaaaaaagcagccatatgcacaacaccagcccttgtcaaatgatgtcccatcttaaccatgtgcaatttgtcctttataagctttgagtatcttacagcttgcctttttaatgttagtcacaatgtttttgtggtttgaagtttagtttaatgttagtgcagtgacgggaaatacacattatgctaatgttgatgacagaatttatttggttgccttgtgtgttaattgaatgcatacctaattgtaaaatttttttatttacaacattggaaattcagaagttaatgtttttttgtaagcacaaaagaagtattatagaaatttatcctagcaagactttacaagataggatcaaattctaatggaattgagccggtttcttatcctaaatgtttcctccctttttacaatctctgtccagcacctcttggttaaataatgtatgctgtgagacatgaaattaaaacagacctatgaaataaattattttaaaaccagaagatt

SEQ ID NO: 7854 - protein, 58 aa, Homo sapiens
MEGELYSALKEEEASESVSSTNFSGEMHFYELVEDTKDGIWLVQLCQSGILKLFKTKC

SEQ ID NO: 7855 - DNA, 2499 bp, Homo sapiens
tgttatgtctcggctccggccgcggccgccgctgatacacggttgtggagggttttttgaggccattgtgtggtatgaaactggcatctttgccacccagctggtggatccggtggcgctgagcttcaagaagctgaagaccattttggagtgccgggggttgggctactcagggttgcccgagaagaaggatgtccgggagctggtggaaaagtcaggtgacttgatggagggtgagctctattctgctctcaaggaagaagaagcatccgaatcggtttctagtaccaatttcagtggtgaaatgcacttctatgagcttgtggaagacacaaaagatggcatctggctggttcaggtcatagcaaatgacagaagtcccttggtgggcaaaattcactgggagaaaatggttaaaaaggtgtcaagatttggaatacgtacaggcacatttaactgttccagtgatcccagatattgcaggagaagaggctgggtccgatccacactcattatgtctgttccacaaacaagtacttcaaaagggaaagtcatgcttaaagaatacagtggacgcaagattgaagtagagcacatttttaaatggataactgctcatgcagcttctcggatcaaaaccatttataatgctgaacacttgaaagaagaatggaataaaagtgatcagtattggttaaaaatatacctatttgcaaaccttgaccagcccccagctttcttctctgcactaagtataaagtttactggaagagttgagtttatttttgttaatgtagaaaattgggacaacaagagttatatgacagatattggcatatataatatgccatcatacatacttagaactcctgaaggaatttacaggtatggaaaccacacaggcgaatttatatcccttcaggccatggattcatttttgcgctcattacaacccgaggtaaatgatctgtttgttttgagcttggttctagttaatcttatggcttggatggacttatttattacacaaggagctaccataaagcgatttgtggttctcataagcactttagggacatataattctctattaattatttcctggctacctgtgttgggctttttacagctaccttacttagatagcttttatgaatatagcttaaaattgttgagatattccaatacaaccacactggcttcatgggtaagggcagactggatgttttactcttcacacccagccctgtttctcagtacataccttggtcatggtttactaattgattactttgagaagaagagaaggcgcaacaacaacaatgatgaagtcaatgccaataacttagaatggttatcaagtctgtgggactggtacaccagctacctcttccacccgattgcttcttttcagaactttcctgtagaatctgattgggacgaagaccctgacttattcttggagcgcttagctttccctgacctttggcttcaccctctgataccaactgattatattaaaaacttaccaatgtggcgatttaaatgtcttggagtccagtctgaagaggaaatgtcggaggggtctcaagatactgaaaatgactcggaaagtgagaacacagacactttgagtagtgagaaggaagtatttgaagataagcaaagcgtacttcacaattctccaggaacagcaagtcactgtgatgctgaggcttgttcatgtgccaataaatattgtcagaccagcccatgtgaaaggaaggggaggtcatatggatcatataacactaatgaagatatggaacctgattggttaacttggcctgctgatatgctgcactgtactgaatgtgttgtttgcctagagaattttgaaaatggatgtttgctaatggggttgccttgtggtcatgtgtttcatcagaattgcattgtgatgtggttggctgggggccgacattgttgccctgtttgccggtggccttcttataaaaaaaagcagccatatgcacaacaccagcccttgtcaaatgatgtcccatcttaaccatgtgcaatttgtcctttataagctttgagtatcttacagcttgcctttttaatgttagtcacaatgtttttgtggtttgaagtttagtttaatgttagtgcagtgacgggaaatacacattatgctaatgttgatgacagaatttatttggttgccttgtgtgttaattgaatgcatacctaattgtaaaatttttttatttacaacattggaaattcagaagttaatgtttttttgtaagcacaaaagaagtattatagaaatttatcctagcaagactttacaagataggatcaaattctaatggaattgagccggtttcttatcctaaatgtttcctccctttttacaatctctgtccagcacctcttggttaaataatgtatgctgtgagacatgaaattaaaacagacctatgaaataaattattttaaaaccagaagatt

SEQ ID NO: 7856 - protein, 681 aa, Homo sapiens
MSRLRPRPPLIHGCGGFFEAIVWYETGIFATQLVDPVALSFKKLKTILECRGLGYSGLPEKKDVRELVEKSGDLMEGELYSALKEEEASESVSSTNFSGEMHFYELVEDTKDGIWLVQVIANDRSPLVGKIHWEKMVKKVSRFGIRTGTFNCSSDPRYCRRRGWVRSTLIMSVPQTSTSKGKVMLKEYSGRKIEVEHIFKWITAHAASRIKTIYNAEHLKEEWNKSDQYWLKIYLFANLDQPPAFFSALSIKFTGRVEFIFVNVENWDNKSYMTDIGIYNMPSYILRTPEGIYRYGNHTGEFISLQAMDSFLRSLQPEVNDLFVLSLVLVNLMAWMDLFITQGATIKRFVVLISTLGTYNSLLIISWLPVLGFLQLPYLDSFYEYSLKLLRYSNTTTLASWVRADWMFYSSHPALFLSTYLGHGLLIDYFEKKRRRNNNNDEVNANNLEWLSSLWDWYTSYLFHPIASFQNFPVESDWDEDPDLFLERLAFPDLWLHPLIPTDYIKNLPMWRFKCLGVQSEEEMSEGSQDTENDSESENTDTLSSEKEVFEDKQSVLHNSPGTASHCDAEACSCANKYCQTSPCERKGRSYGSYNTNEDMEPDWLTWPADMLHCTECVVCLENFENGCLLMGLPCGHVFHQNCIVMWLAGGRHCCPVCRWPSYKKKQPYAQHQPLSNDVPS

SEQ ID NO: 7857 - DNA, 2530 bp, Homo sapiens
tcataggtctgttttaatttcatgtctcacagcatacattatttaaccaagaggtgctggacagagattgtaaaaagggaggaaacatttaggataagaaaccggctcaattccattagaatttgatcctatcttgtaaagtcttgctaggataaatttctataatacttcttttgtgcttacaaaaaaacattaacttctgaatttccaatgttgtaaataaaaaaattttacaattaggtatgcattcaattaacacacaaggcaaccaaataaattctgtcatcaacattagcataatgtgtatttcccgtcactgcactaacattaaactaaacttcaaaccacaaaaacattgtgactaacattaaaaaggcaagctgtaagatactcaaagcttataaaggacaaattgcacatggttaagatgggacatcatttgacaagggctggtgttgtgcatatggctgcttttttttataagaaggccaccggcaaacagggcaacaatgtcggcccccagccaaccacatcacaatgcaattctgatgaaacacatgaccacaaggcaaccccattagcaaacatccattttcaaaattctctaggcaaacaacacattcagtacagtgcagcatatcagcaggccaagttaaccaatcaggttccatatcttcattagtgttatatgatccatatgacctccccttcctttcacatgggctggtctgacaatatttattggcacatgaacaagcctcagcatcacagtgacttgctgttcctggagaattgtgaagtacgctttgcttatcttcaaatacttccttctcactactcaaagtgtctgtgttctcactttccgagtcattttcagtatcttgagacccctccgacatttcctcttcagactggactccaagacatttaaatcgccacattgagactatacgtaacatggacctggaaaagcttaaaaatatgaagaggattgaactggctgccatctgtgcatcttcatttatgaaaacactcctcatagacttaaaacaaatgacagagaacaaattagtcagcttcttctaaaatacagtggtctccccttaccctcagtttcactttctgcagtcaactgcagtccgaaaatactacatacaattagatattcggagagagagacaccacatttacataaatgttatttcagtatactgttataattgttctatttttattagttgttgttgttactgtgcctaacttacacattaaactttatcacaggtatgtatgtataggaaaaaacatagactatataggatttggtactatccacggtttcaggcatccactgggggtcttggaacgcatccccctcagataaggggggactactgtaaacagaaaataacaacaattcaaattgttaaaaacaattcttgaaagttatcctttacaatagattaatatatatgatctgagctgaaagaatggcaagcaatggagacaatatttctcttctgtttctagtagatattttcaattttaagcatagttttaaaaagtacaaccctcttttaagggcttaaaccaaggtggctgtgctgattggcttagctggctagttcacagtgccaaggacagggtttcaatctcattcttctcagttgtcctgccagagattgttctttcagaccaggccagccatttgacagatgtaagccactggcctcaaggaacacaagccagacagtggtggtcaatgcaaaccttgagcatcactggaaaaattaagcaggtgtcctactgcattatttccatacatagaaaaaccacagaaatacattctatttttaaagagttgtttttcaactattaatacctataaggtttaaaaatattttcagagaaaaaaaatttagcaactagaatttataatgctaccatttactatcattatttgtccttcacttcatttgtcaccttaccagagaattccttgccactctcatctccttaatctgcttatttttcttcttactactttccactaactgatgttatattaaatatttatttatttggtgtctgcctctcccaactagaatgtgagctgcctgacagagcaaggccttagcttggtgtgtgtttctggtatatcttcagggcccagaacagggcctggcacacccacaactgaataaacttttgatgaattctgtcacatatttattacaggagcttaattcatggatatctttaacaggacatcaaaaacagtagatcatttacaagccaagaacatactgctaactattgaaccagaatgtatttgttgtctataggcagcagcctatatagcaaaagaactcaagacttttgacatagcccttccaagtttcaaaggtgtgcaacatcttcaccatttatttccatgggatcattcaatgtgggtgacatttagacactgaaagcagggcagtgggactggctattcaattcatcctcagtaataaaatctaaaattatc

SEQ ID NO: 7858 - protein, 87 aa, Homo sapiens [sequence omitted]

SEQ ID NO: 7859 - DNA, 1406 bp, Homo sapiens
taggaatatatacttttcagaccatttcagttaaaacagtaatgatattaatggaatctgtcttattaaggtagtgaatcaactcaacaagaagctaagagtcacagtctgtgattttgagtcacctagacagttttccagagtcatcactaaccttgtcttaagacatagcgtgttgtcttcatttatcttaaactatatcacagaatccctgagataaaattagtcatattatcattatacagccatatgctacctacgtcaagactcttctcttcatctgatcatatgatgtgtaatatgtttatttaataaaatataatccatgctaagtaaagcataacatctatgacttttacatcaatattctgagtagcaaaatgcgaagtcagatatttattactatgcatatacaaatctgtaacaaataaaacgtttccatgtggtagattgtcttttttacaactttattgaggtaaattttacttaaaaatttcacatggtaggttttggaaaaaaaaatactttttaaaaacaaaagattaactcttctgtgtggtacatgaaaaactaactaaaaccaaaaacaaaaggcagcctgggcgacatggtgagaccccaactctacaaaaaattcttttaaaacttagcctcccaagtagctgggattacaggcacgcgttgccatgcccagctaatttttatatttttggtagagatggggtttcaccatgttggccaggatggtctcaatctcctgactttgtgatctgcccaccttggcctcccaaagtgctgggattacaggtgtgagccactgcacccagcctgttttcagtttttaatatttcttttctctcattacctacttttttaagggaagatggatatcacaaatatcctagcaagaacctgtcaatagacaggtttccaaaaggaagagtcatgatcctactgcataaatctaaatgaatgatttaattttagttaaattcttctgaatataatctgctgtaaaatggggatcattcttgaagtgaacctcttaatctaaatacttcctgtttttgtttcctcttgttaaatactccccttcatgatcttcactgaagaaataagagaatacaaaaatatatggggcttgctgttgctcttttcttggttggcttttgtgcagattactttgtagcagtcaggcattgtggtagttgttaattaaatgggtaagcatgactcctaccctcaaggagcttgcaccaaaccagtgactcagccttaggataatctgttttcttctcttttctccacccatctggattctaaccatccttcaagacctagttcaattcctaaaccattcatgaaatctgcaccagcccaaactttgaacttcttttgcattattt

SEQ ID NO: 7860 - protein, 30 aa, Homo sapiens
MIFTEEIREYKNIWGLLLLFSWLAFVQITL

SEQ ID NO: 7861 - DNA, 2913 bp, Homo sapiens
gctgatacacggttgtggagggtacggccgcggtctccggaggtggcgggggtgttggggacgggtgctgcgaccggcactgcccatccgagcgggacgggcgctgagtggccgggaggcagccgggtagccgcctggaggagcagtctcggggcctattattggttttttccctccgagaccgattccatctgcagagaccgcgacgccccatcctgggccgggccgcagtgcccgcccgcctgagaggcgccgcccgccagccggcccgagcgaacctggagccgccgccgtgcccgccgctcttctcgcggagcctgggcggtcggcggggcctggggcctgggcttcgggcgcggcgttgcggcggccgctcctccccgcgcagaacacgctgggccccgggcctggcccggccgagcgccgcgccctcctgacccgcggccgcgggagtccggcccccacggcccctcgggccccggcctgccgcccggatccccgcctcctgggcggatctgagttattttttggtctccccctcccccttgagatcgcggcaccggagggccgaccccgccacctgggtcagtgcccgccccgggggaagcgtccctcgttttgttcttccccgcgagctctccccgcgcccctctcctttctgtgcttaatggatgggggttttgagtttttcccctttatttttgtcggctcttgactgggaggcccggcgcgaggctctgcgtctctgcgtccctcgtcgccgcctcgcgcccgcgcggatcccgtcacctgcttccccgccggggatggccggccagtgacggcgccgggtggcccgcgcgtggacacggggccctcgcccaagctgccaccgagccgcggcccccgccctcgacccttctctctcccgtattccgagctctctggaaagagaggaaactccagggaagatgtggctgaagctttttttcttgctcctctatttcctggtcctgttcgtcctggccaggttttttgaggccattgtgtggtatgaaactggcatctttgccacccagctggtggatccggtggcgctgagcttcaagaagctgaagaccattttggagtgccgggggttgggctactcagggttgcccgagaagaaggatgtccgggagctggtggaaaagtcaggtgacttgatggagggtgagctctattctgctctcaaggaagaagaagcatccgaatcggtttctagtaccaatttcagtggtgaaatgcacttctatgagcttgtggaagacacaaaagatggcatctggctggttcagtgatgctcaaggtttgcattgaccaccactgtctggcttgtgttccttgaggccagtggcttacatctgtcaaatggctggcctggtctgaaagaacaatctctggcaggacaactgagaagaatgagattgaaaccctgtccttggcactgtgaactagccagctaagccaatcagcacagccaccttggtttaagcccttaaaagagggttgtactttttaaaactatgcttaaaattgaaaatatctactagaaacagaagagaaatattgtctccattgcttgccattctttcagctcagatcatatatattaatctattgtaaaggataactttcaagaattgtttttaacaatttgaattgttgttattttctgtttacagtagtccccccttatctgagggggatgcgttccaagacccccagtggatgcctgaaaccgtggatagtaccaaatcctatatagtctatgttttttcctatacatacatacctgtgataaagtttaatgtgtaagttaggcacagtaacaacaacaactaataaaaatagaacaattataacagtatactgaaataacatttatgtaaatgtggtgtctctctctccgaatatctaattgtatgtagtattttcggactgcagttgactgcagaaagtgaaactgagggtaaggggagaccactgtattttagaagaagctgactaatttgttctctgtcatttgttttaagtctatgaggagtgttttcataaatgaagatgcacagatggcagccagttcaatcctcttcatatttttaagcttttccaggtccatgttacgtatagtctctgtaatgtgaacagaatttattttagttttcaaggtagcaacatacatatgacatctttaccaatgacacactatgaaatacatgtagaaccaagtgctcttttttctaagttattcctaacattgtttttctcctttgtccctaacccaagctcatatctttcattagctattcatttaacagttttgtggattctttggccccagtcttcatagcattacaaatagaagatggttacttttctttcaaaagacccttggtcagagaggcagatggcacagtggataggcttctgaagtggagaagttagcataatttatgggttttatggatttatcctcctcctaacatttctgtttctccgttttgacttttgtcatagttcaaagaaggacatatttgttccctactggctgtgttacatcatatggaatttaaagtcactggaattgaggtagcagtgagaagcatcatatgatttaaaataaagctttgggtcaatatttactgaagtattacatcaatatatttcctgtttggctgacaagagttaatagctgattttaaacttgtttatctttgctcctagacaaaagttttgttcgaggagattctaaattacgtatttctttcttgatactgctatggaggtgaagcacatagcaagccactttatcttatattttgtattggtaaaaaattttataaattctatgtaagaatacaaaaaaattaaaagaccactgttttttgtcaa

SEQ ID NO: 7862 - protein, 122 aa, Homo sapiens
MWLKLFFLLLYFLVLFVLARFFEAIVWYETGIFATQLVDPVALSFKKLKTILECRGLGYSGLPEKKDVRELVEKSGDLMEGELYSALKEEEASESVSSTNFSGEMHFYELVEDTKDGIWLVQ

SEQ ID NO: 7863 - DNA, 754 bp, Homo sapiens
gaggaagttaagctttaaaataaagaacagggagctgaacttactgataccagaactcattgtacttaacaatttacaggctaaaacctttgaagaggaatttattatatcctacaactgggttatatggctttgacaccagcacctctctatgaagaaaagagtgtgttgtgaacgaagtcagaatttcctgtgttccctttgccgctcctggagttcactggttctccttccagggaacccagccttagatgattaaaaaaattgaggagggcctgaagaagcagggcagcagtgctctggaggtggcagaatcacagctggtgttaacgaggaaggacaggaaagaggctcacaatcgcagcaggggctgggcctggagaaggtattctgtggcaagttggattttctcacagcaccgatacagtaggtaggtgcgtgctgacggcttaatcttaactctccttttttattgaccataaatgccatatttaaatcaactataaatgatacaattacatactgcccagtggtaagctttcaaaatgtaaatcagtctgggaatacagaaatcgattataagtattttcaatgatctttgtttaactgtttaggggactccccggaagtgggcttgtgtaagtgtgggaaatgtgggaggaaagggctagaaaagggaagaggagcttgggctgagagggaagaatccagggggactgtaggtggcagggtgtgtgtgtgtgcacctcctggc

SEQ ID NO: 7864 - protein, 60 aa, Homo sapiens
MIKKIEEGLKKQGSSALEVAESQLVLTRKDRKEAHNRSRGWAWRRYSVASWIFSQHRYSR

SEQ ID NO: 7865 - DNA, 2487 bp, Homo sapiens
ggcccacaccattagagtggcggcgcgtgtgggcgcccgtcgcgttcctccgcccgttctcgccgggtcgcaccccccaccccgagggtgtacttggtacggcccgcgccgcctcctttcctcgcccgggtggccatccccctccccccagtcggcggcgcttggtgccgcccgggagaaccaggtcatcggtcggttcccgtgaaaacaaaaacaatcggccgcgccgtcgcaggcacccgaacgtcgcgagcggggcctggggacgcggagccgagtgcagcgagcgaacgggagcagcggcgactcgccggggggctagggcgccatggggcaggcgggctccggctgcgcggggctcccccggcgccgcggctagtgcgcccgccgcctcggccgcctcagcctcccgcgccgcccgcttggggaacgaggagcaggacgcggcctcggtggggcccgggccgaacggctgcggacacctgggcgccgaggagccgagcgccgccgcctccggcatggatcagtgcgtgacggtggagcgcgagctggagaaggtgctgcacaagttctcaggctacgggcagctgtgcgagcgcggcctggaggagctcatcgactacaccggcggcctcaagcacgagatcctgcagagccacggccaagatgctgaattatcagggacactttcacttgttttgacacagtgctgtaaaagaataaaggatactgttcaaaaattggcctccgaccacaaagacatccacagcagtgtttctcgggttggaaaagccattgataagaattttgattctgacattagcagtgtgggaatagatggctgctggcaggcagacagccaaaggcttctcaatgaggtgatggtggagcacttctttcgacaaggaatgctggatgtggctgaggagctctgtcaggaatctggtctttctgtagacccaagtcagaaggaaccatttgtggagttaaatagaatattagaggcattaaaggtcagagttctgagacctgctctggagtgggcagtgtcaaaccgggaaatgcttatagctcaaaacagctccttggaatttaagctacacagactgtattttattagcttgttaatgggtggaaccacaaatcagcgagaggcattacaatatgctaaaaattttcagccatttgccctaaatcatcaaaaagacattcaggttttgatgggaagccttgtgtacctgagacaagggattgagaactcaccatatgttcacctacttgatgcaaaccagtgggctgatatctgtgacatctttacacgggatgcttgtgccctcctggggctctccgtggagtcccctctcagtgtcagtttctcagcaggttgtgtggcgctgccagctttaattaacatcaaagccgtgattgaacagaggcagtgtactggagtttggaaccagaaagatgaattacctattgaagtggaccttggtaaaaagtgctggtatcactctatatttgcctgccccattcttcgtcagcaaacaacagataacaatccacccatgaaattggtctgtggtcatattatatcaagagatgccctgaataaaatgtttaatggtagcaaattaaaatgtccctactgtccaatggaacaaagtccaggagatgccaaacagatatttttctgaagagataactttagtttgcaatttgtaagtgaaactgaatcgtgggtgcatttcagaagagaacgttccatataatgcagctaaccaaggactcctgtgtttctataagctaatgctccagaaactttgccaacctgttagtgtacacacactgaggggagtgctcccggtgaatattatcatagggctttattatattcttggtcttcatttctgatcaagtaaatacaccagcagttgtcattcaatgcaggtttttgtacttaattatatggtgatttttttactttttaagagcagaaacggaaattgacctccccgccatgtgtttaatattcctcctgcttttacttttgtcattttcttgataatcgtaagccttgagagtgtttgtgaaaaagttttatttcctgttatgtatacataattaaatgaaaattcttcagaaaaagtttgataaattgaattgtggttatgaaactaatttgcatttttatttgcttaagaaagaaagctgtgatagattccagatatgctttttgatgttttcctctgctccagctccaagaagtcagcacacctgcattttagctctgcatgcagccccagcaggctgcgtgtttaagaatttcattgtttaactggctggtgtgagaagtcttccgttagcatagagtggaaggagtactattgtttggttgggtttttgtttgtttgttttttgtttttgcttttattgccaagaggtgcttgttttaaaagtatgtttaataaaatgaaattctaaagttag

SEQ ID NO: 7866 - protein, 391 aa, Homo sapiens; identical to SEQ ID NO: 532

SEQ ID NO: 7867 - DNA, 3596 bp, Homo sapiens
ggcccacaccattagagtggcggcgcgtgtgggcgcccgtcgcgttcctccgcccgttctcgccgggtcgcaccccccaccccgagggtgtacttggtacggcccgcgccgcctcctttcctcgcccgggtggccatccccctccccccagtcggcggcgcttggtgccgcccgggagaaccaggtcatcggtcggttcccgtgaaaacaaaaacaatcggccgcgccgtcgcaggcacccgaacgtcgcgagcggggcctggggacgcggagccgagtgcagcgagcgaacgggagcagcggcgactcgccggggggctagggcgccatggggcaggcgggctccggctgcgcggggctcccccggcgccgcggctagtgcgcccgccgcctcggccgcctcagcctcccgcgccgcccgcttggggaacgaggagcaggacgcggcctcggtggggcccgggccgaacggctgcggacacctgggcgccgaggagccgagcgccgccgcctccggcatggatcagtgcgtgacggtggagcgcgagctggagaaggtgctgcacaagttctcaggctacgggcagctgtgcgagcgcggcctggaggagctcatcgactacaccggcggcctcaagcacgagatcctgcagagccacggccaagatgctgaattatcagggacactttcacttgttttgacacagtgctgtaaaagaataaaggatactgttcaaaaattggcctccgaccacaaagacatccacagcagtgtttctcgggttggaaaagccattgataagaattttgattctgacattagcagtgtgggaatagatggctgctggcaggcagacagccaaaggcttctcaatgaggtgatggtggagcacttctttcgacaaggaatgctggatgtggctgaggagctctgtcaggaatctggtctttctgtagacccaagtcagaaggaaccatttgtggagttaaatagaatattagaggcattaaaggtcagagttctgagacctgctctggagtgggcagtgtcaaaccgggaaatgcttatagctcaaaacagctccttggaatttaagctacacagactgtattttattagcttgttaatgggtggaaccacaaatcagcgagaggcattacaatatgctaaaaattttcagccatttgccctaaatcatcaaaaagacattcaggttttgatgggaagccttgtgtacctgagacaagggattgagaactcaccatatgttcacctacttgatgcaaaccagtgggctgatatctgtgacatctttacacgggatgcttgtgccctcctggggctctccgtggagtcccctctcagtgtcagtttctcagcaggttgtgtggcgctgccagctttaattaacatcaaagccgtgattgaacagaggcagtgtactggagtttggaaccagaaagatgaattacctattgaagtggaccttggtaaaaagtgctggtatcactctatatttgcctgccccattcttcgtcagcaaacaacagataacaatccacccatgaaattggtctgtggtcatattatatcaagagatgccctgaataaaatgtttaatggtagcaaattaaaatgtccctactgtccaatggaacaaagtccaggagatgccaaacagatatttttctgaagagataactttagtttgcaatttgtaagtgaaactgaatcgtgggtgcatttcagaagagaacgttccatataatgcagctaaccaaggactcctgtgtttctataagctaatgctccagaaactttgccaacctgttagtgtacacacactgaggggagtgctcccggtgaatattatcatagggctttattatattcttggtcttcatttctgatcaagtaaatacaccagcagttgtcattcaatgcaggtttttgtacttaattatatggtgatttttttactttttaagagcagaaacggaaattgacctccccgccatgtgtttaatattcctcctgcttttacttttgtcattttcttgataatcgtaagccttgagagtgtttgtgaaaaagttttatttcctgttatgtatacataattaaatgaaaattcttcagaaaaagtttgataaattgaattgtggttatgaaactaatttgcatttttatttgcttaagaaagaaagctgtgatagattccagatatgctttttgatgttttcctctgctccagctccaagaagtcagcacacctgcattttagctctgcatgcagccccagcaggctgcgtgtttaagaatttcattgtttaactggctggtgtgagaagtcttccgttagcatagagtggaaggagtactattgtttggttgggtttttgtttgtttgttttttgtttttgcttttattgccaagaggtgcttgttttaaaagtatgtttaataaaatgaaattctaaagttagaagtgttcttaagttgatatttactctcttggtcttggtagccctattatatcattgcagacacagtgttgtgcatgtgtgtattgtatatgtgcaccagcatcaaacattgtgtatctggaaggaaagcagcatgttccagttctaaaatgcagttaccagacccatcactttaaatccttaaagttagaagctagcaaattttctgtagtgcagaacgtttattgctgtttttgtgtttgaatagtataatgtttgatgcctctcttctgcaaagcgtatcatctcattgactgtgaatctgtatattattctgatggatacagataatgatcttttctcttgtgaggtatcttcatttatgcactgtccaaaaatagccatgtgtaagagtctttctgtatgacgaactacatggaaaagacttctgtggacataattctgaccgaaacccatgaagttacttcagtataagaagaacgttacacggaaatcaccaaatattttgcaactttatttcttctgacatggagtgaacatcaataggaatactttcaaagaaaatgaaaacacagaagcaaagagaaatgtggcacttcacattttaaactacagatggacttggtttgagggagggggaatcacagatttggtgctaagttaattagaaactggcagcgttttacagtagtacaccagcctggatgttttttctaaaatgtttacctgggagagctggggtttgtttgtgaggagaaagagtactgtggaaaacctctgcttgagtaccatgtggccaggcctatgtggatggctactccgtgctgtgcggcttcaccagcggttgggattggcccagcttggagtgcttgtgtggtccaacctcagtctggccccatagcgacttttgccccatgattctgcttcactgttggaatcctctttgaagttccccctctctttgctaaagcagtgaaggaagagaacagagacaaactctttggactgtgaaagagaaggtagagaattccaggcaacagtctgaccaagggtgtaaaccagtttattatatatatatttttcctttgaattaaaacctagagtgttgt

SEQ ID NO: 7868 - protein, 391 aa, Homo sapiens; identical to SEQ ID NO: 532

SEQ ID NO: 7869 - DNA, 2501 bp, Homo sapiens
ggcccacaccattagagtggcggcgcgtgtgggcgcccgtcgcgttcctccgcccgttctcgccgggtcgcaccccccaccccgagggtgtacttggtacggcccgcgccgcctcctttcctcgcccgggtggccatccccctccccccagtcggcggcgcttggtgccgcccgggagaaccaggtcatcggtcggttcccgtgaaaacaaaaacaatcggccgcgccgtcgcaggcacccgaacgtcgcgagcggggcctggggacgcggagccgagtgcagcgagcgaacgggagcagcggcgactcgccggggggctagggcgccatggggcaggcgggctccggctgcgcggggctcccccggcgccgcggctagtgcgcccgccgcctcggccgcctcagcctcccgcgccgcccgcttggggaacgaggagcaggacgcggcctcggtggggcccgggccgaacggctgcggacacctgggcgccgaggagccgagcgccgccgcctccggcatggatcagtgcgtgacggtggagcgcgagctggagaaggtgctgcacaagttctcaggctacgggcagctgtgcgagcgcggcctggaggagctcatcgactacaccggcggcctcaagcacgagatcctgcagagccacggccaagatgctgaattatcagggacactttcacttgttttgacacagtgctgtaaaagaataaaggatactgttcaaaaattggcctccgaccacaaagacatccacagcagtgtttctcgggttggaaaagccattgataagaattttgattctgacattagcagtgtgggaatagatggctgctggcaggcagacagccaaaggcttctcaatgaggtgatggtggagcacttctttcgacaaggaatgctggatgtggctgaggagctctgtcaggaatctggtctttctgtagacccaagtcagaaggaaccatttgtggagttaaatagaatattagaggcattaaaggtcagagttctgagacctgctctggagtgggcagtgtcaaaccgggaaatgcttatagctcaaaacagctccttggaatttaagctacacagactgtattttattagcttgttaatgggtggaaccacaaatcagcgagaggcattacaatatgctaaaaattttcagccatttgccctaaatcatcaaaaagacattcaggttttgatgggaagccttgtgtacctgagacaagggattgagaactcaccatatgttcacctacttgatgcaaaccagtgggctgatatctgtgacatctttacacgggatgcttgtgccctcctggggctctccgtggagtcccctctcagtgtcagtttctcagcaggttgtgtggcgctgccagctttaattaacatcaaagccgtgattgaacagaggcagtgtactggagtttggaaccagaaagatgaattacctattgaagtggaccttggtaaaaagtgctggtatcactctatatttgcctgccccattcttcgtcagcaaacaacagataacaatccacccatgaaattggtctgtggtcatattatatcaagagatgccctgaataaaatgtttaatggtagcaaattaaaatgtccctactgtccaatggaacaaagtccaggagatgccaaacagatatttttctgaagagataactttagtttgcaatttataatgatcttttctcttgtgaggtatcttcatttatgcactgtccaaaaatagccatgtgtaagagtctttctgtatgacgaactacatggaaaagacttctgtggacataattctgaccgaaacccatgaagttacttcagtataagaagaacgttacacggaaatcaccaaatattttgcaactttatttcttctgacatggagtgaacatcaataggaatactttcaaagaaaatgaaaacacagaagcaaagagaaatgtggcacttcacattttaaactacagatggacttggtttgagggagggggaatcacagatttggtgctaagttaattagaaactggcagcgttttacagtagtacaccagcctggatgttttttctaaaatgtttacctgggagagctggggtttgtttgtgaggagaaagagtactgtggaaaacctctgcttgagtaccatgtggccaggcctatgtggatggctactccgtgctgtgcggcttcaccagcggttgggattggcccagcttggagtgcttgtgtggtccaacctcagtctggccccatagcgacttttgccccatgattctgcttcactgttggaatcctctttgaagttccccctctctttgctaaagcagtgaaggaagagaacagagacaaactctttggactgtgaaagagaaggtagagaattccaggcaacagtctgaccaagggtgtaaaccagtttattatatatatatttttcctttgaattaaaacctagagtgttgt

SEQ ID NO: 7870 - protein, 391 aa, Homo sapiens; identical to SEQ ID NO: 532

SEQ ID NO: 7871 - DNA, 6089 bp, Homo sapiens
ggcccacaccattagagtggcggcgcgtgtgggcgcccgtcgcgttcctccgcccgttctcgccgggtcgcaccccccaccccgagggtgtacttggtacggcccgcgccgcctcctttcctcgcccgggtggccatccccctccccccagtcggcggcgcttggtgccgcccgggagaaccaggtcatcggtcggttcccgtgaaaacaaaaacaatcggccgcgccgtcgcaggcacccgaacgtcgcgagcggggcctggggacgcggagccgagtgcagcgagcgaacgggagcagcggcgactcgccggggggctagggcgccatggggcaggcgggctccggctgcgcggggctcccccggcgccgcggctagtgcgcccgccgcctcggccgcctcagcctcccgcgccgcccgcttggggaacgaggagcaggacgcggcctcggtggggcccgggccgaacggctgcggacacctgggcgccgaggagccgagcgccgccgcctccggcatggatcagtgcgtgacggtggagcgcgagctggagaaggtgctgcacaagttctcaggctacgggcagctgtgcgagcgcggcctggaggagctcatcgactacaccggcggcctcaagcacgagatcctgcagagccacggccaagatgctgaattatcagggacactttcacttgttttgacacagtgctgtaaaagaataaaggatactgttcaaaaattggcctccgaccacaaagacatccacagcagtgtttctcgggttggaaaagccattgataagaattttgattctgacattagcagtgtgggaatagatggctgctggcaggcagacagccaaaggcttctcaatgaggtgatggtggagcacttctttcgacaaggaatgctggatgtggctgaggagctctgtcaggaatctggtctttctgtagacccaagtcagaaggaaccatttgtggagttaaatagaatattagaggcattaaaggtcagagttctgagacctgctctggagtgggcagtgtcaaaccgggaaatgcttatagctcaaaacagctccttggaatttaagctacacagactgtattttattagcttgttaatgggtggaaccacaaatcagcgagaggcattacaatatgctaaaaattttcagccatttgccctaaatcatcaaaaagacattcaggttttgatgggaagccttgtgtacctgagacaagggattgagaactcaccatatgttcacctacttgatgcaaaccagtgggctgatatctgtgacatctttacacgggatgcttgtgccctcctggggctctccgtggagtcccctctcagtgtcagtttctcagcaggttgtgtggcgctgccagctttaattaacatcaaagccgtgattgaacagaggcagtgtactggagtttggaaccagaaagatgaattacctattgaagtggaccttggtaaaaagtgctggtatcactctatatttgcctgccccattcttcgtcagcaaacaacagataacaatccacccatgaaattggtctgtggtcatattatatcaagagatgccctgaataaaatgtttaatggtagcaaattaaaatgtccctactgtccaatggaacaaagtccaggagatgccaaacagatatttttctgaagagataactttagtttgcaatttgtaagtgaaactgaatcgtgggtgcatttcagaagagaacgttccatataatgcagctaaccaaggactcctgtgtttctataagctaatgctccagaaactttgccaacctgttagtgtacacacactgaggggagtgctcccggtgaatattatcatagggctttattatattcttggtcttcatttctgatcaagtaaatacaccagcagttgtcattcaatgcaggtttttgtacttaattatatggtgatttttttactttttaagagcagaaacggaaattgacctccccgccatgtgtttaatattcctcctgcttttacttttgtcattttcttgataatcgtaagccttgagagtgtttgtgaaaaagttttatttcctgttatgtatacataattaaatgaaaattcttcagaaaaagtttgataaattgaattgtggttatgaaactaatttgcatttttatttgcttaagaaagaaagctgtgatagattccagatatgctttttgatgttttcctctgctccagctccaagaagtcagcacacctgcattttagctctgcatgcagccccagcaggctgcgtgtttaagaatttcattgtttaactggctggtgtgagaagtcttccgttagcatagagtggaaggagtactattgtttggttgggtttttgtttgtttgttttttgtttttgcttttattgccaagaggtgcttgttttaaaagtatgtttaataaaatgaaattctaaagttagaagtgttcttaagttgatatttactctcttggtcttggtagccctattatatcattgcagacacagtgttgtgcatgtgtgtattgtatatgtgcaccagcatcaaacattgtgtatctggaaggaaagcagcatgttccagttctaaaatgcagttaccagacccatcactttaaatccttaaagttagaagctagcaaattttctgtagtgcagaacgtttattgctgtttttgtgtttgaatagtataatgtttgatgcctctcttctgcaaagcgtatcatctcattgactgtgaatctgtatattattctgatggatacagataatgatcttttctcttgtgaggtatcttcatttatgcactgtccaaaaatagccatgtgtaagagtctttctgtatgacgaactacatggaaaagacttctgtggacataattctgaccgaaacccatgaagttacttcagtataagaagaacgttacacggaaatcaccaaatattttgcaactttatttcttctgacatggagtgaacatcaataggaatactttcaaagaaaatgaaaacacagaagcaaagagaaatgtggcacttcacattttaaactacagatggacttggtttgagggagggggaatcacagatttggtgctaagttaattagaaactggcagcgttttacagtagtacaccagcctggatgttttttctaaaatgtttacctgggagagctggggtttgtttgtgaggagaaagagtactgtggaaaacctctgcttgagtaccatgtggccaggcctatgtggatggctactccgtgctgtgcggcttcaccagcggttgggattggcccagcttggagtgcttgtgtggtccaacctcagtctggccccatagcgacttttgccccatgattctgcttcactgttggaatcctctttgaagttccccctctctttgctaaagcagtgaaggaagagaacagagacaaactctttggactgtgaaagagaaggtagagaattccaggcaacagtctgaccaagggtgtaaaccagtttattatatatatatttttcctttgaattaaaacctagagtgttgtatttttctttctttctttttttttttttttttttttaccctttttctccttaggccaagtttagcttattcttatctttccacccaaacacctacacaacgtttaggcttcctgtaaggtttgaatgagacagatgtactctgaaggctggtggtaaatgtgtttgatgaccagactcttcatacagtcggcttgggccactttaaaggacaaaagccagagctcagctttatccctctcccagtgctgggagccaaaaaactgttgacggttttttgtgcagctcaagaaaactttgaaaagaacatgctttaactgaagcattggactctgcagctttctgtgtaaggcccgtgtactcccactgggcagggtgaggaccaaaaatctgaaactcttatgaatctgacatattatatggaaattatatcttgtgaccgtcttcaagtgcatggacttaaaattcatgagagactaaatgtgagggagaggtggatttaaagaggccagaccttaaccaaagatgctgagatacagcattctgtcccccctgccctagaaactccataaatgctgtcacaaccctatcatcgctgatgctttctgcatgtcagcagtccaggaggatgctttttgtctctctttgcctccactttacaaaagataatatgatagaggcaacgtttataacagtcacatttaattataatgtacatcaaaggcagaatttcagaatggtttcttaaatttccttgggaaccgtttccacatatcagttatagacaaaggccatgggactatgctaaaccaataaaaccttattagcaaatctttagattctgacttagccagagcatctgagtgttcaagtacagttttacagtggctaaggttgtctcttgatcttttttctccgttgtgtgatcacagatgctatttctgttttattggtgattatacgagacttctaatacataaatgaacgggtattggtgcctctttattttaaaaaatttgaagaaaagagccacctcatattcatagggtgtgtattttttgagtgtgagcatttaattgaaaataagaaagctatgaagtaaatgttaacttctctgtagcagctaatgcatagagacactaaaacccacaccacattttgtgggaaatgaggatcctgatcctcttttgtcctctccaggtagtctcgcaggttatgcagcttaagttcagtcttctttatgctgcgattgatttccacctcagtggcttagcctttgggacagtggatactgcaacagccaagaactcttggttatccgcacaagctgctggtagactacattagccctctggttttccagctcaacctctgataaagtggactgagagccacgctgctcagtctgtttcgtcagccgactcaggttattttcagggaaggcatggaggcatagtttggttagtttcatcactaggatgtataaggtgacgacacaaaccaaatacctttctttcatcacttaactatacgtactttatctctggtaacactagaatgctgtggtcttgagggaatgttagcaaggaacacatagaagatttggtgtttcataagcctgtctaggtgtggcaggttttgtgtggtacactgatgtttaccataagcaggtacaagcttcatgaaccgttcttaatgaactataattgaatagataccaaaaatagaatgacaaatgtattttaatagcagatgaggcagttttaggatgaattttccactgttgattttacttcaagacatagcaagagaaacaaaattttgttttcaagacatttccactgcagtttcaagctgtagtgggcatatgcttcatttacttccaaagaggcaaaagcagctggaattggcttacagcacatgctttgtttcatgttatgggtgaggacctacatacactcttactttagcagtcacttaaccttctccagcaaggcagttgtggggttcactaggatttagtgcctgatcttttttttgggaaggggcgggaatgaatgtgttggggctgggagggaagcagaagaaaatgggagtgtgagtgagtgtgcatgtgtctgaagttcaccattgcccccacctgcacctagcaaggaacaggtgtttgatgtattttgctcatgactgcagtatgcatgtatttttttccttctctgtgttttctaaacttacactaaaggattcatcaaatcatcttgttcagatggctcaggattgtatttattttgcttaccccgtgctcttgggttctatagtatttctataattatgtaacgagaatagtgttgcactgtaatctatcatatagagctatatgtatggaaaattttgatcaattttttaagaaatgtatcctgtttgcaaaggcacagtaaagttgcatcttatagactataggcaataaagctaacaataaaccttatttaacacaaacc

SEQ ID NO: 7872 - protein, 391 aa, Homo sapiens; identical to SEQ ID NO: 532

SEQ ID NO: 7873 - DNA, 6324 bp, Homo sapiens
ggcccacaccattagagtggcggcgcgtgtgggcgcccgtcgcgttcctccgcccgttctcgccgggtcgcaccccccaccccgagggtgtacttggtacggcccgcgccgcctcctttcctcgcccgggtggccatccccctccccccagtcggcggcgcttggtgccgcccgggagaaccaggtcatcggtcggttcccgtgaaaacaaaaacaatcggccgcgccgtcgcaggcacccgaacgtcgcgagcggggcctggggacgcggagccgagtgcagcgagcgaacgggagcagcggcgactcgccggggggctagggcgccatggggcaggcgggctccggctgcgcggggctcccccggcgccgcggctagtgcgcccgccgcctcggccgcctcagcctcccgcgccgcccgcttggggaacgaggagcaggacgcggcctcggtggggcccgggccgaacggctgcggacacctgggcgccgaggagccgagcgccgccgcctccggcatggatcagtgcgtgacggtggagcgcgagctggagaaggtgctgcacaagttctcaggctacgggcagctgtgcgagcgcggcctggaggagctcatcgactacaccggcggcctcaagcacgagatcctgcagagccacggccaagatgctgaattatcagggacactttcacttgttttgacacagtgctgtaaaagaataaaggatactgttcaaaaattggcctccgaccacaaagacatccacagcagtgtttctcgggttggaaaagccattgataagaattttgattctgacattagcagtgtgggaatagatggctgctggcaggcagacagccaaaggcttctcaatgaggtgatggtggagcacttctttcgacaaggaatgctggatgtggctgaggagctctgtcaggaatctggtctttctgtagacccaagtcagaaggaaccatttgtggagttaaatagaatattagaggcattaaaggtcagagttctgagacctgctctggagtgggcagtgtcaaaccgggaaatgcttatagctcaaaacagctccttggaatttaagctacacagactgtattttattagcttgttaatgggtggaaccacaaatcagcgagaggcattacaatatgctaaaaattttcagccatttgccctaaatcatcaaaaagacattcaggttttgatgggaagccttgtgtacctgagacaagggattgagaactcaccatatgttcacctacttgatgcaaaccagtgggctgatatctgtgacatctttacacgggatgcttgtgccctcctggggctctccgtggagtcccctctcagtgtcagtttctcagcaggttgtgtggcgctgccagctttaattaacatcaaagccgtgattgaacagaggcagtgtactggagtttggaaccagaaagatgaattacctattgaagtggaccttggtaaaaagtgctggtatcactctatatttgcctgccccattcttcgtcagcaaacaacagataacaatccacccatgaaattggtctgtggtcatattatatcaagagatgccctgaataaaatgtttaatggtagcaaattaaaatgtccctactgtccaatggaacaaagtccaggagatgccaaacagatatttttctgaagagataactttagtttgcaatttgtaagtgaaactgaatcgtgggtgcatttcagaagagaacgttccatataatgcagctaaccaaggactcctgtgtttctataagctaatgctccagaaactttgccaacctgttagtgtacacacactgaggggagtgctcccggtgaatattatcatagggctttattatattcttggtcttcatttctgatcaagtaaatacaccagcagttgtcattcaatgcaggtttttgtacttaattatatggtgatttttttactttttaagagcagaaacggaaattgacctccccgccatgtgtttaatattcctcctgcttttacttttgtcattttcttgataatcgtaagccttgagagtgtttgtgaaaaagttttatttcctgttatgtatacataattaaatgaaaattcttcagaaaaagtttgataaattgaattgtggttatgaaactaatttgcatttttatttgcttaagaaagaaagctgtgatagattccagatatgctttttgatgttttcctctgctccagctccaagaagtcagcacacctgcattttagctctgcatgcagccccagcaggctgcgtgtttaagaatttcattgtttaactggctggtgtgagaagtcttccgttagcatagagtggaaggagtactattgtttggttgggtttttgtttgtttgttttttgtttttgcttttattgccaagaggtgcttgttttaaaagtatgtttaataaaatgaaattctaaagttagaagtgttcttaagttgatatttactctcttggtcttggtagccctattatatcattgcagacacagtgttgtgcatgtgtgtattgtatatgtgcaccagcatcaaacattgtgtatctggaaggaaagcagcatgttccagttctaaaatgcagttaccagacccatcactttaaatccttaaagttagaagctagcaaattttctgtagtgcagaacgtttattgctgtttttgtgtttgaatagtataatgtttgatgcctctcttctgcaaagcgtatcatctcattgactgtgaatctgtatattattctgatggatacagataatgatcttttctcttgtgaggtatcttcatttatgcactgtccaaaaatagccatgtgtaagagtctttctgtatgacgaactacatggaaaagacttctgtggacataattctgaccgaaacccatgaagttacttcagtataagaagaacgttacacggaaatcaccaaatattttgcaactttatttcttctgacatggagtgaacatcaataggaatactttcaaagaaaatgaaaacacagaagcaaagagaaatgtggcacttcacattttaaactacagatggacttggtttgagggagggggaatcacagatttggtgctaagttaattagaaactggcagcgttttacagtagtacaccagcctggatgttttttctaaaatgtttacctgggagagctggggtttgtttgtgaggagaaagagtactgtggaaaacctctgcttgagtaccatgtggccaggcctatgtggatggctactccgtgctgtgcggcttcaccagcggttgggattggcccagcttggagtgcttgtgtggtccaacctcagtctggccccatagcgacttttgccccatgattctgcttcactgttggaatcctctttgaagttccccctctctttgctaaagcagtgaaggaagagaacagagacaaactctttggactgtgaaagagaaggtagagaattccaggcaacagtctgaccaagggtgtaaaccagtttattatatatatatttttcctttgaattaaaacctagagtgttgtatttttctttctttctttttttttttttttttttttaccctttttctccttaggccaagtttagcttattcttatctttccacccaaacacctacacaacgtttaggcttcctgtaaggtttgaatgagacagatgtactctgaaggctggtggtaaatgtgtttgatgaccagactcttcatacagtcggcttgggccactttaaaggacaaaagccagagctcagctttatccctctcccagtgctgggagccaaaaaactgttgacggttttttgtgcagctcaagaaaactttgaaaagaacatgctttaactgaagcattggactctgcagctttctgtgtaaggcccgtgtactcccactgggcagggtgaggaccaaaaatctgaaactcttatgaatctgacatattatatggaaattatatcttgtgaccgtcttcaagtgcatggacttaaaattcatgagagactaaatgtgagggagaggtggatttaaagaggccagaccttaaccaaagatgctgagatacagcattctgtcccccctgccctagaaactccataaatgctgtcacaaccctatcatcgctgatgctttctgcatgtcagcagtccaggaggatgctttttgtctctctttgcctccactttacaaaagataatatgatagaggcaacgtttataacagtcacatttaattataatgtacatcaaaggcagaatttcagaatggtttcttaaatttccttgggaaccgtttccacatatcagttatagacaaaggccatgggactatgctaaaccaataaaaccttattagcaaatctttagattctgacttagccagagcatctgagtgttcaagtacagttttacagtggctaaggttgtctcttgatcttttttctccgttgtgtgatcacagatgctatttctgttttattggtgattatacgagacttctaatacataaatgaacgggtattggtgcctctttattttaaaaaatttgaagaaaagagccacctcatattcatagggtgtgtattttttgagtgtgagcatttaattgaaaataagaaagctatgaagtaaatgttaacttctctgtagcagctaatgcatagagacactaaaacccacaccacattttgtgggaaatgaggatcctgatcctcttttgtcctctccaggtagtctcgcaggttatgcagcttaagttcagtcttctttatgctgcgattgatttccacctcagtggcttagcctttgggacagtggatactgcaacagccaagaactcttggttatccgcacaagctgctggtagactacattagccctctggttttccagctcaacctctgataaagtggactgagagccacgctgctcagtctgtttcgtcagccgactcaggttattttcagggaaggcatggaggcatagtttggttagtttcatcactaggatgtataaggtgacgacacaaaccaaatacctttctttcatcacttaactatacgtactttatctctggtaacactagaatgctgtggtcttgagggaatgttagcaaggaacacatagaagatttggtgtttcataagcctgtctaggtgtggcaggttttgtgtggtacactgatgtttaccataagcaggtacaagcttcatgaaccgttcttaatgaactataattgaatagataccaaaaatagaatgacaaatgtattttaatagcagatgaggcagttttaggatgaattttccactgttgattttacttcaagacatagcaagagaaacaaaattttgttttcaagacatttccactgcagtttcaagctgtagtgggcatatgcttcatttacttccaaagaggcaaaagcagctggaattggcttacagcacatgctttgtttcatgttatgggtgaggacctacatacactcttactttagcagtcacttaaccttctccagcaaggcagttgtggggttcactaggatttagtgcctgatcttttttttgggaaggggcgggaatgaatgtgttggggctgggagggaagcagaagaaaatgggagtgtgagtgagtgtgcatgtgtctgaagttcaccattgcccccacctgcacctagcaaggaacaggtgtttgatgtattttgctcatgactgcagtatgcatgtatttttttccttctctgtgttttctaaacttacactaaaggattcatcaaatcatcttgttcagatggctcaggattgtatttattttgcttaccccgtgctcttgggttctatagtatttctataattatgtaacgagaatagtgttgcactgtaatctatcatatagagctatatgtatggaaaattttgatcaattttttaagaaatgtatcctgtttgcaaaggcacagtaaagttgcatcttatagactataggcaataaagctaacaataaaccttatttaacacaaaccacatccatatcctctgttcatttgattttggaaaaagtagcatatccagtagtttcagggaattcattttaactttaagaattctgatatatttaatttataaatttcggactgatataatagagttttggaaaactataagaaatgctttgttaatgtgtgtattcctatgtaaaacacatggcttttcctgtgtatatttttaaaaattaaagaaatgcacatttaaaaagtg

SEQ ID NO: 7874 - protein, 391 aa, Homo sapiens; identical to SEQ ID NO: 532

SEQ ID NO: 7875 - DNA, 4798 bp, Homo sapiens
agttggctcggcggcagcggagcggccggagctgcggtgcggaccggggccgcgcggcgtggcgcggggagcggcggcggcggcagagccagagcaacatggcgccggtgggcgggggcgggcgcccggtcggcggaccggcccgcgggcgcctcctcctggcggcgccggtgctgctggtgctgctgtgggcgctgggggcccggggccagggcagcccccagcagggcacgatcgtgggcatgaggctggcgagctgcaacaagtcgtgtgggacgaacccggatggcatcatcttcgtgtccgagggcagcaccgtgaacctgaggctgtacggctacagcctgggcaacatctccagcaacctgatctccttcaccgaggtggacgatgccgagaccctccacaagtccaccagctgcctcgagctcaccaaggacctggtcgtccagcagctggtcaacgtgagccgcgggaacacgtccggcgtgctggtggtgctcaccaagttcctccggaggagcgagagcatgaagctgtatgcactgtgcacccgggcccagcccgacgggccctggctgaagtggacggacaaggactcactgctcttcatggtggaggagcctgggaggttcctgcctctctggctgcacattctcctaattacggtgctgctggtgctgtcgggcatattttctggcctcaacctcgggcttatggccctggaccccatggagctgcgcatcgtgcagaactgtggcaccgagaaggagaggcgctatgcccgcaagattgagcccatccggcgcaagggcaactaccttctctgctcgttgctcctagggaacgtgctggtcaacacctccctcacaatccttctagacaacctcatcgggtccggcctcatggcggtggcctcctccaccattggcattgtcatctttggggagatcctacctcaggccctgtgctcccgacatgggctggctgtgggtgccaacaccatccttctcaccaaattctttatgctactcaccttccccctcagttttcccattagcaagctcctggacttttttctgggccaggagattcgcactgtttacaaccgggagaagctgatggagatgttgaaggtgacggagccctataatgacctcgtgaaagaggagctcaatatgatccagggtgccctggaactacggaccaaaactgtagaggatatcatgacccagctccaggactgcttcatgatccgcagcgatgccatcctggacttcaacaccatgtcggagataatggaaagcggctatactcgcatcccggtgttcgaagacgagcagtccaatattgtagatattctctacgtcaaagacttggcctttgtggaccccgatgactgcacccccctcaagactatcactcgcttctataaccacccggtgcactttgtcttccatgacaccaagttggatgccatgctggaggagttcaagaaggggaagtcccacctggccatcgtgcagaaggtaaacaacgagggtgagggtgaccccttctacgaggtcctgggcctggtcaccctggaggacgtgatcgaggagatcatcaagtcggagatcctggacgagtccgacatgtacactgacaaccgaagccggaagcgggtgtctgagaagaacaagcgtgacttctctgccttcaaggatgcggacaatgagctcaaagtgaaaatctccccgcagctcctcctggccgctcatcgcttcctagccacagaggtctctcagtttagcccctccctgatatcagagaagatcctgctgcggctactcaagtacccagatgtcattcaggaactcaagtttgacgagcacaataagtactacgcccgccattacctgtacacccgaaataagccggccgactacttcatcctcatcctgcaggggaaggtggaggtggaggcagggaaggagaacatgaagtttgagacgggcgccttctcctactatgggactatggccctgacctcggtcccctccgaccgttccccagcacaccccaccccactcagccgctcagcctccctcagttacccagaccgcacagacgtctcaactgcagcaaccttggcaggcagcagcaaccagtttggcagctctgtcctgggccagtacatctctgacttcagcgtccgggcactcgtggacttgcagtacatcaagatcactcggcagcagtaccagaacgggctgctggcttctcgcatggagaacagccctcagtttcccatagacgggtgcaccacccacatggagaacttggccgagaagtctgagctgcctgtggtggacgagaccacaactcttctcaacgagcgtaactccttgctgcacaaagcctcccacgagaatgccatctgacaggagggcccggggccccctgcccaccctgcgggggcctccccagtgggcccacatgaagagagggaacctgttagtccagaaaggatacggatagatagcctgtctgactgaacagccagatggcccccagcctatgggggatctggcctctgccagggacctctgagtagctctgaggtggcactgtccagccctggatagggggggcagtgggccagctaccgtaagcaaaggctgttttttactgagagaatttctaaagtaggctcatcacttttttttaaatatcattttgggaagggaagacagggttaaggaactttatttaaaaaaaaaatatttttttcctaaaaactataaaagaggaagggtttcttgtcccgggaagcaacggacataatctgttcccagccatggccttccagcttgtgtccctgattcagggagctctcccttcctcctcctcctcctcctccggaggtgggatcccagagcctgccagtggaggcttatctgttgggaggaagacagctcttcacagaagcaaagaacaaaatggcatggagatcagctgcctgagcacctgcgctgtagcttatctgacaacgctgaggccacgagctcctgggtagctgtgatcagggacatgataatctgagctatgcagaggagcacatctgttgtcaactgctgtacccagaaatctagaactctgccgacagcctctcctggtgagtcgggactcagctgaggacacatccccaccctgcctcccatctggccctttggacaactggccctttgtgacagggctgactcaagtgttaggcagggtctcaggcctttgattgctcacccctgctccccaggccctgccctcacttttaccaaaggttctccctcggcgggagggcatctgtgttggaggtgatttgtctgggttcttccttttggttccagaaggaactgtcagtcatcagcatctgcgttgttagcagtcagtaccacccccgccccacaatgacagtcaaggctgacttgttgactgaagcctttttcccagaccccttatttcgaatccccaagcttcagtccctcttgggggtggagacaagaggacatgtgggaagccacggaagcaggttctttatgtcctctcctctgtggctggcaaggctcacctggccttatccacccacttatggaacctcaggagaggagggctcctcctaaaggcatgcagcttgcagcccctctttctcacacgtgtgatcctagcgtgagaggtcatcctgcccttgctgaagttagtagtactgtactaagagctctgccctcatgtgaattcctgccctggcgcctcttccctggggctgaatcaggccctgctgcaaaactccaggcttcccagggttggggaggctgtgggaccaaggtccatgttggtccttccactgggtgcagcaggagctgggtcccgagagcctggcaggtgaaactctgcaggccttccgcctgattattatttattcactcctttcctcaccccaagtgccctgctctccaggtgcctagagtatcctaactcttaggaccagggattgtcttgcaccaagtatgcctacccctggccagtctgaggtctcctagccatagaactgactcctggaagcctggagagaaggtggtgacacccatgggttctcaactgtaaggaaaaaagacaccagacttttgttccctagtgggggaaagcccttagtcttgtacaggagcagcttgctcccaagtccttttggaagctggcagagctatattcctgacagccctgactgccaggtagagcaaaagacattggtgggggtatgtgaagcaaaaggggcaggtgcacacacctccacagtgacctctgtgcacacggttaccaccaactggctggccctcctcctcttccctggcccattgatcatcccttctcacagagggtcatcattatttccaaatattgtttgtctgatgacttcctcttcccagtgcaatttttcccttcctatttcaacctctggttcctgggatgagccataccctggaactggcccacccactgtgtcttccacgtaagggagacctttgcaaagggcatccaaatgggtaggcaggtgacagccgccgtatttattttgcataatattttaatttgtatatttttgtgatttattttggcgttatgagtttgactctcggggagttttgttgttatgactcttgtgtcttttgtcacaaaacaatgatatttgctaaacgatatatggaatttatttttgattggtaataaaaaatcaaatatgtataaatcctggtgaatctac

SEQ ID NO: 7876 - protein, 775 aa, Homo sapiens; identical to SEQ ID NO: 534

SEQ ID NO: 7877 - DNA, 1480 bp, Homo sapiens
ggtgatgttctgtgccctttgagtttaccttacttttgcagattacagagtaagccgccagcagaagcaataaagacattactgggcctttgcactgcaacatcatgcctctgaagaaaaaaaaagtgcaaacattacaatagattcagctcctttagttctcacttctgtctccacgtcaagataaaatactgacattgaaatagaatggatgacatgcttgaaatgagtcatgtgcctgaaaagtcattaacaaacaacagttccagagaaaagccaggaaaaactccccatggatttagagacagagctctcaccttcaacaggttactttttccttgtctcaggcttccttggaaaacaacctataactaactttctgggagtaaagcttcaggtggaagaacaattggatcaaacttggaaaacatgcccccagtttgtctactccattgaactttgcatgcttggagcccctggcctcagcacactcaatcgcacaagccagcctgcagcacctgtacagcaccatgggagtcccctgcagagctgcaactttgagagtgggtatagtgacgtaactcaggttcttcaagggatgaacactccaactttgaaaccactagcctgtaggtgtggacgaaaaggcagctgcatgttataaaacaatattactcatacttttggatcaagcttctttcagtcccatgggtagggaggaggggcaatttgctgaagcccactgcccttccagtactcacaagccaagggccctatgggatctgtttcacaggactcatgcttatggcagctgagcacatctgtcctgtatgtctgccagcagccacgtccctctcactcctgtgacgacagccttgactatatttagaaattccatttctgattgcatttcactgctgaatggtcctagaatcctttattgcccttgtcccatcacaagagacagccagccacagccacttttatctcaacaacatactgaatactgacagaacaaacaggcaagttgtagattcaccaggatttatacatatttgattttttattaccaatcaaaaataaattccatatatcgtttagcaaatatcattgttttgtgacaaaagacacaagagtcataacaacaaaactccccgagagtcaaactcataacgccaaaataaatcacaaaaatatacaaattaaaatattatgcaaaataaatacggcggctgtcacctgcctacccatttggatgccctttgcaaaggtctcccttacgtggaagacacagtgggtgggccagttccagggtatggctcatcccaggaaccagaggttgaaataggaagggaaaaattgcactgggaagaggaagtcatcagacaaacaatatttggaaataatgatgaccctctgtgagaagggatgatcaatgggccagggaagaggaggagggccagccagttggtggtaaccg

SEQ ID NO: 7878 - protein, 123 aa, Homo sapiens
MDLETELSPSTGYFFLVSGFLGKQPITNFLGVKLQVEEQLDQTWKTCPQFVYSIELCMLGAPGLSTLNRTSQPAAPVQHHGSPLQSCNFESGYSDVTQVLQGMNTPTLKPLACRCGRKGSCML

SEQ ID NO: 7879 - DNA, 679 bp, Homo sapiens
ggtgatgttctgtgccctttgagtttaccttacttttgcagattacagagtaagccgccagcagaagcaataaagacattactgggcctttgcactgcaacatcatgcctctgaagaaaaaaaaagtgcaaacattacaatagattcagctcctttagttctcacttctgtctccacgtcaagataaaatactgacattgaaatagaatggatgacatgcttgaaatgagtcatgtgcctgaaaagtcattaacaaacaacagttccagagaaaagccaggaaaaactccccatggatttagagacagagctctcaccttcaacaggttactttttccttgtctcaggcttccttggaaaacaacctataactaactttctgggagtaaagcttcaggtggaagaacaattggatcaaacttggaaaacatgcccccagtttgtctactccattgaactttgcatgcttggagcccctggcctcagcacactcaatcgcacaagccagcctgcagcacctgtacagcaccatgggagtcccctgcagagctgcaactttgagagtgggtatagtgacgtaactcaggttcttcaagggatgaacactccaactttgaaaccactagcctgtaggtgtggacgaaaaggcagctgcatgttataaaacaatattactcat

SEQ ID NO: 7880 - protein, 123 aa, Homo sapiens; identical to SEQ ID NO: 7878

SEQ ID NO: 7881 - DNA, 912 bp, Homo sapiens
actcgcccgcgggggaggccgcctcctcccggcagcccgccccctccggggccacccaggaccaagagctgttggcgaagcccgggccgaagaggcgcaggaggaaggacgcggggcggcgggcagggcctcccaagcccggctgtcctcggcccgtgcgcggcgcccggagtcccactcctcccgatgctgtcccccgcgcccggaggccgagccaattctctgggaagttcccggcttgggagcggagcggccggtcggaagaacctcgggtgctggcgcgcctgaagttgcagaccagactgaaatgtgcgagacatgtgcctttttcttaggaaaggccccaggtaccagaaaggttttcagcgcgccgacctacggggctaagagggctgaaataagaaccagtgactgagcgccgggaggtttaaggtttatggaagatgttcatcgcgccgtaccctactagaggtttggggacgtgggacacagcccctgcgttcccgccgcggaccccgtgataaatacacagacacacaaaatcactaccgccttgaatctggacagctacctcaggtggttaatatctaacaggagcagagtggagctcagaaagactcagcgtgggtgctgggttccggcgcgaccagcctgatacctaggtcagcatctcagccacacaagcaggcggcagttctgtcaggaattactacatctggtgattccacttctcatagctcaccgctgggagaataattcctcaggattaacaagatctattccagaggatcctcactgctgaagcgattttagaagacagtgtggtctgttgacagtatggaatattctttacccatcagatatgatctgtatgtgattggaaggaaataaaccaactgctaacaacacttc

SEQ ID NO: 7882 - protein, 35 aa, Homo sapiens
MCETCAFFLGKAPGTRKVFSAPTYGAKRAEIRTSD

SEQ ID NO: 7883 - DNA, 2985 bp, Homo sapiens
agcggggtaggctgcgcgagaggccgagagggggcagcaggcgatggcggcggcggtagctgcggcgggtcggttaggctggttgttcgccgcgctctgcctgggcaacgccgcgggggaggccgcgccgggcccgcgagtgctgggcttctgcctggaggaggatggagcggcgggcgcgggttgggtacgcggaggggcggcgcgggacacgccggacgccaccttcctcctgcgcctcttcggcccgggcttcgccaacagctcttggtcctgggtggccccggagggggcgggctgccgggaggaggcggcctcccccgcgggcgagtggcgcgcgctgctgcgcttgcgcctgcgggccgaggccgtgcgcccgcactcggcgctgctggcggtgcgcgtggagccgggtggcggggcggctgaggaggcggcgccgccctgggctctgggcctgggggcggccgggctgctggcgctggcagcgctggcgcgaggcctgcagctgagcgcgctggcgctggcgcctgccgaggtgcaggtgctgcgcgagagcggctcggaggcggagcgtgcggcggcgcggcgtttggagcccgcgcggcgctgggccggctgcgccttgggcgcgctgctgctgctggccagcctggcgcaggcggcgctggcggtgctgctgtaccgcgcggccggccagcgtgcggtgcccgccgtgttgggcagcgcggggctcgtgttcctggtgggagaggtggtgccggccgccgtgagcgggcgctggacgctggcgctggcgccgcgagcgctcggcctcagccgcctggccgtcctgctcactctgcccgtcgcgctgcccgtggggcagctgctggagctggcggcgcggcccgggcggctgcgggagcgggtgctggagctggcgcgcggcggcggcgacccctacagcgatctcagcaagggcgtgctgcgctgccggaccgtggaggacgtgctcacgcccctcgaagactgcttcatgctggacgccagcaccgtgctggacttcggcgtcctggccagcatcatgcagagcggccacacgcgcatcccggtgtacgaggaggagcgctccaacatcgtggacatgctctacctcaaggacttggccttcgtggatcccgaagactgcacgccgctcagcaccatcactcgtttctacaaccatccgctccacttcgtcttcaacgacaccaagctggacgctgtcctggaggaattcaagcgaggagacaccgtggtgaagaggaagcctgcttctctgatggcccctctgaagcggaaggaggagttctccttgttcaaggtgtctgatgatgaatataaagtaacaatctcgcctcagctgctcttggccacccagcgcttcctgtcccgagaagtggatgtattcagcccgctgcgcatctctgagaaggtcctgctgcacctgttgaagcatcccagtgtcaaccaggaagtgaggtttgacgagagcaaccggctggccacacaccactacctgtaccagcgcagccagccggtggattacttcattctcatcctgcagggcagggttgaagtggagatcgggaaagagggtctgaagtttgagaatggggccttcacgtactatggagtgtcggccctaactgtgccatcctcggttcaccagtccccggtgtcctcgctccagcccatccgccatgacctgcagcccgacccaggtgacggcacgcattcatctgcgtattgtcccgactacaccgtgagggcgctctctgatctgcagctcatcaaggttacgcgactgcagtacctcaatgcactcctggctacccgagcccagaacctgccacagtcccctgagaacaccgacctgcaggttattccaggcagccagaccaggctccttggtgagaagaccaccacagcggcagggtccagccacagcaggcccggcgtcccggtggaaggcagccctgggcggaacccaggcgtttaacggctcactaggcagccccagatctggggaacagatgagcacgtggggagctggagtgagctgagcagaagttttgtgcccgcctgcccccatcccctccaggccacgttttagatggcccttgtagttgcgggtcctgggtgtcctcagaactagacatcaatgcctggatccttcagccggccctgccctcctttaggagacaggagtcaccagggcacagccctccaggcccgcctcaggaaggaatgaaaggaatgccatcatctctagttcccagggcccagccttccccttctcccccggggcagggacagtgcggcatattcagattcagacctctttgggctgagccaccttgtgagtgcagttactgcctttgtgtggccgtgacctctatttgtttgcttttaatttgccaacctatcgctgctggcagcactttttgagcaagccgagagcacccattttggctgggggttcagatcgatggccttgtccatgttgtcctttctggcttccctgatggtgtcatgtttcagcgcatgcgccccagcctttcccatgtgccaaaccagaagctccactgcccgtaggctgtccctgtagccctgctccctccctggaggctgctcttctgattctgagagctggcctagtggtgctgagggcccctttctgcttctctgcccacctgctgagttgccactcgcagtgttgtcagttcccgtgttctgagaagaggtcatgcctgggaggaagggatcgtcatgctgcatcgaatcctctctccgccgtgtggcccccaggagagtagctgcctgttgcacctgctccacacctccccacagcctccctgcaggtgctgtgtggccgtgatgtgcagagagcagtgagggagggttcatgaaccaggtggatcctctttaaaaaaaaaaaagtttttgttatatctctagaac

SEQ ID NO: 7884 - protein, 659 aa, Homo sapiens; identical to SEQ ID NO: 538

SEQ ID NO: 7885 - DNA, 3129 bp, Homo sapiens
agcggggtaggctgcgcgagaggccgagagggggcagcaggcgatggcggcggcggtagctgcggcgggtcggttaggctggttgttcgccgcgctctgcctgggcaacgccgcgggggaggccgcgccgggcccgcgagtgctgggcttctgcctggaggaggatggagcggcgggcgcgggttgggtacgcggaggggcggcgcgggacacgccggacgccaccttcctcctgcgcctcttcggcccgggcttcgccaacagctcttggtcctgggtggccccggagggggcgggctgccgggaggaggcggcctcccccgcgggcgagtggcgcgcgctgctgcgcttgcgcctgcgggccgaggccgtgcgcccgcactcggcgctgctggcggtgcgcgtggagccgggtggcggggcggctgaggaggcggcgccgccctgggctctgggcctgggggcggccgggctgctggcgctggcagcgctggcgcgaggcctgcagctgagcgcgctggcgctggcgcctgccgaggtgcaggtgctgcgcgagagcggctcggaggcggagcgtgcggcggcgcggcgtttggagcccgcgcggcgctgggccggctgcgccttgggcgcgctgctgctgctggccagcctggcgcaggcggcgctggcggtgctgctgtaccgcgcggccggccagcgtgcggtgcccgccgtgttgggcagcgcggggctcgtgttcctggtgggagaggtggtgccggccgccgtgagcgggcgctggacgctggcgctggcgccgcgagcgctcggcctcagccgcctggccgtcctgctcactctgcccgtcgcgctgcccgtggggcagctgctggagctggcggcgcggcccgggcggctgcgggagcgggtgctggagctggcgcgcggcggcggcgacccctacagcgatctcagcaagggcgtgctgcgctgccggaccgtggaggacgtgctcacgcccctcgaagactgcttcatgctggacgccagcaccgtgctggacttcggcgtcctggccagcatcatgcagagcggccacacgcgcatcccggtgtacgaggaggagcgctccaacatcgtggacatgctctacctcaaggacttggccttcgtggatcccgaagactgcacgccgctcagcaccatcactcgtttctacaaccatccgctccacttcgtcttcaacgacaccaagctggacgctgtcctggaggaattcaagcgagggaagtcccacctggccatcgtgcagaaggtgaacaacgagggtgaaggcgaccccttctacgaggtcctgggcctggtcaccctggaggacgtgatcgaggagatcatcaggtccgagatcctggacgagtctgaagactaccgagacaccgtggtgaagaggaagcctgcttctctgatggcccctctgaagcggaaggaggagttctccttgttcaaggtgtctgatgatgaatataaagtaacaatctcgcctcagctgctcttggccacccagcgcttcctgtcccgagaagtggatgtattcagcccgctgcgcatctctgagaaggtcctgctgcacctgttgaagcatcccagtgtcaaccaggaagtgaggtttgacgagagcaaccggctggccacacaccactacctgtaccagcgcagccagccggtggattacttcattctcatcctgcagggcagggttgaagtggagatcgggaaagagggtctgaagtttgagaatggggccttcacgtactatggagtgtcggccctaactgtgccatcctcggttcaccagtccccggtgtcctcgctccagcccatccgccatgacctgcagcccgacccaggtgacggcacgcattcatctgcgtattgtcccgactacaccgtgagggcgctctctgatctgcagctcatcaaggttacgcgactgcagtacctcaatgcactcctggctacccgagcccagaacctgccacagtcccctgagaacaccgacctgcaggttattccaggcagccagaccaggctccttggtgagaagaccaccacagcggcagggtccagccacagcaggcccggcgtcccggtggaaggcagccctgggcggaacccaggcgtttaacggctcactaggcagccccagatctggggaacagatgagcacgtggggagctggagtgagctgagcagaagttttgtgcccgcctgcccccatcccctccaggccacgttttagatggcccttgtagttgcgggtcctgggtgtcctcagaactagacatcaatgcctggatccttcagccggccctgccctcctttaggagacaggagtcaccagggcacagccctccaggcccgcctcaggaaggaatgaaaggaatgccatcatctctagttcccagggcccagccttccccttctcccccggggcagggacagtgcggcatattcagattcagacctctttgggctgagccaccttgtgagtgcagttactgcctttgtgtggccgtgacctctatttgtttgcttttaatttgccaacctatcgctgctggcagcactttttgagcaagccgagagcacccattttggctgggggttcagatcgatggccttgtccatgttgtcctttctggcttccctgatggtgtcatgtttcagcgcatgcgccccagcctttcccatgtgccaaaccagaagctccactgcccgtaggctgtccctgtagccctgctccctccctggaggctgctcttctgattctgagagctggcctagtggtgctgagggcccctttctgcttctctgcccacctgctgagttgccactcgcagtgttgtcagttcccgtgttctgagaagaggtcatgcctgggaggaagggatcgtcatgctgcatcgaatcctctctccgccgtgtggcccccaggagagtagctgcctgttgcacctgctccacacctccccacagcctccctgcaggtgctgtgtggccgtgatgtgcagagagcagtgagggagggttcatgaaccaggtggatcctctttaaaaaaaaaaaagtttttgttatatctctagaac

SEQ ID NO: 7886 - protein, 707 aa, Homo sapiens; identical to SEQ ID NO: 536

SEQ ID NO: 7887 - DNA, 3316 bp, Homo sapiens
agcggggtaggctgcgcgagaggccgagagggggcagcaggcgatggcggcggcggtagctgcggcgggtcggttaggctggttgttcgccgcgctctgcctgggcaacgccgcgggggaggccgcgccgggcccgcgagtgctgggcttctgcctggaggaggatggagcggcgggcgcgggttgggtacgcggaggggcggcgcgggacacgccggacgccaccttcctcctgcgcctcttcggcccgggcttcgccaacagctcttggtcctgggtggccccggagggggcgggctgccgggaggaggcggcctcccccgcgggcgagtggcgcgcgctgctgcgcttgcgcctgcgggccgaggccgtgcgcccgcactcggcgctgctggcggtgcgcgtggagccgggtggcggggcggctgaggaggcggcgccgccctgggctctgggcctgggggcggccgggctgctggcgctggcagcgctggcgcgaggcctgcagctgagcgcgctggcgctggcgcctgccgaggtgcaggtgctgcgcgagagcggctcggaggcggagcgtgcggcggcgcggcgtttggagcccgcgcggcgctgggccggctgcgccttgggcgcgctgctgctgctggccagcctggcgcaggcggcgctggcggtgctgctgtaccgcgcggccggccagcgtgcggtgcccgccgtgttgggcagcgcggggctcgtgttcctggtgggagaggtggtgccggccgccgtgagcgggcgctggacgctggcgctggcgccgcgagcgctcggcctcagccgcctggccgtcctgctcactctgcccgtcgcgctgcccgtggggcagctgctggagctggcggcgcggcccgggcggctgcgggagcgggtgctggagctggcgcgcggcggcggcgacccctacagcgatctcagcaagggcgtgctgcgctgccggaccgtggaggacgtgctcacgcccctcgaagactgcttcatgctggacgccagcaccgtgctggacttcggcgtcctggccagcatcatgcagagcggccacacgcgcatcccggtgtacgaggaggagcgctccaacatcgtggacatgctctacctcaaggacttggccttcgtggatcccgaagactgcacgccgctcagcaccatcactcgtttctacaaccatccgctccacttcgtcttcaacgacaccaagctggacgctgtcctggaggaattcaagcgaggagacaccgtggtgaagaggaagcctgcttctctgatggcccctctgaagcggaaggaggagttctccttgttcaaggtgtctgatgatgaatataaagtaacaatctcgcctcagctgctcttggccacccagcgcttcctgtcccgagaagtggatgtattcagcccgctgcgcatctctgagaaggtcctgctgcacctgttgaagcatcccagtgtcaaccaggaagtgaggtttgacgagagcaaccggctggccacacaccactacctgtaccagcgcagccagccggtggattacttcattctcatcctgcagggcagggttgaagtggagatcgggaaagagggtctgaagtttgagaatggggccttcacgtactatggagtgtcggccctaactgtgccatcctcggttcaccagtccccggtgtcctcgctccagcccatccgccatgacctgcagcccgacccaggtgacggcacgcattcatctgcgtattgtcccgactacaccgtgagggcgctctctgatctgcagctcatcaaggttacgcgactgcagtacctcaatgcactcctggctacccgagcccagaacctgccacagtcccctgagaacaccgacctgcaggttattccaggcagccagaccaggctccttggtgagaagaccaccacagcggcagggtccagccacagcaggcccggcgtcccggtggaaggcagccctgggcggaacccaggcgtttaacggctcactaggcagccccagatctggggaacagatgagcacgtggggagctggagtgagctgagcagaagttttgtgcccgcctgcccccatcccctccaggccacgttttagatggcccttgtagttgcgggtcctgggtgtcctcagaactagacatcaatgcctggatccttcagccggccctgccctcctttaggagacaggagtcaccagggcacagccctccaggcccgcctcaggaaggaatgaaaggaatgccatcatctctagttcccagggcccagccttccccttctcccccggggcagggacagtgcggcatattcagattcagacctctttgggctgagccaccttgtgagtgcagttactgcctttgtgtggccgtgacctctatttgtttgcttttaatttgccaacctatcgctgctggcagcactttttgagcaagccgagagcacccattttggctgggggttcagatcgatggccttgtccatgttgtcctttctggcttccctgatggtgtcatgtttcagcgcatgcgccccagcctttcccatgtgccaaaccagaagctccactgcccgtaggctgtccctgtagccctgctccctccctggaggctgctcttctgattctgagagctggcctagtggtgctgagggcccctttctgcttctctgcccacctgctgagttgccactcgcagtgttgtcagttcccgtgttctgagaagaggtcatgcctgggaggaagggatcgtcatgctgcatcgaatcctctctccgccgtgtggcccccaggagagtagctgcctgttgcacctgctccacacctccccacagcctccctgcaggtgctgtgtggccgtgatgtgcagagagcagtgagggagggttcatgaaccaggtggatcctctttaaaaaaaaaaaagtttttgttatatctctagaacatttcaagtcttttcctttttttctgttcctagctatggggttttagagaagtgggaacaggaaggcatttgtctttttcttctagtttactacattttccttccgtagttcttcagctgtgtggaaacgggcatcacaaggacataggatcatagattgggtagggagggaggaggatttctggaacttttctcaaaggaatttggacccttataaatgggactgaaggtcaaaacaacagtgatatccttgcttagaaattgtcctcaaggaataaactctgagagcaagcccgggttggaaacagatgctttaaaatcctctctccag

SEQ ID NO: 7888 - protein, 659 aa, Homo sapiens; identical to SEQ ID NO: 538

SEQ ID NO: 7889 - DNA, 3460 bp, Homo sapiens
agcggggtaggctgcgcgagaggccgagagggggcagcaggcgatggcggcggcggtagctgcggcgggtcggttaggctggttgttcgccgcgctctgcctgggcaacgccgcgggggaggccgcgccgggcccgcgagtgctgggcttctgcctggaggaggatggagcggcgggcgcgggttgggtacgcggaggggcggcgcgggacacgccggacgccaccttcctcctgcgcctcttcggcccgggcttcgccaacagctcttggtcctgggtggccccggagggggcgggctgccgggaggaggcggcctcccccgcgggcgagtggcgcgcgctgctgcgcttgcgcctgcgggccgaggccgtgcgcccgcactcggcgctgctggcggtgcgcgtggagccgggtggcggggcggctgaggaggcggcgccgccctgggctctgggcctgggggcggccgggctgctggcgctggcagcgctggcgcgaggcctgcagctgagcgcgctggcgctggcgcctgccgaggtgcaggtgctgcgcgagagcggctcggaggcggagcgtgcggcggcgcggcgtttggagcccgcgcggcgctgggccggctgcgccttgggcgcgctgctgctgctggccagcctggcgcaggcggcgctggcggtgctgctgtaccgcgcggccggccagcgtgcggtgcccgccgtgttgggcagcgcggggctcgtgttcctggtgggagaggtggtgccggccgccgtgagcgggcgctggacgctggcgctggcgccgcgagcgctcggcctcagccgcctggccgtcctgctcactctgcccgtcgcgctgcccgtggggcagctgctggagctggcggcgcggcccgggcggctgcgggagcgggtgctggagctggcgcgcggcggcggcgacccctacagcgatctcagcaagggcgtgctgcgctgccggaccgtggaggacgtgctcacgcccctcgaagactgcttcatgctggacgccagcaccgtgctggacttcggcgtcctggccagcatcatgcagagcggccacacgcgcatcccggtgtacgaggaggagcgctccaacatcgtggacatgctctacctcaaggacttggccttcgtggatcccgaagactgcacgccgctcagcaccatcactcgtttctacaaccatccgctccacttcgtcttcaacgacaccaagctggacgctgtcctggaggaattcaagcgagggaagtcccacctggccatcgtgcagaaggtgaacaacgagggtgaaggcgaccccttctacgaggtcctgggcctggtcaccctggaggacgtgatcgaggagatcatcaggtccgagatcctggacgagtctgaagactaccgagacaccgtggtgaagaggaagcctgcttctctgatggcccctctgaagcggaaggaggagttctccttgttcaaggtgtctgatgatgaatataaagtaacaatctcgcctcagctgctcttggccacccagcgcttcctgtcccgagaagtggatgtattcagcccgctgcgcatctctgagaaggtcctgctgcacctgttgaagcatcccagtgtcaaccaggaagtgaggtttgacgagagcaaccggctggccacacaccactacctgtaccagcgcagccagccggtggattacttcattctcatcctgcagggcagggttgaagtggagatcgggaaagagggtctgaagtttgagaatggggccttcacgtactatggagtgtcggccctaactgtgccatcctcggttcaccagtccccggtgtcctcgctccagcccatccgccatgacctgcagcccgacccaggtgacggcacgcattcatctgcgtattgtcccgactacaccgtgagggcgctctctgatctgcagctcatcaaggttacgcgactgcagtacctcaatgcactcctggctacccgagcccagaacctgccacagtcccctgagaacaccgacctgcaggttattccaggcagccagaccaggctccttggtgagaagaccaccacagcggcagggtccagccacagcaggcccggcgtcccggtggaaggcagccctgggcggaacccaggcgtttaacggctcactaggcagccccagatctggggaacagatgagcacgtggggagctggagtgagctgagcagaagttttgtgcccgcctgcccccatcccctccaggccacgttttagatggcccttgtagttgcgggtcctgggtgtcctcagaactagacatcaatgcctggatccttcagccggccctgccctcctttaggagacaggagtcaccagggcacagccctccaggcccgcctcaggaaggaatgaaaggaatgccatcatctctagttcccagggcccagccttccccttctcccccggggcagggacagtgcggcatattcagattcagacctctttgggctgagccaccttgtgagtgcagttactgcctttgtgtggccgtgacctctatttgtttgcttttaatttgccaacctatcgctgctggcagcactttttgagcaagccgagagcacccattttggctgggggttcagatcgatggccttgtccatgttgtcctttctggcttccctgatggtgtcatgtttcagcgcatgcgccccagcctttcccatgtgccaaaccagaagctccactgcccgtaggctgtccctgtagccctgctccctccctggaggctgctcttctgattctgagagctggcctagtggtgctgagggcccctttctgcttctctgcccacctgctgagttgccactcgcagtgttgtcagttcccgtgttctgagaagaggtcatgcctgggaggaagggatcgtcatgctgcatcgaatcctctctccgccgtgtggcccccaggagagtagctgcctgttgcacctgctccacacctccccacagcctccctgcaggtgctgtgtggccgtgatgtgcagagagcagtgagggagggttcatgaaccaggtggatcctctttaaaaaaaaaaaagtttttgttatatctctagaacatttcaagtcttttcctttttttctgttcctagctatggggttttagagaagtgggaacaggaaggcatttgtctttttcttctagtttactacattttccttccgtagttcttcagctgtgtggaaacgggcatcacaaggacataggatcatagattgggtagggagggaggaggatttctggaacttttctcaaaggaatttggacccttataaatgggactgaaggtcaaaacaacagtgatatccttgcttagaaattgtcctcaaggaataaactctgagagcaagcccgggttggaaacagatgctttaaaatcctctctccag

SEQ ID NO: 7890 - protein, 707 aa, Homo sapiens; identical to SEQ ID NO: 536

SEQ ID NO: 7891 - DNA, 4100 bp, Homo sapiens
agcggggtaggctgcgcgagaggccgagagggggcagcaggcgatggcggcggcggtagctgcggcgggtcggttaggctggttgttcgccgcgctctgcctgggcaacgccgcgggggaggccgcgccgggcccgcgagtgctgggcttctgcctggaggaggatggagcggcgggcgcgggttgggtacgcggaggggcggcgcgggacacgccggacgccaccttcctcctgcgcctcttcggcccgggcttcgccaacagctcttggtcctgggtggccccggagggggcgggctgccgggaggaggcggcctcccccgcgggcgagtggcgcgcgctgctgcgcttgcgcctgcgggccgaggccgtgcgcccgcactcggcgctgctggcggtgcgcgtggagccgggtggcggggcggctgaggaggcggcgccgccctgggctctgggcctgggggcggccgggctgctggcgctggcagcgctggcgcgaggcctgcagctgagcgcgctggcgctggcgcctgccgaggtgcaggtgctgcgcgagagcggctcggaggcggagcgtgcggcggcgcggcgtttggagcccgcgcggcgctgggccggctgcgccttgggcgcgctgctgctgctggccagcctggcgcaggcggcgctggcggtgctgctgtaccgcgcggccggccagcgtgcggtgcccgccgtgttgggcagcgcggggctcgtgttcctggtgggagaggtggtgccggccgccgtgagcgggcgctggacgctggcgctggcgccgcgagcgctcggcctcagccgcctggccgtcctgctcactctgcccgtcgcgctgcccgtggggcagctgctggagctggcggcgcggcccgggcggctgcgggagcgggtgctggagctggcgcgcggcggcggcgacccctacagcgatctcagcaagggcgtgctgcgctgccggaccgtggaggacgtgctcacgcccctcgaagactgcttcatgctggacgccagcaccgtgctggacttcggcgtcctggccagcatcatgcagagcggccacacgcgcatcccggtgtacgaggaggagcgctccaacatcgtggacatgctctacctcaaggacttggccttcgtggatcccgaagactgcacgccgctcagcaccatcactcgtttctacaaccatccgctccacttcgtcttcaacgacaccaagctggacgctgtcctggaggaattcaagcgagggaagtcccacctggccatcgtgcagaaggtgaacaacgagggtgaaggcgaccccttctacgaggtcctgggcctggtcaccctggaggacgtgatcgaggagatcatcaggtccgagatcctggacgagtctgaagactaccgagacaccgtggtgaagaggaagcctgcttctctgatggcccctctgaagcggaaggaggagttctccttgttcaaggtgtctgatgatgaatataaagtaacaatctcgcctcagctgctcttggccacccagcgcttcctgtcccgagaagtggatgtattcagcccgctgcgcatctctgagaaggtcctgctgcacctgttgaagcatcccagtgtcaaccaggaagtgaggtttgacgagagcaaccggctggccacacaccactacctgtaccagcgcagccagccggtggattacttcattctcatcctgcagggcagggttgaagtggagatcgggaaagagggtctgaagtttgagaatggggccttcacgtactatggagtgtcggccctaactgtgccatcctcggttcaccagtccccggtgtcctcgctccagcccatccgccatgacctgcagcccgacccaggtgacggcacgcattcatctgcgtattgtcccgactacaccgtgagggcgctctctgatctgcagctcatcaaggttacgcgactgcagtacctcaatgcactcctggctacccgagcccagaacctgccacagtcccctgagaacaccgacctgcaggttattccaggcagccagaccaggctccttggtgagaagaccaccacagcggcagggtccagccacagcaggcccggcgtcccggtggaaggcagccctgggcggaacccaggcgtttaacggctcactaggcagccccagatctggggaacagatgagcacgtggggagctggagtgagctgagcagaagttttgtgcccgcctgcccccatcccctccaggccacgttttagatggcccttgtagttgcgggtcctgggtgtcctcagaactagacatcaatgcctggatccttcagccggccctgccctcctttaggagacaggagtcaccagggcacagccctccaggcccgcctcaggaaggaatgaaaggaatgccatcatctctagttcccagggcccagccttccccttctcccccggggcagggacagtgcggcatattcagattcagacctctttgggctgagccaccttgtgagtgcagttactgcctttgtgtggccgtgacctctatttgtttgcttttaatttgccaacctatcgctgctggcagcactttttgagcaagccgagagcacccattttggctgggggttcagatcgatggccttgtccatgttgtcctttctggcttccctgatggtgtcatgtttcagcgcatgcgccccagcctttcccatgtgccaaaccagaagctccactgcccgtaggctgtccctgtagccctgctccctccctggaggctgctcttctgattctgagagctggcctagtggtgctgagggcccctttctgcttctctgcccacctgctgagttgccactcgcagtgttgtcagttcccgtgttctgagaagaggtcatgcctgggaggaagggatcgtcatgctgcatcgaatcctctctccgccgtgtggcccccaggagagtagctgcctgttgcacctgctccacacctccccacagcctccctgcaggtgctgtgtggccgtgatgtgcagagagcagtgagggagggttcatgaaccaggtggatcctctttaaaaaaaaaaaagtttttgttatatctctagaacatttcaagtcttttcctttttttctgttcctagctatggggttttagagaagtgggaacaggaaggcatttgtctttttcttctagtttactacattttccttccgtagttcttcagctgtgtggaaacgggcatcacaaggacataggatcatagattgggtagggagggaggaggatttctggaacttttctcaaaggaatttggacccttataaatgggactgaaggtcaaaacaacagtgatatccttgcttagaaattgtcctcaaggaataaactctgagagcaagcccgggttggaaacagatgctttaaaatcctctctccagaacagtggttttttgtttgtttatttgagatggagtctcactctgtcacccaggctggagtgcagtggtgagatcttggctcactgcaacctccacctcccaggttcaagccattctcctgtctcagccccctgagtagctgggattacaggtgcccaccaccacacccggctaatttttgtatttttagtagagatggggtttcaccatgttggccaggctgatcttgaactcctgacctcaggtgatctgcctgccttggcctcccaaagtgctgggattataggtgtgagctaagatcagggattcttaaccttggctgcacaccagaatcacctggcaaattaaaaatacgtggacctgccaccagagcttgtgatttaatcagagtcggcatcagagttttcaattttttatttatttattattattattattattattattattattgagacaagatcttgctctgtcgcccagactggagtgcagtggtgtgatcacggcttgctgcagcctcgacctccctggttcaggccatcctgccacctcagcctcctgagtagtagggactacaggtaggcaccaccacacccagctaatacttttaatttttttttgtagagatagggtctcatta

SEQ ID NO: 7892 - protein, 707 aa, Homo sapiens; identical to SEQ ID NO: 536

SEQ ID NO: 7893 - DNA, 4243 bp, Homo sapiens
ggccgagagggggcagcaggcgatggcggcggcggtagctgcggcgggtcggttaggctggttgttcgccgcgctctgcctgggcaacgccgcgggggaggccgcgccgggcccgcgagtgctgggcttctgcctggaggaggatggagcggcgggcgcgggttgggtacgcggaggggcggcgcgggacacgccggacgccaccttcctcctgcgcctcttcggcccgggcttcgccaacagctcttggtcctgggtggccccggagggggcgggctgccgggaggaggcggcctcccccgcgggcgagtggcgcgcgctgctgcgcttgcgcctgcgggccgaggccgtgcgcccgcactcggcgctgctggcggtgcgcgtggagccgggtggcggggcggctgaggaggcggcgccgccctgggctctgggcctgggggcggccgggctgctggcgctggcagcgctggcgcgaggcctgcagctgagcgcgctggcgctggcgcctgccgaggtgcaggtgctgcgcgagagcggctcggaggcggagcgtgcggcggcgcggcgtttggagcccgcgcggcgctgggccggctgcgccttgggcgcgctgctgctgctggccagcctggcgcaggcggcgctggcggtgctgctgtaccgcgcggccggccagcgtgcggtgcccgccgtgttgggcagcgcggggctcgtgttcctggtgggagaggtggtgccggccgccgtgagcgggcgctggacgctggcgctggcgccgcgagcgctcggcctcagccgcctggccgtcctgctcactctgcccgtcgcgctgcccgtggggcagctgctggagctggcggcgcggcccgggcggctgcgggagcgggtgctggagctggcgcgcggcggcggcgacccctacagcgatctcagcaagggcgtgctgcgctgccggaccgtggaggacgtgctcacgcccctcgaagactgcttcatgctggacgccagcaccgtgctggacttcggcgtcctggccagcatcatgcagagcggccacacgcgcatcccggtgtacgaggaggagcgctccaacatcgtggacatgctctacctcaaggacttggccttcgtggatcccgaagactgcacgccgctcagcaccatcactcgtttctacaaccatccgctccacttcgtcttcaacgacaccaagctggacgctgtcctggaggaattcaagcgaggagacaccgtggtgaagaggaagcctgcttctctgatggcccctctgaagcggaaggaggagttctccttgttcaaggtgtctgatgatgaatataaagtaacaatctcgcctcagctgctcttggccacccagcgcttcctgtcccgagaagtggatgtattcagcccgctgcgcatctctgagaaggtcctgctgcacctgttgaagcatcccagtgtcaaccaggaagtgaggtttgacgagagcaaccggctggccacacaccactacctgtaccagcgcagccagccggtggattacttcattctcatcctgcagggcagggttgaagtggagatcgggaaagagggtctgaagtttgagaatggggccttcacgtactatggagtgtcggccctaactgtgccatcctcggttcaccagtccccggtgtcctcgctccagcccatccgccatgacctgcagcccgacccaggtgacggcacgcattcatctgcgtattgtcccgactacaccgtgagggcgctctctgatctgcagctcatcaaggttacgcgactgcagtacctcaatgcactcctggctacccgagcccagaacctgccacagtcccctgagaacaccgacctgcaggttattccaggcagccagaccaggctccttggtgagaagaccaccacagcggcagggtccagccacagcaggcccagccttccccttctcccccggggcagggacagtgcggcatattcagattcagacctctttgggctgagccaccttgtgagtgcagttactgcctttgtgtggccgtgacctctatttgtttgcttttaatttgccaacctatcgctgctggcagcactttttgagcaagccgagagcacccattttggctgggggttcagatcgatggccttgtccatgttgtcctttctggcttccctgatggtgtcatgtttcagcgcatgcgccccagcctttcccatgtgccaaaccagaagctccactgcccgtaggctgtccctgtagccctgctccctccctggaggctgctcttctgattctgagagctggcctagtggtgctgagggcccctttctgcttctctgcccacctgctgagttgccactcgcagtgttgtcagttcccgtgttctgagaagaggtcatgcctgggaggaagggatcgtcatgctgcatcgaatcctctctccgccgtgtggcccccaggagagtagctgcctgttgcacctgctccacacctccccacagcctccctgcaggtgctgtgtggccgtgatgtgcagagagcagtgagggagggttcatgaaccaggtggatcctctttaaaaaaaaaaaagtttttgttatatctctagaacatttcaagtcttttcctttttttctgttcctagctatggggttttagagaagtgggaacaggaaggcatttgtctttttcttctagtttactacattttccttccgtagttcttcagctgtgtggaaacgggcatcacaaggacataggatcatagattgggtagggagggaggaggatttctggaacttttctcaaaggaatttggacccttataaatgggactgaaggtcaaaacaacagtgatatccttgcttagaaattgtcctcaaggaataaactctgagagcaagcccgggttggaaacagatgctttaaaatcctctctccagaacagtggttttttgtttgtttatttgagatggagtctcactctgtcacccaggctggagtgcagtggtgagatcttggctcactgcaacctccacctcccaggttcaagccattctcctgtctcagccccctgagtagctgggattacaggtgcccaccaccacacccggctaatttttgtatttttagtagagatggggtttcaccatgttggccaggctgatcttgaactcctgacctcaggtgatctgcctgccttggcctcccaaagtgctgggattataggtgtgagctaagatcagggattcttaaccttggctgcacaccagaatcacctggcaaattaaaaatacgtggacctgccaccagagcttgtgatttaatcagagtcggcatcagagttttcaattttttatttatttattattattattattattattattattattgagacaagatcttgctctgtcgcccagactggagtgcagtggtgtgatcacggcttgctgcagcctcgacctccctggttcaggccatcctgccacctcagcctcctgagtagtagggactacaggtaggcaccaccacacccagctaatacttttaatttttttttgtagagatagggtctcattatgttgcctggggtagtctcgaactcctaggctcaagcgatcctcctgcctcggcctcccaaagtgttgagattataggcgtgagccaccgtgcccagattcacagaagtttcatacacctttcacccaggttcccctaatgttaacagcttacatataaccttggtacatttatcaaaactaaaggtgcaatcatactaatagctagagtttatttggattttaccatttttcccaatgtcccttttctgctgcagcagccaatccaggatgccatactgcacttagagctgttgctttcttttttcctaactttatattttgaaataatttcagatgataggaagttgtaaaggtaagggccccacgcacccttcatctagtttccctccatggttacatcttatatggttgtaatgcagtattccaacaaagactctgacactggtgcgatgtgggtggacagtccaaatcatttgtcacatgtacatctgtgtaactaccactgcaatcaggataaagaagtcccatccccacaaggatctccctccccaccttccctaactcctggtaaccactaatcgttcatctcttcttattttgtcatttcaagaatgttgtataaatgggagcatagtg

SEQ ID NO: 7894 - protein, 680 aa, Homo sapiens
MAAAVAAAGRLGWLFAALCLGNAAGEAAPGPRVLGFCLEEDGAAGAGWVRGGAARDTPDATFLLRLFGPGFANSSWSWVAPEGAGCREEAASPAGEWRALLRLRLRAEAVRPHSALLAVRVEPGGGAAEEAAPPWALGLGAAGLLALAALARGLQLSALALAPAEVQVLRESGSEAERAAARRLEPARRWAGCALGALLLLASLAQAALAVLLYRAAGQRAVPAVLGSAGLVFLVGEVVPAAVSGRWTLALAPRALGLSRLAVLLTLPVALPVGQLLELAARPGRLRERVLELARGGGDPYSDLSKGVLRCRTVEDVLTPLEDCFMLDASTVLDFGVLASIMQSGHTRIPVYEEERSNIVDMLYLKDLAFVDPEDCTPLSTITRFYNHPLHFVFNDTKLDAVLEEFKRGDTVVKRKPASLMAPLKRKEEFSLFKVSDDEYKVTISPQLLLATQRFLSREVDVFSPLRISEKVLLHLLKHPSVNQEVRFDESNRLATHHYLYQRSQPVDYFILILQGRVEVEIGKEGLKFENGAFTYYGVSALTVPSSVHQSPVSSLQPIRHDLQPDPGDGTHSSAYCPDYTVRALSDLQLIKVTRLQYLNALLATRAQNLPQSPENTDLQVIPGSQTRLLGEKTTTAAGSSHSRPSLPLLPRGRDSAAYSDSDLFGLSHLVSAVTAFVWP

SEQ ID NO: 7895 - DNA, 1655 bp, Homo sapiens
aagaggatccacctggttcatgaaccctccctcactgctctctgcacatcacggccacacagcacctgcagggaggctgtggggaggtgtggagcaggtgcaacaggcagctactctcctgggggccacacggcggagagaggattcgatgcagcatgacgatcccttcctcccaggcatgacctcttctcagaacacgggaactgacaacactgcgagtggcaactcagcagatctggggctgcctagtgagccgttaaacgcctgggttccgcccagggctgccttccaccgggacgccgggcctgctgtggctggaccctacaggagacaagggaaggagaattaacatcaaagctggttcaagcgattcttctgcctcagcctcctgagtatgtgagactacaggcacgcaccaccacgcccagctaatgtttgtatttttagcagagatggagtttcaccatattggccaggctggtctcgaactcccgatctcgtgatctgcctgcctgggcctcccaaagagctgggattacaggcgtgagccactgcgcccagccaggaagactttcttcatggcaaacagtgggttctttcaggggacatttctgtaatgtacaaaagaacctgcaaaaacaaaagcacctagggagacagaagactgggaaaggcccatgaagggcagagctctctcagtaatggaggaaactaataggactgctgctaatggagccccaggtgagccctgggattgcaaggccaccgctggcacaggcaaccatgcttgtgtggaggtgcaggcgtgagccctcctgcaagggggctctctgccagcacccatgcagggctcagaagggggcctggctgtggatcttgctgggttccagcagcacagaggcccactggcctctgacgcaacatacgcctggggaagtgtgcaggcccagcggagacagaactgccaagagtctggactcacggtagtcttcagactcgtccaggatctcggacctgatgatctcctcgatcacgtcctccagggtgaccaggcccaggacctcgtagaaggggtcgccttcaccctcgttgttcaccttctgcacgatggccaggtgggacttccctgtggggggaggacactcatggaacagcttgctgggccccccccagtttgattcatctcccctggtataggcccaccaaaaggacacggctaacgttcatgctcctacaacgtgccaggcacagagccacactcttttctaggtttttacttaagactcccagcgtgattatgagaactggccttattttcacacaggttgaaaatgaagcagtgggctcatgcccatctgcacaaggccccccaggcagagctggcagagctgggatccagctccaggtccgtgcacctccatgacatggatgcagtttagacaaggatgcctccctccagtggagaacacaaatgcctcacacatcagccagcctgcacatgcaggctaacaagggcactgactctggaaacacaggctctcctgcgacagtccacacggggcagctgagtggggccacccagcctgactgtccttgggaggatttcctaagtctttttcttcttaaagtaaatatatatgctgtccatcctacat

SEQ ID NO: 7896 - protein, 109 aa, Homo sapiens [sequence omitted]

SEQ ID NO: 7897 - DNA, 691 bp, Homo sapiens
aagaggatccacctggttcatgaaccctccctcactgctctctgcacatcacggccacacagcacctgcagggaggctgtggggaggtgtggagcaggtgcaacaggcagctactctcctgggggccacacggcggagagaggattcgatgcagcatgacgatcccttcctcccaggcatgacctcttctcagaacacgggaactgacaacactgcgagtggcaactcagcagatctggggctgcctagtgagccgttaaacgcctgggttccgcccagggctgccttccaccgggacgccgggcctgctgtggctggaccctacaggagacaagggaaggagaattaacatcaaagctggttgaaaatgaagcagtgggctcatgcccatctgcacaaggccccccaggcagagctggcagagctgggatccagctccaggtccgtgcacctccatgacatggatgcagtttagacaaggatgcctccctccagtggagaacacaaatgcctcacacatcagccagcctgcacatgcaggctaacaagggcactgactctggaaacacaggctctcctgcgacagtccacacggggcagctgagtggggccacccagcctgactgtccttgggaggatttcctaagtctttttcttcttaaagtaaatatatatgctgtccatcctacat

SEQ ID NO: 7898 - protein, 109 aa, Homo sapiens [sequence omitted]

SEQ ID NO: 7899 - DNA, 370 bp, Homo sapiens
gtgtccgcctgttagcatggtggctgaggtctgcagggctgtacagagtctgtgcgtcatggccgggccgcctgccctgcatgcttccagaagtatcgctttaatcatgcgtcgattttcaaactagcactttgggaggtcaaagcgggcagatcatgaggtcaggagttccgagatcagcctgaccaatatggtgaaaccccggtctctactaaaaatacaaaaactagccgggcgtcgtggcacacgcctgtaatctcagctactcaggagaataggagaatcgcttgaacccaggaggcggaggctgcagtgagccgagattgcgctactgcacgccagcctggacaaaagagggagactccatctc

SEQ ID NO: 7900 - protein, 36 aa, Homo sapiens
MVAEVCRAVQSLCVMAGPPALHASRSIALIMRRFSN

SEQ ID NO: 7901 - DNA, 850 bp, Homo sapiens
ttttatttttttgtaaagacacggtctctctatgttgcctaggctggtgttgaacttctggccttaagtgatcctcccgcctcagcctcctaaagtgctagggttacaggtgtgaatcactacatctggcctaaatttaaaaaagtttttagtctacatccagtgacctatcagggatgcttgttattttatacaagctgctttgttatcatatcagcattctcttcagccagctccaaggcagatagtcacccctctctctgtgtggttggggtgggagcaggccccgtggagggagcggtgctgaggacatgtccctggcgttccgatgctgctccatcgaggaccccctggcctcaggaggaaggagcaggcgatgcagccccttagtgtggtcgtgttgactgacaggtggctgatgcctgagcgcgccctcttcttccatcttaggagacaccgtggtgaagaggaagcctgcttctctgatggcccctctgaagcggaaggaggagttctccttgttcaaggtgtctgatgatgaatataaagtaacaatctcgcctcagctgctcttggccacccagcgcttcctgtcccgagaagtggatgtattcagcccgctgcgcatctctgagaaggtcctgctgcacctgttgaagcatcccagtgtcaaccaggaagtgaggtttgacgagagcaaccggctggccacacaccactacctgtaccagcgcagccagccggtggattacttcattctcatcctgcaggtagctgtgggtcccaggcctggagtccctcctgcttcctcaggccagggaagggtctaggagaagaggggagcaggggc

SEQ ID NO: 7902 - protein, 114 aa, Homo sapiens
MAPLKRKEEFSLFKVSDDEYKVTISPQLLLATQRFLSREVDVFSPLRISEKVLLHLLKHPSVNQEVRFDESNRLATHHYLYQRSQPVDYFILILQVAVGPRPGVPPASSGQGRV

SEQ ID NO: 7903 - DNA, 543 bp, Homo sapiens
ttctcctagacccttccctggcctgaggaagcaggagggactccaggcctgggacccacagctacctgcaggatgagaatgaagtaatccaccggctggctgcgctggtacaggtagtggtgtgtggccagccggttgctctcgtcaaacctcacttcctggttgacactgggatgcttcaacaggtgcagcaggaccttctcagagatgcgcagcgggctgaatacatccacttctgcacgtggtggaaaaaagggacagtgtccactggggcctagtggccagtggaaccacacccaacactgtaggcaatttaaagttattgtgcccaccagggatctcccgggtggcctgtgagcagctgcccctaacacctcaacacaagagaactaggcaggggccaggtgcggtggacgcctgtaatcccagctacttgggaggctgaggcaggagaatcacttgaacccagaaggcggaggttgcagtgagccaacatcgtgccactgcactccagcctgggtgacagagcgagaccctatcttt

SEQ ID NO: 7904 - protein, 49 aa, Homo sapiens
MRSGLNTSTSARGGKKGQCPLGPSGQWNHTQHCRQFKVIVPTRDLPGGL

SEQ ID NO: 7905 - DNA, 1729 bp, Homo sapiens
ttcagctcttctcactggggggtgtgaggaacaggggggaccatggacttcatcagcattcagcagttggtaagtggagaaagagttgaagggaaagtgttgggatttggacatggagttcctgaccctggagcctggcctagtgactggaggaggggcccccaagaggctgtggcccgggagaagctgaaattggaagaagagaagaagaagaaacttgaaagatttaacagtaccagatttaatctggataacctggctgacttggaaaacttggttcaaagacggaaaaagcgactgagacacagagtcccccccaggaaacctgagcccctggttaagccgcagtcccaggcccaggtggagcctgtgggcctggagatgttcctgaaggcagctgctgagaaccaggagtacctgattgacaagtacttgacagacggaggggaccccaatgcccatgacaagctccaccgcaccgccttgcactgggcctgtctgaagggtcacagccagctggtgaacaagctgctggtggcaggtgccacagtggacgcgcgagacttgctggacaggacacctgtgttctgggcctgccgcggaggacatctggtcatcctcaaacagctgcttaaccagggagcccgggtcaatgcccgggacaagatcgggagcacccccctgcacgtggcagtgcgcacccggcaccccgactgcctggagcacctcatcgagtgtggcgcccacctgaacgcacagtctgtacgtttcaaattacactggtgtaggcctgtactgctggtggggctgggcccctaaacgccagaaagtgaatcttaagaagctctgccctaaactgagaaccacatgctgagggaagggctgaaaggtgaaggctcagcctccctcacatgggtcctgggttacattaggtaccgggctgattgataggcatttggccatggttccttttcgtctacctttgggggccttctcaggcccagaacaaggctgttgttactatgtggaaaagctgaccagtgctgcacactaggggcacacacctttccatgagcagctcctgccctgtggcgacagccagcgtgcacccagacgctggtgccatggcgaagcaggcgttcaagaccatggagaagacaactcctcatctagaaaatgaggacacctcagtgacaaacacacctttttataccaatcagtatcctctgttcattaaaactggctatccattacagcctagccgtctttcctgggccgagaggagcccatgcttcagtcaccagggactgtctgatagggcccacgcctgttagccatgccggccgacagcaagataggccgagtgcagagtgggcgggatgcggggtcctggcactaggcttttgtgcttaaggcacctctgctcactgacgacaaggtcaaagagcagtggttctccacctcagctgcttatcagaatcaccaggaaggtttaaaaagtcctgatgtccagaccctaagtcagaagccctgaggggaggatccaggtattctcatgcagaggccatgcttgtctatgtgggaaatcctaggaatctacagaaagcagacaactagggagtccagcaaaatctcgggtgcaagataaacacacaaaaacctgtttctacctcctagaaatgaacatgtagacacaaaagttaaaaatatgtactgtttacaattgctg

SEQ ID NO: 7906 - protein, 258 aa, Homo sapiens
MDFISIQQLVSGERVEGKVLGFGHGVPDPGAWPSDWRRGPQEAVAREKLKLEEEKKKKLERFNSTRFNLDNLADLENLVQRRKKRLRHRVPPRKPEPLVKPQSQAQVEPVGLEMFLKAAAENQEYLIDKYLTDGGDPNAHDKLHRTALHWACLKGHSQLVNKLLVAGATVDARDLLDRTPVFWACRGGHLVILKQLLNQGARVNARDKIGSTPLHVAVRTRHPDCLEHLIECGAHLNAQSVRFKLHWCRPVLLVGLGP

SEQ ID NO: 7907 - DNA, 2945 bp, Homo sapiens
ttcagctcttctcactggggggtgtgaggaacaggggggaccatggacttcatcagcattcagcagttggtaagtggagaaagagttgaagggaaagtgttgggatttggacatggagttcctgaccctggagcctggcctagtgactggaggaggggcccccaagaggctgtggcccgggagaagctgaaattggaagaagagaagaagaagaaacttgaaagatttaacagtaccagatttaatctggataacctggctgacttggaaaacttggttcaaagacggaaaaagcgactgagacacagagtcccccccaggaaacctgagcccctggttaagctccaccgcaccgccttgcactgggcctgtctgaagggtcacagccagctggtgaacaagctgctggtggcaggtgccacagtggacgcgcgagacttgctggacaggacacctgtgttctgggcctgccgcggaggacatctggtcatcctcaaacagctgcttaaccagggagcccgggtcaatgcccgggacaagatcgggagcacccccctgcacgtggcagtgcgcacccggcaccccgactgcctggagcacctcatcgagtgtggcgcccacctgaacgcacaggataaggaaggggacacggctctgcacgaggccgtgcggcacggcagctacaaagccatgaagctactgctgctctatggggccgagctgggggtgcggaacgcggcctccgtgaccccggtgcagctggctcgagactggcagcgcggcatccgggaggccctgcaggcccacgtggcgcatccccgcacccggtgctgaccgcagcaccgccccccgccgcgcctttcgcactgccaccattccatcctgtgccccgcccccgcgtctgcacctctgtggttcctgccctcagccctggttcctccctctctggcctgtgccgcctcagcagccctggcagaactgaagagcggcaccgggcccagcaggcaaagagagaggcctccctggcttcgagtgtcaggggagccgcgttccctcccagggctggagcagaggaccacaaggcagcagaaagcgcgggtccagatgagggccaggaaggggaggagagtgagggccaagaacgagccttaagggagcagtcccaagctggagccacccagggctgggtctgggagtcctcagtgtccacttgtcccaggttagggggcttgccttgctctctccagggccagtctgtgtgtgtggggactcagcccgtggccggcagatgccatccaggatgtacaaggtgcagccaaggcaggccatgcaggggccgggcctgtctgcagctggtggatgcctgtgggcatggctttctctggggaccccattcctgtcagtagcaaccctggcagtgtccggagcggctctagacaactttggtcataggaactctggaggtgggttctggtcatctgaggtggctactcaacaggtttgaggccccacagcaacagaagtccaggacccactaggttgcctcagaagccctaagactgatgagctggagcgcgcatttgagagaagcctcgcacccactgtgtactggccccgctcaggccggcctggcacaccgttgcctgctggcggctctcatggggaagcgcctgggcactggggattgcttgtggcccactcaactcttggggcagtggcccgtaaccctagtttgcctgaggcccttatgtccccttatgttcctggtactggagcttgagctcttgcctggaacgctgcagctgcacccaccctgcttgatcccacctgggaggccaggacactgaggagctctgaacccagcccacagggaagcagaggaaggtgagcccccgccgccccccagcccttcccatcccttccctgctccctggtggtctaaggacccaagctccctagacttcctcttccaccgtctgtacgtttcaaattacactggtgtaggcctgtactgctggtggggctgggcccctaaacgccagaaagtgaatcttaagaagctctgccctaaactgagaaccacatgctgagggaagggctgaaaggtgaaggctcagcctccctcacatgggtcctgggttacattaggtaccgggctgattgataggcatttggccatggttccttttcgtctacctttgggggccttctcaggcccagaacaaggctgttgttactatgtggaaaagctgaccagtgctgcacactaggggcacacacctttccatgagcagctcctgccctgtggcgacagccagcgtgcacccagacgctggtgccatggcgaagcaggcgttcaagaccatggagaagacaactcctcatctagaaaatgaggacacctcagtgacaaacacacctttttataccaatcagtatcctctgttcattaaaactggctatccattacagcctagccgtctttcctgggccgagaggagcccatgcttcagtcaccagggactgtctgatagggcccacgcctgttagccatgccggccgacagcaagataggccgagtgcagagtgggcgggatgcggggtcctggcactaggcttttgtgcttaaggcacctctgctcactgacgacaaggtcaaagagcagtggttctccacctcagctgcttatcagaatcaccaggaaggtttaaaaagtcctgatgtccagaccctaagtcagaagccctgaggggaggatccaggtattctcatgcagaggccatgcttgtctatgtgggaaatcctaggaatctacagaaagcagacaactagggagtccagcaaaatctcgggtgcaagataaacacacaaaaacctgtttctacctcctagaaatgaacatgtagacacaaaagttaaaaatatgtactgtttacaattgctg

SEQ ID NO: 7908 - protein, 263 aa, Homo sapiens
MDFISIQQLVSGERVEGKVLGFGHGVPDPGAWPSDWRRGPQEAVAREKLKLEEEKKKKLERFNSTRFNLDNLADLENLVQRRKKRLRHRVPPRKPEPLVKLHRTALHWACLKGHSQLVNKLLVAGATVDARDLLDRTPVFWACRGGHLVILKQLLNQGARVNARDKIGSTPLHVAVRTRHPDCLEHLIECGAHLNAQDKEGDTALHEAVRHGSYKAMKLLLLYGAELGVRNAASVTPVQLARDWQRGIREALQAHVAHPRTRC

SEQ ID NO: 7909 - DNA, 2187 bp, Homo sapiens
ttcagctcttctcactggggggtgtgaggaacaggggggaccatggacttcatcagcattcagcagttggtaagtggagaaagagttgaagggaaagtgttgggatttggacatggagttcctgaccctggagcctggcctagtgactggaggaggggcccccaagaggctgtggcccgggagaagctgaaattggaagaagagaagaagaagaaacttgaaagatttaacagtaccagatttaatctggataacctggctgacttggaaaacttggttcaaagacggaaaaagcgactgagacacagagtcccccccaggaaacctgagcccctggttaagccgcagtcccaggcccaggtggagcctgtgggcctggagatgttcctgaaggcagctgctgagaaccaggagtacctgattgacaagtacttgacagacggaggggaccccaatgcccatgacaagctccaccgcaccgccttgcactgggcctgtctgaagggtcacagccagctggtgaacaagctgctggtggcaggtgccacagtggacgcgcgagacttgctggacaggacacctgtgttctgggcctgccgcggaggacatctggtcatcctcaaacagctgcttaaccagggagcccgggtcaatgcccgggacaagatcgggagcacccccctgcacgtggcagtgcgcacccggcaccccgactgcctggagcacctcatcgagtgtggcgcccacctgaacgcacaggataaggaaggggacacggctctgcacgaggccgtgcggcacggcagctacaaagccatgaagctactgctgctctatggggccgagctgggggtgcggaacgcggcctccgtgaccccggtgcagctggctcgagactggcagcgcggcatccgggaggccctgcaggcccacgtggcgcatccccgcacccggtgctgaccgcagcaccgccccccgccgcgcctttcgcactgccaccattccatcctgtgccccgcccccgcgtctgcacctctgtggttcctgccctcagccctggttcctccctctctggcctgtgccgcctcagcagccctggcagaactgaagagcggcaccgggcccagcaggcaaagagagaggcctccctggcttcgagtgtcaggggagccgcgttccctcccagggctggagcagaggaccacaaggcagcagaaagcgcgggtccagatgagggccaggaaggggaggagagtgagggccaagaacgagccttaagggagcagtcccaagctggagccacccagggctgggtctgggagtcctcagtgtccacttgtcccaggttagggggcttgccttgctctctccagggccagtctgtgtgtgtggggactcagcccgtggccggcagatgccatccaggatgtacaaggtgcagccaaggcaggccatgcaggggccgggcctgtctgcagctggtggatgcctgtgggcatggctttctctggggaccccattcctgtcagtagcaaccctggcagtgtccggagcggctctagacaactttggtcataggaactctggaggtgggttctggtcatctgaggtggctactcaacaggtttgaggccccacagcaacagaagtccaggacccactaggttgcctcagaagccctaagactgatgagctggagcgcgcatttgagagaagcctcgcacccactgtgtactggccccgctcaggccggcctggcacaccgttgcctgctggcggctctcatggggaagcgcctgggcactggggattgcttgtggcccactcaactcttggggcagtggcccgtaaccctagtttgcctgaggcccttatgtccccttatgttcctggtactggagcttgagctcttgcctggaacgctgcagctgcacccaccctgcttgatcccacctgggaggccaggacactgaggagctctgaacccagcccacagggaagcagaggaagctcctgccctgtggcgacagccagcgtgcacccagacgctggtgccatggcgaagcaggcgttcaagaccatggagaagacaactcctcatctagaaaatgaggacacctcagtgacaaacacacctttttataccaatcagtatcctctgttcattaaaactggctatccattaca

SEQ ID NO: 7910 - protein, 305 aa, Homo sapiens; identical to SEQ ID NO: 540

SEQ ID NO: 7911 - DNA, 305 bp, Homo sapiens
gctgggcccctaaacgccagaaagtgaatcttaagaagctctgccctaaactgagaacaaggctgttgttactatgtggaaaagctgaccagtgctgcacactaggggcacacacctttccatgagcagctcctgccctgtggcgacagccagcgtgcacccagacgctggtgccatggcgaagcaggcgttcaagaccatggagaagacaactcctcatctagaaaatgaggacacctcagtgacaaacacacctttttataccaatcagtatcctctgttcattaaaactggctatccattac

SEQ ID NO: 7912 - protein, 60 aa, Homo sapiens
MSSSCPVATASVHPDAGAMAKQAFKTMEKTTPHLENEDTSVTNTPFYTNQYPLFIKTGYP

SEQ ID NO: 7913 - DNA, 1254 bp, Homo sapiens
ttcagctcttctcactggggggtgtgaggaacaggggggaccatggacttcatcagcattcagcagttggtaagtggagaaagagttgaagggaaagtgttgggatttggacatggagttcctgaccctggagcctggcctagtgactggaggaggggcccccaagaggctgtggcccgggagaagctgaaattggaagaagagaagaagaagaaacttgaaagatttaacagtaccagatttaatctggataacctggctgacttggaaaacttggttcaaagacggaaaaagcgactgagacacagagtcccccccaggaaacctgagcccctggttaagccgcagtcccaggcccaggtggagcctgtgggcctggagatgttcctgaaggcagctgctgagaaccaggagtacctgattgacaagtacttgacagacggaggggaccccaatgcccatgacaagctccaccgcaccgccttgcactgggcctgtctgaagggtcacagccagctggtgaacaagctgctggtggcaggtgccacagtggacgcgcgagacttgctggacaggacacctgtgttctgggcctgccgcggaggacatctggtcatcctcaaacagctgcttaaccagggagcccgggtcaatgcccgggacaagatcgggagcacccccctgcacgtggcagtgcgcacccggcaccccgactgcctggagcacctcatcgagtgtggcgcccacctgaacgcacagtctgtacgtttcaaattacactggtgtaggcctgtactgctggtggggctgggcccctaaacgccagaaagtgaatcttaagaagctctgccctaaactgagaaccacatgctgagggaagggctgaaaggtgaaggctcagcctccctcacatgggtcctgggttacattaggtaccgggctgattgataggcatttggccatggttccttttcgtctacctttgggggccttctcaggcccagaacaaggctgttgttactatgtggaaaagctgaccagtgctgcacactaggggcacacacctttccatgagcagctcctgccctgtggcgacagccagcgtgcacccagacgctggtgccatggcgaagcaggcgttcaagaccatggagaagacaactcctcatctagaaaatgaggacacctcagtgacaaacacacctttttataccaatcagtatcctctgttcattaaaactggctatccattac

SEQ ID NO: 7914 - protein, 258 aa, Homo sapiens; identical to SEQ ID NO: 7906

SEQ ID NO: 7915 - DNA, 2470 bp, Homo sapiens
ttcagctcttctcactggggggtgtgaggaacaggggggaccatggacttcatcagcattcagcagttggtaagtggagaaagagttgaagggaaagtgttgggatttggacatggagttcctgaccctggagcctggcctagtgactggaggaggggcccccaagaggctgtggcccgggagaagctgaaattggaagaagagaagaagaagaaacttgaaagatttaacagtaccagatttaatctggataacctggctgacttggaaaacttggttcaaagacggaaaaagcgactgagacacagagtcccccccaggaaacctgagcccctggttaagctccaccgcaccgccttgcactgggcctgtctgaagggtcacagccagctggtgaacaagctgctggtggcaggtgccacagtggacgcgcgagacttgctggacaggacacctgtgttctgggcctgccgcggaggacatctggtcatcctcaaacagctgcttaaccagggagcccgggtcaatgcccgggacaagatcgggagcacccccctgcacgtggcagtgcgcacccggcaccccgactgcctggagcacctcatcgagtgtggcgcccacctgaacgcacaggataaggaaggggacacggctctgcacgaggccgtgcggcacggcagctacaaagccatgaagctactgctgctctatggggccgagctgggggtgcggaacgcggcctccgtgaccccggtgcagctggctcgagactggcagcgcggcatccgggaggccctgcaggcccacgtggcgcatccccgcacccggtgctgaccgcagcaccgccccccgccgcgcctttcgcactgccaccattccatcctgtgccccgcccccgcgtctgcacctctgtggttcctgccctcagccctggttcctccctctctggcctgtgccgcctcagcagccctggcagaactgaagagcggcaccgggcccagcaggcaaagagagaggcctccctggcttcgagtgtcaggggagccgcgttccctcccagggctggagcagaggaccacaaggcagcagaaagcgcgggtccagatgagggccaggaaggggaggagagtgagggccaagaacgagccttaagggagcagtcccaagctggagccacccagggctgggtctgggagtcctcagtgtccacttgtcccaggttagggggcttgccttgctctctccagggccagtctgtgtgtgtggggactcagcccgtggccggcagatgccatccaggatgtacaaggtgcagccaaggcaggccatgcaggggccgggcctgtctgcagctggtggatgcctgtgggcatggctttctctggggaccccattcctgtcagtagcaaccctggcagtgtccggagcggctctagacaactttggtcataggaactctggaggtgggttctggtcatctgaggtggctactcaacaggtttgaggccccacagcaacagaagtccaggacccactaggttgcctcagaagccctaagactgatgagctggagcgcgcatttgagagaagcctcgcacccactgtgtactggccccgctcaggccggcctggcacaccgttgcctgctggcggctctcatggggaagcgcctgggcactggggattgcttgtggcccactcaactcttggggcagtggcccgtaaccctagtttgcctgaggcccttatgtccccttatgttcctggtactggagcttgagctcttgcctggaacgctgcagctgcacccaccctgcttgatcccacctgggaggccaggacactgaggagctctgaacccagcccacagggaagcagaggaaggtgagcccccgccgccccccagcccttcccatcccttccctgctccctggtggtctaaggacccaagctccctagacttcctcttccaccgtctgtacgtttcaaattacactggtgtaggcctgtactgctggtggggctgggcccctaaacgccagaaagtgaatcttaagaagctctgccctaaactgagaaccacatgctgagggaagggctgaaaggtgaaggctcagcctccctcacatgggtcctgggttacattaggtaccgggctgattgataggcatttggccatggttccttttcgtctacctttgggggccttctcaggcccagaacaaggctgttgttactatgtggaaaagctgaccagtgctgcacactaggggcacacacctttccatgagcagctcctgccctgtggcgacagccagcgtgcacccagacgctggtgccatggcgaagcaggcgttcaagaccatggagaagacaactcctcatctagaaaatgaggacacctcagtgacaaacacacctttttataccaatcagtatcctctgttcattaaaactggctatccattac

SEQ ID NO: 7916 - protein, 263 aa, Homo sapiens; identical to SEQ ID NO: 7908

SEQ ID NO: 7917 - DNA, 886 bp, Homo sapiens
ggtgctcggcgtacagcagacgctggaggagatggacttcgagaaggctgctgagaggggtcacggggacatctgctccctcctcctgcaacacagcccagccctgaaggccatccgggaccgaaaggcacggctagcatgtgacctgctgccttgcaacagtgacctgcgggacctgctatccagctgagccgccaccctatctccagctgcctttaaagggtaagtggagaaagagttgaagggaaagtgttgggatttggacatggagttcctgaccctggagcctggcctagtgactggaggaggggcccccaagaggctgtggcccgggagaagctgaaattggaagaagagaagaagaagaaacttgaaagatttaacagtaccagatttaatctggataacctggctgacttggaaaacttggttcaaagacggaaaaagcgactgagacacagagtcccccccaggaaacctgagcccctggttaagccgcagtcccaggcccaggtggagcctgtgggcctggagatgttcctgaaggcagctgctgagaaccaggagtacctgattgacaagtacttgacagacggaggggaccccaatgcccatgacaagctccaccgcaccgccttgcactgggcctgtctgaagggtcacagccagctggtgaacaagctgctggtggcaggtgccacagtggacgcgcgagacttgctggacaggacacctgtgttctgggcctgccgcggaggacatctggtcatcctcaaacagctgcttaaccagggagcccgggtcaatgcccgggacaagatcgggagcacccccctgcacgtggcagtgcgcacccggcaccccgactgcctggagcacctcatcg

SEQ ID NO: 7918 - protein, 116 aa, Homo sapiens
MFLKAAAENQEYLIDKYLTDGGDPNAHDKLHRTALHWACLKGHSQLVNKLLVAGATVDARDLLDRTPVFWACRGGHLVILKQLLNQGARVNARDKIGSTPLHVAVRTRHPDCLEHL

SEQ ID NO: 7919 - DNA, 726 bp, Homo sapiens
ctcgcatcccagcgcggtgctcggcgtacagcagacgctggaggagatggacttcgagagggcactatgccagccgcaatgggcactacgctgtgtgccagttcctgctggaaagcggagctaagtgtgatgcccagacccacgggggtgccactgctctgcaccgagccagctactgcgggcacactgaaatcgcgcggctcctgctatcacatgggtccaaccccagggtggtggatgacgacggcatgaccagtctgcataaggctgctgagaggggtcacggggacatctgctccctcctcctgcaacacagcccagccctgaaggccatccgggaccgaaaggcacggctagcatgtgacctgctgccttgcaacagtgacctgcgggacctgctatccagctgagccgccaccctatctccagctgcctttaaagggtacacagaccagttctccaagcccctgccttggtcagcatccatgctgctgggcagggaactgaggccagaccacccaggaagagccccagtctggtcactgtggaagcgagggagtagatttggtgtggctaaaagtgtttaagactggacagatgatcatattctaaattagttcatatgagacatctatttatttggaaaaaaataaagttatatccttacctcatcccacacccaaagataaattgcaagattaaagatctaaatataaaaacacaaaa

SEQ ID NO: 7920 - protein, 53 aa, Homo sapiens
MTSLHKAAERGHGDICSLLLQHSPALKAIRDRKARLACDLLPCNSDLRDLLSS

SEQ ID NO: 7921 - DNA, 976 bp, Homo sapiens
gcggacgccgagcggccagatcagggacgcggggcgggccctgcgtccgcccctcccgccgaggctgagcctgagacccggggcggatcgactgacgccggggccgggatggcgacgcctcggccctgcgcggacgggccctgctgctcgcatcccagcgcggtgctcggcgtacagcagacgctggaggagatggacttcgagaggggaatctggtcggcagccctgaatggagacctgggccgagtgaagcatttaatccagaaggccgaggacccaagtcagcccgactcggccggctacactgcgctgcactatgccagccgcaatgggcactacgctgtgtgccagttcctgctggaaagcggagctaagtgtgatgcccagacccacgggggtgccactgctctgcaccgagccagctactgcgggcacactgaaatcgcgcggctcctgctatcacatgggtccaaccccagggtggtggatgacgacggcatgaccagtctgcataaggctgctgagaggggtcacggggacatctgctccctcctcctgcaacacagcccagccctgaaggccatccgggaccgaaaggcacggctagcatgtgacctgctgccttgcaacagtgacctgcgggacctgctatccagctgagccgccaccctatctccagctgcctttaaagggtacacagaccagttctccaagcccctgccttggtcagcatccatgctgctgggcagggaactgaggccagaccacccaggaagagccccagtctggtcactgtggaagcgagggagtagatttggtgtggctaaaagtgtttaagactggacagatgatcatattctaaattagttcatatgagacatctatttatttggaaaaaaataaagttatatccttacctcatcccacacccaaagataaattgcaagattaaagatctaaatataaaaacacaaaa

SEQ ID NO: 7922 - protein, 183 aa, Homo sapiens
MATPRPCADGPCCSHPSAVLGVQQTLEEMDFERGIWSAALNGDLGRVKHLIQKAEDPSQPDSAGYTALHYASRNGHYAVCQFLLESGAKCDAQTHGGATALHRASYCGHTEIARLLLSHGSNPRVVDDDGMTSLHKAAERGHGDICSLLLQHSPALKAIRDRKARLACDLLPCNSDLRDLLSS

SEQ ID NO: 7923 - DNA, 675 bp, Homo sapiens
ctcgcatcccagcgcggtgctcggcgtacagcagacgctggaggagatggacttcgagagggcactatgccagccgcaatgggcactacgctgtgtgccagttcctgctggaaagcggagctaagtgtgatgcccagacccacgggggtgccactgctctgcaccgagccagctactgcgggcacactgaaatcgcgcggctcctgctatcacatgggtccaaccccagggtggtggatgacgacggcatgaccagtctgcataaggctgctgagaggggtcacggggacatctgctccctcctcctgcaacacagcccagccctgaaggccatccgggaccgaaaggcacggctagcatgtgacctgctgccttgcaacagtgacctgcgggacctgctatccagctgagccgccaccctatctccagctgcctttaaagggtacacagaccagttctccaagcccctgccttggtcagcatccatgctgctgggcagggaactgaggccagaccacccaggaagagccccagtctggtcactgtggaagcgagggagtagatttggtgtggctaaaagtgtttaagactggacagatgatcatattctaaattagttcatatgagacatctatttatttggaaaaaaataaagttatatccttacctcatccc

SEQ ID NO: 7924 - protein, 53 aa, Homo sapiens; identical to SEQ ID NO: 7920

SEQ ID NO: 7925 - DNA, 925 bp, Homo sapiens
gcggacgccgagcggccagatcagggacgcggggcgggccctgcgtccgcccctcccgccgaggctgagcctgagacccggggcggatcgactgacgccggggccgggatggcgacgcctcggccctgcgcggacgggccctgctgctcgcatcccagcgcggtgctcggcgtacagcagacgctggaggagatggacttcgagaggggaatctggtcggcagccctgaatggagacctgggccgagtgaagcatttaatccagaaggccgaggacccaagtcagcccgactcggccggctacactgcgctgcactatgccagccgcaatgggcactacgctgtgtgccagttcctgctggaaagcggagctaagtgtgatgcccagacccacgggggtgccactgctctgcaccgagccagctactgcgggcacactgaaatcgcgcggctcctgctatcacatgggtccaaccccagggtggtggatgacgacggcatgaccagtctgcataaggctgctgagaggggtcacggggacatctgctccctcctcctgcaacacagcccagccctgaaggccatccgggaccgaaaggcacggctagcatgtgacctgctgccttgcaacagtgacctgcgggacctgctatccagctgagccgccaccctatctccagctgcctttaaagggtacacagaccagttctccaagcccctgccttggtcagcatccatgctgctgggcagggaactgaggccagaccacccaggaagagccccagtctggtcactgtggaagcgagggagtagatttggtgtggctaaaagtgtttaagactggacagatgatcatattctaaattagttcatatgagacatctatttatttggaaaaaaataaagttatatccttacctcatccc

SEQ ID NO: 7926 - protein, 183 aa, Homo sapiens; identical to SEQ ID NO: 7922

SEQ ID NO: 7927 - DNA, 1036 bp, Homo sapiens
tgccactacagtcaggcccactcccaaaaacatcacggtggtggcgggcacagacctggtgctgccctgccacctctcctccaacttggccctgcccgactccaaccccgaggagtcatcagtatgaggggaacccccaccgcgtcggcgggaagcgtgggaggtgtagctcctacttttgcacaggcaccagctacctcagggacatggcacgggcacctgctctgtctgggacagatactgcccagcacccacccggccatgaggacctgctctgctcagcacgggcactgccacttggtgtggctcaccagggcaccagcctcgcagaaggcatcttcctcctctctgtgaatcacagacacgcgggaccccagccgccaaaacttttcaaggcagaagtttcaagatgtgtgtttgtctgtatttgcacatgtgtttgtgtgtgtgtgtatgtgtgtgtgcacgcgcgtgcgcgcttgtggcatagccttcctgtttctgtcaagtcttcccttggcctgggtcctcctggtgagtcattggagctatgaaggggaaggggtcgtatcactttgtctctcctacccccactgccccgagtgtcgggcagcgatgtacatatggaggtggggtggacagggtgctgtgccccttcagagggagtgcagggcttggggtgggcctagtcctgctcctagggctgtgaatgttttcagggtggggggagggagatggagcctcctgtgtgtttggggggaagggtgggtggggcctcccacttggccccggggttcagtggtattttatacttgccttcttcctgtacagggctgggaaaggctgtgtgaggggagagaagggagagggtgggcctgctgtggacaatggcatactctcttccagccctaggaggagggctcctaacagtgtaacttattgtgtccccgcgtatttatttgttgtaaatatttgagtatttttatattgacaaataaaatggagaaaatgaaacgattgctctgatggggctaag

SEQ ID NO: 7928 - protein, 152 aa, Homo sapiens
MCVCTRVRACGIAFLFLSSLPLAWVLLVSHWSYEGEGVVSLCLSYPHCPECRAAMYIWRWGGQGAVPLQRECRAWGGPSPAPRAVNVFRVGGGRWSLLCVWGEGWVGPPTWPRGSVVFYTCLLPVQGWERLCEGREGRGWACCGQWHTLFQP

SEQ ID NO: 7929 - DNA, 2644 bp, Homo sapiens
gttcctagttgccttgtgcaatactcttgtggcatgtttgctacacctcctgaactttgatttgtttgccttttaccagctattatgactcaaaattgtcccctagaacatggaataatggcagaaagaaagtgtgtggttgaataaacacacagattggcatccaccgttgaaacaggaaaacatcttatgttatgctgctgctgttgtgagggctgatgggccttgaaatgtatttcctgcactatgtgtgtgtgagtgtgtgtgattatactttttggcctcacagccccatcatccctttctaataacgtcacgtcgataaggggcttaggattgcatctggcctgtgtaagccctctgagttctgcggttcttagagttcccttttcagcactatagctctgccttgttcccttgttcctccttctggcgccccgtgctgtgccccctgcaggagtccaagctgtccccatgctgcgttctggtccggccgcccctcccgtggtgtggccctggccgacccccctcctgcgccccgcttttctcgcagaagctgctctttgccggctcccgctctcagctggtgcagctgcccgtggccgactgcatgaagtatcgctcctgtgcagactgtgtcctcgcccgggacccctattgcgcctggagcgtcaacaccagccgctgtgtggccgtgggtggccactctggatctctactgatccagcatgtgatgacctcggacacttcaggcatctgcaacctccgtggcagtaagaaaggtgagctttttcattcccgtcgcatcgggctgagccctggaccagagctggagtttctgttctcctcttccccagccctgctttcctgcactaacatgcactctgttttctctgccactacagtcaggcccactcccaaaaacatcacggtggtggcgggcacagacctggtgctgccctgccacctctcctccaacttggcccatgcccgctggacctttgggggccgggacctgcctgcggaacagcccgggtccttcctctacgatgcccggctccaggccctggttgtgatggctgcccagccccgccatgccggggcctaccactgcttttcagaggagcagggggcgcggctggctgctgaaggctaccttgtggctgtcgtggcaggcccgtcggtgaccttggaggcccgggcccccctggaaaacctggggctggtgtggctggcggtggtggccctgggggctgtgtgcctggtgctgctgctgctggtgctgtcattgcgccggcggctgcgggaagagctggagaaaggggccaaggctactgagaggaccttggtgtaccccctggagctgcccaaggagcccaccagtccccccttccggccctgtcctgaaccagatgagaaactttgggatcctgtcggttactactattcagatggctcccttaagatagtacctgggcatgcccggtgccagcccggtggggggcccccttcgccacctccaggcatcccaggccagcctctgccttctccaactcggcttcacctggggggtgggcggaactcaaatgccaatggttacgtgcgcttacaactaggaggggaggaccggggagggctcgggcaccccctgcctgagctcgcggatgaactgagacgcaaactgcagcaacgccagccactgcccgactccaaccccgaggagtcatcagtatgaggggaacccccaccgcgtcggcgggaagcgtgggaggtgtagctcctacttttgcacaggcaccagctacctcagggacatggcacgggcacctgctctgtctgggacagatactgcccagcacccacccggccatgaggacctgctctgctcagcacgggcactgccacttggtgtggctcaccagggcaccagcctcgcagaaggcatcttcctcctctctgtgaatcacagacacgcgggaccccagccgccaaaacttttcaaggcagaagtttcaagatgtgtgtttgtctgtatttgcacatgtgtttgtgtgtgtgtgtatgtgtgtgtgcacgcgcgtgcgcgcttgtggcatagccttcctgtttctgtcaagtcttcccttggcctgggtcctcctggtgagtcattggagctatgaaggggaaggggtcgtatcactttgtctctcctacccccactgccccgagtgtcgggcagcgatgtacatatggaggtggggtggacagggtgctgtgccccttcagagggagtgcagggcttggggtgggcctagtcctgctcctagggctgtgaatgttttcagggtggggggagggagatggagcctcctgtgtgtttggggggaagggtgggtggggcctcccacttggccccggggttcagtggtattttatacttgccttcttcctgtacagggctgggaaaggctgtgtgaggggagagaagggagagggtgggcctgctgtggacaatggcatactctcttccagccctaggaggagggctcctaacagtgtaacttattgtgtccccgcgtatttatttgttgtaaatatttgagtatttttatattgacaaataaaatggagaaaatgaaacgattgctctgatggggctaag

SEQ ID NO: 7930 - protein, 374 aa, Homo sapiens
MKYRSCADCVLARDPYCAWSVNTSRCVAVGGHSGSLLIQHVMTSDTSGICNLRGSKKGELFHSRRIGLSPGPELEFLFSSSPALLSCTNMHSVFSATTVRPTPKNITVVAGTDLVLPCHLSSNLAHARWTFGGRDLPAEQPGSFLYDARLQALVVMAAQPRHAGAYHCFSEEQGARLAAEGYLVAVVAGPSVTLEARAPLENLGLVWLAVVALGAVCLVLLLLVLSLRRRLREELEKGAKATERTLVYPLELPKEPTSPPFRPCPEPDEKLWDPVGYYYSDGSLKIVPGHARCQPGGGPPSPPPGIPGQPLPSPTRLHLGGGRNSNANGYVRLQLGGEDRGGLGHPLPELADELRRKLQQRQPLPDSNPEESSV

SEQ ID NO: 7931 - DNA, 3402 bp, Homo sapiens
tgtgagatgtttatgatgccctcaccatggtggttttccttccagcccccatttccgtgactgtttccctgaagtgcttgcattatacccttgtgcaatactctttttggtttttttttgagatggagtctcactctgtcacccaggctagagtgcagtgacgcgatctcagctcactgcaacctccacctcccaggttgaagctattcttatgcctcagcctcctgagtagctgggattacaggtgcctgccactatgcccagctaaaggttttttgtttttgtttttgttttctttgagatggagtctcactctgtcgcccaggctggagtgcggtggcatgatctctgctcactgcaacctccacctcccgggttcaagcaattctgcctcggcctcccaagtaactgggactacaggcacgtgccaccatgcccagctaatttttttttttttttttttttttgagatggagtctcgctctgtcacccaggctggagtgcagtggcgcaatctcggctcactgcaagctctgcctcccaggttcacaccattctcctgcctcagccttccatgtagctgggactacaggctcccatcaccacgcctggctaattttttgtatttttagtagagacggggtttcaccgtgttagccaggatggtctcgatctcctgaccttgcgatccgcccgactcagcctcccaaagtgctgggattacaggcgtgagccactgcgcctggccagccggctaatttttgtatttttagtagagacaaggttttaccatgttggccaggctggtcttgaactcctaacctcaagtgatttgcccacctcagcctcccaaagtgctgggattccaggcatgacctgctgttcctagttgccttgtgcaatactcttgtggcatgtttgctacacctcctgaactttgatttgtttgccttttaccagctattatgactcaaaattgtcccctagaacatggaataatggcagaaagaaagtgtgtggttgaataaacacacagattggcatccaccgttgaaacaggaaaacatcttatgttatgctgctgctgttgtgagggctgatgggccttgaaatgtatttcctgcactatgtgtgtgtgagtgtgtgtgattatactttttggcctcacagccccatcatccctttctaataacgtcacgtcgataaggggcttaggattgcatctggcctgtgtaagccctctgagttctgcggttcttagagttcccttttcagcactatagctctgccttgttcccttgttcctccttctggcgccccgtgctgtgccccctgcaggagtccaagctgtccccatgctgcgttctggtccggccgcccctcccgtggtgtggccctggccgacccccctcctgcgccccgcttttctcgcagaagctgctctttgccggctcccgctctcagctggtgcagctgcccgtggccgactgcatgaagtatcgctcctgtgcagactgtgtcctcgcccgggacccctattgcgcctggagcgtcaacaccagccgctgtgtggccgtgggtggccactctggatctctactgatccagcatgtgatgacctcggacacttcaggcatctgcaacctccgtggcagtaagaaagtcaggcccactcccaaaaacatcacggtggtggcgggcacagacctggtgctgccctgccacctctcctccaacttggcccatgcccgctggacctttgggggccgggacctgcctgcggaacagcccgggtccttcctctacgatgcccggctccaggccctggttgtgatggctgcccagccccgccatgccggggcctaccactgcttttcagaggagcagggggcgcggctggctgctgaaggctaccttgtggctgtcgtggcaggcccgtcggtgaccttggaggcccgggcccccctggaaaacctggggctggtgtggctggcggtggtggccctgggggctgtgtgcctggtgctgctgctgctggtgctgtcattgcgccggcggctgcgggaagagctggagaaaggggccaaggctactgagaggaccttggtgtaccccctggagctgcccaaggagcccaccagtccccccttccggccctgtcctgaaccagatgagaaactttgggatcctgtcggttactactattcagatggctcccttaagatagtacctgggcatgcccggtgccagcccggtggggggcccccttcgccacctccaggcatcccaggccagcctctgccttctccaactcggcttcacctggggggtgggcggaactcaaatgccaatggttacgtgcgcttacaactaggaggggaggaccggggagggctcgggcaccccctgcctgagctcgcggatgaactgagacgcaaactgcagcaacgccagccactgcccgactccaaccccgaggagtcatcagtatgaggggaacccccaccgcgtcggcgggaagcgtgggaggtgtagctcctacttttgcacaggcaccagctacctcagggacatggcacgggcacctgctctgtctgggacagatactgcccagcacccacccggccatgaggacctgctctgctcagcacgggcactgccacttggtgtggctcaccagggcaccagcctcgcagaaggcatcttcctcctctctgtgaatcacagacacgcgggaccccagccgccaaaacttttcaaggcagaagtttcaagatgtgtgtttgtctgtatttgcacatgtgtttgtgtgtgtgtgtatgtgtgtgtgcacgcgcgtgcgcgcttgtggcatagccttcctgtttctgtcaagtcttcccttggcctgggtcctcctggtgagtcattggagctatgaaggggaaggggtcgtatcactttgtctctcctacccccactgccccgagtgtcgggcagcgatgtacatatggaggtggggtggacagggtgctgtgccccttcagagggagtgcagggcttggggtgggcctagtcctgctcctagggctgtgaatgttttcagggtggggggagggagatggagcctcctgtgtgtttggggggaagggtgggtggggcctcccacttggccccggggttcagtggtattttatacttgccttcttcctgtacagggctgggaaaggctgtgtgaggggagagaagggagagggtgggcctgctgtggacaatggcatactctcttccagccctaggaggagggctcctaacagtgtaacttattgtgtccccgcgtatttatttgttgtaaatatttgagtatttttatattgacaaataaaatggagaaaatgaaacgattgctctgatggggctaag

SEQ ID NO: 7932 - protein, 333 aa, Homo sapiens
MKYRSCADCVLARDPYCAWSVNTSRCVAVGGHSGSLLIQHVMTSDTSGICNLRGSKKVRPTPKNITVVAGTDLVLPCHLSSNLAHARWTFGGRDLPAEQPGSFLYDARLQALVVMAAQPRHAGAYHCFSEEQGARLAAEGYLVAVVAGPSVTLEARAPLENLGLVWLAVVALGAVCLVLLLLVLSLRRRLREELEKGAKATERTLVYPLELPKEPTSPPFRPCPEPDEKLWDPVGYYYSDGSLKIVPGHARCQPGGGPPSPPPGIPGQPLPSPTRLHLGGGRNSNANGYVRLQLGGEDRGGLGHPLPELADELRRKLQQRQPLPDSNPEESSV

SEQ ID NO: 7933 - DNA, 3801 bp, Homo sapiens
ctgtgctcgcatctctggcagcctggattggggtcctgctggagtgaagggtttcctgaggcagggagtactcatagccgtctgtgcctcctgctctgctggactctgatagaggcagtgggcagcagggcaaagaaggaagcagccgccgaggaagcgaaggtggggtgggggtgcccagccctgcggccggaggtgccattgaccctgagagcaagagccatcagtctgatggcttcctctggccggaagctgtggctgagatatccttccttcctcccagcagcctggatttgcctcctcccaggctgggaaaggctagggaggcccaggtggggctgtcagggccaaaggctgtttcaaaagtgtcctttattgccaatcagggggtttggctggcatctgcttgtggcatggggtgctggctctcgtggagcaagactgagggctgtcgagccccaggggtcctgcccatcagcagccatgcttacccctgcagagctggccacggtagtacggcggttctcccagaccggcatccaggacttcctgacactgacgctgacggagcccactgggcttctgtacgtgggcgcccgagaggccctgtttgccttcagcatggaggccctggagctgcaaggagcgatctcctgggaggcccccgtggagaagaagactgagtgtatccagaaagggaagaacaaccagaccgagtgcttcaacttcatccgcttcctgcagccctacaatgcctcccacctgtacgtctgtggcacctacgccttccagcccaagtgcacctacgtcaacatgctcaccttcactttggagcatggagagtttgaagatgggaagggcaagtgtccctatgacccagctaagggccatgctggccttcttgtggatggtgagctgtactcggccacactcaacaacttcctgggcacggaacccattatcctgcgtaacatggggccccaccactccatgaagacagagtacctggccttttggctcaacgaacctcactttgtaggctctgcctatgtacctgagagtgtgggcagcttcacgggggacgacgacaaggtctacttcttcttcagggagcgggcagtggagtccgactgctatgccgagcaggtggtggctcgtgtggcccgtgtctgcaagggcgatatggggggcgcacggaccctgcagaggaagtggaccacgttcctgaaggcgcggctggcatgctctgccccgaactggcagctctacttcaaccagctgcaggcgatgcacaccctgcaggacacctcctggcacaacaccaccttctttggggtttttcaagcacagtggggtgacatgtacctgtcggccatctgtgagtaccagttggaagagatccagcgggtgtttgagggcccctataaggagtaccatgaggaagcccagaagtgggaccgctacactgaccctgtacccagccctcggcctggctcgtgcattaacaactggcatcggcgccacggctacaccagctccctggagctacccgacaacatcctcaacttcgtcaagaagcacccgctgatggaggagcaggtggggcctcggtggagccgccccctgctcgtgaagaagggcaccaacttcacccacctggtggccgaccgggttacaggacttgatggagccacctatacagtgctgttcattggcacaggagacggctggctgctcaaggctgtgagcctggggccctgggttcacctgattgaggagctgcagctgtttgaccaggagcccatgagaagcctggtgctatctcagagcaagaagctgctctttgccggctcccgctctcagctggtgcagctgcccgtggccgactgcatgaagtatcgctcctgtgcagactgtgtcctcgcccgggacccctattgcgcctggagcgtcaacaccagccgctgtgtggccgtgggtggccactctggatctctactgatccagcatgtgatgacctcggacacttcaggcatctgcaacctccgtggcagtaagaaagtcaggcccactcccaaaaacatcacggtggtggcgggcacagacctggtgctgccctgccacctctcctccaacttggcccatgcccgctggacctttgggggccgggacctgcctgcggaacagcccgggtccttcctctacgatgcccggctccaggccctggttgtgatggctgcccagccccgccatgccggggcctaccactgcttttcagaggagcagggggcgcggctggctgctgaaggctaccttgtggctgtcgtggcaggcccgtcggtgaccttggaggcccgggcccccctggaaaacctggggctggtgtggctggcggtggtggccctgggggctgtgtgcctggtgctgctgctgctggtgctgtcattgcgccggcggctgcgggaagagctggagaaaggggccaaggctactgagaggaccttggtgtaccccctggagctgcccaaggagcccaccagtccccccttccggccctgtcctgaaccagatgagaaactttgggatcctgtcggttactactattcagatggctcccttaagatagtacctgggcatgcccggtgccagcccggtggggggcccccttcgccacctccaggcatcccaggccagcctctgccttctccaactcggcttcacctggggggtgggcggaactcaaatgccaatggttacgtgcgcttacaactaggaggggaggaccggggagggctcgggcaccccctgcctgagctcgcggatgaactgagacgcaaactgcagcaacgccagccactgcccgactccaaccccgaggagtcatcagtatgaggggaacccccaccgcgtcggcgggaagcgtgggaggtgtagctcctacttttgcacaggcaccagctacctcagggacatggcacgggcacctgctctgtctgggacagatactgcccagcacccacccggccatgaggacctgctctgctcagcacgggcactgccacttggtgtggctcaccagggcaccagcctcgcagaaggcatcttcctcctctctgtgaatcacagacacgcgggaccccagccgccaaaacttttcaaggcagaagtttcaagatgtgtgtttgtctgtatttgcacatgtgtttgtgtgtgtgtgtatgtgtgtgtgcacgcgcgtgcgcgcttgtggcatagccttcctgtttctgtcaagtcttcccttggcctgggtcctcctggtgagtcattggagctatgaaggggaaggggtcgtatcactttgtctctcctacccccactgccccgagtgtcgggcagcgatgtacatatggaggtggggtggacagggtgctgtgccccttcagagggagtgcagggcttggggtgggcctagtcctgctcctagggctgtgaatgttttcagggtggggggagggagatggagcctcctgtgtgtttggggggaagggtgggtggggcctcccacttggccccggggttcagtggtattttatacttgccttcttcctgtacagggctgggaaaggctgtgtgaggggagagaagggagagggtgggcctgctgtggacaatggcatactctcttccagccctaggaggagggctcctaacagtgtaacttattgtgtccccgcgtatttatttgttgtaaatatttgagtatttttatattgacaaataaaatggagaaaatgaaacgattgctctgatggggctaag

SEQ ID NO: 7934 - protein, 886 aa, Homo sapiens
MASSGRKLWLRYPSFLPAAWICLLPGWERLGRPRWGCQGQRLFQKCPLLPIRGFGWHLLVAWGAGSRGARLRAVEPQGSCPSAAMLTPAELATVVRRFSQTGIQDFLTLTLTEPTGLLYVGAREALFAFSMEALELQGAISWEAPVEKKTECIQKGKNNQTECFNFIRFLQPYNASHLYVCGTYAFQPKCTYVNMLTFTLEHGEFEDGKGKCPYDPAKGHAGLLVDGELYSATLNNFLGTEPIILRNMGPHHSMKTEYLAFWLNEPHFVGSAYVPESVGSFTGDDDKVYFFFRERAVESDCYAEQVVARVARVCKGDMGGARTLQRKWTTFLKARLACSAPNWQLYFNQLQAMHTLQDTSWHNTTFFGVFQAQWGDMYLSAICEYQLEEIQRVFEGPYKEYHEEAQKWDRYTDPVPSPRPGSCINNWHRRHGYTSSLELPDNILNFVKKHPLMEEQVGPRWSRPLLVKKGTNFTHLVADRVTGLDGATYTVLFIGTGDGWLLKAVSLGPWVHLIEELQLFDQEPMRSLVLSQSKKLLFAGSRSQLVQLPVADCMKYRSCADCVLARDPYCAWSVNTSRCVAVGGHSGSLLIQHVMTSDTSGICNLRGSKKVRPTPKNITVVAGTDLVLPCHLSSNLAHARWTFGGRDLPAEQPGSFLYDARLQALVVMAAQPRHAGAYHCFSEEQGARLAAEGYLVAVVAGPSVTLEARAPLENLGLVWLAVVALGAVCLVLLLLVLSLRRRLREELEKGAKATERTLVYPLELPKEPTSPPFRPCPEPDEKLWDPVGYYYSDGSLKIVPGHARCQPGGGPPSPPPGIPGQPLPSPTRLHLGGGRNSNANGYVRLQLGGEDRGGLGHPLPELADELRRKLQQRQPLPDSNPEESSV

SEQ ID NO: 7935 - DNA, 3635 bp, Homo sapiens
cgccgtggtggcgcggggagcccgagcctaggggcgcggagccgggcggggacggaggggcggtggcagagaggccgcggagggctggcgggcgagcgcgggcaggcggcgacgcgggggcaggggtggacggcggtcagagccgaacgcgagggcggcgcccggggactggagctgcgcgcaataggacagctggcctgaagctcagagccggggcgtgcgccatggccccacactgggctgtctggctgctggcagcaaggctgtggggcctgggcattggggctgaggtgtggtggaaccttgtgccgcgtaagacagtgtcttctggggagctggccacggtagtacggcggttctcccagaccggcatccaggacttcctgacactgacgctgacggagcccactgggcttctgtacgtgggcgcccgagaggccctgtttgccttcagcatggaggccctggagctgcaaggagcgatctcctgggaggcccccgtggagaagaagactgagtgtatccagaaagggaagaacaaccagaccgagtgcttcaacttcatccgcttcctgcagccctacaatgcctcccacctgtacgtctgtggcacctacgccttccagcccaagtgcacctacgtcaacatgctcaccttcactttggagcatggagagtttgaagatgggaagggcaagtgtccctatgacccagctaagggccatgctggccttcttgtggatggtgagctgtactcggccacactcaacaacttcctgggcacggaacccattatcctgcgtaacatggggccccaccactccatgaagacagagtacctggccttttggctcaacgaacctcactttgtaggctctgcctatgtacctgagagtgtgggcagcttcacgggggacgacgacaaggtctacttcttcttcagggagcgggcagtggagtccgactgctatgccgagcaggtggtggctcgtgtggcccgtgtctgcaagggcgatatggggggcgcacggaccctgcagaggaagtggaccacgttcctgaaggcgcggctggcatgctctgccccgaactggcagctctacttcaaccagctgcaggcgatgcacaccctgcaggacacctcctggcacaacaccaccttctttggggtttttcaagcacagtggggtgacatgtacctgtcggccatctgtgagtaccagttggaagagatccagcgggtgtttgagggcccctataaggagtaccatgaggaagcccagaagtgggaccgctacactgaccctgtacccagccctcggcctggctcgtgcattaacaactggcatcggcgccacggctacaccagctccctggagctacccgacaacatcctcaacttcgtcaagaagcacccgctgatggaggagcaggtggggcctcggtggagccgccccctgctcgtgaagaagggcaccaacttcacccacctggtggccgaccgggttacaggacttgatggagccacctatacagtgctgttcattggcacaggagacggctggctgctcaaggctgtgagcctggggccctgggttcacctgattgaggagctgcagctgtttgaccaggagcccatgagaagcctggtgctatctcagagcaagaagctgctctttgccggctcccgctctcagctggtgcagctgcccgtggccgactgcatgaagtatcgctcctgtgcagactgtgtcctcgcccgggacccctattgcgcctggagcgtcaacaccagccgctgtgtggccgtgggtggccactctggatctctactgatccagcatgtgatgacctcggacacttcaggcatctgcaacctccgtggcagtaagaaagtcaggcccactcccaaaaacatcacggtggtggcgggcacagacctggtgctgccctgccacctctcctccaacttggcccatgcccgctggacctttgggggccgggacctgcctgcggaacagcccgggtccttcctctacgatgcccggctccaggccctggttgtgatggctgcccagccccgccatgccggggcctaccactgcttttcagaggagcagggggcgcggctggctgctgaaggctaccttgtggctgtcgtggcaggcccgtcggtgaccttggaggcccgggcccccctggaaaacctggggctggtgtggctggcggtggtggccctgggggctgtgtgcctggtgctgctgctgctggtgctgtcattgcgccggcggctgcgggaagagctggagaaaggggccaaggctactgagaggaccttggtgtaccccctggagctgcccaaggagcccaccagtccccccttccggccctgtcctgaaccagatgagaaactttgggatcctgtcggttactactattcagatggctcccttaagatagtacctgggcatgcccggtgccagcccggtggggggcccccttcgccacctccaggcatcccaggccagcctctgccttctccaactcggcttcacctggggggtgggcggaactcaaatgccaatggttacgtgcgcttacaactaggaggggaggaccggggagggctcgggcaccccctgcctgagctcgcggatgaactgagacgcaaactgcagcaacgccagccactgcccgactccaaccccgaggagtcatcagtatgaggggaacccccaccgcgtcggcgggaagcgtgggaggtgtagctcctacttttgcacaggcaccagctacctcagggacatggcacgggcacctgctctgtctgggacagatactgcccagcacccacccggccatgaggacctgctctgctcagcacgggcactgccacttggtgtggctcaccagggcaccagcctcgcagaaggcatcttcctcctctctgtgaatcacagacacgcgggaccccagccgccaaaacttttcaaggcagaagtttcaagatgtgtgtttgtctgtatttgcacatgtgtttgtgtgtgtgtgtatgtgtgtgtgcacgcgcgtgcgcgcttgtggcatagccttcctgtttctgtcaagtcttcccttggcctgggtcctcctggtgagtcattggagctatgaaggggaaggggtcgtatcactttgtctctcctacccccactgccccgagtgtcgggcagcgatgtacatatggaggtggggtggacagggtgctgtgccccttcagagggagtgcagggcttggggtgggcctagtcctgctcctagggctgtgaatgttttcagggtggggggagggagatggagcctcctgtgtgtttggggggaagggtgggtggggcctcccacttggccccggggttcagtggtattttatacttgccttcttcctgtacagggctgggaaaggctgtgtgaggggagagaagggagagggtgggcctgctgtggacaatggcatactctcttccagccctaggaggagggctcctaacagtgtaacttattgtgtccccgcgtatttatttgttgtaaatatttgagtatttttatattgacaaataaaatggagaaaatgaaacgattgctctgatggggctaag

SEQ ID NO: 7936 - protein, 833 aa, Homo sapiens
MAPHWAVWLLAARLWGLGIGAEVWWNLVPRKTVSSGELATVVRRFSQTGIQDFLTLTLTEPTGLLYVGAREALFAFSMEALELQGAISWEAPVEKKTECIQKGKNNQTECFNFIRFLQPYNASHLYVCGTYAFQPKCTYVNMLTFTLEHGEFEDGKGKCPYDPAKGHAGLLVDGELYSATLNNFLGTEPIILRNMGPHHSMKTEYLAFWLNEPHFVGSAYVPESVGSFTGDDDKVYFFFRERAVESDCYAEQVVARVARVCKGDMGGARTLQRKWTTFLKARLACSAPNWQLYFNQLQAMHTLQDTSWHNTTFFGVFQAQWGDMYLSAICEYQLEEIQRVFEGPYKEYHEEAQKWDRYTDPVPSPRPGSCINNWHRRHGYTSSLELPDNILNFVKKHPLMEEQVGPRWSRPLLVKKGTNFTHLVADRVTGLDGATYTVLFIGTGDGWLLKAVSLGPWVHLIEELQLFDQEPMRSLVLSQSKKLLFAGSRSQLVQLPVADCMKYRSCADCVLARDPYCAWSVNTSRCVAVGGHSGSLLIQHVMTSDTSGICNLRGSKKVRPTPKNITVVAGTDLVLPCHLSSNLAHARWTFGGRDLPAEQPGSFLYDARLQALVVMAAQPRHAGAYHCFSEEQGARLAAEGYLVAVVAGPSVTLEARAPLENLGLVWLAVVALGAVCLVLLLLVLSLRRRLREELEKGAKATERTLVYPLELPKEPTSPPFRPCPEPDEKLWDPVGYYYSDGSLKIVPGHARCQPGGGPPSPPPGIPGQPLPSPTRLHLGGGRNSNANGYVRLQLGGEDRGGLGHPLPELADELRRKLQQRQPLPDSNPEESSV

SEQ ID NO: 7937 - DNA, 1054 bp, Homo sapiens
cagccccgccatgccggggcctaccactgcttttcagaggagcagggggcgcggctggctgctgaaggctaccttgtggctgtcgtggcaggcccgtcggtgaccttggaggcccgggcccccctggaaaacctggggctggtgtggctggcggtggtggccctgggggctgtgtgcctggtgctgctgctgctggtgctgtcattgcgccggcggctgcgggaagagctggagaaaggggccaaggctactgagaggaccttggtgtaccccctggagctgcccaaggagcccaccagtccccccttccggccctgtcctgaaccagatgagaaactttgggatcctgtcggttactactattcagatggctcccttaagatagtacctgggcatgcccggtgccagcccggtggggggcccccttcgccacctccaggcatcccaggccagcctctgccttctccaactcggcttcacctggggggtgggcggaactcaaatgccaatggttacgtgcgcttacaactaggaggggaggaccggggagggctcgggcaccccctgcctgagctcgcggatgaactgagacgcaaactgcagcaacgccagccactgcccgactccaaccccgaggagtcatcagtatgaggggaacccccaccgcgtcggcgggaagcgtgggaggtgtagctcctacttttgcacaggcaccagctacctcagggacatggcacgggcacctgctctgtctgggacagatactgcccagcacccacccggccatgaggacctgctctgctcagcacgggcactgccattggccccggggttcagtggtattttatacttgccttcttcctgtacagggctgggaaaggctgtgtgaggggagagaagggagagggtgggcctgctgtggacaatggcatactctcttccagccctaggaggagggctcctaacagtgtaacttattgtgtccccgcgtatttatttgttgtaaatatttgagtatttttatattgacaaataaaatggagaaaatgaaacg

SEQ ID NO: 7938 - protein, 100 aa, Homo sapiens
MRGTPTASAGSVGGVAPTFAQAPATSGTWHGHLLCLGQILPSTHPAMRTCSAQHGHCHWPRGSVVFYTCLLPVQGWERLCEGREGRGWACCGQWHTLFQP
